United States Patent Application Publication US 2026/0103690 A1 - sequence listing, part 82

SEQ ID NO: 404269 - protein, 421 aa, unidentified
MLQEVEEREEIIERVAALDIGKAELVCCVRVPGDTGKRRVQEVATYKTMTRSLIAMCERLAALGVTRVVMEATSDYWKSPFYLLEAAGLQTWLVNAKDVKHLPGRPKTDRLDAVWLCKVAERQMLRPSFVPPPEIRILRDLTRYRVDLVAVQTAEKQRIEKLLEDAQIKLSVVVSDILGVSGRDMLAALIAGQRDPRVLAQFARGRMRGKLTDLEEAFTGRFDDHHAFLLEKMLDRIDQLDRDIADVEAKIEEQIVPFIDTVDRLDEIPGLGHIGAAGIIAEIGLDMTRFPTAGHLASWAKFTPIVKESAGRRKGTSATGHGNRYLARILGQVAVTGGKTDTFIGERYRRIARRRGKKKAIVAVGRSTLTIIWHLLSDPNATFHDLGSDFYEQHRSTSAQRRRAVRQLEALGYHVVLEPAA

SEQ ID NO: 404270 - protein, 421 aa, unidentified
MQVIFERCAGLDVHRDTAVATVRSPGQRRGSRATETRTFKTTVRALADLGDWLVCEGVELVGMEATGAYWKPVFAALEGRFTCWLVNAAHLRNVPGRKTDVADSVWIARILECGLVRPSFVPVQEFRELRDLTRARTAVSQERVRVIQRLEKVLQDAGIKLTSVASQVWSKTARAVLEALLDGVTSPVELAALAKGRLRSKREALEEALEHRFRVEHHGVIVRGLLAHIDGLEQRLDAYDAEIAIRLAPHQEVLELIQTIPGVGAKVAQVLIAEIGLDMSAFPSSAHLASWAGVCPGNHASGGKRRGGRSRPGPKWLKAALTEAAWGAVKAKGTYLHAHHMQIKGRAGGFKALGATRHDIVVAYWHIVHDQVPYRELGPDWAARRFSPEQRARRLTAQLEALGFDVTIGPAGTGPAGTGPA

SEQ ID NO: 404271 - protein, 341 aa, unidentified
MKKFIRIGVDLAKNYFQIHALASEGAPAVTRKMTRVKMREFFSQIGPCLVGMEACATAHYWARELKAMGHEVLLMPPAYTKPYVKRGKNDAVDADAICEAMSRPGMRFVPIKGADQQATLMLHKTRELLVKQRTMSVNALRGHLSEFGIVAAKGIGRVDELLDLAESDATLPNAARASVKVLAQALEGLDKAIDDLEKEISSAHAQNEMSRLLDKVPGIGKLIASVIAASVPDPSVFKSGRDFAAWLGLTPRQNSSGGKQTLGGITKQGNRYIRKMLVLGATSLLNVVGKRKGALRDWIVGLLAKKPARLVTVALANKLARILWAMMKTGECFRTEMFAKA

SEQ ID NO: 404272 - protein, 456 aa, unidentified
MSKRRGKAKRVQKASNQEPENLPVLNRDAAAIDIGSEQHCVAVPPGRDTESVRSFGAFTIDLHAMAHWLKQCAIKSVVMEATGVYWIAPFEVLEQYGLEVLLIDARLAKNLPGRKSDVLDCQWHQQLHTFGLLRGCFLPVAEIMPLRSYLRLRDELVKASTQAVQHIQKALFEMNVQLANVISDITGETGLAIIEAILAGERDGKKLAELKHRRIVASKETIAKSLEGNWRPELLFALQTALDRYKFYQQQLAQCDDQIAQALAQLPTRELKVQTEPEKKNETSVRGQKLTPLEAELKRIAGVDLTSIDGIGEQIAQIILSELGPDLERSFQSEKHFSSYLGLCPGTKISGGKVLKRRSRKVKHRVATALRLAARSLHSSDSALGANFRRLKARLGAPKAITAMANKLAKLVYRLLVYGKDYFDRGSQMYEQKFRLQQIRRLQKQAKMLNLKLVPA

SEQ ID NO: 404273 - protein, 343 aa, unidentified
MQAFTTIGLDIAKSVFQVHGIDAEGKVLIRRQLKRRYVLAFFQKLQPCLVGIEACATSHHWSRQLKALGHTVRLMPPAYVKPYVKRQKNDAADAEAICEAVTRANMRFVETKPPEQQSCLMLHRTRQLFIRQQTSVINAIRARLAELGIIAPVGRKGVEQLLAVAEDASDHHVPEMARACVVALGAQLRMLKAQILEFDRRILAWHRSNEICQRLDELPGVGPALATALVASVADPKAFRSGRNFSAWIGLVPKQHSSGGKNKLGGISKQGDRYLRSLFTAGALAVIRYAKTHGTKHRPWLTALLARRPTKVAAIALANKIARMAWAMMAKGERYKEPVALAA

SEQ ID NO: 404274 - protein, 391 aa, unidentified
MIFVGIDVAKDTHYADVSDDSGAVLVKPFAFQNNAEGFCLLLKKLSEFDRSKLLIGLESTGIYSENLICFLYESGFRLAVINPIQTATLRKTAIRKTKTDKVDTMLIIKSLMVNSYRLYSQRDADSLKLKTLCRFRQNLKKSKARLKIQLTGYVNLMFPEFGKFFKSGIHIAASYALLKKYSSPKEIAALRTSTLCTLLSKASHGRFGKDTAEALKSLALSSVGVKNPYISIQIAQTIAQIELLEQQIKDLNSAIEEAMESINSVLMPVPGIGAVNAACILGEIGDIKRFSKPCKLLAYAGLDPTVRQSGQFTAKSTRMSKRGSALLRYALINSAWQLTLNDTTFKAYYDLKRSQGLNHYGALGHVAHKLTRVIFKLLTSDTPFNPAKLVA

SEQ ID NO: 404275 - protein, 343 aa, unidentified
MQVIIGVDPHKASHTAVAISATEDELAGKKIRASRAQVDQLLAWAEPFPTRVWAVEGADGMGYLLAQQLAATGEHVLNVPATLAARTRLLGTGRTNKNDPNDALSVAVTALRTRDLRPVRPVGHSEVLRLLAKRNRDIGVHRTRLVCRMHALLLEITAGGISKEINASDVDRFLAEVTPATPAEQVRYDLAVELLDDIRRLDEQLKGSHKRIRTAIAASGTTVTDLFGIGPIIAAMLIGYSGDIGRFADRDRYAAYNGTAPVEFSSGGRTVHRLSQRGNRNLNHALHMAVICQLRHPGSDGRVYFDRRLAEGKTKKEALRSLKCHVSNAVYRQLVADAARARA

SEQ ID NO: 404276 - protein, 427 aa, unidentified
MAHTTIIGIDVSKNFADACAISAQGEVMLETKIFYDTVGLQHFLKQLDQLAGEQRHCAVAVMESTAHYHRILETYLRRSGIDVVVINPLQSGSMKNLEIRKIKNDRTDAKRIAQLYLFKMPRGNAVDSILVGALKDLTRQRSDIISERGKFSNKLTALLDQGFPGFRKVFSSLRTKSALAVLARFPGPEEICGANRIDIAKTIAFAAGRNTESAYAVKKANHLLDIAEQAMQLQVERGSFKTLITLFAEMLIQIQRAADQIERQIFETAQCDRTFWSQVELLTSIPGIGQYAAVVILAEIGDFSRFKKAKQLVAFAGIDPAVKQSGTSAYKHNKISKRGSPYLRKILDTCTHVAAHKGRNQQPANPILAAYYEEKRSVKPANVAQCACIHKMLGYIFSVLRNQKPFELRSPEEHLALMRSKTADIAA

SEQ ID NO: 404277 - protein, 414 aa, unidentified
MLKIVYRVCCGMDVHRSFVVACIASTNEQGVTSYKSKRFSTFTGDLRRCAVWLSENNCKDVCMESTGKYWIPIYNILERTCNIVLAHPKYVKAIRGKKNDKRDAKWIADIFKHDLVAGSFIPPADIRQLRDLVRYRWKLTNFTTGEKNRAQNCLTVSNFKLDDVFSDVFGKAASAITARILENPAEKITDVSRFRTKGMKATNEQVLAAVDGEMCAEQAEKLRIIRSHMGSLELCKANLESLILSTAEKYLPQLNLVMTVPGIQFLAAIGIISEIGVDMSVFPTSKHLCSWAGLTPQNNESAGKKKTTRISRAGAYIKPLLVQCALCAIRAKQFLEVRNRYLALKKRRGHKKAIIAIARMLLTAIYNILKKKEPYNPELYRKGDRPPAHREVSLEDAVYILQRQGYLVTAPPTA

SEQ ID NO: 404278 - protein, 428 aa, unidentified
MSVTRALKYCGIDVSKKSLVCAAIGELDEHVRHYLPAQAEDLGLVDDEPVVKKSFSNTWSGLESMVQWMSDIGVTVAVMESTGIYWSAAYMVLERVGIRVVLANPYQVRNVAVHKTDMRDSVWLAVLLRAGFIIPSYVPKGIIKDLRDTTRMRARLMRDLARTKNRCHRVLDTVLVDLGLSDTFGKRGRQTLLRVMRGERQGLTEEQLRSIESVSEAQRLIICDLVETMGMIEERVKRYDAAIARLVERLREDEEDEDIMLLTTVPGMALTSAAVVKAEIGRVERFESPEKLCSYLGLVPRVYQSGPVNRRGGIVKRSNKHVRTVMYLVAQKCAQIGPRELREFHKRIKRKRNHHVATIALARRLMVVVWKMLREGTRFRDTYDEELAKRKEERYRREVKRLKKIKNKYGTTEFLNMLGELLREDSSV

SEQ ID NO: 404279 - protein, 504 aa, unidentified
MTTPPWEPAFRLVKPLRKSVSPFGGDLCFGWLGSPRLYLYKPLGCVSALWKWMPARKDKTMKYPKVLMMLESIPYLSVGLDVGADFTWMSIMLPNGILTGKPFKIIHSDPQSRELAVAKIKEAQEMYSLESRCFLESTGIYHIPLLYFLRDKGFDCSVINPIITKNSTNMNVRKLHNDKFDSKKAAKVGLDASLKTSIIPDDEVIDLRNLVRDYYYFKDLQSAVVLKLTAKLKVSFPAYRKVFSKVTTQTSLKLLEAYPLAADMLAAPKDILVETIRKTARFGEKYAVSKYDAIRAAAKDAAVFGRALQSSALRIRLYIKTYREYQEHLDNILEDLHKAVDKLEGTPVYDRIFLLQSLRGVGFLSAAVLIAEMGSFDLFSSPKKLYAYFGLDPAVKQSGKFNGDKVHMSKRGSSLARRILHMVAINNLKVDKGTKTPVNPVIHGYYSDKCKSKKKNVAVGAVMHKICNIIFAMLRDNKPFEIITPQEHCERYLAAHPDKIQNAA

SEQ ID NO: 404280 - protein, 345 aa, unidentified
MKIIGCDFHPSFQQIAICDLETGEFQERKLSHADGQAERFYRELGEPALIGIEATGNSQWFLDLVQRLGHEIRVGDAAKIRASYVRKQSTDKRDAGHILKLLLEKRFPQLWRPSAAMRDQRQLLRHRDKLVEVRTKVKNSLQHLAMNQGMQKKSRLWTRQGMEQFQQLAMPGWAGTRREDLLQLLKELNRQIEPLDQAVKRSAEQHPQAQLLMTQPGVGPVTALAFVLTIGDVARFAGSKQLTSYLGLVPSEHSSGGKRHLGAITKQGNRFLRKLLVEAAQTTVRKDEGFRKEYQRRCHRRPKGVAKVAAARKLAVRLYWMLRSHVSYPEIARVESNPRVALGDV

SEQ ID NO: 404281 - protein, 334 aa, unidentified
MWHVGIDLHRRTVVIAAVNDEGNVQPVRQIECQDRQAILDLMRSLQPFRAVVEATGTYRWLYDLLSPLGTVLLAHPLRLRAMVQRRSKTDKLDCQLLANLLRINQIPLAYIPPPKYQQLRDVTRHRARLSRQAGAAKTQLRGLLARHNRLSPFKSVCGVRGCRWLRQQEFGDVDNFVRDELLSRLEHYQKQLVCIDSHLEKLRTQVPEVEAILDIHGIGLYTALLIIGELGEVGRFRTAKQVGSYSGLTSRVRQSGDHCYRGAITREGSPWLRWILVEAAIKATREDAELKNFYQRIRKRSGAKKARVATARKLAEICWKRLIGWHGRPTAAVA

SEQ ID NO: 404282 - protein, 411 aa, unidentified
MENIFPCCAGLDVHRDSVEACVRRIEPNGRWHQQTHHWGTMTRDLLAMADWMAAQGVTQVAMESTGVFWKPIYNILESRFTMLLVNARHLKQVPGRKSDVRDCQWIAQLLQYGLLKGSFIPPRSQRELRDLTRHPTQLVEEKTRTANRIHKVLQDTNIKLSSVATDVLGVSGRAMLEALITGEEDPVKLAHLAQRKLRSKIPELEKALEGHLTEHHRFMLQLLWKQLAQQEELIAELDRKIEEQTRPFAAEIDRLDAVPGVDRRVAEVVLAEVGADMKPFPAHENLASWAGMCPGNEESAGKRRRRRITPGNPWLKPTLAQAAWAASHTKNSYLASQYRRLAGHRGRKRALIAVGHSILVIFYHMLKTGTSYTDLGGDFFDRLQPERLTRYYVKRLERLGHKVTLESRAAA

SEQ ID NO: 404283 - protein, 338 aa, unidentified
MTSFVGVDLHRNNFTYCIRENGEEKKIGKCEISELKGFASLLGKDTAMAVEATGNTFMFCRFLKAHVGRLVVVNPSQFKVISTSTKKTDKHDAKILAEFLEKDMLPEVRMKDDLQAKISSLTQTREKLVQLRTVLKNKVNNLLAANFIVLKREELSTETGLRKALSFHFDPITDTEMFVVVEQIRSLNQSIEKLDKTIEDHGSKMDGFKNLKSIKGIGSKGAATLLSTIGNIHDFRSSKQLAAYIGIVPRVSNSNDTVCHGRITKNGSKIARTTLVQCALIAKRYSPYLHAFHESVKSRRGGAKANIALARKFLDIVYRTLKNNWMFEDFTQFKLVKN

SEQ ID NO: 404284 - protein, 301 aa, unidentified
MRRKSVPNTPAGFTALGVWLTQQRVTRVHACLEATGSYGEALATWLHDAGHRVSVVNPMTIHAFAASRLSRTKTDRTDAALIAQYCATQHPAPWQPAPREIRELQALIRRLEALQDMRIQETNRLSSGAVTPAVVRSLETVIATLSDEITAVQQQIRDHFTQHPGLRAQRDLLTSIPGIGDSTAAVLLAELFDKQYRSARQAAAFAGVVPRIAESGTLKRRGRLSKIGPSRLRKALYFPALAGLRFNPSLQALRTRLRAKGKVPMVIVGAAMRKLIHIAYGVLKSGKMFDPNHELLSKPVS

SEQ ID NO: 404285 - protein, 358 aa, unidentified
MKKNSKVEASGQLTIGIDVSDRSSCYCYLNQAGEVCGEGKLPFTPEAFRQHFGGMARAVIALEAGTHSRWMSALLRECGHEVIVANPGRLRLLTTSNNKNDPRDARTLAEIAWAKPALLQPVRHRSAETQRDLNLVRARDLLVEARTKLINGVRCLVKGLGARVPKCASGQFCQQAHEHLPEEARPATGPLLEVIDELSVRIGEYDEMLEYVAQTRYPQTTLLKQVSGVGTLSALAFVLTIEDPHRFARSRDVGSFLGLRPKQQDSGDRSPQLRITKAGDSYLRRMLVSCAHYILGPFGPDTDLRRWGLKLCERGGKNAKKRAVVAVARKLAVLLHRLWVTGEVYEPLRNQAEADVAA

SEQ ID NO: 404286 - protein, 425 aa, unidentified
MNLLILKGVPMSLKIVYKICCGIDVHKTFVVACIASTNDKGVTSYESHRFSTYTSGLKTLLQWLLNRNCKDVCMESTGKYWIPVYNILENDCSIVLAHPKYVKAIRGKKTDKKDAKWIADLFKHDLVAGSFMPPADIRQLRDLMRYRFKLTCFQSSEKNRLQNCLTVSNIQLGNVVSDTFGKSAQAILDKLLENPADTSFDLEPLVYKSLKKKLPELRDAIDGYITPEQVGKLKVIKAHYESLESRKAELEELVLALAAPYQQELAILQTAPGIRSDFTAIGIISEIGTNMEAFPSAKHLCSWAGLTPTNNESAGKKKSVRVSKAGCYIKPLLVQCANAVVTSKKHPEIRNRYLRLKKRRGHKKAIIAIARMLLTALYHMLKNGENYNAELYRKSDLPPANWEITVEQAIIIARNQGYKIKSATA

SEQ ID NO: 404287 - protein, 373 aa, unidentified
MDYSTVYVGVDAHSNSFTLSCYTNEKETAEYTQKVEGHYSEILNYIEAMRFHYGDDALFICGYEAGCLGFTLYHQLMDHGVKCIILAPSTMLEQRSRKRVKTDKRDAELIARCLAHHDYSPVHIPTEQDDQTKEYIRMRDDHKLELKKLKQRILSFCLRHNYRYDVGKTNWTQTHLRWLKSLKPDGLYAEILAEYLGTFDYLSRKIERLDQKIEELASGMRYKENVRKLTCLMGIRPQTALAVITEVGDFNRFAAARHFASYIGLTPGEDSSGENQTRLGITKAGNSHVRRLLIEAAQCYTRGRAGHKSREMQKRQLGNRPEVIAYADRANERLRRRYYRMVLKNNKKANVAKTAIARELACYIWGMLTDNIA

SEQ ID NO: 404288 - protein, 367 aa, unidentified
MKKVSTVAAKPSRNISQQKLTMGLDLGDRNSWYCVVDEAGQIQLEQRVRTNAKALQEVFGAMPHSRIALEIGTHSPWISRLLSELGHEVIVANARKVRLIGESRKKDDRLDAQTLARLARIDPELLYPVKHRSAQAQADLMMVRARAGLVRARTGLVNTARGLAKSYGERLRGCNVRNMNPEKAEGLSPELQRALEPLLAGIEAVSERICEYNERIEQLTQQSYPQTALLKQVKGVGTLIALTYLLTLEDPHRFQKSRDVGCYLGLQPGRRNSGQREPQLHISKEGDPYLRTLLVQGAQHILGPFGIDCDLRRWGLKLAERGGRNGKKRAIVATARKLAVLLHHLWRSGEVYEPLHNSRRTTVAAAA

SEQ ID NO: 404289 - protein, 346 aa, unidentified
MEHYVGLDVSLKLTAICIVDQTGKIVREGMVPSDPEAIAGFVQSHAPHVARVGLETGATATWLWNELNALGLPVICIDARHAKAALKMQINKNDRNDAAGIARIMQCGWYKEVHVKDRGSHAIKAVLSSRALLVKLKRDLENQIRGLLKNLGQVIGRAKMNVFAKRAAELLEDRPELAAATLPLLRAREAVEQQIADLDRKVLRLARRSAQVQRFMTVPGVGAITALCFLATIDDPTRFKRSRSVGAYAGLTARGYASGETDWTGRISKCGDTMLRSYLYEAANVLLTRVAKWSALKAWGLRLAKRSGLRKAKVAVARKLSVILHRMWMDGTDFHWSSQEAAQQAA

SEQ ID NO: 404290 - protein, 339 aa, unidentified
MAIVCGLDIHRSQVTYDWVDVDTGEGRRGKLAPANRETFRGWLEQFAGHDVDVVVEGCTGWRFIVEECRAAGVTAHVADPAEASVRIHGVKRRAKTDKVDAKGLRELGVQGRVPESWVPPAQVLEIRTAVRLYHDLMTERAAWLHRIHATLFHQGAAVQTQLLRGDRDRLHDSELLSAEGRAAVQSILRVVEVLDGEINRIRQQLQRFATKQPGCKELQKEYGIGKLTSVIIWSEIGDCRRFSSSDGAVRHSGLDVTVYSSNGKRSAPHLSRQGQPLLRWALFEAGRCGGRASSPDHDYWQAAAQRVGKKRAAISVGRKLTRRCHHRLRALGDDAFAEV

SEQ ID NO: 404291 - protein, 349 aa, unidentified
MVIVGIDAHKRTHTAVAIDEAGRKLGEKTTHATTTEANLELVRWAGGFDPERRFAVEDCRHLSRRLEVDLLAAGEELVRVPPKMMAHARDSARTYGKSDPIDALAVARAALREPNLPIARLDGPSRDLRLLVDHREDLVRDRTAQINRLRWHLHELDPSWDPAPRVLVRLKHLDGLAARLEGLEGTVAWVARDLVARIRELTVAANDLQRLIVEKVAGLAPALLEIAGVGALTAAKIVAEVADVRRFRSKDAFARHNGTAPLPVWSSNRVRHRLSRTGNRQLNAAIHRIAITQMRIHDDAKVYLERRIGMGNTKMEALRALKRQLSDVVYRALMADAVSTQAACFGEAA

SEQ ID NO: 404292 - protein, 403 aa, unidentified
MNVELHVALDIGSTKHRVAIGLSGCREPIEEFDLAHTPAGLSEFFKRVRHHESIHGAQVCVAMEGFGGYARPIDTQVLAQGWQLYAINNLKFARFKEIFPAPAKTDAIDTRRMLQLMQMRGQVPMAEALLQEVAPVDALHRQLKALTRRRKQLVGERMSISQRMQVELHAVAPGLLAITGQADNLWFLGLLTCKEDLRKLKTVRQPTLLRIPGVGTGYATKIAQWQKDAVFADSLTWAGPMIQADARRMLDLREAIAELDRQIASLVKQSELAQRLLSMPGFGPTCAGELAGEIGNIERFAGEASFAVYLGVAPLDRSSGKRFGAKLPRQINPRARDALLIAVVHHMGQVPQSRTFYERKRAQGKTHMQALRALARHLARVLFSMLKQNRNYRWPPEHSADFS

SEQ ID NO: 404293 - protein, 369 aa, unidentified
MKKSIKYVGMDVHKKTIDVAIAEGDRDGEVRHYGTINHDLDSMAKLLRKLASAGGELRFVYEAGPCGYQLYRHLSGNGLRCTVVAPSLIPRKSGNRIKNDRRDAIALARLHRAGELTAVQVPAPEDEAMRDLTRARDDLKIAERKAKQLVSGFLLRHGFVFSGRTPWSNAYWRWIAEIRMGHPAQQIALQEYVHAVKACGEQVDRLTAQVHELLLQWRWAPVVKALQAMRGVSVIVAVTAIAELGDLGRFETPAKLMAYLGLVPSEHSSGESRKRGGITKTGNGHVRRVLVEAAQAYRLPARISRTLLARQQGVSPEVRKIAWEAQLRLCSRYQRLTGRGKPVNLVVTAIARELAGFMWAIAREVPAVA

SEQ ID NO: 404294 - protein, 376 aa, unidentified
MGTPSAQTLDDVGVRKMFQELEEVPMTMVGGLDVHRQQITFDYVDDDGLVHWGQIRPATRKTLRGWLAEHCPDGNGEFALEGCTGWRYVSEELAAAGLGVHLGDPAEIAVLRGPKKRAKTDRADAKLLRTLLLEGRFPESWIPPAHVAEIRSLGRLYYTLMEERRAWQQRIHAQLFHQGCPPIKALLSASGRDALARAPLSAAGRQHVDTALRRIDELSAEIEPLRTQLANFARRQQGCQALQRHYGIGWLCAAIIWAEIGDTRRFTSSDQLVRFAGLDITVYSSDSKRSPGHLSRQGSPELRWAAFEAAKCAARRGSPDYAYYHRQAAKHDGHNGKNPTLAVERKILRRCYHTLRDLGDAALALPDTRPQQEVAA

SEQ ID NO: 404295 - protein, 385 aa, unidentified
MNNFVGKLIKGLTILTSYLPKLKGKKMNFSKKGDLIMKIKKTRRKNKLNTFTELTGYDYYLGLDYSQTGYSLSRMTDKMQEPKIVRGGNRVEEIQEELKKLKGKKILTIEETTSTHWLYVELKEYVEKIVVCDPYRNSLLGDGPKNDDIDAGNLSLLLRGGFLKEVYHTMDESYYIRKLISSYEDLINQGVRIKNQQSSIYRSIGKSYKKKESLGNNSTIRFIEMQQNKAIKQYEEQRKEYIEEFEKLRKKIPVIEYMCKVSGIETISAVKIYGIVIEARRFPTKYKYWGYCGLVKHQKLSGNRNYGKRKTRYSRVLKSVYKTAALASIRSKSDIGEYYKELLTRGISEDKARNQIARYIAKVTLAIMKYETEYIPYLWRKPIAA

SEQ ID NO: 404296 - protein, 391 aa, unidentified
MVCVGIDVAKDKHDCCILDSDGMVRADCFTIPNNMDGFKQLLQTIRNCTKKSDKIKVGLEATGHYSYNILGFLLDNDLAVYVMNPLHTNLYRKSLSLRKTKTDRVDARTIATMLLSDVDLKSYTNTAYHNEELKSLTRYRFDKVRERAKLKQSVSRLVTILFPELEKLVPSLHIASVYALLSEYPGAKQVSEVHLTKLTNLLTTASKGRYGKDKAIQIRDAAKTSIGSVMPAKSLELKHTIKLIKELTSEIDEIEDSIQQIMDELHPPILSIPGVGIQSAAMILAEIGDFSNFESPDKILAYAGCSPSTYQSGKLTNCYAHMEKRGSRYLRYALYNATKYVCHWNPVFAKYLAKKRAEGKHYNVALSHATKKLVRLIYALQKSGKAYLTAA

SEQ ID NO: 404297 - protein, 450 aa, unidentified
MSKGSGVSRGDKRRNARLAELRRLVPRENAIAGIDLAEDNQAVVVTDHDSKVLARRSPRCKAWQLGEVLDWAVAKAQARGFASVTVACEPTGSRWMHVQQACAERGLNFVCVQTLVTHNAREAEDCTRDKSGQKDAVLIARLTAELRCYRPEVIEEDWAVLRYLGQRRDALVTEAIRCRQQITDRLALAWPAALGTAAAPLDSVTFLACLQVVADRCDGDPGKLRGYGLAEFTQLVRGVLPRWGGQRACHRIVAAFHAALGDSHGAVPARRRGALKLAGHALADLRRARELQARVGAEMIAQLHVLGIADVLATIDGLSLEVAACILAETGDPARSGSSRALVKHAGVAPCDNSSGNSAGQARISRRGRPVLRKAAWRATWAMIHGANPVLAAKYAHLTSRPAGQLAKGQAHIACMATLLRWIYSVVTSRASWDQRVAAGTISHTAAMAA

SEQ ID NO: 404298 - protein, 357 aa, unidentified
MSQQSNNCAIAVIGIDIGKNSFHVVGHDLRGAIVLRQKWSRGQVEARLANLPPCLIGMEACVGAHHLSRKLQLLGHNARLMPAKYVRPYSKGQKNDFRDAEAIAEAVQRPTMKFVATKTADQLDLQALHRVRERLVRQRTGIINQIRAFLLERGVAVRQGLRFLRAELPGILATRTDVLSPRMSRVIEALAGDWRHLDARVEGLSGEIETLAHQDQHCERLMTVPGIGPIISSAMVAAIGTGEVFSKGRDFGAWLGLVPKQISTGDRTILGSITKHGNRYLRALFVQAAWVVLVKLGPKQWERYELKSWIEAAKKRLHHNVLAIALAHKLARIAWAVLNKGRAFACDKTNAMASRPA

SEQ ID NO: 404299 - protein, 343 aa, unidentified
MQTITTIGLDIAKSAFQVHGIDAEGKVIVRRQLKRRYVLSFFEKLQPCLIGVEACASAHYWSRELKALGHTVRLMPPAYVKPYVKRQKNDASDAEAICEAVRRPTMRFVETKTREQQSCLMLHRTRHLFIRQQTSVINAIRAHLAEFGIVAPVGRNGVEELLDIVADANDKRLPELARACLGALGAQLRMLKAQILNFDRMITAWHRSNETSKRLDELPGVGPALATALVASVADPKVFRSGRDFSAWVGLVPKQNSSGGKQKLGSISKQGDRYLRSLFTAGALAVIRYARIHGTKHRPWLTALLARRPTKVAAIALANKIARMAWAMMARGERYREPVALAA

SEQ ID NO: 404300 - protein, 345 aa, unidentified
MERVECIMTTGLAAGTYELFVGIDIAATTAEVSTQRPGAKAGRSFKIDQTPEGFHRLVHTLQATDNEPSHVLVVMEATGSYWMSLATRLVHEGFRVSVINPSQAHHFAKALLKRAKTDAIDAQTLAQLAMVLQPEPWMPPPQIYYALQQRLAQRDDLLNLRQQVRNQLHALDQHPEVIASVRTRMESLLLLFQSQIDEVEGEIAAALNQDSAWAAAAERLQSIKGVGWVTAAWTLVTTLNFTTCDTVDALTAYAGLAPMPRQSGSSVWHRPSIGHSGNGRLRTAFYMATLTAARFNPAIKAFYNRLLEAGKPEKVARCAAARKLLHMAWAVVKKDQPFDPNYAQE

SEQ ID NO: 404301 - protein, 389 aa, unidentified
MLHDHPSVGPTAILTQFGAIFVSLELSRSNWVLTSLSPGNGEKMSQYSLAAGDIGGLLARFAELKRKAKERTGSDYPTITIHEAGLDGFWVHRVLQNEGIESYVVDAASIATSRRRRRAKTDKIDGEALLRALLAFKRGEPRVCAMVVAPSPEEEDRRRLCRERQTLIAERIIHVNRIKGLLFAQGISDYVPLRRDRRKRLEGLRTGDRRPLPVHLKTQISRELDRLELLLDQIRKVEAEQEALLAAESKAAPEGEPHNAVAMLLAVKGIGEHSAAILWSEGLCRQFSNRRQVAAYAGLAATPWRSGAVMHEQGLSKAGNPQLRTTMVQLAWLWLRHQPQSALACWFRARGERGRKGSIVALARKLLVALWKYVTHGVIIEGAVMKPAA

SEQ ID NO: 404302 - protein, 430 aa, unidentified
MNRVVIGVDPHKLSVTIEARDNREILRAVGQFATDGRSYRQLLEVARQWPERIWAVEGANGIGRPLTQRLLASGERVLDVPAKLAARARVFDTGQGRKTDATDAHAIVMVALRDKGLREVSSDPELVVLRMLCDRRDELSRARVQALNRMHRLFLGLLPGGAPVKKSVRQYQAMLATVRPRDPAGKTRRRMAAEELEDLHRLDAKLKALKAELKAAVLATGSHLMDIHGIGPAGAARILADVGDVARFPDRHHFASWTGTAPIDASSGQHLRHRLSRAGNRRLNHVLYIAGIVQLRHDTAGRAYYRRKLAAGKTSMEAMRCLRRRLSDAVYRQLAADARSQDEASPGGHPGASLISSAAGLSPDTGTSDQPLPGPADLTLPPPRPAPQPMAPAAAATRRRARGVNVERPGRTTLTPTSAAAPSTAPGPCP

SEQ ID NO: 404303 - protein, 323 aa, unidentified
MNKCHSNTELSSHEGTRCQFNGGTGAIKLGIDVHQDFYVVVEQVDGTNPKPPQRFQKAAFLHWATKLKSQAREVYAVYEACGFGFRLERDLSALGIHCHVVCPQKLDEQNRRVKTDGLDAKALCLKLDRFVQGNRDALALVRVPSEKEEQLRAVHRQREQLVKARKQLEAQGRSLLVNHGIEPVKNWWKSRTFGALQVPEWVKELLSNSQPILIGLQEKIAALTLQLQTAAASNQPRGLGAMSSVIIDREIGDWKRFNNRRQIASYTGLCPGEYSSGNTRLQSCVTKHGNPRLRAALVELAWRLVRFQPNYKPIVKWRATHRL

SEQ ID NO: 404304 - protein, 366 aa, unidentified
MPPMPQPAQPDHDTIATGEVILGVDTHKDIHVAAVITALGAVAASRSFPTTMAGYHQLLAWARTFGTLRRAGVECTGSYGAALARHLRAAGINVIEVNQPDKATHRRRGKTDTIDAQAAAQAVLSGRATATAKTGDGPVEMLRMFKLAKGSAIKSRTQAINQLKAVLVAADPTLREALSGLSNPILIRQCAQLPADPPGDASSAAAWTLRLLARRILELTAEIDDLNQQLTHAVNRHTPKLLARPGVGPDCAAALLIAAGDNPERLGSEASYAALCGASPVQASSGKTIRLRLNRGGDRQANAALYRIALSRLRWDPQTRAYLARRITEGKTRREAIRCLKRYIAREIYQLICEPKPDPTASPIAT

SEQ ID NO: 404305 - protein, 363 aa, unidentified
MVGSAKGCLTDAMLYTAIDYHKQYSVACTMDAAGTRVREARICNAPEAFASYFGSLPEGSQVVMEACWNWTWLYDVLDEIDQVEDVVLANPAKTRIIADAQIKTDRLDAQALCTLLRGQLVARAYVSDRVIRAKKRVLRQRVYWVRMRTMLRNRIHVILDRQRELDRPICTDLFGQKGLHWLRQLELPDPDGLLLQQSLALHDDLVAHIRALESRFNAENRDDPSVQHLQTLPGVGPVLSAVIAAEIGPIDRFNRADQLCAYAGLVPTTYASGGHVHHGRVLPFCNRWLRWALVEAAWTGISCSPYLGALYKRCRERGKKANVAIIVVARRMCQIVWSLLQEQRDFTTMPPSRTLSPVAPIPK

SEQ ID NO: 404306 - protein, 353 aa, unidentified
MIHLPEEREVILGVDTHLDVHVAVLIDVVGRIVATTSVPTTALGYEQLIEWARGFGRLTRAGIEGTGTYGAALARRVHAHGVQVLEINRPDRSRRRLRGKSDPTDAENAARAVLAGEANAIPKAQSGLVEAMRAVSMARRSAVKAKTQAINQLRALLVTAPESIRATLWKVKPEQCVARCARLQSLGDTPLLKALTSTLRLLARRWMSLAKELHQLDAALEELTKRAGRRLLTRFGVGPQTAATLLVTAGDNPNRLRSEAALAALCGASPLEASSGKTTRHRLNRGGDRAANNALWTISMVRMRSDPRTRAYVTRRTAEGLSTKEIQRCLKRYIVRELYPLILADLAESIRKT

SEQ ID NO: 404307 - protein, 451 aa, unidentified
MANSKTRADRIISRQLSHCTVEAAHLSAVGIDVHHDQLICCFQKLDPIAGELTSEHRSFGTTIPQLLEFAAWCRVRESSVILMESTGVLWFSPYRSLEDVGFDNDTLALVNARDVKAAVGRKTDAQDAKRLAEYARLGKFHKSFVPSRPFRDMRMVSRDIIRLSDDISRQKNRYNKNLNSVGCRATSVFSDVHGKAAGKILDAYIRGDRDFEEIVRSARKQLRATQQEILEAINFAMSDALRELLRSSYEHLQYLIARRDSQIALLERMQAPYQEYIDRLMTIPGVKELSARLLFCEFTNEQQSFPDAAHFASWLGLCPGNNKSAGKSSSGKTPKGNRWARKTLTEVAHGIGLMKRGALKALFQAFKERRGARRAVVAIAHKVAMIMFAMIWDGSEYVETTCSALRDTRVKRLLQTSKNLREQRTVITLSGQIVDKDTGELIGQLSVDAAT

SEQ ID NO: 404308 - protein, 348 aa, unidentified
MGETIGIDLGDKVSCYCILSGEGEVIEEGNLRNTEASLEKHFAGLPRTRLAMETGTQSGWISRQLESYGHEVLVAHARDLHGISRSDRKNDRNDAEKLARYARLDPTLLNPIQHRTAQQQSDLCAIRARDALVRARALLVNTARGLAKTEGFRLPPSITATFGERALEVLTGDLQAALRPLLEQIDQLGIRIALYDALLEQIAQQRYALETKILQTVPGVGLLTSLTYVLTLSDAQRFAHSREAGPYLGLRPKQNQSGERDPQLGISKAGNAYLRKLLVPCSHHILGHFGKESKLRAWGLAIAGRGGQNAKKRAIVAVARKLAVLLHRLWASKTMYQPFFEPAAAGAK

SEQ ID NO: 404309 - protein, 391 aa, unidentified
MPSWVRPAVKRCIKKLIFENDLGGFGKLLQRCQAAGVQNDLGKVVFGLEPTGNYHKPLANHLIENGCQVVLVTGKAVKDNRRQLDGRWDKNDTKDAANVADLVSRGRCLYYDAGTAQINQLRDLLSLRRRLKKEEHSLRMRIRNTVLAKYFPELDRFYGACESESLAIVRWCLEPAKIAGLDFDKFFAMVTAGRRGIAQKLRLQKIHQLAAQSVGCPMGPAAEFEAVLLVQKLKQVREQIKQVEDLMQQVAGDFDEYQILLSIPGFGPYVAAVVLAAIADPFRFGSSNQVVKLAGYDLCANRSGKSSDDAVPVISKNGNAQLRYALYQAAFIASVRNPHFSAYFTHVLRGRQRERGIKTKMRVKLAAKMLIIAWKLMKKKEPFNPDYLHIE

SEQ ID NO: 404310 - protein, 336 aa, unidentified
MFFVGIDLHKKTITVCVVNQQRCVVQRKTFHCCQPDKIREFFSQLGAFQAVVEATASYEWLWQLLEPLAERLVLAHPQKMRIIAETTRKTDKIDAEVLATFLALNMIPQAYRPSPRQRQHRTLVRQRCRVQGRITSVKNKLRHILSDYNADRKDLFTAEGLAYLTKLCVSAADRYVVDQLQGEYEFLKGQLRALDKQLRTFARQAPTPEAEAREVLASMPMVGDVTVNVVVSELGDIQRFRSAKCVAAYAGLAPGRRESAGRSREMPISKTGSRLLRWVLVQTAWRMVQKSRRWQCVYEGLCKRRGKKKAIIAVARRLLGVMAALLRSGQRYRLAS

SEQ ID NO: 404311 - protein, 428 aa, unidentified
MAEQTKAWSERSAFAGFDWASDHHDIVVVDAHGTIVEDFRIEDTAVGWQQLKERLVKYPGLAVTIETSSGAAVERLLAAGYAMYPINPKSAQRYRERKVPSGTKTDRVDAWSMADALRLDGHTWRALKPDDPLTQELRLLCRDEVALIEQRTALICQLRAALHEYYPTALQAFDEWTHPAAWAFIERFPTPECLVQAGKRAQEKFMHTHKLYHSKELYERRLLLFAQAREFCGTAAVTQAKRLLAMTLTHQLRVLQEHLDAYRQRITKLFAQHPDHDLFGSLPGTGPKLAPRLLAELGDDRARFDSAEGLQCYAGTAPVSYQSGKIRKSRLRRACQLSLRAAVHHWANLSRKKCVWADAYYDRKREQGMNHACALRCLGQRWIKILWKMWQTHTRYDADLHQRNQIKHGSWVLALVTAPSNSAAPATP

SEQ ID NO: 404312 - protein, 410 aa, unidentified
METVVERPAALDVHKEQVTACVRVPVGRDRREQHLAEFKTTVQGLLALRDWLQAHGATQVAMEASGVYWKPPWAILEDEFECVLVNARHVKQVPGRKTDVSDAAWLCQLLEAGLLKASFVPPKPIRTLRNLTRYRKAQVGERQREANRLHKILEDTGIKLDCVASDILGASGRAMLDALVAGTTDPDVLADLAKGKLRQKLPALREALQGRFDAEHGIVVGAILAHIDFLDEQVSLLSDAIEEQIRPFAPAVELLCTIPGVQRRTAEVILAEIGTDMSVFPSAGHLASWAGLCPGNDESAGKRRSGRTRKGSRWLGIALTEAAQANTRSRDTYLSAQYRRLKPRRGHRKAIGAVRHSIIVACWHMLTTGEVYRDAGGDYFTHLDPDKQTRRLVAQLERLGHTVMLQEAAA

SEQ ID NO: 404313 - protein, 353 aa, unidentified
MIIIGVDPHKSTHTATAVDPVTNTDLGSLRIEATLTGYRRMLAWAKQWPQRQWAIENAEGLGHHLAQWLVARAEVVLDVPATATARVRDLSRGARRKNARIEAAGAACVAAAQGDARPVVREDHVDALGLLDERRMNLSQHRTRTINQLHRLLRELLAGGVPTDLTAAKAVAALRVFRPCSTPERVRLQLCRELIADVRRLDQQLADNQAQATRLLDEQGTRLREIDGVGPVLAARILGRTGHVRRFATAAAFATYNGTAPVEVASAEYHCHRLNRYGDRQLNSALHTIAIVQVRMPDSAGRRYYDRRIADGKTPRAALRCLKRHLSNQLWRTMLADERRHRDRAHDQSATAS

SEQ ID NO: 404314 - protein, 350 aa, unidentified
MASIRISYRGKKVYIGIDVHKETYAVTCICDQIIVKKATLPAEPAKLSQSFLNWFKGATIYTAYEAGFSGFGLHRELDRQEGIKSIVVNAASIAVAANDKVKTDLRDSKKIAEQLSVNQLRGIYVPTEKEESRRTLTRTREQVVEARATVSRQIKSKLHYFGLMELGDSRQITNRYLKEIEARKLSVEIAFSFKVLIDQWRFLTRQIHELRSALQKQAEKDNKLEKVYQSVPGIGLITSRTLANELGDLSRFDNERALFSYTGLTPSERSSGESVRRGHISKQGSARIRWLLVEAAWRALSKDEALKEAFDRIAKTRGKKRAIIAIARKLIGRIRACFRTKTVYAVGTYA

SEQ ID NO: 404315 - protein, 344 aa, unidentified
MENYKHYIGIDLHSKHCYIVVMNKSGKITKRAKIITNEKDILEILCSLKGKKAVTFEETTLAHWMYILLISHNVADKIVVCSQKTKTGPKTDYKDATELADLLRVNRLKPVFHEDNPRMELRTLVSGYNDLIKDLTRMKNRDKALYRKSAIPVGGKKVYKDTSFNNLLISKTDRFVEKQYFNQIALLEEQKELYLKKFEQNIKKFPEMKNIITVPGFSIVRTNILVGIIITPWRFPTKYNFFSYAELTKHEQTSDGKSYGNKKAYGRSELKNIFKAATQNTIRGKNAFNRKYNEMRINGSTDKSAQNAVAKALASTVLAVWKTGKKYKDYYREVKQKENSQNRT

SEQ ID NO: 404316 - protein, 400 aa, unidentified
MTNTIAAIDVHKKVLMVVTGVEAGDSHRFATTRDQLERLAAWLQARGIEEVVMESTAQYWKPVWQALEPDFRLHLAQAQSNRAPRGRKHDFGDARRLLRRFVAGELILSFVPAPEQRSWRTATRMRQQLVRDRVRLQAQIEALLEEAAIKLSSVLSDLLSLSGRRILDAIAHGQTDPAALADLGDRRLRCGREQLEQALHGRLTPLHQQLLALFLEHLTLLDRHIEHLEQLAAETMHAQRDAILRLAEVPGLGLESARQIVAEVGATAQTFASPDRLASWTGICPGRTESAGVSHSSHSAKGNRHLRRILVQAAQAASRTKGSYLQSVFRRLLPRLGFAKALWALAHRLCRLIWKLLHDRVRYLEHGQIADPRTRKHLATKHLRALTRLGFHVHISDPAM

SEQ ID NO: 404317 - protein, 372 aa, unidentified
MTSIIYVGMDVHTTNHTLCCYSMEDDRFFAEVQVEPDAKNILKYLARIEKQQSRDCRMVCGYEAGCLGYSLYHQLYAHGIDCVILAPTTMMTKPGKRIKTDRRDARLISKCLAFHTYSPVYIPTEVDDAVKEYIRMRDDANSALARVKQQIIAFCIRHGKIHDGKSYWTNKHLEWLSSLDLGNKILSEVLQEYLIRYYQLREQVDMYDMRINELAQAEPYRQKVEKLGCFRGIAAHTALSFCVEVGDFRRFATAQQFASYLGLVPGECSSGDKQQYTGITKAGNSHLRKLLVETAQVFGRSATKSGKSVVLKERQAKCDSLTVAYADKANARLKKKYFKIAMRSKVNIAKTAVAREMACFIWGMMTDNISCA

SEQ ID NO: 404318 - protein, 337 aa, unidentified
MKYQWFSGIDVSKHQLDITVYKGAERQFHVSIPNTIKEIRIFIKSLVQKQNIELPDMIFCMEHTGIYNSVFLQATQEFKLNVCVESSVQIKQSGGLQRGKNDKIDSNRIALYAFKNCEFLKLWEPERKVITELRKLGTLRARLINARKQLLAGIREEKTFSSKNINNRLETCCKGSLQSLEKDIETTDEAIEAVIATDGELKRLFAIIESVPGIGKVTAAEIVINTNEFKRINDPRKYACYAGIAPFEHSSGTSVRGKVRVSKKANMQAKSLIHMASMAAARFSEDLKIYYERKVAEGKNKMSVLNAIKNKLIHRIFACVNQNRLYQKNYIRDLVLS

SEQ ID NO: 404319 - protein, 349 aa, unidentified
MRPGTRMGNCRVQELAAHRISMSTERRKVCGIDVHKKFLVATILDREGKSETRRISQNTESLLELRNWIESEKCDSVAFESTADYWRSLYLVLENHIPITVANAHHIKHVPGKKTDITDSHWIAQLELNNLITPSRIFTGERYDLRTLTRSRELLVQSRTELKNKIHHLLDNTNIRLSSLLSDLFGKSGSIILKGLAQNKPLDEIIESLPKKMRGNADVISAAVPASIPPVVLVLLQSYLKLVDDLDTEIKLLEGRIRESLTNKSRDFQIITSIPGIGFIGASTLIAEIGDVHDFDTADKLTKWAGLTPTVYQSVNVTRTGSITKQGSRHIRWILVELAHVAIRSPGVV

SEQ ID NO: 404320 - protein, 427 aa, unidentified
MKQEAPEQQEFGAYIGLDWADRTHVISLRGTDSGKVEHYQLVHKPEALAEWVSDLQRRFPGQRVAVALEQARGAVVHALMGYDFLVLYPVNPKTLAKYREAFSPSGAKDDPTDADLLLELVTLHRDKLRAWLPDDELTRTITLLVEYRRQLVATQTSLSNRLTSLLKLYYPQALAWAGELTTVQACDFLQRWPTLAQVQQAPPAKLRQFYLAHGCRKADVIEQRLQEIKLAQPLTRDGAVITASVLMVQATTTQLRPLMEAIARMEKQIAELFRQHADHELFSSFPGAGPVLAPRLLAALGADRGRFAAATEVQQLSGIAPVMERSGKTCWVHRRWACPKFVRQSFHEFAGQSIRWSTWARAFYDQQRQRGNGHHAAVRSLAYRWIRIIFRCWQMRVPYCEETYCRALQRRQSPLARVLAAPMQNAS

SEQ ID NO: 404321 - protein, 454 aa, unidentified
MPKKSSKKAKSQRSRERNLLAKVHLNAAGIDVGANEHWVAVPEDRDPYPVRRFGVFTSELIVLCNWLKQCQIETVAMESTGVYWIALFQVLERNGFEVRLVNASHVKNVPGRKTDVVDCQWLQQLHTFGLLRGSFRPEAAMCVARSYLRLRDTLTKDSNSLVQRMQKALTEMNVQIHRVISDITGLTGMSILRAIIAGERDCVKLAQLKHPQIKSSTEVVAKALEGDYCQEHLFALQTALELYDSLQLKILGCDKRIEEAFKAFEAKVSLPAPDLSRLRSAEKRREARQRHHLEQMTGADLTTLPGLELLAVQRILSEIGRDMTRWPTEKHFCRWLGVAPDKRVSGGKPLPSKPRKNANRAAAALRLAAQSAMQSKTAIGAFIRRIKSRLGAPTAINAGAHKLARLLYRMLKFGKAYVEVGQQAYEKLFKERMLRNLQRKARDLGFQITPIPSQ

SEQ ID NO: 404322 - protein, 457 aa, unidentified
MGDDVMISVDPHKASNTLAVMDPVTKTVIARQRFMNTAVGYRRLREFAGGWTHRRWAVEGCHGAGRSLAQRLAGDGEIVLDVPAKLAARVRVYSQGHGRKSDADDAISIGLAALNSTRVAVVRRDDTLVSLRLLCDRRDELGALRTQAVCRLHRLLCELTPGGTHRGLRASRAEQLLAKLRPVDPVDVVRCQLAHQHLDDIRALDAKMTAVRAQIAALVDGTGTRLTELYGIGPVIAGRILAEVETIDRFPSKDHFASYNGTAPIDASSGEQVRHRLSRAGNRRLNHALHMMAVTQIRQPETIGRRYYERKRLEGKTPKEALRCLKRWLSDVVYWQLVADRRATITQCGSSTTPTRTRPTSTSATTPVPCTAPPRRPPHPTVSTGSSHSTGKTAASSASKSSTPAVGSPKTSSTKQKTRAEATRKPTTSSAAVRDRRPTSAAAAGVKAGAATRRAQP

SEQ ID NO: 404323 - protein, 344 aa, unidentified
MGEVSTIGLDIAKSVFQVHGVDVAGAVVIRKRISRARVLEYFGELPPCLVGIEACPSAHHWGRELQKLGHVIRLIPPSYVKAYLKRSKNDANDAAAICEAVTRPSMRFVPIKTKEQQTALMLHRTRQLLVRQRTMLSNALRGHLAELGIVSAKGRSGTAELLRIIRDGEDSRVAPAVRGILDVLARQYGAIGTEIASIDKRIMALHRACEASRRLAEIPGIGPVGATALVAEIGDWNSFSSGRSLAAWIGLVPKQHSTGGKDRLGSITKQGNRYLRWLLVVGAMAVIRYARKHGTERRPWLGRLMERRPTKVAAVALANKIARMAWAIMVRGERYKEPKLSLAA

SEQ ID NO: 404324 - protein, 348 aa, unidentified
MKYIGLDCHKQYDHATMIDTETGEVKARKLAHIKEEFREFIGDKTGTRVVIESCRDWSRTYELSKDLVEDIILAHPLKVKAIASAKVKTDAVDSRTLAQLLMADLIPEAHLRKAENRVKQRVIRHRTFMVVMRTRVKSRIHNLVDSQLLSPEALKAKPKNLFSKKGIKWLTSLEWAEEEDNRLVESHLRAMEAINQEISITNDMVKEIYEKDRDAQLLITIPGIGITLGMLISTEIDGIERFHSPSKLCSYAGLVPSTHSSGGKTYHGKITSEGNRWLRWALVEAAVPASYADAEIKERLDTLRKKKGANVAKTAMSRWLLKVVYHVLKERRPYITDYNVMAKAGAAF

SEQ ID NO: 404325 - protein, 376 aa, unidentified
MKKIVICGADVHDNSIMTRIAVNKEEPETRIFSYTTHGRNSMFKYLKFVARKHGAERIVMAYEASSLGFGLCDEGNDAGIECYVLAPTKMPQSEEQRKRKTDKRDAQKILEQVRGHVLAGNDLAKVWIPDLQTRDDREVVRMRLEVANKLTEARTQVRTLLKRNKVEKPKGVGNAWTDSECRWLRGISKGGNELAEGTRIALASLLRQITALEAEIKELNKAVAALAATDRYRAAAEVLDEQLTGVAVLTAMVFLTEMGDLRRFKNRKKVGAYLGLVPTSNESGENTDRKGHITHQGPARLRKVLCQAAWVRIVHDKEEKKVHARIVEKNPKKKKIATVACMRRLGIRMWRMALETQIKAGVYPDKELPQTKRPAA

SEQ ID NO: 404326 - protein, 318 aa, unidentified
MNSKNNQNEINVGVDTGKTQLDIYIRPLDIYFTVSNDEKGINKAIKEIKKYKPKRIVIEATGRLEQAFIIACAKEKLPFVIANPVKIKKFAGAIGQLAKTDKLDAKLIAYYSEALKPELSTLKPATLRLMSDLMSRRCQLMEMRTMEKNRLQIMPKEITSSINPLLTVINNQLIKIDKKLQKLIESCDEYQIKNDIIQSVPGVGNVVAFSLLSNMPELGYITNKEAAALVGVAPINRESGSFKGKRMIRGGRHQIRTAMFMSMMSAMQCNPVFKATYQRLVAVGKPKKIAIIACVRKMIVILNSMVRDGVYWDPKMNQ

SEQ ID NO: 404327 - protein, 410 aa, unidentified
MSTSVKRYVGLDVHKHYVVIAAVTAAHEVVLRPQRVNLTTLPAWARKHLRPSDEAVLEATSNAWYVHDLLEPLVSRVVVGVTQQIKLIAAALVKTDRKDALTLARLLAVNMIPPVWVPPQPVRDLRALINHRQRLVQAQTRLKNRLHSVLHRQQVVPPEGEVFALANRPWWLALDLPAGEKLRTRQDLTQLEQLVPLIAEVDAELHRLSLADPWADQMPYLVQLPGIGLLTAMTVLAAIGDITRFPTAKKLVGYAGLGARIHSSGETHYTGGITKQGRRELRTSLIEAAWVAVRYSPFWQAQFARLVARKEPNKAIVAIARMLLVVIWHVLSQQVADRHANPAKVAAYFLQWARQIKAPTQFGIRTATFARQQLDKLGLGQNLMTVKLGCLYKLPPSSLPTTKDNAAHTA

SEQ ID NO: 404328 - protein, 371 aa, unidentified
MKYYTSTTEFNCGIDLHSRQMYVCVMDRAGTKLVHINIQGNDFAYFLKRIEPYRHSLTIVCECTFNWYWLADACQREGLTFVLAHALYLKAIHGGKNKNDRIDSEKLAHLLRSNLIPPSYVYPGAKRPVRALLRQRLYYVWRRAELLARIQCHQLAEGHEPVKQSRPNRDPWEQRLLAQYDNPFHKSALEIDLHMIRAYDEMLLRLERELLAATRQLASRDFALLNTVPGIGRSLGLTILYEIDSIERFPTVKDFTSYCRLVKGSVASAGKLKGHRGAKLGNPYLRWAFGEAAVIGKRDHPLLRAYAQQLEAAHGKFRGNAILAHKLARAVYFMLKHGTGFDVEKLVATSSGPRRAEVAKVTQAGGAMNAA

SEQ ID NO: 404329 - protein, 390 aa, unidentified
MSQSFDASRSLVAFEQDSTLVAVIEMSQSKWLVAAMIPGVARQPLKKLDANADALLKLLQRWQDEARKAGRTVRRIVCTYEAGRDGFWLARWLQARAIETYVIHAASIAVSREHRRAKTDRIDTELLMRSFLGWLRGEKRHCSMVAIPTMAEEDARRPSRERESLVGEQTRIVNRIKAVLALFGIGGFNPRLRKAAQKLETLHTAEGTPLPENAHAELRRDLERLRLVHDQIHIIESERLRRLALAPAAATGPHAMVRLIARVFGVGIETADMLVNEALARKLRDRRAVARYAGLTGAPDESGKRRREKGLARAGNGRVRRGMIQLAWRFLIFQKDSPLVRWFRERTADGRSTTRKTMIVALARKLLIALWRLVTTGEMTQGLKLRPAGT

SEQ ID NO: 404330 - protein, 318 aa, unidentified
MPSAAPAFVGIDVAKTELVIRIRPSGDRWTVANDGAGIQALVKRLDRHAPALVVLEATGGYERAAIAALAAARLPLVVANPRQVRDFARATGQLAKTDRIDADILALFAERVRPEPRALPDEAASALDALLTRRRQVLGMLVAERNRLEHALSAVRRGITQHIRWLERQLQDVDRDLDDHIQASPVWRAKENLLRSAPGVGPVLSRTLIGELPELGTLPRKQIAALVGVAPLARDSGTLKGKRLVWGGRAPVRAALYMAALVGTRCNPVIRAFYLRLLAAGKPKKVALTACMRKLLTILNAMMRTNTTWRQTAQSETT

SEQ ID NO: 404331 - protein, 412 aa, unidentified
MQVLYSRCCGLDVHQKTVVACVMITQANGKVDKSICTFATTTAALVALGDWLASLEVSHVAMESTGVFWRPIYNVLEDQFELILANAHEIKALPGRKTDVRDCEWIADLLRHGLIRPSFIPAKPVRVLRDLMRYRKSLVYQHTQQINRLHKVLETANIKLTSVVSDVWGKSGQSMIKAIRQGENDAQTLTEGARGTLRGKLPQLQEALAGRIQPHHQVLLQQIFAQLQFWESSMQQVLQEIEAQMEPYQAVVELLLTHPGVQAVAAMGFVSEVGIDLSRFPSAKHFASWIGVCPGNHSSAGKRKHGKTTKGNPYLRALLAEIVWAISHTKDNYLSAQYHRLARRIGKTKAIVAVSHTVAVNFYHMITKRIPYQELGANYFDTLDRERLTKHTVKRLEALGYEVTLTPKEVGA

SEQ ID NO: 404332 - protein, 341 aa, unidentified
MFMIGIDPHKGSHTAAAVDHTEAVIDTLRVIADCHQREHLLAWAASFTPRTWAVEGATGMGALLAQQLVAAGEHVVDVPPKLSSRVRLLERGKIDKTDPNDARSAAIVAWHNPSLNVVIGLDEHRVVLRLLADRDHQITANRTRTICRLHALLCLLIEGGTGRALTAAKAEQLLASVHCDGAVSVERVAAGDQFLEEIRVLDAARVEVRKRTLAVVIACATTVTDVFGIGPLTAAIIIGRVGDIGRFPTSGHFARHNGTAPIEASSGPKKRHRLNPRGDRQLNHAIHMAAVTQVGHNTPGRVYYLRKQAEGKSRKEAMRALKRHISDAIYQRLVADARSNG

SEQ ID NO: 404333 - protein, 366 aa, unidentified
MNLKKSNKSFFIGIDLHSAKFNCCFLNDFNEKLEITFPVNEVGIQAFIEYAGNNSVVLVEASTGTFEFVSKIRNHIKCVYVANPHKLKLISMVNKKTDKVDAEKLAIFLKMQVMSGEELIKPVYVPEESIRMLRSCFSSYKSLKSITIQLKNNIHSIFKQHLICISRSSFSSKTKREQYIEKYNLPEPIKYQLKILFKQLKETEENISDVENLIKSIGADYYKEIEILTSMKGISVIMALALIADIASIDRFPNSKHLTSYLRSAPSVDSSGDIIRIGRTNKFGRKLSVSMVTQSVSHFRKANEYLNNWYETKSEKKGRGKMRMAIVNMLSNQEYHWYRDELNHLRKMKEYDIFLKGKGIKIRDVA

SEQ ID NO: 404334 - protein, 335 aa, unidentified
MNYRLFAGIDVSKLKIDVVFFLAENPDNEFHELFENTDEGCSKMIAWINSLTGLLISDMLFCAEDTGLYTLPICTFFDDQGGNLWVENALRLKRSLGLKRGKSDKADAAEIANYGFLHRRKAVLFRLPGKTISKLKHLLSCRKQLVKQQTALKNTCGELETFDKESAGFTLEIRESLIKEYDKKIDMVEAQLLAYVKEDEILEKQYYLVKSVHGIGSQTAMFIVVLTQGFTMFDDYRKFACYCGLAPFGNTSGTTLKGKPKVSHLANKRIKTLLTMCALNTIKKDNEFKRYYDRKIKEGKHHSAVMNVLRNKLVSRAFAAVLKDRPYEKDYHIAA

SEQ ID NO: 404335 - protein, 344 aa, unidentified
MDHSAGLDVSVKETSVCIVDDTGRIVREVKVASEPEELLAVLANPGYHFKRIGLEAGPLSQWLYSALAEAGLPVICVETRHMRAVLKAQINKTDRNDARGIAQMMRVGLYRPVHVKTLRSQKLRMLLTHRKLLQSKAIAIDNDLRGTLRNFGLKVGMVGRVKFEARIKELVENLPDLAELVEPLLVVRRVLREQFVIQHRRLLAIVRDDEVCRRLMTVPGVGPVVSLTYRATVDVPARFKKSKSVGAVFGLTCAKYQSGEVEWSGRISRCGDEMMRVMLYEAAQSMLRSKKWSWLKAWAMQIARRRGMKKAIVALARRLAVIMHRIWVDGTEFHWTREQAAAAA

SEQ ID NO: 404336 - protein, 340 aa, unidentified
MSLHGGIDLHANNSVIVLINEQDEVIYRKRLPNALPTILEQLAPYHMQIKGLVVESTYNWYWLVDGLMEADYRVHLANPAAIQQYSGLKYTDDHSDARWLAHLLRLGVLPEGYIYPKAERAVRDLLRKRAHLVRQHTANVLSVQNILVRNTGARFSVKRLQELTKQELKSLLAEEPQVLAVTSSLAVLDCLRQQIKTLEKTVHKRLHHTPAYEQLLTVDGIGTILAQTITLETGAISRFPTVGNSASYCRCVDSTKISNGKRKGTGNVKNGHPYLAWASMEAAQFAMRFQPEAQRLYQRKLAQSRNNTVLARKAVAHKLARACYYMMRDLVPYEATKAFG

SEQ ID NO: 404337 - protein, 436 aa, unidentified
MLFHVEKYIISAFFQRTILLYYVAAVIVVAFDVGKDKLNAYCEYGQHCFQDSFANNTLKIEQKLITFSGIAESTGYEGLRIIAEPTGIYHLKLFRTARRLGHHTAIVNPESVHKFKVVENNDAGKTDAKDPRVINLLAKYGKTLVDRNLRDEYLMLRQLNAMIIDEEKAYTSTRCKIHRVLAELFCDYSFKKDFLYTNTGRIFMEKYHANPYRVVQKGYSAFWQRLKRAAPRIRDITIQRLWQDAQCSVRNQLPADYVQILESRLNYLWEELLLREYRMAEIEDAMISVTNELRLKDPKIPAPVKGVVTAFRIAQLLAETGPLSDFKSIDQLMRYAGLNIRERQSGYYRGNNKISKKGRSNLRRVLGYIVLPIVKKKSLYGRVYHAKKDLGMVGNKAMVVMMRKFLRMFYGWYKSGLPFDENRVFNDDVNYVQITK

SEQ ID NO: 404338 - protein, 368 aa, unidentified
MKKRITFVGLDTHKNSIEVALADDGRNTEVRLYGSIGGDLASLDKMIRKLQATGTELRFVYEAGPCGYQIYRHLRAQGLQCDVVAPSLVPKRSGDRIKTDRRDACNLARLYRAGELTAIYVPQEDDEAMRDLVRGRQDAINAQRKVRQQLGGFLLRHGFRYPGKCAWTLAHRRWLAGVRMPHPAQQIMLQEYIHSVEECTQRVHRLTEQILQLMPDWRMRPLVGALQALRGVAPVVAATAVAEIGPMGRFERPRQLMAYLGLVPSESSSGGSVRRGAITKTGNGHARRALIEAAQAYSHPARISRVMRKRQEAVPEPIRQIAWKAQLRLCARFRKLTARGKSRNRVVTAIARELSGFMWAIAKQVPVP

SEQ ID NO: 404339 - protein, 344 aa, unidentified
MNHVAVDLGSRQSQLCVRSAEGQIQQEAKLANADLRAALAALPKSRVVLETSSEAFAVADLALAARHEVNIVPSGLARNLGVGQRGIKTDKKDAQNLSMASCRMETLPQVHLPSMQARELRRLLTSRAQLVAARTSMVNSVRGWLRSQLLRTSRGTRPDNFPERIRELALGRPEGLPVHIDRLLKVVETLNAQLKDADKELEELAKDNLTCQRLMTVPGVGPVTSATFWATVDDAKRFKTAHAVESYLGLTPGESSSGQTVQKLGITRAGATRTRATLIQAAWAAWRTRPSDPMVRWARGIAERRPTQVAVVALARKMAGILFALWRDEERYDPAHGLEKNQHS

SEQ ID NO: 404340 - protein, 344 aa, unidentified
MDHFAGMDVSVKETSVCILDDAGKIVKEVKVASEPQALLKVLGNPAYRFKRIGLEAGPLSQWLFSALAEAELPVICVETRHMQAVLKAQINKTDRNDARGIAQMMRAGLYRPVHVKTLRSQKLRMLLTHRKLLQSKAIAIENDLRGTLRNFGLKVGMVGKVRFEARIQELVKNQPDLAVLVEPLLIVRRALREQIVILHRRLLAIVRDDEVCRRLMTTPGVGPVVALTYRATVDVPARFHKSKSVGAVFGLTSSRYQSGEIDWNGKISRCGDEMMRVMLYEAAQSMMHSRKWSWLKAWAMQIARRRGMKKAIVALARRLAVIMHRIWVDGTEFRWTREQAAAAA

SEQ ID NO: 404341 - protein, 455 aa, unidentified
MQTFYLGIDASKGYADFIILNRYKKVVVESFQLDDTFDGHCLLYELLMNFSTDHPDSIICAALESTGGYENNWHNVLLEFQGTLNLQTARLNPLGVHHNSKADLKRNVTDKISARNVAEYMIAHPEKVSYQPQDHLASLRKQWGFVKMLTKQCTQLLNQLESLLYSANPEILTYCKDGVPAWVLKLLVKYPTAANLARAKMGSVSRIPFVSTAKAEALVLNAKKSVASAVDEVTQQLVAATVKQILHLKETIKIQSAIMARACAVPEVELLKTFIGISDASAIGLMLNIQSVKRFKTVKKLAAFFGLHPKLKISGDGVSYVRMSKQGRAEPRQILYMVAMAAITRNPLIREIYQERVGQGMEKMAAIGLCMHKILRIVYGMLKNNRPFDPEIDRRNRQKPIRQRKQKQNKIRRYQDYDFKAPISRRQKAKRMEQRQSQSDNGAECGILAPVPFPT

SEQ ID NO: 404342 - protein, 343 aa, unidentified
MEYYVGLDVSLKQTSICVVNQTGSIVQEGVVDSDPEAIASFVRSRAPGTVRIGIETGPTTTWLWTELKRLGLPVICIDARHAKAVLKMQINKSDRNDAAGIARIMQTGWFKEVRVKDLDSHAVKALLASRALLVKIKRDLENQVRGLLKNLGLVIGRAKFNVFAVRAEGLIENRPELVAAVRPLLEARKAIERQVEDLDRKVHKLAQRDVQVRRFMTVPGVGPITALCFKATIDDPTRFKRSRSVGAYIGLTTRRHASGEIDWSGRISKCGDAMLRMYLFEAAGVLLTRVPKWSGLKAWGAKLVKRSGLRKAKVAVARKLAVILHRMWIDGTEFNWSMKKAAA

SEQ ID NO: 404343 - protein, 425 aa, unidentified
MNLLVLKGVPMALKIVYKICCGIDVHKTFVVACIASTNDKGVTSYESHRFSTYTSGLKTLLQWLLDRNCKDVCMESTGKYWIPVYNILESDCSIILAHPKYVKAIRGKKTDKKDAKWIADLFKHDLVAGSFMPPADIRQLRDLMRYRFKLTCFKSSEKNRLQNCLTVSNIQLGNVVSDTFGKSAQAILDKLLENPADTSFDLEPLVYKSLKKKLPELRDAIDGYITPEQAGKLKVIKAHYENLESRKAELEELILALAAPYQQELTILQTAPGISSPFTAIGIISEIGTNMEAFPSAKHLCSWAGLTPTNNESAGKKKSVRVSKAGCYIKPLLVQCANAVVASKKHPEIRNRYLRLKKRRGHKKAIIAIARMLLTALYHMLKNGENYNAELYQKSDLLPVDREITVEQALMIARNQGYKIKSATA

SEQ ID NO: 404344 - protein, 482 aa, unidentified
MAKRKISTFERLRSGTMNRKERREWQQRLYAEDAGLEVVHPDAAGIDVGSASHFVAVPPDREKRPVQEFGSWTADLRRMAEWLKRCGIRTVAMQSTGVYWVALQEVLEREGFEVCLVNARGTKNLPGRKSDVQECQWLMKLHTYGLLRNSFHPPEQIRAVRTIWRQRDRLVKEAGREVQQMQKALTTMNVQLANAISDVSGLTGQAIIRAILRGERDPQQLAKLRDYRVAASEAEIAHSLEGNWREDVLFELQQVVDAYDFHQKQMAACDVQLQRYLSALPVRHGPGTGEPSTADARSEKPKKRRQHKLQKNQPVFDLAAELQRTMGADVTAIDGVDVMTTQVILSELGPDLSTSFPSENHFTSWLELAPRRDISGGKVLRQKSRKSNNRVANALRMAAQSLWRSNSYLGARYRHLKARLGGQKAVKAMARYLACLIYRLLTKGQAYVDRGAAHFASKRAERELLGLRRKAAELGMQLVAVS

SEQ ID NO: 404345 - protein, 407 aa, unidentified
MELFVGVDWAEDHHDVCVVNAGGRVVAKGRVPQGIAGVARLHELVDLGRDDPKAPVEVVVGIETDRGLLVRALLAAGYAVVAVNPMAVDRYRDRHRVSGAKSDPGDARVLADLVRTDRHLHRPVAGDSDEVEALKLVARAHQNAIWSRRRLANQLRATLGEFFPAIIDLFDDVAQHDALAVLTEAPTPTRGRSLSRSKIAAALRRGGRRNRVEARAEQIQAALRAPALEQPEVVADAYGTVVASLVRLLQVHAVEIDRLEEALSQGFAKHPDAELLRSLPGLGVVTGARVLGEFGDDPDRYLTAKARKNYAGTSPLTVASGHRRVIRARHVRNKRLADALYWWAFNAIIRSPGARALYDTRRAAGDTHSSALRAVANRLVGILHGCLRTHTTYNEHLAWGHRSSIAA

SEQ ID NO: 404346 - protein, 313 aa, unidentified
MMATHRIGVDVGKAELWISIDGETAQPCPNELPAIRRWVRGLEGPADFALEATNDYHLALALEAHHQGHRVYLINGYRLNRYRESIGGRAKTDAGDARLLVRYLQREQDELRPWTLPPEGYRTLQKLLRRRATLVRARVMLEQSLRGVPELQANLKDLLREIGRLAAVLQRVLRETVGSAGWSDHARCCQQIEGVGPLTATGLTMAFHRGAFRSGDAFVAFLVLDVRIRDSGTKRGQRKLTKQADPALRRLLYLAAMQAKSKAAWSDYYQRCLDRGLATTQALNALARKLARVAFALMKNQTDYQPKIPCGET

SEQ ID NO: 404347 - protein, 428 aa, unidentified
MNTNDTTNTNLKADPSTQPPQAWIGLDWGDQKHSFALQERGGQIQSGTLDHSAENLHRWLKELEQRFGGRAVRLGIETSRGAVIAALLQYPWLEIFPINPVTSARYRSAFKPSGAKDDLPDALVCLELVRDHASKLRPLQPQDPQTLKLAGLVEVRRDMVDRRTTLLNQLTSLLKSYYPQALSLLENLNTPMAVALLRRWPELISLKAAKTATLKNFFYRHNVRSEELVKKRLALIAQAVALTTEEARVSVAVLQLRQLLDQLEVFQKHVPRLDAEIKSAFAAHPEAHLFRDLPGAGPQLAPRLCVAFGTNRSAYPDPASLQKYAGLAPVREKSGNQLWTHWRWNAPTFLRQSFVEWAGQTVRYCEWARFYYQRMLKKGKKHAIIIRALAFKWIRVLWKCWQERTAYDESRYLKQLIHRKSPNAVISQ

SEQ ID NO: 404348 - protein, 420 aa, unidentified
MTPDQKAAFARTFPVHIGVDTGKRFHVLVARGPDGLRRKPLKVLVNRAGFERSDAELQALFPDTARSRMLIGLEFAGHHGFTFAHFLASRGYPIVNVLPAHTKRTKELEDNSPLKTDAKDGGVICKLVGDGTFVRFPFLESPYAELRVLVSYRHRLAVEAKRFKNRLQGLLDLAWPEFVAQFSTLAKHTPIGLLERWPLPQDLLAAHKATVRAYARKISKGKFVAERFERLYESAQQTLALPQATSERRMEIQGTLARWRLVRKQMVEAEARISELLARLPSAQALLTVPEVSAVCAATILAEFGTPGDYQHPRQVLKLAGMNLVEKSSGSSQGRRRQSKRGRPMLRRQLFLLAGRWCQRRGLYRSYYEALLARNGGLKTKAVCAIARKLVPLLLAVLQRGEPFDQVRWQAARHPPALAH

SEQ ID NO: 404349 - protein, 349 aa, unidentified
MRFYTKQHKYYCGIDLHARSMYVCILDGGGNNLVHRQLKCSPEAFLGAISPYREDLVVAVECIFTWYWLADLCAREGIPFVLGHALYMKAIHGGKTKNDKIDSQKIAVLLRGGMLPMAYVYPQEMRATRDLLRRRMYLMHHRSELLAHIQNTNSQYNLPEFGKKIAYRANRTGVADVFTDSHVRKTIEVDLSLLDFYDGLLTDLELHITRTAKEHDPHSFYLLRSIPGVGKILALVLLYEIHDIARFPRVQDFVSYARLVRCPKESAGKRTGSGNKKIGNVHLKWAFSEAACLFLRNNEPAQRYHTRLVSKHGKAKALGIIAHKLGRAVYFMLRRREAFDPQKALCPAA

SEQ ID NO: 404350 - protein, 334 aa, unidentified
MQNVTLIGIDLGKHSFHVHCQDKSGKAILRKKFTRAKLFEFLGQCASATVVMEACAGAHFMAHRVADLGHEAKLISPQFVRPFVKSNKNDFVDAEAICEAASRPSMRFVQPRTEAQQAMRALHRVRESLVRDKVKTTNQMHAFLLEFGISMPTGMAVIKRLSNVLADNNLPPYLSQLLLRLHAHYLYLVEQITGIEAELAQSLSCDETGQHLMTIPSIGPITASVLSAQLGDGKQYACSRDFAASTGLVPRQYSTGGKNTLLGISKRGNKNLRRLLVQCARVFIQHIDGQSGRLADWVRAQLARKHSCVVACALANKLARIAWAITTRQTVFAQ

SEQ ID NO: 404351 - protein, 365 aa, unidentified
MSSLASPAGAIHLGMDTSKNTIVVAVLMPGEESPVIDRMWNEEGSVRHLVGRFPDRAALRACYEAGPCGFELHRLLTSMGVACDVVAPSLIPRRAGERVKTDRRDAGRLARLHRAGELTAVRVPTEAEEAVRDLVRVRAALLADRKRAQQQVNAMLLRHGRAWRGTCWTAAHEQWISAQRFGEPALASALAHYRAALDTRRAELQAVEDELAVWAGRPPLAAAVARLGCYRGIAELNGLTLAAEVAGWHRFPSARAFMSFTGLVPAEYSSGDRTRRGSITKAGSAAARTALIEAAWSYRFRPSIGVTLRRRQHDADPQTLARSWRAQRRLYGRYKTMTARGKPAAVAVTAMARELAGFVWAEMTS

SEQ ID NO: 404352 - protein, 451 aa, unidentified
MSKETKNKTKRASSLSLPVVNPDAAGIDVSATMHMVAVPAGRDTGQVKQFGAFTEDLHAIARWLQTCNVSTVAMESTGVYWKQLYLVLMEYGFKVSLVNARHVKNVTGRKTDMDDAQWIQKLHSCGLLNSCFLPDDMTESLRSLVRHRKSLLEDSSKYVLRMQKSLELMNIKVQGVLSDVMGKTGSAIIKAIIDGHREPEYFLQFVDARVKADRATIVKSLTGNWRDDQLFLLEENYALYQLLKQRVDNCDRKIESFLQLQAAPNIDGIIEVAEPATKKKKKSKNEPSFDVSSYLLRIHQVDVTSIYGISNATALQILSETGPDLSKWETDKHFISWLNLCPNNKITGGKLISSSVMKKKAGNATQAFRSAANTIQKSDHWLGDYFRRMKSKGGNKYAIIATARKLAIIYYNMVRFKKDFEPLNTEEYREKYKTAKIAYLEKQLLKLKAVG

SEQ ID NO: 404353 - protein, 347 aa, unidentified
MRFYTSQHKFYCGIDLHARTMYLCILTQEGKVVLHRDIKTKPDVFLKTIEPYREDIVVAVECIFTWYWIADLCSQENIPFVLGHALYMKAIHGGKAKNDKLDAYKIATLLRGGMMPMAYVYPSEMRSTRDLLRRRNHLARKRAELLAHVQNTNHQYNLPAIEKNLGKKGNREGVAKRFPDLCVQKSIELDLGLIDHYDQLLHRTEHEISLIAKEYDADSYFRIRSIPGIGRILGLVILYEIHDIDRFPRVQDFVSYCRLVKCAKESAGKIIGSSGKKIGNAHLKWAFSEAAVLFLRRNPEAVKYRAKLERKHGKAKSLTILAHKLARAVYNILKKKEVFHPETFFAK

SEQ ID NO: 404354 - protein, 332 aa, unidentified
MARIERIVGIDIGKETVEACIGSLGLRLKAANTPAGHRELVAWLGGHEVGKAVMEASGGYERDWAGSLRRAGIEVRIVDPKRVRHFAKAAGRLAKNDPIDAEMICRFAETFPEALGQRHDPVREELGQLVNARAGLKDIQTRLTNWSEHRQPAAARRAQAAIDRVVSAELKKLEAAIATKLRSVGELAEAAEIIESVPGLGTATAACMLAKMPELGKVSGKAIAALLGGAPYDDDSGKRRGERHIKGGRRSVRNQFFMPVLGAATQHNPVMKAFYRRLMAKGKAHKVAVIACMRKLITILNTMIARREKWDPAKHVDGGPQGVDGRRIAATA

SEQ ID NO: 404355 - protein, 337 aa, unidentified
MEYFAGLDVSMKETHICVVDRDGGVVLETMATTLPEAIAAALARAPSCQRVVLETGRMAASLYHGLDALGLPVVCIESRQAYQALKSLATHKTDRNDARGLAQLARTGFFKPVHVKSLPAHAVRALIIARKKLVGQRVTLENQIRGLAVVFGVRLPRGLSPAFAAQVIGGSQGVAGLAGAMAGLLAARNAVLKAIAAIDRDMKRLARSSAACRRLMTIPGIGRLTALAFVAAIDEPERFRKSRDVGAYLGLVPRRYQSGEVDYTGSISKVGDQRVRKLLYEAANVMLTRYRGKLALKDWALDLGRRSTMRKARIALARKLAIIMHAMLRHGTEFRAA

SEQ ID NO: 404356 - protein, 358 aa, unidentified
MNRNTGMNVGQIIGTMGGKQVIGLDIAKHVFQLHTVDMSTGEIVNVQIKRAKVLEHFANRQACLIAIEACGGAHHWARELRALGHTIRLLHAKIVRPFVSGNKTDATDARAIWLAVQQPGVKSVGIKTTEQQATLTLHRQRELMMKMRTMQTNALRGLLYEFGATFAKGRNALFKDVEAALDALSHSLPQMVADSLREQVLRIKAMSADMLAIEKRLGLQLKADKAMQRIAQIPGVGLLTATAAIATMGEASAFKSGREFCAWLGLVPKQTGTGGKVRLGGISKRGDTYLRTLLIHGARSVLSHAKEPGVWLEGLKARRPANVVIVAQAAKMARTIWAVTAKEQDYQRGFKSVRPQAA

SEQ ID NO: 404357 - protein, 312 aa, unidentified
MDNEIIIDKGCGLDVHKETVVACVMGNGIKKEIRTFSTKTNDLLRLKTWLSGLGITHIAMESTGPYWKPVFNVLEDGFTLILVNARHIKNVPGRKTDVKDSEWICRLLRSGLLSASFVPPQGIRELRDLTRYRRKLTQALSAEKNRIQKVLEDANVKISSVLSDTFGVSGSQMIEAIMKGRLSEAEMADLAKGKLKSKKEEIREALVGYFQEHHRFMIRASLEHIKHLEKLISDLDQETKKKLAQYPKEYELLQTIPGVKEQGAAAIIAEIGADMDIFPTEGHLSTWAGMSPGNNESAGKKKVERRPTAIRI

SEQ ID NO: 404358 - protein, 348 aa, unidentified
MRFYTRQHQFYCGIDLHARSIYVCIMDQSGRILVHKNLPAQPESFLQTIAPYRADIVVAVECIFTWYWIADLCGREGIPFVLGHALYMKAIHGGKTKNDKIDSQKIAVLLRGGMLPMAYTYPQGMRSTRDLLRRRMYLVHQRSELLAHIQNTNAQYNCQAFGKKIAYKSNRQGITEVFPDPMVRKSVAVDVQLIDTYDTLIRNLELEILHSARQHDPISLHLLRTIPGVGEILAMVILYEIHDISRFAEVGNFISYCRLVKCPQESAGKKTGCRNSKIGNVHLKWAFSEAACLFLRGNEEGQRYQQKLAARYGKAKALSIIAQQIARSAYAMLKGRQPFDPRRFFEHR

SEQ ID NO: 404359 - protein, 355 aa, unidentified
MQKYKVSFKGQNIYVGIDVHLKTWHVTTLTESGCKYSFAQHADAKELFDRLNKKFPEAHFKSAYEAGFCGFSAHYALTDLGIENIVVHAADIPTTGKEKAMKTDAVDSEKIAWALKRDELKGIYVKDKRYMDDTNLMRLRQRFIMDLSRQKNRTKHLLYTQGVTYPERFHNSKTHWSRNFMKWLREEVELLSDQKMSLLLLCEQVENTRKAILKVTREIRRLSVAERYKENYNLLTSVPGFGLTTSMMILTEFDNNIMRFPNERKFVAILGLIPTSHDSGDKKVSGEKINRGNKHLGPLIVEASWVAIQRDYQLGAYYSNCCQIMKPHKAIIKVARKLACRAYAVLKTKTKYELS

SEQ ID NO: 404360 - protein, 361 aa, unidentified
MNATTVAVDLAKSVFQLAVADEHWRIVETQRLTRTQFERWFANRDVRLVIMEACGSAHHWGRWLNGLGVEVRLLPAQYIRAYVKRNKTDAADAAALLEAARASDIRPVRVKSVEQQALQGMHRIRSLWMGTRTSRINALRGFCREFGIAIPVGARTGIEAISRVLADPGTAVPDLIRGTAKLLLEEIRLLEARIAQLERELAALARLSPPCTTLLSIPGIGLLTATALVAATSGDVSHFKDARHFSSWFGLTPKEYSSGNSRYLGHISKKGDRYLRMLLTHGARSVLRAAKVAEGAGRPVCGVRRWALDVQSRSNHNKAACALANKLARICYATLRDKEPFGEQTVRLGKKINRESFVMPA

SEQ ID NO: 404361 - protein, 466 aa, unidentified
MGHNRPQSRKKSKRVSPSLLERIKPNAAGIDCGSEQHYVAVPSDRDPEPVRSFKTFTADLHRLADWLQACGIATVAMESTGVYWIPIYEILEERGLEVLLVNARHVKNVPGRKSDVLDCQWIQELHSVGLLSGSFRPAAEIASLRAYLRHREKLIQGASSHIQRMQKALIQMNLQLHNVISDITGVTGMRILRDIVAGVTDPKALTAHRDHRCRASQEEIMASLTGNYRAEHLFTLRQNLELYDTFQRQIQACDAEIERLLQTLAAKQDQPNVPPPPPRTKKKPRDNEPRFDIRGPLYRLAGADLTQIDTIGPYTALQLVGEIGTDMTRWRTERHFTSWLTLAPKNKISGARLISSTTQPSANRAAAILRMCAMVAGRTSTALGAYYRRIAYRIGKPKAITATARKIAILVYRVLRGDLDYRDPGANAYEANHRDHTIRNLRNRARQLGFGLVNVETGELLQGPVS

SEQ ID NO: 404362 - protein, 431 aa, unidentified
MDTQQFEVIRPKCAGLDVHKKSVVAAVCTSDPVTLTASYKTKVFNTTNSDIAALRDWLLAQDCRDVCMESTGKYWIPIFNILEPHMHVILTHPKYVKAIKGKKTDKRDAKWIANLFRFDIVKASFIPPADIRALRELSRYRLKLSYMRTAEKNRYQNSMTISRIRIDCVLTDPFCLSATRIMDYLLSDEPFDEETCRSLIDRRVKASKDEVMDAVHGYHILEEQKFKMTHAKAHMDFINRSIGEIETELFLRSRQYDCQVRRIATVPGITELSALFILSEIGADMSVFESDRHLCSWAGLTPANNESASKKKSTRCSKAGQYLKPLLIQCALAAVRSRKEPYFAIKYQRLSKRRGKKKAIIAIARMMLTSIYHILSKGESFHPNDYEATINPPKQKPVILTIENTLQFLREQGADPESLKLIQQQCAAQVG

SEQ ID NO: 404363 - protein, 347 aa, unidentified
MVTLGGDCHKRTHTLVAVDENGQQLGVKTVSAVQAGHLEALDWAGQWRERRWALENCRHLSRRLEADLLLAGELVVQVSPKLMSGARRSAREWGKSDPIDALAVARAALRESELPVAQLEGKSRDVKLLLDHRDDLVGERTRVQNRLRWHLHELEPSFVVADRSLDRKVVLKQVGKVLARHGGVAADIAVELLEHVSQLTQRINELERQLGALVTDLAPNLLELDGCAALSAAKLIGETAGITRFKTPARFAMHNGSAPIPVWSGNAERHRLNRGGNRQLNVVLHRIALTQLRLGGRGYEYIHHRRACGDTKKEAIRALRRRISDEVYRRMWQDSVRATSSGAQAAA

SEQ ID NO: 404364 - protein, 402 aa, unidentified
MLTASLPNVPFLSFLNRNMAVMQWRAMILIQASFAASSSGRMAVPHKSTLLEDAWMNFYTQQHKHYCGIDLHARAMYVCILDEQGTKLVHKNLPTTPEAFLRLIAPYREDLVVGVECMFTWYWLADLCSQEGIAFVLGHALYMKAIHGGKAKNDKIEAHKIAVLLRGGMFPQAYVYPSEMRATRDLLRRRCHLARKRAELLAHIHNTNSQYNLPEIGKRLANKSNREDVADHFPDPSVRKAIEVDVALIDQYDQLLGEVELYLTRSAKAHDVQPFARLQSVPGIGQILALVILSEIQDIARFPRVQDFVSYCRLVKCAKESNGKRFGTSGKKIGNVHLRWAFAEAAVLFIRQSQPGKEYFAKLEHKHGKAKALTVLAHKLGRAVYYMLSREQAFDLKRFVTA

SEQ ID NO: 404365 - protein, 416 aa, unidentified
MRERSGEQRVEEVTDEPLYRDRVCGIDIGKAGLVATIRVPSDRDPARRMQETRSFGTTKREVLALADWLRCWQVPAVVMEATGDYWKGPFYRLEAEGFDCVLADAKQVKNLPGRPKRDPADSRWLAACFERGAITSCFVATPEFRIIRLHTRYRRDLTEERTREKQRAEKLLESAAIKVSSVLTDLHGVTGRDIMDHLIAGERNPKVLAQLARAAARRKISQLEEALDGAEFFTEDHAALLKVMLERIDRLSADIDDLSQVIEQLLAPYEEQLQQAESMPGWGRRAAQDAVAETGVDMTRFRTGGHLVSWAGRAPQDHQSGKRKGRAKAKKGNRYLGAITGETAVAVGRTQTREGARHRRLARRRGTAKACVATGNTQLKVYHKLLSNPGMRYQDLGADYYERQRWHLTGLRPGLR

SEQ ID NO: 404366 - protein, 400 aa, unidentified
MRAVFGIDVSKVSSEVAILVNGEKVHNYTISNDALGFARLLGDLKTVHKPEIIFEATGVYSRRLQAFLEDNGYAYTRLNPLEAKKQLDSLRVRKTDQIDAEKLAQSQFVLNRKPTYVQEEVYQELRDLSRFYQNLTEDIVRAKNRLHKVLQVTFPELETILSTPTGEQYGNLVVAFPCKDFVLDLSKDELSESIRQSTSKRISDKRVAYLAEKLIALANQSYCAVKKTSPMLEEVRYYAQELLRLSERRKAVLDQMVELAQPLPEYDILLSIPGIAETTATSIIGELGDIRRFQSANQINAFIGIDLRHYESGNFLAKEHITKRGNPYARKILFKCIHNIASASHTNPCHIADFYEKRKRQSQTTSTKPHTIASIHRLIRTMYYLIMHNKLYDYASTQNR

SEQ ID NO: 404367 - protein, 313 aa, unidentified
MSKLVTQITLGIDVSKDELVICDWDTEQISTLENQASAIKAWLEALYGPARIAIEPTSHYHLEMVEQAHALGIEVYIINPRQLAHYRIAVGVRNKTDPQDAWLLARYLAHECGSLRPFKPQCAKAQRLWLLLKRRATVVRSRTQLEQSFRQCTFSIKALSREIRHLLKRIDKHIQALIRELGWSSDYQRCLSIPGIGPLNAAALVAVFHRGAFAGSDAFVAFIGFDVRLRESGKYRGKRKLTKCGESEIRRLLYCASQPARCYRLFDDYYQQQLAKGLSKIAAKVILARKLARIAFTLLTNEQSFIKKEIAYS

SEQ ID NO: 404368 - protein, 257 aa, unidentified
MKTDPVFVGIDISKASIDVELYPASDTKRFANDEVGRKQARTWLKQRAPTLIVMEATGGFEMPLAALLATAGLPVVVVNPRQVRDFAKAIGVLAKTDAVDALVLARFAQAVRPPLRALKSEESQALEAVLTRRRQIVAMLTAERNRLSKAATPIATQIEDHIVWLHLRLDEANDNLDRLVRNSPLWRPKADLLGSVPGIGRVVVSTLLAELPELGQLNRRQISALVGVCPFSRDSGTRRGKRMIWGVTLPRFHVHQT

SEQ ID NO: 404369 - protein, 393 aa, unidentified
MIYVGIDVAKSKHDCFITNSDGEVLQGGFTIQNSMAGFLELYETICSFEPNPSSQNIRIGLEATGHYSNNLIDFLLAKNLNPVVLNPLSTNLFRKGQSLRKTKTDKSDARFITMMLITEDIKPYSPVSYHISELKSLTRHRFRLVQERTRFKISYSRILDIVFPELQGVVWATTQKSMLFMLLELPNTKAIGQCHLTRLTGLLEKNSHGRYNRNKATQIRELARNSIGSNSPALAFELQQIIRSILFLQDEIALLDKQIKSVVQEMDSPIMSIPGISYTLAAMILAEVGDVERFESPAKLLAFAGLEPATYQSGNFTASHATMVKRGSKYLRWAVLNAARLVCMRDSTFKAYRDRKQLEGKHYFVASSHTAKKLIRVIFYMLKNNQQFVAQSA

SEQ ID NO: 404370 - protein, 344 aa, unidentified
MEISTIGLDLAKNVFQVHGVDADGNVVVRRTLRRAQLLPFFVSLPPCLVGMEACGTAHHWARELIKLGHDVRQMPAAYVKPYVKRGKTDAADAEAICEAVTRPTMRFVPVKSPEQQAALSMHRARDLLVKQRTQLVNMVRALLAEFGINIPQGVRLALEMARKIVDGEAPPVPREAAKIAGRLSQQALDTHAQLREIDLDLLAWQRTNDTARRLMSIPGIGPIGATALAASVTDASQFRSGREFAAWLGLTPRQHSSGGKERLGRISKMGDKYLRTLLVVGMTSLIKGVKRKPETADPRLVALLARKPVRVATVAMANHTARVAWAIMARGETYRAGHQPRLAA

SEQ ID NO: 404371 - protein, 354 aa, unidentified
MNYVGVDIHKRYSVLVAVDERGRELARGRISGNSVHAFAQFFEALQGPGKVVLEACWNWGRIYDVLSEIEQVEEVVLAHPLKTRLIAEAQIKTDSLDALALATLLRGNLIARAHVPSKATRARKELLRQRLYWARLRTRVRNRVHAVLDRQRELEMPQCSDLFGRKGLNALSKLRLAEPDATLLSEELDLLKLIDGQIKAQEGRIVAFNANEQATQYLQSLPGMGKILAAVAAAEIDAIERFDGAAKLCAYAGLVPTTYGSGGKVHQGHLLKSRNKWLQWAFIEAAWVAVGCSSYFGGIYRYQRARGKKANIAITIVARRMCRIAFTLLKERRNFQEQHRTFPGRSAVRLTAAA

SEQ ID NO: 404372 - protein, 413 aa, unidentified
MQVVHERCAGLDVHKKTVVACVLTPEGKEIQTFSTTTADLLRLAEWLKEQGCRAVAMESTGVYWKPIYNLLEAEDFEPMVVNAQHIKAVPGRKSDVRDAEWITNLLRHGLLSPSFIPDRGQRELRELVRYRRSVVQERAREANRLQKVLEGANLKLSSVASDVLGRSGREMIKAICHGTEDPAALAALARGRLKEKSAQLQEALRGLTGPHQRFLLQEQLSHIEELESRIDRLNTEIEARLTPFAPILQLLDTIPGVGLRTAEDLVAEIGTDMGRFPSDRHLASWAKICPGNRRSAGKAKHEHIGGGNPWLRSLLVEAARGAVHRKDTFLAAQYRRLVGRLGDARAIVAVAHSILVIAYHIIRDGKPYQELGATFHEQRSQKAVVRRLTQRLEDLGFSVNLQLKEDPPTSQAA

SEQ ID NO: 404373 - protein, 374 aa, unidentified
MDKFSKYVGLDVHKATIAVAIAEANGSETRYFGEIANTPTAIAKLMTQLSKGGATLSLCYEAGCCGYVIYRQLTKLGHFCQVVAPSLIPKKSGDRVKTDRRDSMMLARLLRSGELTSIWIPDGLQEALRDLTRAREDLKHLQRQSKQQLLGFLLRHGVSGFTGKSNWTQAHFRWFETVKFDQPTQQIVFQEYVDTIRASMKRVAGIDVHIEHTAKASAVWPIIEALMALRGVSLLAAATIMAELGDLSRFTKAPQLMAYLGLVPSENSSGPNTRRAGITKTGNVHVRRVLVEAAWTYRHPARKTAALQRKAEKTSEAVQEIAWKAQQRLCARYWAFDARGKLKVQACTAIARELAGFIWAIGQAVPQAGSSVTA

SEQ ID NO: 404374 - protein, 321 aa, unidentified
MGNESTVKVFAGIDVSKQRLDVCVVPSGKTLGVGNDQAGIAQVVDLLKAQGVVLVVIEATGRYERRVTSELLNAQIKVAVVNPRQARDFARATGKLAKTDAIDARVLAQFAALEVARACEKVPENRVILEDRIARRRQVVGMLVMEKNRLEGLIDKFTIKMVKKVIEVLERQIEQLDREIARLVESDDDWRNRYELLKSVPGVGPVTASALVAELPELGQLNRQQIAALAGLAPMNCDSGQMRGKRAIRGGRASVRTALYMGAFCAAKYNPVIKSFFERLIAEGKPFKVAITAAMRKLLIILNAMVKSNQPWKENLCLKNA

SEQ ID NO: 404375 - protein, 402 aa, unidentified
MFFVGIDIGKRNHEAAIIDEQGQPIGKPIRFSNTKAGSEKLLQFINDHDLLPDNSLIGLEATGHYWLSVFSFLTALEFKVVPFNPIQSDSLRNFYIRKTKTDTIDAVLIAQVVRMDLPDQTYLPSEDIVRLKQLSRFRYSLVDQTSDLKRKVIASLDQVFPEYETLFSDMFGKSSTQLLLQSPLPEDLLEIDAQKLIDLLNEASNGRLTIEKSTEKVHQLRELAQDSFGIRVATDVYKLQIQLLLQQILLLEEQLKTIEDEMAELVAAQDQYLTTITGIGPVTAAVILSEVGDIHRFERPNQLLAFAGLDASVHQSGDFTGTRNKLSKRGSPYLRRAIWQAAFIASNRDPALSLYYQNLRKRGKHHGTAVGAVCRKLVNIIFAVWTKEKPYEVHINPDLKAD

SEQ ID NO: 404376 - protein, 413 aa, unidentified
MDVLHARCCGLDVHKSSISACILLREAGRVQKHQRRFGAMTQDLRELAEWLQQFGVTQVAMESSGVYWKPVWNILERQFTVVLANAQHIKNVPGRKTDQKDAEWIAQLLQYGLLRPSYVPCEIIRDLRDLTRMRASLSQEASRISSRIQKVLEDANVKLASVATNVLGKSGRAMLEDIISGEDDPEHLASLALGHLRVKIPQLRLALEGKIRSHHRFLLRRLLDQIEFLEHEIALLDERLEDIGRQRPELSQAVARWDTIPGIDQVAAWALLAEIGDNMAQFPTAEHLASWAALCPGNHESACKRLRGTTRQGSPWLCRMACQCAWAAARTKNTYLSSQFRRLAARRGKKRAIIAVAHTLIVIGYHLQKNQSNYDELGGNYFDRLHSDGLKRYLVKRLQQLGHKVTLEPIEAA

SEQ ID NO: 404377 - protein, 335 aa, unidentified
MPLYCGIDLHSNNHVICVIDEKDERVFEIKLENDSTLTLKSLSKYKRRLKGIAVESTYNWYWLVDALMESGYHVDLVNTAKVVQYEGLKHTNDKYDAFHLAHLMRLGILPTGHIYQKETRGLRDLLRKRMQLVQTRSAALIRFKSMIQLHSGKTIRADTIKTRKFKIPIVGDSNVQLALQSELQLIRALIDQIKLLETSILDQVEPLAQYQLLKSIPGIGDILASTIWLEIGDINRFKSPGNFASYCRCVNSRRESNGKKKGENNRKNGNKYLAWAFIEAANFCVRRCEPAKRFCEKKTTQRNNIIARKALAHKLSRACYWVIKNQEPFQLSKLF

SEQ ID NO: 404378 - protein, 373 aa, unidentified
MEKADSDEGASLKNRDKVSTKYVGMDVHQQTASVVVLDESGTELQVSTMPMRRDVIVEFFSGLQGKLQVTFEEGTHAGWLYDQLEPIVDRVVVCNPRKNALLKSGSKSDLIDARKLANLLRGKMLSPVYHGQNSFRTLKELSRTYAAINKDLTRVMCRIKAIYRSRAISTQGKSLYSKRRRQQWLELVSEQQGVKQRTEFFYQQFDALRAIRLQIRKKLVEESRKAEAAERLASIPFMGPIRVAILLGKVETPSRFRTKRQFWTYCGLGLETRSSADYVEINGQVQRSKKAVFIRGLNFNHSAELKEIFKGAATTSSIRDGVFKQYYEGLLGKGIRASMARLTLARKIAAISLVIWKKGERFDPKQVLNIQAV

SEQ ID NO: 404379 - protein, 363 aa, unidentified
MKEVYYVGLDVHKDTIQMAVLGGKGKEPVMAKGMPNDAMKIVKELGKYCEKGKVQVAYEAGCMGYTLHRTLTEFGYESRVIPPNKVFHSGEDKVKTDKRDALDIAWMLRRDEGESIAIPTKEDEAVRDIIRCRSDLQENLKSMKQRLLKFLLRKGLNYETDRYWTGKHYKWISGLQLEEKMEQLTLEEYFDEIRRLEDKLGRIDKIIEETAMWSIYAEKVKKLRAFRGIDYLTALSLVVEIGDFKRFPCAEAFMSYLGLVPCESSSGKKRKQGGITKTGNGHLRRLLTESSWHYARPNQVSKRLLKRRESVDEGTIRYADKAMRRLHEKYTRMVFKGKTKQTSVTAVARELSGFIWGVMNRAV

SEQ ID NO: 404380 - protein, 403 aa, unidentified
MNAVGIDVSKGKSMIAVMRPFGEVVASPYEISHTERELKELTRFLKSLSGETKVIMEYTGKYYQPIARYLREAGIFVSVVNAILVHDYGGNSLRRVKTDRKDAIKIANYGIDRWVDLTEYTPEEDIRQMLKTLNRQYNQYVKVKVMFKNNLIALLDQTFPDVNRFFSSPARKDGHEKWIDFAATFWHCKCISDKSENAFRERYAKWCKKHRYNYSPAKAKEIYEKASNLVSTLPKNETARLLVTQAIAQLNTIAETLAAVMTEMHRLTTLLPEYDIVMGMYGVGPALGPQLIAEIGDVRRFYAKKALIAFAGLDSPPNQSGAYESKSRSMSKRGSSSLRKTLFQVMAVILQNSPPDEPVFQYLDKKRVEGKHYGVYMMAAANKFLRIYYARTKEYLIKLDETA

SEQ ID NO: 404381 - protein, 331 aa, unidentified
MIHVGVDLDQRFCYITALDARGKKLAAGTVSNDKIALRRYFRQWGGPGVQVAVEACGFWPAFREVVEPQVERLVLVHPQRVKAIASAKLKNDRVDAETLAHLLGCDLLPESWKADRETQARRQQVRLRATLVRQRSRLKNQVHAVLHQQGLRSPVTDLFGRRGRQWLAQAKLPPRTRETITVCLRLIDGYSQEISVEARGDARVRWLTTIPGIGMYSAMLLLAEIGEIGRFRDKQALCSYAGLVPRVRESAGKAARGGITRQGSPWLRWIMVEAAQVAERTSPAAPQYVARLRRKKHPHGARVALARKLLVAVYALLHDGVVFEESEFAAV

SEQ ID NO: 404382 - protein, 355 aa, unidentified
MSQEKYIGMDVHQATISVAVMDAQGKLIMECLLETKAATIVEFIQGLQGTLSLTFEEGTSAAWLHDLLKPHVSRLVVCDPRKNALLKDGSKSDRIDARKLAELLRTNQLRPVYHGEHGVRTLKELGRSYLTLTQDVTRVMNRIKALYRSWAIPCSGTAVYAPRHRAEWLAKIVEPGVWVRAQRLYQQLDLLQPLRQAARHDLLSESHQHPAVKLLRQIPSIGPIRAALLVALLQTPHRFRTKRQLWAYSGFAVETHDSGEYRNVRGKLQRNRERITVRGLSDNYNKDLKNLFKGAAISASTRPGPLHDFYVALVAKGMRPTMARLTLARKIVTLTLTMWKKGVGFDPQNLPRQAA

SEQ ID NO: 404383 - protein, 348 aa, unidentified
MRFYTQQHRYYCGIDLHARSMYVCILDAAGTIVVHKDLRAEPESFLRVIAPYRDDMVVAVECIFTWYWLADLCAREGIAFVLGHALYMKAIHGGKAKNDKIDAHKIAVLVRGGMLPLAYVYPSEMRATRDLLRRRCHLMRKRAELLTHIQNTTSQYNLPALGKKIAYKANRVGVAERFPDPSVRASIAMDLALIDHYDALLTEVELSIVRTAKQHDANAFYRLRSVPGIGKILALVILYEIHDIRRFPRVQDFASYCRLVKCAKESAGKRLGSAGKKIGNAHLKWAFSEAAALFLRQNLAGQRYVARLTRKHGKGKALSILAHKLARAVYYMLTRQQPFDPERFLAAS

SEQ ID NO: 404384 - protein, 421 aa, unidentified
MRGIRGKRVKMVKEGTLLVTIDIGMTSNTGYCTTVDGRDTKPFKFGNTREGLDVFWSMLLTSKNRFCCSEVVVGYESTGPYAEPLVHYLMDKPVTIVQVNPMHTKRIKELNDNSPLKTDDKDPRVIADVLRLGHALSVVVPEGDAAYLRRLNNARERHVGERTALLNQLQQLVFLIFPEFKTVFNDVTVKTARHILKNYTTPERIGTLHKDELGEEIRKRSMGKFGVRQAELLISLARDTIGIKEGVAGIVLDIHHILVQLEAVNGFIAEIETEMAKALERIPCSMRILSMKGLGVVTVAGLIGEVGDFSKFRTQSEIMKLAGLDLYEISSGKRKGQKRISKRGRSLLRKILYNAAVGTIRKNGIMCTQYEKLIGRGMKRTPALIVIAKKLLRIIHAMLRDDRDYIRNYESPKRVVIKKAA

SEQ ID NO: 404385 - protein, 320 aa, unidentified
MSSAIAQTSDQITIGIDISKDRLDVHTHPEKAVARFNNDRKGHAKLITWITLRQPTRIIFEATGAYHRALEMALGKAALPAVKVNPLQARRFAEATGKRVKTDPVDAAMLARFGYTMQPAIPPARDETTDKLGELLAARRALVKDRTAALNRSKTLTLALLKRQSQQHLKQINDQIEAIDREQATILAANASLQARFDILISIPGLGAISAFVLLIGMPELGSMDARQTGSLTGLAPITRQSDNWRGKSFIQGGRATLRQAIYMPTLVAIRFNPPLKAKYLALRATGKPAKVAIVAIMRKLIVIANALLRDNRKWTLEAA

SEQ ID NO: 404386 - protein, 370 aa, unidentified
MKDFITIVGLDVHKESIEVVIAEAFGKQEVRHYGKIGGDMASLDKTVKKLVSRGGRLEFVYEAGPCGYEIYRRLTKQGYDCAVVAPSMIPKRSGNRIKNDRRDAEALARLYRAGELTTVQVPHEEDEAMRDLVRGRQDAVKGLRTARQQLGAFLLRHGIRYGRKTSWGPAHMRWLADIKMPHAAQQITLQEYIHAVRERTDRVERLTGEILKLLPQWQMAPVVEALQALRGVAPVIAVTVVAEIGDLSRFENPRQLMAYLGLVPSEHSSGGMVSRGGITKTGNTHARRVLVEAAHAYRYPARVSRPLLKRQEGLTQPIRDIAWKAQVRLCGKFRRLLGRGKATNTVVTAIARELAGFMWAIGQQVQKLNA

SEQ ID NO: 404387 - protein, 345 aa, unidentified
MELQTIGIDLGKTVFHLVGLNRCGEVVVRKKFSRKQLLHFTANLQVELIGMEACGGAHFLGRALQEQGHAVRLMPAQYVKPYVKTNKSDYIDAEAIAEAVTRPRMRFVPIKSDDQLDLQSLHRVRERWVMRRTAVVNQIRGLLLERGITIRKGRCHVDAALPGILEDASTKLSGALRLLLAQLRLELDHLQTRIDEADAVIQQTAGENEACRRLVAIPGVGPVTATAIIAAIGNGAAFRKGREFSAWLGMVPGEYTTGGKQKLLGISKRGNTYLRRLFVQGARAVLQQSAKQSSGLSAWLTQLTARTHPNVAAVALANKLARMAWAVLAKNEPYRPPVLADAATD

SEQ ID NO: 404388 - protein, 340 aa, unidentified
MEQISMIGIDLAKNSFQLHGARTDGSVAFRKKLSRGKVLEFLELQPRCAVAMEACASAHYWGREIGALGHSVKLISPQYAKPYVKRGKNDAADAEAICEAASRPTMRFVAVKTAEQQGRVMLFRTRDLLVRQRTQTINALRGHLAEFGVVAAQGPAHVDRLASALEDPDSGLPEAVRELGSLLFEQVGGFKAKIERLEKDIHASARQDAEARRLMSVPGIGPITAMAIQAFAPPMEGFRRGRDFAAWLGLVPRQHSTGGKPRLGKISKMGQRDLRRLLITGAMAVVRWAVRRGRTSDPWLARMLMRKPRMLVAVALANRMARIVWALMTKKESYRAPAAA

SEQ ID NO: 404389 - protein, 404 aa, unidentified
MEVVLERCAGLDVHKKTVVACAITLAGKETRTFGTMTDDLRRLGDWLQERRISEAAMESSGVYWQPVFNVLEEMGLVLLVANARHIKAVPGRKTDVKDAEWIAELLRHGLLRPSFIPDRAQRELRELTRHRRSLIQERSQVRNRIQKLLEGANLKLTGVITDVAGVSGRAILTALASGMTEPERLADLAHGSVQHKREELVRALSGAMGDHQRLLLQSLLRQLDFLDAEIAALSEEVAARTVPFQEAIDRLDAVPGIGRRNAEDILAEIGTDMSRFPSAAHLASWARLCPANHESAGKRRAVSTGHGNRWLRSSLTQAAQAAAHKRDSYFRAQYQRLSARRGKKRAAIALAHTLLVVIYHLLAQPQPYRDLGALYFDERTQQATINAAVRRIERLGYKVTLEAA

SEQ ID NO: 404390 - protein, 412 aa, unidentified
MTAKDQFAAHVGLDWADKKHDVCVQFKNGDRIFHVIEHTPEALDSWLNELHQRAKGRIAIAVELKKGPVVYALQKYPFVTVFPVHALSLARYRQAFWPSGAKDDPQDAELALDLMLRYPHKIKAIEVDNPDIRLLQQLVEQRRLLVEDKRRFVNRLINTLKQYYPQPLEWFSHRDSSLFCELIIRWPSLQQLKRARSDTVRHFMNAKGGPAVAYTEQRVASIASAIPLTTDKTVIEANALMATALASQIKLTGDLIRTYDERIESLFDTLPDAELFKSLSGMGPCMGPRMLAALGDNRDRFNNAEEIQNYAGIAPVTERSGQKSWVHWRWQCSKFVRQTFVEWTAKTVNSSYWARLYYQSQREKGKSHQSAIRALAFKWIRIIYRCWKTRTRYDEAKYLLALEARKSPLLKP

SEQ ID NO: 404391 - protein, 412 aa, unidentified
MDVLVERCAGLDVHRDSVMATVRLPAKRRRQREQRTRGFPSTLGGQQALADWLEGFGVTLVGMEATGIYWRTVFDALEPRFRCWLLNARHLRNVPGRKSDVIDSAWICQLVEHGLVRPSFVPPLEIRRLRDLTRLRKTQIAERTRVIQRLEKVLQDAGVKLTSVASQAYSVSARAILEALLAGVTEPAQLAELVRGRMRAKIPLLQEALRGRFDLAHHGVLVGSLLSQLDSLELSIANLDQRIVDQTEPLAELVELVCTIPGVGLRTGQVLIAECGVDMSVFPSAAHLTSWAGICPGTNNSAGKRYSGKTRRGSKWLRQALSESAQAAARSKGTYLASHYAQIRGRRGPHKAIGAIRHDILVAYYHIVRDRLPYRELGPDWLARRYSPEHRARRLLRQLEALGFNATIEAAT

SEQ ID NO: 404392 - protein, 455 aa, unidentified
MPKKTTGGRPELKAVNVGAAAIDIGSKMHMAAVNPASTDVPVRSFGTFTQDLHDLADWFKACGVMSVAMESTGVYWIPVYEILEQRGFDVILVNARYAKNVPGRKTDVSDAAWLRELHSYGLLRGSFRPDAEIATLRAYLRQRERLVEYAAAHIQHMQKALMEMNLQLHHVVSDITGATGMRIIRAIVSGERNPDVLATYRDVRCHSSIETIRAALVGNDRHEHVSALTQSLELYDVYQAKMLDCDRKLEVLLAGLNDRGAKPVGRLSKPRIKTKQVNAPTFDVRTTLYGVLGVDLTEIHGLGPSLALTLVGECGTDLRAWPSAKHFTSWLCLAPGNKISGGKVLSSRTRRSSCRAAALLRLAATTVGRSDTALGAFYRRLSSRAGKSKAVTATARKIAVLFYNTLRHGMSYKDPGADHYEQQYRSRVLANLQRRAKSLGFVLQAIPEHANPAVS

SEQ ID NO: 404393 - protein, 389 aa, unidentified
MRFVGIDIAAETHVVAAVNEAGEMIFKPTAFTEDADGYRRLRELLGPPAATLVAMEATGHYWRNVFAVLAAEGFEVALLNPLRTHRYAGEDLERTKTDAIDALSIARFASEKRPAVTRLPENATQELRELIRHRDRLVQDFGDRTRQLHRLVDLGFPEFTRHVRRLDSALATAILYAYPTAHAFHGVGVRRVAKLRYDLRQVVGTELAHALIEAARVSVGQHHGAAYQLQVRHVCEDLDRWRGRLRELDRNIEAKLADHEVGSLLTTINGIGPHTAARIVAELGDPASFRDARALAAYVGVVPALRHSGKRRPYARLSPQGHARLRAALWMPTLTAVRTNPWLRQHYQRLLARGKARKVALVTCMHKLLLAVYSVARSRTPFVPRPQTP

SEQ ID NO: 404394 - protein, 405 aa, unidentified
MDVIIERACGLDVHKDNITACIMTTEGKEIQTFSTKTVFLLKLLDWIKENNCTHVAMESTSVYWKPIVNLLESEGIEFLVVNAQHMKALPGRKTDVKDAEWIAKLLRHGLLKASFIPDRNQRELRELVRYRRSIIEERARQHNRIQKVLEGANIKLGSVVSDIMGVSSKDMLRAIADGEDDPEKLANFARRTMKKKKEELELALQGYVNPHQRLMLKTILTHIDFLSEQIEMLDQEIAQRVSSYQEDIERLDSIPGIATRMAEQILAEIGTDVGNQFPTAAHLCSWAALVPGHNESAGKRKSSRSKKGNKYLRSALTEAAQSVRGSKNYLGALYRRTAGRKGKKKAAIVVAHAMLRIAYYLLTRKEMYVDLGEDYFDKQRQVSIVRHSVRRLENLGYTVTITEAS

SEQ ID NO: 404395 - protein, 335 aa, unidentified
MSETNIIAAGIDTGKHKLDVAINGDRKRWQFDNSATGISDLVRLLRRRRVNRVGIEATGGYEREVVIALRKAGLAVVLLQPLQVRGYAQAVLCRAKSDRIDCGLIADCVAHREVIRRDPDPRLVPLADLLTFVEQTEEDIARCKVRREHAHSPEQRRLLEVDIKRFTKRRAQLIAKLQAMVAAHDDLARRHDLLLSIDGIGERTALAMLIRLPELGQITREQAASLAGLAPFVHDSGEHKGERHIAGGRHRLRRSVYAATIPAAFFHNHQLIAFYRRLVAAGKPPKLALIACARKLVIYANTVLARGTPWAKQNVFSISDAACQPDPGAKPRSSS

SEQ ID NO: 404396 - protein, 318 aa, unidentified
MTWWTVAIGVDTHKQAHVAVALDRLGRLIDSLTVPATMVGYRQLLVWAHGLGQPTFGIEGCGSYGAGLARFLTDHDETVFECERPRRHERHGDKNDLIDATLAARHVISGDGLSLPRGSGQREQLRVLLLERRGAVRARTAALNQLDAAIMTAPAELRQRLDGVPKRRLVMTVARLRPRPDGVTQVLRRIARRIQLLSSEITEIDQTLDHLVAATAPDLLTECGVGPVCAAQLLVSSGDPARMTTEASFAALAGTNPLEASSGKQRRHRLNRGGDRQLNWALHVIALQRVHHHDQTKAYYQRLLADGKTTKEAKRCTP

SEQ ID NO: 404397 - protein, 377 aa, unidentified
MKRVKFVGLDVHAETIAVAVAEQNGEVRSLGVIPNREDSVRKLVRKLGPVEEPRFCYEAGPTGYVLYWQLTRMGAKCEVVAPTLVPVKSGDRVKTDRRDALKLARNYRAGELTPVWVPDAAHEALRDLVRAREAAKKDELRARHRLNKFLLRQGRRPPMGVKLWTIKYLEWVKREVHFEQMAQEATLLDYLHEVEHAAARIMRLDGAIAEAVKLAPPKMRAVIEALQALRGIAHVAAVTVVAELGELSRFARAKQLMGYGGIVASEHSSGERTRRGGITKTGNAHLRRVVVEAAWTYRHRPAVGTSLRKRQEHVSEEVKEIAWKAQQRLHQRYKKLLANGKNKGVVVTAIGRELLGFIWAIGIKVEAAQKESLQRAA

SEQ ID NO: 404398 - protein, 339 aa, unidentified
MLIIGCDYHPSFQQIAFVDRETGECGARKLTHKEEAESFYRDLNGRSVRVGMEATGHARWFERLLAEQNFELWIGDPAEIRAKRVRKQKNDRQDAEHLLQLLVEDRFPQIWVPSPENRDLRQLLWHRHRLVQMRTRVKNQVQAIALNEGIRRKKGLWSKLGRVQLESLSLAPWSARRRQDLLELLDRLNPKIDELSTAIQQAAEQRPEVQRLMTHPGVGPITALAFVLILGVPERFQCGKQVGSYLGLIPCEESTGGRQRLGHISKQGNTLLRFLLIESAHAVVRYDPDWRRRFLHLAMRRGRPIAKVAMARRLAVRLYWMWRKAWDYQQTLKFGSHVG

SEQ ID NO: 404399 - protein, 291 aa, unidentified
MMIIGCDYHPGFQQIAFIDTETGECGEHRLPHREETEKFYRDLAAQGMKVRVGMEASGHAHWFERLLAELNFELRIGDAAVIRTKRVRKQKTDRQDAQLILQLLMEDRFPRIWVANWENRDLRQLLWHRHRMVQARTRIMNQLQAVALNEGLRCKKRLWREAGREQLESFSLAPWASRRRRDLLEVLDRLTPTITELSQAIEQEAEKCPEAQRSRTHPGVGSLMALAFVLIIGGAERFHCGKQIASYLGLVPSEESSGDRRRLGHICKQDNALLRFLLVEAAQVTVRSLPE

SEQ ID NO: 404400 - protein, 391 aa, unidentified
MLYLGIDIGKNTHVASLIDESAKSLFKAFSFSNTTDGATSLIDKLSFHAKSVSEVEIGMEATGHYWLSAYSFLVECGYVVHVLNPIQTDGWRKGVEIRNRKTDAIDSVLIAELIRYGNFVETSLADENTMSLRNLSRFRNYLVSSISDLKRKVICVLDQVFPEYQSVFSNIFGETSKELLLHFQTADDFNNITAEQLKNALENISFKGFAKNKLSKISELAANSFGLSFCRDSFSLQLKLLIEQIKFIEAQVDDVESEIKQILIKINSPITSIPGVGSVNAAVILGEIGDINRFSNPSKLAAYAGIDATVNQSGEFKSQNGKMSKRGSPYLRKALFQAALIAAFHDPTFSAFYQKKRSEGKHHLTAVGAVARKLCNIIHAVLISNSPYRIQ

SEQ ID NO: 404401 - protein, 505 aa, unidentified
MNNLAATVPAIPGKTVGGSFAAASLRSAPPHPARVWSRKPATPTARVQKSERTTPREGHRIRLTMNRVIPTSAAATKKKESPQMKTWNEITHFAGFDWAKDHHDLLVLDNTGKIVAEFRFNHTASGWTLCREKLAQFPQLAIAVEAGHSAAIERLVALGYRVYPVHPRSSKSYRTRKLPSGTKTDHADCWALADALRLEGESWRALTAPEPLVQQLRLLCRDEVALIEQRTALVNQLQQALYEYYPAALEAFEDWCAPSAWAFVERFPTPQVLVRAGKRKWQNFLHAQKLFHPEWNQKRMEIFAKADQFCGSEANVTAKSVLAVAVVKLLQTLEAQIARYRALITERFKQHPDYAIFASLPGAGPKLAPRLLGELIALKPLAETPQALQCLAGMAPVSYQSGKVSVVYLRYQCNRFLRATIHLWVDLSRHYCDWARIYYEEHRKKGQSHACALRCLGMRWLKIIAAMIRNQTPYDAAIHTRNQLQHGSWVLQLQPVQIVKGNTHD

SEQ ID NO: 404402 - protein, 368 aa, unidentified
MEKDTTYVALDDSKRTIVVGILRPGAEAPELHEIVNDPRQIRRLFERLKREGPVKACYEAGVSGYDLHRQLTALGVECAVIAPALTPRRPGQRIKTDRRDAAKLVRLFRAGELTAIHVLAESEEAVRDLVRCRDDLRRDVLRWRHRVLKLLARHGRAYLSGKNWSQGHWRWIREQRFDLPPLQRAFEATVFALEQALARQAELDQELEVVAGTAPYREPVGWLRCFRGIDTLSAIILLAELVDFQRFRRPRALMAYLGLVPSEYSSGQSQRRGALTKAGNSHARRVLVEAAWHYRHRPTIGRALAQRSQGQPPEIVGQAWRAQQRLHRRYRHLVGHGKRPPIAVAAIARELVGFIWAAMTRHESRWAA

SEQ ID NO: 404403 - protein, 412 aa, unidentified
MKEQIYVGIDLAKGDSKVAVVDDSGEAIFKPFNITNSKEGIRKLLSKLSSYKTGQIVCGMEVSSNYWENMCSYLKEKDVTPILLNPYQVKKYRQAMGFKIKTDPIDAIAIAGLICGRKYESLYISDDSMMELRELVRIKYSFQRRVKDLKKSVLSLLYLVFPEYSKIISYPFSKVSIEILSKYPTSRHMAKASVSKLVKIFRRYQGCNFNLDKAKDLISAAKDSFYSGKASRSRGMTITMQLDEISSLSLKVKDIEDEIRSILDPGGPEGGSSAYNILNSIKGVGIGTIATFIGYVGDVTRFSSSDKLISFIGFYPKIFESGKYRKKNPTIQKAGPKELRYMLYLASVACIKHNSQLRKYYHDKVSAGMPAKKALIKVAVKLARMMYSMLKHKTEYESSRVFMQSLPLKKAA

SEQ ID NO: 404404 - protein, 395 aa, unidentified
MGSTATPGPEPVVIGTDPHKRSATIEVMTAEEDIAGGGRFGTDRDGYAAMLAYGRQWPDRVWAIEGCAGIGKHIANRLLADGEDVVDVPPKLSARARVFATGQGRKTDATDAHSVALVGTRMSGLRPVVNDEQLAVLRILVDRRRSLGEDHTRMVSQPHQLLLELIPGGAKKDLSARQAKALLAKVRPRDAAGKTRRRVAAELISDLERIYARKKAVNKELTELLTATGTSLLDLPGNGPSGAARLLVEVGDITRFPNKAHFASWNGTAPIDASSGDQVRHRLSRAGNRQINRVLHIMARVQIRSCHEGRDYYERKEADGKSPMEAMRCVKRRLSDLVYQQMLHDALAQTTGPGGQQGNDSDSSATGSHPHTGSSDKPLPGPATSQPKTPLRRAG

SEQ ID NO: 404405 - protein, 334 aa, unidentified
MSNVTTVGVDLAKQVFSVHGVDERGGVVLRRTVQRSKLVALIAQLPPCLIGMEACSGAHEWARQFERWGHTVRLMAPRFVAPYRKSGKNDDNDAAAICEAVGRPSMRFVPVKSLEQQAVLAQHRIRQGFIEERTASINRIRGVLAEFGQVRPQSASAVRCGLAARLEHLPERVARGLEDLLAHVRLLDERIGAYDRQLKQHARTEPNAQRIQALNGIGPISASAIVASVGRAAEFGNGRQFAAWLGLTPRQYSSGGKTRLGHITRRGDPYLRTLLIMGARAVLQSAARHTDRLSRWALALKARRGYHRTCVAIAAKNARILWVLLARGETLRMA

SEQ ID NO: 404406 - protein, 406 aa, unidentified
MNYLGIDVSKANSRYVFLDNDGEKLVKPFTLDNGHNDFNKLLDRLKELTLLPDNLLIGIEATGIWWENLYSLLTEHKFKVIVLNPHQTNKFREALRIKAKTDDIDAYVIAGLLRSGEYASSYIPEESIQCLREITKLRFELVKDRQNYERQTNALLGLLFPELTQTAIKNPFAVSSMAILKAYPTAKHLAEAKPKNIEKIVRSIKGNNFNIKEIQLLIETAQKSIYSGRAKHDRGLNLIILLTQVESLQNAIAQLDERTNNILSPSDSNDANSFPGANLLSIPGVGPKTLAAILSAVGSDGQAFPDGKHLIGHIGFFPKIYESGETRHDNTMSNRGPKYLRAALYMSAVACLKHNPEFKALYDRKVSQGKTAKQSLVYVAKKLAHLCLSMLKSGESYNPSRVFMPA

SEQ ID NO: 404407 - protein, 344 aa, unidentified
MTKIITVIGLDLAKSVFQVHGIDAEGAVVVRRKLSRSRVLAYFSKLEPCLVGMEACATAHHWGREIRALGHEVKLMPPQFVKPYLKSQKNDMRDAEAICEAVTRPTMRFVPIKTPDQQALLALHGVRDHWVRLSTRLINTLRGYLAEFGIVASKGRMGVEAILDTLADDQDDRIPDLARECLRPLASELRHVKRQILETDRKIMKAHKANAICQRLETIPGIGPIIATRVVAEVSDPAMFKSGRAFSAWVGLVPRQHSSGGRERLGSITKKGNSELRRLLVAGAMSMIIRAKQLGFTRHPWLSRLLERKPMMVVAIAMANKMGRMIWALMVKGEKFNPAKLMPA

SEQ ID NO: 404408 - protein, 370 aa, unidentified
MNSIVYLGMDVHQNSYNLCAYNGYTGEILGETRCSSDIKFVLKFIENVKKNYGEDIQIKAGYEAGCLGYVPYKQLTNHGIDCDILAPTTMYRSSKNKLNKNDKLDARNIATNLANGTYKSVHVPNEDDLAVKEYIRMMDDAKIARKKVKQQINAFTLRYGLHYQGKSKWTIAHVQWLRDIELSPLLKETLDERLALYDSLCDKIERFSERLKELSHHESYEKPVSQLRCLKGIDTTSAMTLHVEISDFFRFSTAQKFSSYVGLTPGENSSGDKTQYLSITKQGNATVRNTLIECAQALVKGTIGVKSKAVKQRQKGQEAAVIEYADKAVERLQRKYRKMIKRGVNHNKAITAVARELACFVWGMETGKIY

SEQ ID NO: 404409 - protein, 353 aa, unidentified
MVTIGADFHKRTTNFHVLNEQGECIKRAKVINETPKLREFLESLPENRTLAIEATRSWGMLYEHTKDLVDHFYLGHPKKMKALTSSEMKNDKNDAEMIAKLTFGKLLPQAYVSSEMIRQLRGVLRLRSFLINQRRGIRNQIQTLLDRNLWPTERPTSFKSPFCKRGLSWLSNLALPEKERFILDQSLQTFGEINTKINSIDEFLVSQNHDLPGLKYLQTTPGFKSGGINAYILLLEISDISRFEKSKGLVYYAGLLPRQYSSGDKQRLGSLVKRANMHLRTALIESTFAAIRQNKTLKEYYASVKKNNGSGAAVIATARKLCCAVYYVLKEQKPFDPKFWIPSTTACHPLASV

SEQ ID NO: 404410 - protein, 531 aa, unidentified
MGAGKLGRPRSGAFEPAPEFGLRGLEISVLVSARCPNSEGIPISRVDAFHSAPAQRPLEILEESPMRQIEISTRRERRAATRAAARGEVFPLVRPNAAGIDVGSRVHYVAVPPELGEPVRAFDCMTADLREMAIWLKTCGVRTVALEATGVYWIPVVEMLEDHGFEVYLVDARQTRSVSGRKSDVQDCQWIQRLHSYGLLAPAFRPEKSITVLRSYWRQRQGLVVSCSEQIQLMHKALEQMNVQLHKVLSDVTGQSGLRIIRAIVAGERDGEKLSALCHRGIKCSRGQVARALEGHYRPEHVFALSQALEAHDFFQRQLQACDQVLEAEIATVPSRHTEPNRQHPDRPPRAKRRKNQPYFDLRAELHRLAGVDLTRVEGIDAMTAFSVLSETGMNMTRFPSEKAFASWMHLCPNNRVTGGRVRSRRVMPGTNRAGQALKLAAQSLHHSKSALGAFFRRMKARLGPQKAITATAHKLARLIYRLLKYGDAYVTQTEAQYQELTRRRTLRELTSRARRLGFALVDTASGEVVS

SEQ ID NO: 404411 - protein, 454 aa, unidentified
MCLEDRPILEQNAAGIDIGSREIFVAVPPDRDQNPVRVFATFTETLQELAAWLLKCGVTTAAMESTGVYWIPLYDILEQHGIKACLVNARHMKNVPGRRTDWHECQWFQFLHSVGLLRSAFRPEVEVCAVRTLIRHRSELVQAASQHIQHMHKALTQMNLQIHHVISDLTGVTGLAILDAILAGERDPVTLAQFRDPRIKATEETIRKSLVGNWRREHLFTLKQSRELYQIYQQQIVACDQEIESLLNQFTPRVDPTEKPLPPDRKRNRAARKRRMKTGNPDTTFDLRTEAYKLFGVDVTQVPGVETIALPLFSEVGRDLSKWPTGRHFASWLALCPDNDISGGRVLWRGMRKVNNQAGRLFRLAAYSLHHSLTPMGNYLRRMKSKIGPAAATTATAHKIAIVFYTMVKNQIEYDETIWATRDIKRQKHFEAKLKRQAKQLGYELVPIGEKPAA

SEQ ID NO: 404412 - protein, 364 aa, unidentified
MIFLGIDLHSNCFTCCFIYDDGKKLKVAFQLNAESLLDFFKLLTLNTYVMVEASTNTFKFVELIKAKVKEVYVANTYKLKLISLVKKKTDKIDAEKLAIILKMQITSNEELIKSVYLPEQTVQDLRSLFTTYSLIKKQITQIKNRIHAIFKQNLHPFTREKIFSISARNEIKKIELGEVADYQIKYLFEVLENLEKKFNEIDESIKVIGQKYYKEIDILTSMKGISIITAIAIIADIAEVKRFPNSKHFTSYLRSAPGVDSSNEEVRITKTTKHGRKLSVSLLSQSLNHFRDNNIKIKKWYNKKVEVESHKRGKIRMGICRKVFAEIYQMLKKGEYHYFMDAENHSKKMNEYDLFCKRSEYVMT

SEQ ID NO: 404413 - protein, 344 aa, unidentified
MQVITFGIDLAKNVFQIHGVDAAGHTVVKKQLKRDQLAPYFANAAPATIGMEACSSAHYWARKLQSLGHSVKLMAPQFVKPYVKGNKNDANDAEAICEAVARKSMRFVPIKNVEQQALLSLHCVRQGFVAERTAYANRIRGLMGEFGFVIPQGIHHISERVHDLIEDASNELPGLFRVTMEWLLEHFKELHRQVRELELQIQAWHRSNDASRKLEAIPGIGPITASALIASIGDAKNFKSGRELSAWLGLVPRQHSSGGKQNLLGISKRGDMYLRMLLVQGAHAVINACCRKGVEAGWLAGLLKRRNHNVAAVAVANKNARIVWALLARERQYETGYIRDTALV

SEQ ID NO: 404414 - protein, 343 aa, unidentified
MNKLNVIGVDLAKNVIQVSVLSPSNRELRNSALTRRKFTEFLGRQRSSLVAFEACATSHYWARVAQRYGHEVKIIPAKAVFPFRQGHKTDENDALAVAEAARRPNVKLAPLKTVEQQGMQAVQRSRELLVHERVSLSNHLRGLLMEFGIVIPQGFASLYRQLPEILEDGENELPDLYRPTLNLLYRRLCALRNDLEQLNGEIETLVRQNPMCQRLTELEGVGPISSVLLYATLGTGEAFVNGRQFSAYLGLTPKQFSSGGKVNLVGISKRVANKRLRAVLIQGARAYVYHMKEPKTTKDRWLWAIVERSGKCKAAVALANKNVRTAWAMLTQNTEYHRYPLAT

SEQ ID NO: 404415 - protein, 433 aa, unidentified
MTEPEEISTSEDLVDRVAAIDVAKATGMVCMRLPHASRPGRRVQEVWNVAATTNAILELGDRLVCQGVTRVVMESTGSYWKPFFVLLEARGLECWLVNARDVKNVPGRPKTDRLDAVWLAKLTERGMLRPSFVPPKPVRQLRDLTRTRTVLLQERTRHKQRIEKILEDAQIKLSTVVTDIFGVSGRAMLEALIAGERNPRTLAELSRGRMNAKRPRLIEAFTGGFEDHHGFLCRTLLDTVDHLTAQVDRLTERITAAIEGLPGPDGEPGLGPSLVQRLDAIPGIGPTAAQILLAELGPDMRVFPTADHLAAWAKLTPRTVQSGASNASRPTGKGNPWLKGALGEIALAASHSDSFLGARYKRLVKRRGKPKALVAVARSILVIVWHLTNDPDAVYTDLGADYHQRLIDPARRTRDLVRQLKALGHDVTLAPTA

SEQ ID NO: 404416 - protein, 410 aa, unidentified
MAERFVGIDVALREHRIAVLDRDGEAVGPSFTIAASPDGVAKLLRTLAARGAPAAQTLIGLEASGHLWENLEAVLVGAGYRVIVLNPLQTRRYRDVVRRKAKTDDIDAHVIAGLLRSGAAQASYVPDEPIQSLRELARLRARLMADRQDYLRRLVAQLDVVLPEHHAVLGDLLTARARGILAQFPTAQHLATATPRAIRRAAADAGARGFALDDATGVRDSARRSLYRGKAAAARAHVVRTLVSQLERLTTSIDEVDRAATTLLPPSEPGTGPSDAELLQTIPGIGPQTAATLLGELGTLTRFTDARALVAYVGFYPVINQSGNRAATPRLSPVGSRIARHSLYLAAVNAVRRSGAWRTIYLRKKAQGKTGKQALVVVAVKLLHAVYAMLKHRQPYNPSRLLVAPATIGA

SEQ ID NO: 404417 - protein, 327 aa, unidentified
MMFIGIDISKEKIDLSWLRDQLTNKIKTKVFKNKRQDFLAIEKWLLNTTKRAASELVITLEPTGVYHEALMYFLHEQGFNIILANTGKAKKYADALNIIHKTDKSDATMLAHYGSAKHAVVDYWQPEALEVRELKALVRRLDALESNRQREANRLEASEFSNVSARVRQSIKVTIAFLDDEIKQLKSDIDDHIDNEPGLKRNRKLLESIPGIGPVLSRELTYLFAAKKFNKAKEAAAYCGLIPRHNESGKLKGRTSISKLGPARIRCKLYMAAIVAGQWNKRIKRHKLTLINNGKTPMQAVCANMRKLIHICFGVIKNQEAFKLQES

SEQ ID NO: 404418 - protein, 362 aa, unidentified
MPMLAELIDAVVGVDTHRDTHEVELALPTGTAIGTRKISNDNSGFAELLAWILDHAPGPRVVVSIEGTRSFGVGLARAVAAAGLTVIECEQPNRKARRGKGKSDPIDAHLAVLAALRLDADRLPIPRADGDREALRILLGTRHELTVVTTAQTNRLRALLLGGGDTDRDRARATLTDPVLLAMVRRREPPQASREQAVRHGEIRRLAHAVRAGRHALAANRAQLQAIVDQIAPGLTERRGIGAVTAAQAIVSFSHPGRCRSDAAFAALSGTSPLQASSGKTVRHRLNRGGDRALNSAIHTIAVTRMRCCPTTKDYVARRTAEGKSSREIQRCLKRYIARQLYRALNASTTLTAQISAPPAAA

SEQ ID NO: 404419 - protein, 344 aa, unidentified
MSMIKVVGIDIAKSVFQVCVWMVDGSVAWNKKISRSKLLDTIRQFEPGTLVAMEACATSHFWGRTISSMGYCVRLIPAQHVKAFVRSQKNDANDALAICETALRPGIHFVAVKTTEQQDIKALRNTRQLMVEQRTALANQLRSLLAEYGVSLPAGILHLQQQLPEVIEDASNELTFTLRRLLYSLREDMQALNERVTGLDKEITALSSQQTAYRHLLTIPGVGPLIAAAFISEVDAGQFSSGRELSAWCGLVPRQHSSGGKQRLSSVTKNGNRSLRTLIIHGARSVMRCVKKRDDCMGLWLQRLEARRGFLKTTVALANKLTRIIWRVLTDQVDFNMSKAFSMI

SEQ ID NO: 404420 - protein, 344 aa, unidentified
MVTFGVDAHKRTHTIVVIDDHGKPLGQTTIGTTSKDHLGLVQWAARFGAERRWAVEDCRHLSRRLERDLLGAGEQIVRVPPKLMAHVRDSARTYGKSDPIDALAVARAAQREPDLPAARLDGPERELRLLVDHRESLVAERTRAICRLRWHLHELDPGWEPKARSLDAQRTLDEVQRRLDDQSGLVARLARELTSRCAELTVSIKSLEVEIADLARQLAPTLLAIPGCGTLTAAKILGETAGVERSKSRDAYARHNGTAPLPVWSSNKARHRLSRTGNRQLNAALHRIALTQARWHPPAQAMIERRRSAGNSGREAMRILKRRLSNAVFQALRTDQLEQLSPAA

SEQ ID NO: 404421 - protein, 354 aa, unidentified
MDATTVAVDLAKSVFQVVEADAQGRVVGSHRLTRTQFERFFGNRQTSQVVMEACGSAHHWARSLGRQGISVRLLPATHVKPYRLRNKTDAADCGALLQANNDPRIREVRVKSIEQQALQALHRARSQWMASRTQRINTLRGYCRKFGVPIAVGAQTGLQAIRRQVADPRSPLPALLRPTMQMLLVEISQLQERIAQIERDLREVVRQSAACQLLLSIPGVGLLTATALVAAVGTDVTQFRNGRQLAAWMGLTPREHSSGSTRRLGGITRAGDRYLRTLLTHGARSVLQAAARAQAAGRDCTGLKGWALAVRQRTNQNKATCALANKLARICFATLRHQQPFDPERACKMAASAS

SEQ ID NO: 404422 - protein, 368 aa, unidentified
MVEKGKSNFGDRSMSNTIVAGIDLGDTESLTTVLSPSGDVTDRFSFAMNEEGYRFFASRVPRDARIAFEATGMAYPVSRALKRFGYDVTVAHPKELAWIVRSKKKNDRVDSLKIAKLHMVGMLSESHLLSRDEQIARDLLIQRVKLGVEVGGLKNSITSYLKREDAYQPLPQTSDRFSDARRHAILSLKFNDDRDLVLKTMMERLQFLENQCIPLDDKIRKTAKRSDDVKLIMTIPGVNFYLASLISSFTGDVNRFPSDDHLASSFGIVPVTRDSAHIKRRGRMSRDGPSIARWTLSVMVDNVMKYNEPIREYYDSVKRRTGSGRMAHVATMRKLTRMLYHMLKTRQHWKWERKQLTGRKLSNLGGEA

SEQ ID NO: 404423 - protein, 353 aa, unidentified
MAIVVALDVHRKQITYKTLDRETGEVERGRIAPAARAEVRAWLARFAGCEAEFALEGTTGWRFVVEEIERAGHRPHLADPAETAAKRGRKRRAKTDSADCDLQLRLLCAGELPESWIPPAHILELRTRVRMRKTLIDQRTAWQQRLQAQLFHQGVPAGLRPRTRAGREALARAELSPVGRELVSLALRMIETIDRELAPLDRDLHAFARRQPGCRALIARLYGVGPVSATAILAELGDARRFARSDDAVRHSGLDVTVYQSDLKRAPGHLSHEGPELLRWALFEAALSAARAGSPDHAYYLQVAERIDHNRACLSVARKLCRRAHHILRELGDEALAPVEGDPHAEEAIAAAA

SEQ ID NO: 404424 - protein, 400 aa, unidentified
MRAVFGIDVSKTSSEVAILVNGEKVHGYTILNDAIGFNRLLGDLKTVHNPEIIFEATGVYSRRLQAFLEEYSYAYTRLNPLEAKKQLDSLRVRKTDKIDAEKLAKSQLVHNRKPTYVQEEVYQHLRDLSRFYQNMTEDLVRTKNRLHKVLQVTFPELENLLSTPTGEQYWNLVMAFPCKEFVLSLSQSNLCEIIRQSTSKRISEKRVTYLVDKLIKLANQSYCAVKKTSPMLEEVRYYAQELLRLSERRQVVLSDMVALAQPLPEYDILRSIPGIAETTATSIIGELGDIRRFQSTNQINAFIGIDLKHYESGNFLAKEHITKRGNPYARKILFKCIHNIASASHTNPCHIANFYEKRKKQSSIASTKPHTIASIHHLIRTMYYLITHNKLYYYSLTQNR

SEQ ID NO: 404425 - protein, 397 aa, unidentified
MSVRNVYDMVSAGGMDVHYKFSQVTMRDEQGQVVRRERLDHPDRKQLRDRLAQWPQGVPFVLEASFGWGWVADLMKEVGLTPVLSNCLKVEQMRKARGLAKTNKKDADLLSLLPAEKDDWWKVWMAPPKVRDQREWMRYRSGLVKIGTQTQNRIHAVFHRHGIFHEFSDLFGAKGRVFLGELCKEGRASDVQLAPGALVGLRGLVRLLGHVRGQLAEVAKKLRGQLNRSPLAKRLDGIPGFGLILSHTLMAEIGEIVRFRNHRKLASYSLLSPIADDTGEDAPGRSPMGRHLGQRGNLTLKWAFIEAAHGAVRSGGKWRKIFDSYTDGGKKNRNRGYIKVARELVKVVYVVWSKCVEYTDNPPARPKASGRNKVKRFFGSTRSGTGQPCPAMAAAQS

SEQ ID NO: 404426 - protein, 311 aa, unidentified
MILHQNVVGVDVAKDWIDICDLGSGRTRRIGTTRRALLAFAGKLSGVLVVFEASGGYERPLMAALEARGVAYARVNPRQAREFARATGRLAKTDRVDAKVLAEMGRALKLTPTPPIDPARRRLAELVARREDLVAAIIAETQRLAMAGDAFVRRDISRVLITLRARRLSLEKEIGAQLCASEELGRLDKRLRTAPGVGPAIAAILLARFPELGAIDRRAAASLAGLAPHACDSGYRKGKRRVWGGRADVRRALYLAAFIASRCDPEMKAFRKRLTDAGKPLKLALIAVARKLLIALNAMVRENRDYQRRPA

SEQ ID NO: 404427 - protein, 355 aa, unidentified
MAILFVGIDLAKNVFAIHGVDEHGKAVLVRPSVPRARLHQLVAALPPCTIGIEACSGAHHWARLFAQHGHTVRLMAPKFVAPYRMSGKRGKTDAADAQAICEAVQRPNMRFVPVKSQDEQARLCIHRVRQGFVEQRTATINRLRGLLSEFGIVLAQKAATVRREAAAHLEDLPGWANIAVGDCLSEVHRLDERLAEYDRHVSQMAGEDERSARLMQLQGVGCTTASAIVSTIGDARDFKNGRQLAAWLGLVPGQYSSGGKTRLGRITKAGDGYLRTLLVLGAKSVLAAARNKHDRLSRWAMALEVRCGYLEGGHRHRREERPHGLGRAGQGRGLQADRGLSTLTTDSHHRVTIKR

SEQ ID NO: 404428 - protein, 340 aa, unidentified
MKKFLFIGIDFSKSKFDVTVLKSIGQQDFAQAIFLNEKRGFNEFLKWVTKQSDIPKQDWLFCGEHTGLYSRGLTEFLIKKNLFVWLENPLQIKCSWGIKRAKTDKIDSLEIARYALRFQDKAVACKPANKEIESLRLLFAYRGRLVKNKVSLEVSANETRRVINRDSTSRLVFENSQHNIDRIKKEIEVIETKMHQIIMSGDIKENYLLVVSIKGVAMITAIALIIHTNNFEAFKTARQLACYCGVVPFEKSSGTSINKGNHISQLANKDIKALLTQCARCAVRYDKELAAYYTRKIAQGKLDRVVINNVRNKLIHRIFAVVNNKIPYRENYLNPFADCA

SEQ ID NO: 404429 - protein, 359 aa, unidentified
MQKRIGKRSSTHSALTIGIDLGDRWGHYCVLDADGEITEEGRVRMTRTALSAHFSGPRARIAVETGSQSAWVNEHLCSLGHEVIVANARELRAISGSNSKHDAADAEKLARYARVDPRILHPIQHRDMDTQKDLVQVRARAAAVRARTQMINAARGMVKSFGFRLPDCSTRFFGRRYWSELPQELRDALQPLFVAIETVSQQIKEYERRIEHMARQSYPETQRLTQFDGVGSLTALTFILTLADKNRFDRSRDVGCYLGLRPRRYQSGGRDPELSITKAGDSYLRSLLVECSQRLLGRFGKDSALRRWGLKLALRGGKNAKKRAIVAVARKLAILLHRLWVSGEPYQPFYGLEEQLVTA

SEQ ID NO: 404430 - protein, 462 aa, unidentified
MAKKAKKIRKDKRLELKIVNPDAAGIDVSSTEMQVCVPLDRATENNRKFGVFTEDLDKISEWLISCRISTVAMESTGVYWVPLYMNLMSHNIEVYLVNAKSVKNFVEEKTDEVDAESLMLMHAYGLLKPSFQVDNFAREVRNLSRHRDNLIRTSAKEVQHIQKSMELMNIKLSNVLTDITGKSGEDIIRAILSGERDAKKLANLADWRCKTPKDVIAKSLVGNWNEDLLFSLKQSYELYQFIQNQIVECEQEMEKLFRKYSCNLPSPPNKIIRSEKRVVKKVKVAFDVEEYGYKIFGINLMRVPGINEGSLLKLIGELGHNFTEKFETYKKFCRWENLAPNNKITGGKIISSKVPKRKNPVGLIFREMAVSISNSKSPMGDYYRRIRSRKGPMGAIIATANKISKIVYTMVKNQTEYDENLIRANEPVFLMQKLRNMQKSISKLQEKIDFHQLKSVSQVAYY

SEQ ID NO: 404431 - protein, 331 aa, unidentified
MKIIDTVGIDISKLTFDVRIHKTKSYEQFENSKKGFAELIKWVDKNSSVSKENRLFAFEYTGLYSHQLSVYLTEKEVSFVLIPGLEIRRSLGIARGKDDKIDASKIALYTYRLRDEIEPTELPTEQIQLLKSLLSLRGRLVKQRAGFKASLREQKRILIKKKHEVLLSIQEKQIKYLSKQIKNVEKEMSDIVSSDEQLNEQFKLIMSIKGVGEQTALFMIVYTHGFTKFKTWRKFASYCGIAPFPNSSGTSIRGRTKVSNLANKKIKSLFDLCAKSAIQHSPEMKVYYNKRVEEGKNKMSTINIIRNKLLSRIFAVVERQTPYVDVMKYAA

SEQ ID NO: 404432 - protein, 342 aa, unidentified
MKLTTIGIDLAKNVLQVHGADEKGKTVLKKQLKRAQVLAFFANLTPCKIGMEACGSAHYWARKLQALGHRVQLIAPQYVKPFVKRNKNDAADAEAICEAVSRPNMPAVPIKNASQQAILSVHRARQGFVKARTAQANQIRGLLAEYGIAIPQGIGHIAERVPAIIEDGENDLPGSFRLLIQRLLDHLKELDGQVGELELEIQRWHRENAASQKLAKIPGIGPMTASAVVASIGDARNFKNGRQLAAWLGIVPRQHSTGGKSTLLGISKRGDTYLRTLLIHGARAVIRVAERKPAADPWLKSLLARRNKNVATVALANKNARTIWALLTHDREYEAHYVRVMA

SEQ ID NO: 404433 - protein, 438 aa, unidentified
MSNKVIFNLDELFISVGIDVGADFSWMSIALPNQQFVGKPYKILHNSIDSLTTAVSKIKEAEELYSLESRIFLESTGIYHYPLFCYLRDKGFNCSVINPIITKNSTNINIRKVHNDRFDSKKVALVGLKPDLKVSLMPSDLALNCRNLCRKYYYLMDNRSAYVNKLQGELRMAFPQYLGIFSKVTINTSLTLLETYTSPSAFIEADKQEIIDSIKSTARFGLTYAQNKYNAIIRAANEANEFGYIIDSNIKRIRLYISFIRKYDEEINSILEAMHELVNANEDTNFVKQIHLIETFKGAGFLSAVSLMGEIGDFSAFSKPKQLFAYFGLDPAVKQSGKFEGSKIQMSKRGSAVARRVIHTLTLQSIGTSHTGEAKNPVLRDYYRKKCESKPKLVAMGAVSHKVCNMIFAILRDNKPFEIITPQEHIQQYNAAKYDIAA

SEQ ID NO: 404434 - protein, 363 aa, unidentified
MTAPSPTAGIDPHQQNFTVGIVDEHGVEIIHQAFNNDGEGYAVAIDVLTTHGVCQVGIEGSASWGSHVAIAVTAAGFDTREVPPSRSAAQRRSRRLDKTDAIDAISIARALQAEPALGPVQTLEVYDPFVAKIEAVLEHRRSLVATRTLMLHHVGDQLAKLPSEVRDELGTTGKLEQRLRRVASIETSKATTPSGRYRLEWLADYIDRDRATATEIQRLERLLGKLLDEHGTTLREESGIGPIAAATLVCEVGDPYRFDRESKFARWSGTGAIALSSGEGSNEPVRHRLDFRGNRRINSVLYIASITQQRRHEPAQTYLERKRSEGKTNREARRAHKRHLANRVIRRMWKDETTRKQKLPTAA

SEQ ID NO: 404435 - protein, 296 aa, unidentified
MKSILSVGMDVHKNSFSLCAYDGYTGEIVSESTFASDVKLVIKFIETLKSRYENDVEIKCGYEAGCLGYSLYKSLTSRGVDCVILAPTTMQVSAKNKMVKNDRMDALNIAKNLASGSYKAVYVPDEEDVEIKEYIRMIHDFKKELKRVKQEIYAFVLRHGYQYDGKSKWTIRYMNWIRELEMSEIQRETLDEYLAEMDNLNDKIERFMNRIDEMYQSDRYNEKVSELRCFKGIDTFAAMTIQVETADFERFPNAKAYASYTGLTTGEHSSGDKNNRIGITKQGNTVIRKTLVECAC

SEQ ID NO: 404436 - protein, 343 aa, unidentified
MSEITVIGLDLAKHVFQVHGADPDGRPVLRKRLRRGQVLEFFASLSPCLIGMEACAGSHYWGRELQALGHEVRLIPPQYVKPYVKTNKNDATDAEAISEALTRPTMRFTAVKSAEQQSVLMLHRTRELLVRQRTMLVNALRGHCGEFGIVAAQGLSRAGDLIKRIEDPADTALPDLARQALQCLTSQIRAIQEQIALIEKKLLAWHSSCEASRRLAEIPGVGLITATAVMASVGNATQFRSARQFAAWLGLVPQQHSSGGKERLGHISKRGDGYIRRLLVHGARAHLSWSRRKKQIRSAWLTGLLARRPTNVVLLAMANKTARIAWAMLSRGERYQEMIAAAA

SEQ ID NO: 404437 - protein, 449 aa, unidentified
MSRPQVIDDEQHERVRERVAAVDVAKDSGMVCTRTRHPSRPGARRSTVWTVKARMGAVRALGRQLHKDGIEIVTLESTSDYWRIWFFILEACGLAVQLVNAAQAKNLPGRPETDKLDAQWLARLTEMGLLRASFVPPKAIRDLRDYTRARTRLIRERTRCWQRLEKLLEGALVKVSSVASKLTTVSAQDMIKAMIAGERDPEVLAGLARTRMRAKRDDLVQALDGMFDDHHGELAGMLLDQIAFLDGRIAQLSARAAELTAAMPEAWGINADGTTGPDAGAAPGAPVLPAVARLAEIPGISDDLARAIIAETGLDMARFPTAGHLVSWAGLCPSARQSGARTRAGKKGQGNSYLRGSLGQAATGAARTATFLGERYHRIARRRGKAKAQVAVARSILVIIWHLLAGPAARYTDLGASYYQTRTDTDRKLRNHIRQIQALGFEVTLTKTL

SEQ ID NO: 404438 - protein, 409 aa, unidentified
MRVIGLDVHRSFAQVAILDNGMVKDHGRFAMDREAVLAFATRTLTQDDDVVLEATGNTAVIVRLLTPFVRRVAIANPLQVRAIAWAKVKTDKIDAATLARLHAAQFLPEVWMPSEKVELQRRLVAERTQLVSQMTRLKNRIQSILHANLMPRETGRIYGAKGRARLEALALPADQMRAALRHHDELGRLAAELAAIDKSIAQQALGDENVRRLMTIGGVDSVVAFSVLAAIGDISRFSSPQKLVSYLGLNPSVHQSGDHPAFHGHITHQGRGHARGMLVEAAWSLAPSPGPLSAFFHRISMKRGKQVAAVATARKLAVLVWHMLTKQQDYAWTRPALLQFKLRRLELNAGYPSRRGGKTPGPARDYSLKTVRDQERAWLEQAEAEYRRFVAGWKEQRPARRVTPAAKGT

SEQ ID NO: 404439 - protein, 354 aa, unidentified
MLIIGCDFHTRYQQIAMAREETSELLVERRLDHQSGEAHAFYRSLQGSSEPVRVGIEATGPIHWFERLLTELGHELWIGDSAKIRASEVRKQKTDERDARLILDLLLSKRFPRIWVPTPAERDLRQLLWHRHKLVCLRTMLGNQLHALAMSQGLCRKQKLFSKKGRAELGSLTLGPWAGRRREELLKLLEQLEPPIAELDRAVLEEAKRREDAVLLMTHPGIGSVTSLAFVLAIGPVTRFQGSRKIASYLGLNPTEDSSGGRRRLGGISKQGNTMVRWLLIEAVYPAVRKDPALRQDYQRLKFRRGHAVAKVAIARKLAVRMYWMLRSGADYAQLVRRQGSPGGTLMNASSSLA

SEQ ID NO: 404440 - protein, 424 aa, unidentified
MNTQQQKEVVCWETMRLFVGFDWARDHHDAVAVDGCGQIVLGVSFADTAEGWSQFRQELTRRAGADLSPVAVAVETNNGPAVERLVQTGCGVFPMNPKAAQRYRDRKAPSGGKSDRLDAWSFADALRTDGHGWRCLRAEDPRTQELRLLCRDEIRLIQQRTAFVNQLREALHEYYPAALEAFDDWLCPGAWAFLKAFPTPQALRKAGKRRWETFLHSHRLYRPDSYPRRLEIFGRADAFCGSPAVTRAKSRLATALAGQLQLLEKQLQEYRRAIETLFAEHPDHDVFGFLPGAAAKLGPRLLAEVGEDRERFEDAQSLQCFGGTAPVCVQSGATRWVKFRRGCNKWLRATVYLWAKLSRPQCAWAEAYYQRKRREGKTHACALRCLGQRWLKILWTLWQRRARYDEGLHMKDLVHHGSWSITMP

SEQ ID NO: 404441 - protein, 375 aa, unidentified
MKEKVRFLGLDVHAETIALAIAEPDGEVRSLGTIANRTESIRKLLKKLGPVEQLKACYEAGPTGYVLYWQLAELGVRCEVIAPTLVPMKAGDRVKTDRRDAERLARSYRSGDLTPVWVPNEGSEALRDQVRAREAAKQDQLRARHRLSKFLLRTGQHPAAGVKAWTQAYLTWVKQVHFMQAARDSTLLDYLHEVEPMAERVKRLEQAIADAVQVASPQMQEVVRGLQALRGIAQISAVTLVAELGELSRFASARQLMGYSGAVPSEDSSGQRIRRGGITKTGNAHLRRIAIEAAWSYRLRPGVGPALRKRQEGVSEEIKEIAWKAQHRLHKRYTRLAAAGKDKRKIITAVGRELLGFIWAIGIKAEASSKLQIAA

SEQ ID NO: 404442 - protein, 430 aa, unidentified
MKYNTQNAKIASITEETLVLGIDVGSATHYVRAFDWRNYEFSDKPLAFSNDEAGFLTFMAWVEDIKEKAGKTAVIPGMEPTGHYWFNLGKFLQDSGMRPVHVNPHHVKKSKEMDDNNPDKNDRKDPKTIAALVNEGRFSYPYIPTGVYAEIRSLSNLRFQTQEEITRIRNRIARWISIYFPEYKDVYGKLDAVSGMMVLKEAPLPVQIKELGAEGINQIWRDAKLRGAGMKRAKTLLSAAEHSVGSQEAPEAASMEIWNLLEDYEKYSSRMDDLMARIEEKIKEVPYVDKLLEIKGIGLKTVCGFIAEVGDLSRFDDPKQLQKLAGYAIVKNSSGKHAGESHISYRGRKRLRYVLYEAAISVIGKNGEFREIHRYYQTREKNPLKKMQSVVAIACKVLRVFYAILTKGVDYDGEKMLGDIRRPAMSVQAA

SEQ ID NO: 404443 - protein, 389 aa, unidentified
MLFCGIDIAKRQHAIALLDGKGQLVQPILSIPNDRAGFDQLIQALPDPDAVAVGLEATGHYWVALYDALTRQGFSVVVVNSLKKAAYRRSGVRKVKSDRSDAVWIADFLRIANPSPTRQDLPVLLQLRELSRFRFRLTDQIGDIKRKLLTILDRVFPEYEQLFSSVFLRTSRALLEQAVSAQEVAEMDLQELAALLQEASRGRFGREKAQQIQAHARRSVGVGFLADAAQIEMRCLLAQIELLEQQRDQIDDALAILMDQIPQHLTSIPGIGPVTGAAIVAEIGDVSRFDSVEKLVAYAGIDPSVYQTGQFRASEAHMSKRGSPYLRHALWLAASVAIKHDPQLQAYYQRKRQEGKHYGTALGAVCRKLLARVYIVLKEQRPYVVKPPC

SEQ ID NO: 404444 - protein, 354 aa, unidentified
MSQISNAPVAVIGIDIGKNSFHVVGHDARGAIVLRQKGSRGQVEARLANMQPCLIGMEACVGAHHLSRKLASLGHDARLMPAKYVRPYSKGQKNDFNDAEAIAEAVQRPTMKFVATKTAEQLDLQALHRVRERLVSQRTGIINQIRAFMLERGIAVRQGIGFLRKELPTILATRTDALSPRMLRVIAELAGDWRRLDQRIDGLSGEIEALARQDQACSRLMTVPGIGPIISSAMVAAIGTGDVFSKGRDFGAWLGLVPKQISTGDRTILGKISRRGNRYLRVLFVQAAWVVLVRIKNWERYGLKSWIEAAKRRLHHNVLAIALANKLARIAWAVLAKGRAFELTRTDGAGVRPA

SEQ ID NO: 404445 - protein, 344 aa, unidentified
MEQYAGIDVSLELSSVCVVDAQGKIVKEAKVASEPETLIGFFETLGIAVDRIGLEAGPLSQWLHAGLKRAGFDAVLLETRHVKAALSAMTVKTDRKDARGIAQLIRMGWFRPVHAKSIGAQEIRALLVARKQLLGRLIDVELSIRGILRGFGLKVGPVTRKNFEVRIRELVAGQAMLERIVAAMLSARAALKAEYAKLHKAVLTIVRDDTVCRRLMTVPSVGPLVAITYKSAIDDPHRIAKSKAAGALFGLTPKKYQSGETNVTGGITLAGDEMVRTALYEAANVLLSRITRFSKLKRWGMDVAKRRGSKRAKVALARKLAVILHRMWVDGTTYRWAEAEPIAA

SEQ ID NO: 404446 - protein, 338 aa, unidentified
MQTGQTVRTYALFVGVDIAAKTATVATQRPGTKTGRSLTIEQTPEGYTSLLQQLQATGSVPSQVLVVMEATGSYWISLATRLVHAGFAVSVINPAQAHHFAKALLKRAKTDAIDAQTLAQLAMVLQPEPWTPPPQIYYALQQRLAQRDDLLNLRQQVRNQLHALVQHPEVIPEVRARMDRLLTTFEAQLVEVEREIAVALTQDSAWAAAATRLQSIKGVGWGTAAWTLVTTLNFTSCDTVDSLTAYAGLAPMPRQSGSSVWYRPAMGHTGNSRLRTAFYMATLSAAQHNPIIKAFYARLREAGKPEKVARCASARKLLHIAWAVVKKDQRFDPHYAQG

SEQ ID NO: 404447 - protein, 359 aa, unidentified
MSTQSKPFSFKGQKIFVGLDVHLRSWSVTVLSEQSVLKKFTQDPSPAALNKFLTNTYPGAEYYSVYEAGFCGFWIHWELQNLGINNIVVNPADVPTMAGERLRKTDAVDSGKLARSLRSGELKGIYVPDSVATEIRSLIRLRDSLTKDQTRHKNRIKAHLRYLGIDIPEEFCRPGRTWTNRFVLWLKGLKLETKYGKKTLDLLIAQYEDLRGQQLKMMKELRVLSRTECFDKPLQFLMSIPGIGQLAGLTILSEVDDISRFKDAAHFASFIGMVPMCYSSGEHDGTGNITVRRHAKLRWLIVEAAWIASRKDPVLSAAYVEYCRTMKPSKAIIKIARRLVNRIYFVMKHQQPYVNCYVS

SEQ ID NO: 404448 - protein, 597 aa, unidentified
MLLRLAEPVQQNSAPPNNSTPADASMTGIGVGLDTSRYGHYAAFLNTDLQAAAPELEVVESAVGYAKLRQRFTDLVAKHGRVHFLVRIDAAGLYADNLIAWLTDLKIDHARFSISTGDTQRNKNYRVAIYGQQKSDPIEARACARYALTERPKANPILTAELRQLRQIAGRLQAVVRQRTRLVNQLHQLLARTFPELAVLTKDITVGWVLELIALYPTAQMLAQASAADLQAIFYLPHERIDDLLARARDSIASLDGELIDELVRDQVRQVRDIGTRQIRLESLLKSAYRSLPVPNHLDTIKGIGEVTAAVLTAFILDIEHFDTPGKLVAYFGVMPIEVSSGVDRDGHARGPKRYVMCRRGNDLVRRYLWMAALTASRFNPACQPLYARVRAKRPDKPSIAIGHVMRKLLHLTFAIWKSGKPFDPKHYPWDTPAHVEGRNTCKDVDGSMEEMQAASLKPDEPAQSEVTATCDSTVAEPTPAVESSMWIDFAHVKKQLSIERVLDHLGLLSRLRGSGPQRRCTCPIHPGDGRSRTFSVNLEQNMFQCFDTRCEAKGDAIDLWAALHKKDVRAAALELVQTFHLEPAPRTPTPHRPRHG

SEQ ID NO: 404449 - protein, 337 aa, unidentified
MCIVTVGIDLAKNVFAVHGVNAAGQVLLLKPEVKRDKLLALIASLPPCLIGMEACSGAHYWAREFQKHGHTVRLIAAQFVTPYRKSSRIKNDAADAAAICEAVARPNMRFVPIKSVEQQSQLFIHRARQGYVEHRTALINRIRGLLSELGIVLPLAHAQFCKGVHAVLEDLPGYSNRVIGDLMSELNQTEQRLAQYDQLIAQIARQDAQAKRLLQIQGVGATTATAIVASIGNGLDFNNGRQFSAWLGLVPKQHSSGGKAKLGRITKAGDRYLRTLLVLGARALLRYAKDKDDPISRWALALQQRRGYGRALVAIAAKNARMCWAALRLGENFKLPA

SEQ ID NO: 404450 - protein, 387 aa, unidentified
MTVRTVSSLPAATHGETVRCLFAIELSKQSWIIGFITPLSPRIGRRILSGGDWKGLLKLIDEVRARISREMSRTVEVMSCYEAGYDGFWLHRQLEAHGVRNYVIDPASLQVDRRVRRVKTDRIDTERLLRSLMAYLRGEPKVWSVVRVPSIAEEDARRLHRERHRLISERVQHVNRIKGLCALHGIYDYHPLRPQAIAHLEQLRTAQGDALPPRVKSEIKRELHRLKLVVEMIATLEAERDAIVGDVTSTHVNAEKIRALHKLKAIGPEFAAVLVGEIFHRKFNNRRQLASYVGFAPSPFQSGNVAHDQGISKAGNSRGRTTGIELAWLWLRYQPESDLSVWFRARVGTVKGRIRRIIIVALARKLLVALWRYLETGVVPQGAVLKG

SEQ ID NO: 404451 - protein, 344 aa, unidentified
MEGYAGQQFVGIDLHRRRSVIVRTTERGDPLETVRITNDVDSLTKVMARAGVSPEVVLEATYGWYWAADALADVGASVHLAHPLGVKAFAYRRVKNDVRDATDLADLLRMGRLPEAWIAPPVTRELRELVRHRAKLVGIRSGCKCEVHAVLAKCGVQVLMSDLFAPTGIGLLVRLDAPAPYLARVGSLRRLIDDLDVEIDLFSRLIRGRLVADPGYRAVQTIPGIGPVLAAVFVAEIGDVHRFPGPAQLASWAGLTPKHHESDTHVHRGRITKQGSRLVRWAAIESVQALGPGTGAGRLKRRVGDRRGRNIGKTAAARQQVGYVYYALRDGHVRALTQRPRVAA

SEQ ID NO: 404452 - protein, 316 aa, unidentified
MYLGIDVSKLTIDCCLISDGQNHEKRFSNNPKGFQLLTDWLKFHQMTSELHCCCEATGTYYEPLANYLHQHYTVTVENPRRIKGYAIAELQRSKTDKQDARLIAQYCQDRKHKLKAWIPPSQEQKQLQELARYLDHLKQQRATETTKLHEAPDYIAPHIKTTIENLSGQIRSIKKQLLQFYKSYTDYNTQRKRLKTITGIGEQSAAVLLSAYKRHPFSNQKQFTAYLGLDPRKNQSGSSVNGKSRISKIGNADIRKSLYMPAVVAYRCNVFSSFVNRLKAKGKPIKLILIAIMRKLAVIAFNLLKNGQDFEPERYK

SEQ ID NO: 404453 - protein, 346 aa, unidentified
MMAIGVDTHKASLAACAIDALGRSRAERTFANSAAGHRAFERWLRALPLPRRIGIEGSGSFGAALAQRLAAAGEDVREVPVILTHRERRRTGRPGKCDPADALAIARVVLREERLPLVRDPLAYRDLKLLVDYRDQLIAEQTRLRNRLHSDLQVLMPGYGAQLGRLGDLKHATSIPAARSLLAPLGGVAVDLTELRLARLEALAAEIAESRHRLDAALASEHPALTSICGVGPVTAARLLGETGDPRRFRSAAAFAMACGVAPIPASSGKTQRVRLNRRGNRQLNRALFIVALTQGREYAPAREYMERKRAEGKTWNEAMRCLKRQLADVVFRAMLKDRSEELLTT

SEQ ID NO: 404454 - protein, 336 aa, unidentified
MNGSIGCWVGVDVAKSKLDVALLDEHGKLKGRVFANEAKGHAALMAWLGQRGCSRQHIRVCMEATGCYSEALAISLVDAGWCVSVVNPARIKGFGQGELLRNKTDRADAALLARFGQAMRPEPWVAPSLEVRQLRALVDRLHNLKEMHQQEANRLEAAMNQTGMRESIESHMQWLQAGIKQLERQIDDHIDGHPQLRADAKLITSIPGVGNTTAAKVMAYLGDVRRFKNAKALAAFIGVTPRLRLSGSSVRGRSMISRSGHAAMRHALYMPALVALKHNPIIKTFAERLKTGGMAPKAVVTACMHKLAHLIYGILKSGTAFDANFMVVRLDSQDGI

SEQ ID NO: 404455 - protein, 309 aa, unidentified
MDNSVGIDVSKDRLDVAFAASGTAFFVENSHAGIDDLVERLKEVHTDIVALEATGGFETLAVARLSAAGFAVIVVNPAQVRAYANAIGRRAKTDAVDAAVIAAFVSATKPQIRPLRDQQTQLLSALVDRRRQIVQMIVAEENRLRMALEKSTRKSIQRLLAALRREVDSIDAEMDDHIRKSPVWRVREALLTSVPGVGPATARTLLAEMPELGSLDRRQIASLAGLAPWTRQSGKWKGKSFIGGGRGKVRAVLFMAALVAARHNPVLKAFRDRLVEAGKPKILATVATMRKLLTMLNAIIRDNKPWQNA

SEQ ID NO: 404456 - protein, 412 aa, unidentified
MEVIYARCCGLDIHKQTVVACVIVPGPERQPRKEVRTFGTMTADLLALSDWLAAQGVTHVALESTGVYWKPVWNVLEGSFELLLANARHIKAVPGRKTDVRDCEWIADLLRHGLLKASFVPDRGARELRELTRYRTSLVRERTAEANRLQKTLEGANIKLAAVATDILGKSGREILAALVAGSTDAAALAQLAKGRLREKLPALERALVGRFGAHQRFLVAQQLAHLDFLDAAIAEVSAEVAERLRPFEEALTRLDTIPGIGRYVAETLVAEIGTDMSRFPTAAHLASWAGMCPGNNESGGKRRRGKTRKGSPWLRALLVQAAHAAARKKDTYLAAQYRRLAARRGASKAAIALGHTILVIAYYLLRRGTEYQELGPRYFDEHDRQAVERRLVRRLEALGNKVTLEPAHPAA

SEQ ID NO: 404457 - protein, 350 aa, unidentified
MDIIGLDLHQRESQLCICDADGTVTERRIVTSRERFTAVLGGRPRAKILLEASTESEWVARHLESLGHEVLVADPNYAPMYATRSRRTKTDRRDARTLMDACRTGAYRLAHRLSDPRRHVRAELAVRDALVRTRTRYVALAKTLVRRDGLRVASSESHLVAQRIGALSLSPVLAAELQPLFTVLAPLNEQIAAADGRIATLAATDPLVARLATAPAIGPVTASAVVATVDDIGRFRSAHQFEAYLGLVPGERSSGEKRRVGPITKAGNSRVRWLLVEAAWRLLRTKSAEAAALRAWARRLAGRRGKKIAVVALARRLAGILYAMWRDGVPYDASRIRGPRIAAEVTARAS

SEQ ID NO: 404458 - protein, 345 aa, unidentified
MKKGITIGMDLGDKKNLVCILDKTGKVITEEGIANNRKAVTKFFKRYCGAVVAMETGTHSGWVSRIAETEGLEALVGNARKLRMIWQSRQKSDTRDAVMLARIARMDPELLCPICHRGEQVQVDLEIIKARDLLVGERTKMINHVRGVVKSMGERLPTTSAASFGNKAKIPEALNAALNPMLEMIRELTKKIRGYDLMIKEQAASKYPETKRLCQVGGVGPLTALAYVLTLEKPERFAKSRMAGAYLGLVPRLDQSGQIDKQLRITKHGDVYLRRLLVGSAHYILGPFGPDCDLRNFGLKLMQRGGKNAKKRAVVAVARKLAVLLHALWRSGQQYEPKRSQKAAA

SEQ ID NO: 404459 - protein, 334 aa, unidentified
MDKVTTVGIDLAKSVFSLHGVDGAGRVLLRRTVRRDQLIQTVAALSPCLIGMEACSGAHEWGRRFQGLGHTVKLMAPKFVAPYRKSGKNDGNDAEAICEAVTRPSMRFVPVKSVEQQALLAMHRVRQGFVVERTATINRLRGLLCEFGVVLPLRSVTVRRQAAAAAEKLPELARRAIGDLLEQLRVLDERIGGYDREIEAQARLCEPAQRLMKIRGIGPTTALAIVATVGNAREFKNGRQFAAWIGLTPSQYSTGGKPRLGHISKRGDAYLRNLLVQGARSVLNSASAHQDRMSRWILELQPRRGYYRTLVAIANKNARIAWALLARNESLRSA

SEQ ID NO: 404460 - protein, 344 aa, unidentified
MEKHTTIAMDIAKNVFEVAVSDEPGRVKERRRFTKSQMLRFFANREPARVVIEACGAAHALARELEWYGHEMVLLPPGQVRRYVLRNKTDRTDTKGLLEADRNEEIVPVPVKTVAQQALVAVHRLRSGWMATRTARLNAIRGFLRELGVAVPAGATRVLPALTGAMEAGRVPGTLEALLRTTAEEVRDLDRRIEEAESTLKRMSREMAAAVRLQTVPGIGLLTATARIGSVGEPGRFPSGRHLASFLGLVPRESSSGDRRRLGSITKRGDGYVRMLFTHGARSVLRAASVKRQNDRLRTWALETQKRKGHNKATVALANKLTRIAWAVWLKDRPYEGRVLEETL

SEQ ID NO: 404461 - protein, 343 aa, unidentified
MKYIGLDLHKKSIFATVLDGEGNILSKTQIGAKSRDITYYLKRQGKKDELSVAMEASYNWPYYYRAAEEAADTIVLAHPLKTRIIGEAKIKTDKIDSAALAYMLKADMLPAAYVPSRATMENKLLLRSRISLVGIRTQVKNKIHSIVDRNTDSYSYLENMSDIFTKTAIKILRDTKICPTDYRILTGYLDLMDEINKKIKDIESQIDERSIVDKDIELLKTIPGIGTFSAFLIKSEIDNIERFTCKEKLSSYAGLIPSTHASGARLHHGRIVKQGNKFLRWALVEAALTAVRCSEYFRYHYSKVKSRKNGNSATIAVARRMLEVIYAMLKENREYIEKPVDIK

SEQ ID NO: 404462 - protein, 370 aa, unidentified
MKEFTKYVGLDVHKKTIEIVTADEGRNGEVRYYGTISGNLAALDKAIKKIKSKGAKLNFVYEAGPCGYEIFRYLTKNGYDCAVVAPSLIPKRAGDRIKTDRRDAEMLARLYRAGELTPVYVPLEEDEAIRDLIRGREDAIEARRKGKQRLLAFLLRHGIRYPGDSYWSSSHLRWLSEIKMPTSAQQITLQEYINAVHECDKRVTRFTKQIEEHVNTWRMKPVVEAFQSLRGVSLLVAATSVAEIGDFSRFANPKQLMAYLGLVPSEHTTGEKVKRGGITKCGNGHVRRSLIEAGQAYSHPARITRPLLKRQEGLPQSVVDISWKAQIRLCARFKRLMAKGKSRNVVVTAMARELCAFMWAISKEIEAQKN

SEQ ID NO: 404463 - protein, 348 aa, unidentified
MLRPARKALAQKAHSENFCVKTAAGEIVEEGSVLAQREVLRQWASARRQPWRGAMEATLFSGWIYDTLKPYAGQLEMAHPAKMKAISAGKKKSDPIDARTIADLVRCNLLPACYVAPPRIRELRRLLRYRSLVVSEAVRMKNKMAGLLMETGALYVKEKLHRKKYFANLLEELEEVPQSVIDLLRLSRGALEMFESTQKRLVRELLADPELAQRVERLMTIPAVGEITALTWALEVGDPQRFPSCSDAMSYCGLTAALKSSAGKQQRGPISKQRNHWLQTTLIEAAKLAPRWNPQLAALHARELERGHRNRATLAVARKLVAYLLAVDKSGQAFQARAPLEAPTQKAA

SEQ ID NO: 404464 - protein, 386 aa, unidentified
MYNAVGIDVSKGKSTIAVLQPGGVIVRKPFDVFHTSQSLKELSNYLASLEGDTRIVMECTGRYHESMANSLSNAGFFVTVVNPHLIKNFGNNTLRKVKSDPADAKKIARYTLDNWAELRQYSCMDNTRNQLKTLNSQFSFFMKQKVAAKANLIALLDNTYPGVNKLFNSPAREDGSEKWVDYAYSFWHVDCVRKTGLKAFTVRYEAFCRKHHYIYQPSKPEELFNASKELVAVFPKETSYKLLIQQSIQQLNLASAHIEQLRREMNALASTLPEYEVVMGMYGVGKTYGPQLIAEIGDVSRFTHREAITAFAGVDPGVEQSGQHNSKSNKASKCGTGRLRKTLFQVMTTLLQNAPENEPVYQFLNRKRSEGKPYYVYMTADRKSVV

SEQ ID NO: 404465 - protein, 349 aa, unidentified
MLADELDYVVGVDTHLDEHVLAVVVAPAGAVVAQRSVQTSARGYAAAVRFAEEHANGARVWAIEGAGHYGAGLARHLSGRGETVLEVGRGPRDERRLRGKDDPLDATRAARAALSSETPARPRSGQHREALRLLLIARRSAVDVRREALVQLRSVIVTAPDRLRDELRRLPVQRLLDRCSRLRRSTRATPDELAVRLVLRTLARRIEAATVEADELEHEILAHVRALAPQLLDEAGVGPIVAAQLLVAWSHPGRVRSEAAFARLAGVASLPASSGQTTRHRLSRGGDRQLNRALHTVVLHRRQHDPATKAYIARRVAEGKSRRDATRLLKRYLARHLYRILDQRTQLIA

SEQ ID NO: 404466 - protein, 355 aa, unidentified
MSRSVMPQLPNVTIGLDLGDRTSRTYELSAGGECTREATVSTTTIGMTHYFEHRERCRVVLEVGTHSPWVSRLLKALGHEVIVANPSAMFAGRPRRRRNDRLDAQFLARQGRVDVTLLYPLTHRSADAQRDLEYLRARDQLVAVRSKLINHVRGTVKSSGARLAKCSAEAFAKRAASELPPGLAPALTPLLEVIADLTRRLATAETQIATVIHERHPIAQRLQQPAGVGPITALAFVLLIEDPTRFRKSRDVGPYFGLVPRLDASGDSSPQLRISKTGDEFGRRLLVSAAHYILGPFGPECDLRRFGLAIAQRGGMNAKKRAVVAVARKLAVLLHQLWVSEAPYDPDYQLKRRAA

SEQ ID NO: 404467 - protein, 359 aa, unidentified
MSSVPVFVGLDYHQDSVQLCVLDSQGNQLCNRSVENDAEAIERLAKRHGIPRRIAIEACCGAADLAEELATQRGLPMQLAHPGYVNRMKRSPDKTDLGDAQLLADLVRVNYLPSVWLAPRATRELRRLVRHRAQLVRRRKDVKLRIRGLLRENRLKCTHARAWTKGWLDWLTKEAALSDSDRWVMDDHLQELDLLATRITAAEAEIQNRVQDDPIVRKLLQLPGVGLVTAVTLRAEIGRFDRFDTGKQLARFCGVTPRNASSGARQADAGLIKAGNPELRTVLIELAHRLISRIGGHWMEFAINMLQRGKAKNVVVAAVANRWVRWLHHELRREAADPSTSARALQKGAAPSVYPVAST

SEQ ID NO: 404468 - protein, 404 aa, unidentified
MYNAVGIDVSKAKSTVAVLQPGGTVLRKPFDVSHTSQSLHELSDYLGSLDGNTKIVMECTGRYHEPVVKALSEAGLFVSVVNPHLIKNFGNNSLRKVKSDPADAKKIARYTLDNWAELRQYSGMDNTRTQLKTLNSQFSFFMKQKVAAKANLIALLDNTYPSVNKIFDSPVREDGSEKWVDYAYSFWHVDCVRRIGLKAFTERYRAFCKKHHYIFQPDKPEKLFNASKELVAVFPKEKTYKLLIQQSIHQLNLASEHVERLRKEMDELASTLPEYSTVMGIYGVGKTYGPQLIAEIGDVSRFTHREALTAFAGVDLGVDESGQHKSKSNRASKVGSARLRKTLFQIMTTLLQNAPQDDPMYRFLDKKRSQGKPYYVYMTAGANKFLRIYYGKVKECLRNLEQAE

SEQ ID NO: 404469 - protein, 460 aa, unidentified
MPKSKARKVPKKPSLPASLERVSRNAAGIDVGGESHYVAVPADRDDQPVREFAAFTGDLYRMADWLKACGIETVAMESTGVYWIPVFQVLEERGFEVKLADARQLKRVPGRKTDVADCQWLQQLHSFGLLAGAFRPDDQVCVLRSYMRQRAMLVSYAGQHVQHMEKALVQMNVQLQHVIEDITGATGMRIIRGILDGERDPHRLAALRDHRCKNSVSTIAKALQGDWREEHLFALQQAVELVEAYRAKIVACDKRIEVHLSTFDDRSNGEAPPHGPAPRKDRHDLSFDATTELYRMTGIDLTLVNGLEAHTLLKVISETGLDMTKWPTSKHFGSWLGLAPNNRVSGGKVLSRRTMPSSNRAAAALRLAAQSLHHSRSALGAYLRRKAAQIGMPKAITATAHKLARIIYNMLRYGTEFVEQGQDYYEQLYQDRVLKNLTRKAQEIGYWLVKQEQTIATPTS

SEQ ID NO: 404470 - protein, 412 aa, unidentified
MTHPQHTHFAGFDWAGDHHDVIIVDSAGVLVADFRFDHSAAGWQHWRDQIAAWPQLGVAIETSFGAVVEQLIDSGVTVYPVAPTSAKGYRQRKYPGGAKTDRHDAWALADALRTDGHAWRALSAKDPIIEELRMLCRDEVALIEERTALVNQARQAAREYYPVVLEAFEDWTLPSTWAFIESFPDTQALLKAGRRAWQKFFHTHKLHRAETVQRRIAVLEAAGQWRIAEPMVKAKRLYLLTKARQLRALHIQLEEYRRRIEAVFASHPDSGMFGSLPGAGAKLAPRLLGEIGSDRALYADACSLQSVSGTAPVSYQTGKLHKVQMRRACNRHLRHTMHLFSDLSRAQCAWAKVYYDGLKSRGKTHAQALRSLGQRWLNIIFRMWQDHTRYDPELHTRNQLQHGSWVLQHRPS

SEQ ID NO: 404471 - protein, 347 aa, unidentified
MDQIIIGVDTHKSNHVAVAINTQGVRLGILSVPATSQGYLDLEEWAEDFGPVKAFGIEGTGSYGGGLSRSLLSHDQTVIEVMRPNRQLRFLHGKSDNIDAEGAARSVLNGQATAIAKSQIGSVEMIRHLKVARDSAIKSRSQAAIILKALIVNAPAQLRDGLDKVKGNIALVRHIAAFRPGEVTTPTASAKAAMRAIAKRWLFLHEEVRTHDLELAALVELRAPKLMAAHGIGAMTAAEMLILVGDNPERIKSEAALAKLCGVCPIPASSGKTNRMRLNRGGNRQANAALYIIAITRMRNHEATRSYVVKRTAQGKSKREIIRCLKRYIVREIYQHLCVPNDAKCAA

SEQ ID NO: 404472 - protein, 310 aa, unidentified
MENVIVGIDVSKDQLDVAGLPSKEILSVPRDSDGLDKLVRRLVALSPKLVVMEATGGFETIVAAALAAANLPVAVVNPRRIRDFARALGHLAKTDRIDAAVIAAYGEAAKIEAQKVPDEASRMLGELVARRRQIVETMGVERNRRRSLTSSRLLRGVDRILAALQKELSDLECDIAESVRGTPAWREKDELLQSFPGIGPKLSSMLIADLPELGTLTRRKIAALVGVAPMADDSGKHRGRRYIKGGRTHVRNGLYMAAMVGARFNPLIAAYHQRLIAAGKPPKQALIACARKILTILNAILRDNCPWQTA

SEQ ID NO: 404473 - protein, 341 aa, unidentified
MPAQRHIGIDLHRNQFTCCVRLENGRNYLTEWKLEELPRFVKKLRPSDQIAVEMTGNTRLFHEAVAPHVKRVVVVDPNQFQVISHSVKKTDPNDARNLALYLEKDLLPEVRMKDKRQAQLASLTQTRDTMVKLRSALKNKVNNILSAQGINLKREALSSEKKLQEILAMRFDAMVQIELEVIIEEIRSLNQRIAKLEKTIVEEGSQLEGHKNLTSIKGIGPLSSSILLSVIGDIHDFAEEGKLAAYFGIVPRVSNSNETERSGRITKRGSKLGRTALVQCALIAQRYSPYLKRYYEQVKARRGTGKGIIALARKLLGIIYRTLKNNWVFADFPNFVLREAA

SEQ ID NO: 404474 - protein, 320 aa, unidentified
MTQLASFVGIDVAKGKLDWCIRGTAHGTAPNTPAGCAKLAGELKRWGIKIAVMEASGGYEQTIALALRGKGLLARIVDPKRVRDFARAAGRRAKNDPIDADTIAWFAETFNLEPGSPPDRDREQLAALVGERQDLVEMRIQCLNRGEHKRPALCQNLRKDVLKHINRAIAKLEAAIAALIAQNELLAERARLLDSVPCLGSQSIAALLAWLPELGQISNLQIAALLGVAPYADDSGQQVGVRHIAGGRRQLRNILYMAVLGGATQHNPVLKAYYKRLLARGKLPKVALVACLRKLIVILNVMVARQQHWNPPAQAGATCP

SEQ ID NO: 404475 - protein, 352 aa, unidentified
MKTLKLSIGIDVAKDTIVCCKGTLDTEGLICFSKSRTFFNNPEGFEELMGWTKVDPGIEILFVMEATGVYYEGLAYWLDAKDKKISVLLPGKVKHYGKSLNVKTKTDGVDAQLLSRMGLERRLDSWHMPSKAMRTIKFLSREYKEIKAKLVVSKNQLHAKTHSHGCPASVTKRLNQEIGLLETQLLEIEAELRMTAMADTALYDRINKITTLPGVGFITVIGVLAETNAFALVKNAKQLVSYAGLDIKLNQSGAKEGKTRISKQGNSFIRSALYMPALCASRHNRELNRFYNRLNERKPAKKIGITAVARKLLVLIYTLWKNNEEFNPDITKENRQAGLRLPAQDEQVVLLK

SEQ ID NO: 404476 - protein, 410 aa, unidentified
MDVLHTHCAGLDVHKETVVVCARRVIETEVVREVRTFKTTTGDLLSLSEWLATLGVTQIVMEATGVYWKPVWNILSDGDFALLLANAGHVRNVPGRKTDVNDATWLADLLAHGLVRASFVPDSQTQEQRGLLRTRKQLTRERTSHVQRVQKTLEEANIKLDSVISDILGTSGRAMLEALIAGETDPVRLAALASTRIRASPTQLSAALQGRVTRHHRFLLRLHLDQIDALGRAISAIDKEVEANLAPFRTLIPVLTSIPGIGELAARVLLAEIGTDMSRFPTAGHLISWAGLCPKNDESAGKRRSARMRKGAPWLKTTLIQCAWAATRRTDSYLQAQFHRLRARRGAKKAVCAVAASILTAAYHMIANGTFYQDLGADHFRRRAKPALANRLVAKLQNLGYDVLLKPIAA

SEQ ID NO: 404477 - protein, 456 aa, unidentified
MPDYFFGIDVSKGYSNFVMLDSSKRCVEDDFQLDDTFDGHQKLYSILSEFCVRHPKANIFAAVESTGGYENNWFDVLARFQAQLPIRTARLNPCGVYNNSKAALDRNITDKISAENVAKYIIEHPEKVRWQLQDPLAPLRKQWGFIKMLKKQKTQLLNQLESNLYTANPEILAYCKDSTPAWVFSLLQRYPTASKLAKARKSSVALIPYVTPQKAKNLIEAAKHSVASATDEITSQIIKATVQQIRQLSKVIDAQTKAMTDKCSIPEVELLKTFIGIGDDSAVGLILEISSIKRFKSAKHLASFFGLHPVYKKSGDGSWGYRMSKKGRITPRQILYMVAMVAIQSNPLIREIYEKHTEKGMEKKAALGVCMHKIIRIIYGMLKHNKPFKPEIDRKNREKQNTQGEKKICRDKSRRYQTHDAKAPISRRQAKKREERKQSQSDNNAKCGIKAPVPIF

SEQ ID NO: 404478 - protein, 338 aa, unidentified
MKSNIGTPVSVGIDVAKATLSVSICDHDGHEQALAIRNTDTDITTKVLPYLRHYSGKVVMESTGHYHWTPALVLREAGIDIRIVNPLLAKQYTSGTIRKVKTDPADARGLARMAMVCDNLPETFTVSRARLIIRKKLATISTMSRHLQALKANITSLREGQALLNEPDTTVVMELAESIKQLGLSIKHLENECVRLTTSDTNSRETMERLETIPGVSEFCAALATNWFDINTATSAKSFIGYAGLDVSSRESGTWRGHCRLTKRGNPFLRKRLYSAGWGAAMNYPEYRLYYDQLKASGRGHREAVVIIARKLVRTMYCLLRDGVSYDSVKVSFPNRII

SEQ ID NO: 404479 - protein, 367 aa, unidentified
MQRVRFVGLDVHKESIAIAVADAGGEAPENVATIPNETTVLLKCLKKLGSGETLRCCYEAGPTGFVLQRALRSAGIDCIVIAPSLVPKTTGDRVKTDRRDAVKLARFLRSGDLTEVHVPEAATEAMRDLERSRDDAKRAERTARHQLSKFLLRQGRRYEGKTAWTGMHLEWIRGQVFEHEAHNRVLVDSVQAVENATARVARLTKDMVDLVESWSLRPLVKALQALRGVQLITAVILAAELGDFARFASAPALMAYLGLVPSEHSSGQTQKRGRITRTGNGHVRRILVESAWSYRYRPTMSPQIRTRNEGVAPAVQAIAWKAQHRLHARYRKLLGRGKNKQQTVTALARELAGFVWSIARQPQLLAA

SEQ ID NO: 404480 - protein, 319 aa, unidentified
MICGVDVSSSTLEVRLGREGATGTFPNTAAGIAALGSFCHAHEVELVAMEATGGYERQALLQLSEQGLPVAILNPRAVRRFAQSMGRLEKTDAIDSGMIAWYAEVKQSMPLRLAPRTQQHLRALVTRLRQLTQIRTAQLNQQRLISEPVVQDSFEELLAVVGRQIGTLELQIATLIQADPLWCVLNQAFRSIKGVADRTVARLMAEMPEIGTLSNKTISKLAGVAPLARDSGKHQGKRAVRGGRAAVREILFIVASVVGRYEPDFIAFQQRLRVAGKPPKVIRIALAHKLLIRLNAKAREVRRQLDKTLPVSVPLPATN

SEQ ID NO: 404481 - protein, 343 aa, unidentified
MEHFAGLDVSVKQTSVCIVDGPGRLVREGRVASEPEALLPVLTNPLWRFKRIGLEAGPLSQWLFSALAEADLPVICVETRHMRAVLQAQINKTDRNDARGIAQMMRAGLYRPVHVKTLRSQKLRMLLTHRKLLQSKAIAIDNDLRGTLRNFGLKVGVVGTVKFEARIRELVETLPDLAELVEPLLIVRRTLREQIGILHGRLLAIVRHDDVCRRLMTVPGVGPVVALTYRATVDVAARFRNSKAVGAVFGLTPSRYQSGEVNRTGAISRCGDEMMRVMLYEAAHTMLLRLAKWSWLKAWAMKIARQRGIKKAVVALARRLAVILHRIWVDGTEFRWTRETAAA

SEQ ID NO: 404482 - protein, 337 aa, unidentified
MIVIGVDVHKHSLSAVAVDEVGRQLDCLETSAGEELLSWSKRVGRRRLWALEDCRHVTRGLEATLQGERQRLVRVPPRLTAPERRRGRVRGKSDLIDALAIARAALREPLLDSPRPEEGRLRELKLLVDHRDDLVAERRRCQQRLRWHLHELDPSLRVPLGALDRSVWLARLGRQLARREQTIQVRIARELLGRCRSLTRSILELERELETQTAAAAPRLLELPGCGSLTAAKLLCEIGPIARFGSDAQLARHAGVAPLDASSGKHQRHRLDRGGNRQLNCALHRIAVTQGRCYPPARAYLERKQGEGKSRREALRCLKRQLARTVYTTLKSEPLLT

SEQ ID NO: 404483 - protein, 342 aa, unidentified
MGKATIIGVDLAKNVFQLHGAASDGSVVFRKRLSRLQFARFMSELPRCLVAMEACASAHHWARQMARYGHEVRLIAPRYVKPFVKRQKNDAADAEAIVEAALRPTMRFVEPKSADQQARAVAFRSREQLVKQRTEAVNALRSHLYEFGYIAPEGIGYVSRLATIVEDSETDIPELARDICRMLIEQIAHLTDRINALKVRIAAMSKEAEMPRRLQSMPGVGPITALAVETFAPPMEQFRSGRDFAAWLGLVPRQNSTGGKQRLGKASKMGQRDIRRLLIIGAMAVIRWASRRGSPQGSWLARMLERKPPTVVAVALANKMARGIWAMLTRNENYRGPVLIGA

SEQ ID NO: 404484 - protein, 352 aa, unidentified
MPKPRRIVIGGVDTHGRTHHAAVIDQQGRLLGDREFPADSGGYRQLLGWLGRHGRLDAVGVEGTGSYGAGLTRFLLDQDVAVVEVDRPDRRIRRQRGKSDPIDAEAAARAVLAGVATAPAKRRDGIVEAIRALRAVRSGAIKARTAAINQLKGLLVTAPASVREGLEALPTTALVATCARLRPNETALADPVQATKAALRVVACRIHQLEEEISLADQRLATLVGRAAPRLLKLHAIGVDHAGQLLITAGDNPERLRGEAAFAHLCGAAPIPASSGKTHRHRLHRGGDRDANRTLHLAVVVRMRWCPRTRAYAERRTKQGLSKPEIMRCVKRYLAREVYHALVADFEALHAT

SEQ ID NO: 404485 - protein, 413 aa, unidentified
MDVIHPRCAGIDVSKRDGKVCVRVAGEGRAGPTSTVTTWGSVTNQVLALREHLISEHVTLVVMEATGDYWKPFYYLLEDDLNVMLVNARHVKNLPGRKSDVSDAAWLAQLGAHGLVRGSFVPPAPIRQLRDLTRTRTTMVRERAREIQRLEKLLEDSGIKLSSVASDITGVSGRAMLEALIAGGRDPVELAELAKRRMRVKIPALTEALTGRFGPHHAFLARLHLDLIDQRSHAVEELTARIEVVMAPFLAVRDLLVTIPGVSTRVADVIIAETGADMTRFPGPAHLASWAGTCPGSNESAGRIKSTHTRPGNPYLKGALGIAAMSCARSKDTYLAAKYRRIASRRGPVKAIVAIEHAILIAVWNMITNDTFYTEPGGDFYTRLHPDKTKQRAIDQLRKMGYTVTLNPLEAAG

SEQ ID NO: 404486 - protein, 413 aa, unidentified
MVPVMAVSSRSSGVRLEDLVAVPIDVGKHSAMAKAIDFTGAELARPFVFSLDRAGIGQLVARVRSVLPASVSLVRVGLEAAGHYHLPLAGGVLPAEWELRVLNPGHVAMQRKVSGQRGVKTDRVDLTAIADLLLAGQGTIAPPFADLVMTLAGWAAHRRRRSLLRRRTIQQLTTHVDRCFPGLGRAVWSVVLSQAGRLVITELPDPVRVVRLGPTRLRAFAAKRGVRMTTPMAAKIVEAARQALPVPGAEVARRLLAADLELLADIETQITVADREVEALVPLTPFGVLTTTPGWGPVRVANYGAAVGDPERWPSHRQLYRAAGLTPRIYESAGHRRDGHITREGSVPLRVALVDLGMGLWHQEPASRVYGAQLRARGKPGAIIVTAMAHRANKIAYAMVRDQHPWESSRWAT

SEQ ID NO: 404487 - protein, 360 aa, unidentified
MINTNIEKLLGRLLESKTETIKIGCDIHARDLAVSIQEDGARPLRPQMMMRVQLVRLVRALVQGGRKVHVCYETGPCGYGLYFELKGAGAQAYVIVAEVLTDGRKQKTDKQDAAALCDKLDRYVRGNSKAMTPVRVPEVVEQQRRSVGRLREQLKQSRHQWEARGRSLMLFYGHHVTGKWWNERRWPQVAATLEAWLVEQLTVMRTMLLQLDQQEKALRAKLEADAPKRLPKAIGALTWGLLWREVCDWGRFRNRRQVSSFTGLCPGVHQSGPRRRDGSINRYGNPRVRALLIELVWRLARWQPDYPPVRALVAGMARGAARRKCAVAAARRLAVDLWRLATHQTTPEKLKLSVPTEVLG

SEQ ID NO: 404488 - protein, 475 aa, unidentified
MILIRLPLPFGNVSEPKEGIAMATRTPRRRPSKGLPIIHPKAAGIDVGSQFHVAAVAAELEREPVRTFASFTDELHALTQWLEVLGITTVAMESTGVYWIPLFEILEDRGFEVLLVNAREAKSVPGRKTDVNDAQWLQQLHQYGLLRGSFRPAREIASLRAYLRHRERLFDYAAAHIQHMQKALMQMNLQLQHVVSDITGVTGLRIIRAMVSGERDPGRLAEFRDPRCRASRETIRQALTGNYQPEHIFALRQALELYEFYQTQVLACDREIEAVLESLCARVSPPPEPLPARRCKTRQRNAPDFDVRGALYTLLGVDLTQIHGLGPYLALKLIGECGRDMSRWRSVKHFTSWLALAPGNKISGGKVIASRTRRSSNRAAALLRLAATTVGRTDTALGAFYRRLAARIGKAKAITATARKIAVLFYNTLRYGVNYSDPGATYYEDRYRQRVVANLRRRAKSLGFVLEEAPAGGVS

SEQ ID NO: 404489 - protein, 369 aa, unidentified
MKSITYIGMDVHTTNYTLCCYSVEDDRFFAEIEVKPDYQDVLKYINRVKSQRGKEAEIMCGYEAGCLGYSLYHQLTYHGVDCVILAPSTMPVTPGKKIKTDRMDARRISKCLAYHTYSAVYVPTAEDDAVKEYIRMRDDENNALKRIKQQTIALCTRHGKQYNGKTYWTKRHLDWLGSLDFGNGVLNEVLQEYLVLYYQAQEKVDVYDKRIEEVSQSGKYREPVEKLGCFIGIKNHTALAFCCEVGDFQRFPSAQQFASYLGLVPGENSSGEKQQHTSITKAGNSHLRRLLIEAAQQYGRGTVGKKSMALKARQANCPTHIVAYADRANERLRRKFYRIALRSKRNIAKTAVARELACFIWGMMTEHFA

SEQ ID NO: 404490 - protein, 364 aa, unidentified
MISVPHDSTLLGLDVHKLTITAAVLEAGSDTPVVDKISSDPDAVRHLVARFPDPRRLVACYEAGPTGYELARLLSRLGVRCEVVAPSLIPVAPADRVKTDRRDAKRLALLLRGGQLSAVRVPTVGEEAVRDLCRARADMVLDRTRAQHRLNKFLLRHGRVWRDGKNWTLKHHIWIRSQRFDEPALIATLAHYRATLEAREAAVDAIDAELATWFATEPFVHSVRRLAAYRGVTELGALTLVTEVGDWRRFPSSAMFSGFCGLVPSERSSGERTRRGGITHAGNTHLRTQLVESAWVYRSAPSVGAELKRRQEGLDPAVVARSWNAQLRLCGRFRRLDARKANRKTVVTAIARELSGFLWAEMTA

SEQ ID NO: 404491 - protein, 465 aa, unidentified
MVYSTFNHIQGKIGSRWAQLVRETGPENLLLVAIDAAKYTPKVIITSFYGDILVKPFDIDSSMSGFHKLKSLIESTKSSHNLTKVVIGIETTGHYYEHLVYKCHLEGYHVRTVNAATTAKERETLLNWSKTDNLDLMAIIQSVIHGRGTSNELPSGDIHNLRKLTRARRELVSERTKTKNLILMHMDHIFREFQGKTVWMKGKRYLSKPFSKVFGKGSIYLMRHHPHPSDILELGVKGLREISQRENLKIRDKTIQTLIEFAKDSITLPKEQVEADIYLLNQKLDRLEFLEKQIKRLEVKIEELFVTTDGAVILSVQGIGLVTGAELAAEMGDISDFDQAGQLIKLAGTNPIVKQSGGNQPAYYGVSRQGRRPFRNIVYQVGKSLAVNNPEMHQRYLALKERGKHSRQAYIALGNRMVRLAFSMIRNQTLYQTKAENYTLFDEISKKIRKANVEKFFKAHVLSIQ

SEQ ID NO: 404492 - protein, 469 aa, unidentified
MGKRSGGNGMTRGDRRRNARRERLRGLLPRDGAVIGIDLAEDKQALAVIDHDVRVLARKTVRVKAFRLGEALDWAVAQARAAGFARVAVACEPTGARWLQVQRLCGERGLPLVCIQPLVSHIAREQQDLTTHKADEPDSVLIGRLAAELHCYVPEELDETWAHLRHLGRRRAQLITAGTASVQRIRDFLSVAWPVVTEACVRPFDSVTWLAGMGVVTSRCGADPAGLAGLGLEEFTGLVRGAVAGWGGQRPDGRVLRAVFAALTCTEGVVAWSRRGLFRRIAGELGDLARTRAQLRAIEADMVVVLAELGLSRLGDIPGLTATGAAVILAEAGDPRRYDSSSSLVKHAGMSPAGNASGASEGQAHISRRGRPALRLAVWRAVWPLLRHNPVLAAKYAALTAAADAAAQARPGTGPQRSSAAAAARAARARARVACAASLLRWIWCLTVHGTSWDPDVAAGLAPTPAQAA

SEQ ID NO: 404493 - protein, 339 aa, unidentified
MKVTTFGLDLAKRVMQLHWVEMETGEICRRQLKRDQVLQFFVNREPSVIAMEACGSAHYWARKLLGVGHEVRLIAAQFVRPFVKTNKTDAADAQAIWEAAQRPGMRFVAVKSEGQQGVLMLHRMREQLVKMRTMQINQLRGLLYEFGADLPPGRQKGLERIPGELAKLDGVLPAMVVETIRDQLQRIATLDRDITQIEKRLGLWKKKDVASKKLMAIPGVGLLTATAAVATIGDAKAFKSGREFAAFAGLVPRQSGTGGRVQLLGISKRGDVYLRTLLIHGARSAITQGKEREPWLEKLLARRPLNAVVVALANKMARTIWALLAHDRTYQKGYVARAA

SEQ ID NO: 404494 - protein, 341 aa, unidentified
MEQVTTIGLDIAKHVFHAHGADERGAKLFSNRISRSGLLAFFARQPRCVVALEACAGAHHWGRELQRLGHEVRLIPPAYVKPFVKRQKNDAADAEAICEAAQRPSMRFVAVKSEEQQASAMVFRGRDLLVGQRTQIINALRGHMAEHGWVAPKGPSHIARLADLLEDQAAVPAAARPVLAAMLEMLGELDRRIALLDREIAKRAREDETARRLMTIPGIGPITATALAALAPPPESFAKGRDFAAWLGLVPRQHSSGGKQKLGAISRMGERTLRRLMIIGASAVVLHASKRGAPAGSWLAQMLARKPRMLVTVALANKTARIVWAVLTRNEVYRAPALAAA

SEQ ID NO: 404495 - protein, 355 aa, unidentified
MDSKQYIGLDVHQATISIAVADSTGKVVMESVIETKAGTILAFLRGLRGTTSVAFEEGTNAAWLYDLLKPHVAEVIVCDPRKNALLKVGNKNDRVDARKLSELLRAGLLSPVYHGECGVRTLRELARSYLTITKDLTRVMNRLKGLYRSWAIPCAGAKVYSPRYRDAWLEKLTQAGVHRRAERLYQQLDALVPLRREVRRELLGESGKHPASKLLREIPRLGPIRVALLIALVQTPHRFRTKRQLWGYCGLGLRSRITGEYCFTGNQLQRRKRSPTLRGLNVNHNHELKNVFKSAATQVMAAGDPFGDFYQGLLAGGMKPALARLTLTRKMAAIVLRLWKKGEHFDPAQLKRQSA

SEQ ID NO: 404496 - protein, 340 aa, unidentified
MRYVGLDVHLRQSTFCVLDERGCKIMTRTVHGTWAALVTELERLKAPFAICFEASAGYGFLFERLRQIARRVTVAHPGHLRLIFRSKRKNDRVDAEKLAKLLFLDEVPAVYVPSASTQAWRRLIEHRRKLVGERTRAKNALRALLRSHGIDAPRGKRLWSRGGLAWLTAVDLPTELDALQRDLLEERLRSLTEMLRRVETALGKTGVTHPGVQLLMTIPGVGPRTAEAVMAYIDDPQRFSRNKAIGRYFGMVPSQDASAQSNRLGHITREGPSVVRHFVVEAAWQGIRRSAHLRAFYERVRRADPNRRKIALVATAHRLLRVMLSMLQTGEVWRYQEDHV

SEQ ID NO: 404497 - protein, 412 aa, unidentified
MDVLYPRCCGLDVHKKTVVACCILSTKGRKPVKETRTFRTMTTDLWALADWLQEQGCSHVAMESTGVYWRPVYNLLEGQFELLVVNAQHIKAVPGRKTDVKDAAWLAELLRHGLLRGSFIPSKPQRQLRELTRYRSTLVQERARTLNRLQAVLEDAHLKLASVVTDINGVSARAMLEAILAGQRDVEILADLARGRLRAKRDQLKEALEGRVTAHHSFLLTEHLSTLEYVDEAIERVSREIDQRLTVDQEAIVLLDTIPGVGQRAAEILIAEIGTDMSRFPSAKHLASWAGMCPGNHESGGKRLSGKTRKGNRWLRQVLVEIAHVASKTKNTYLAAQYKRIAARRGKKRALIAVGHTILTIVYMMLTRKQPYQDLGAAYFDQREQERVERRLVHRLERLGYEVSLQPRALAS

SEQ ID NO: 404498 - protein, 357 aa, unidentified
MRGLPGPLHERYSTRGGRCAIESFPTSPDGLADALALLDSVEFAIGRVGVEGSAGLGRHVAAFLAAAGFDVRAVPAKPTAERRRRRRRHKTDPEDAEAIARETLADPDLPAAGKQRRPDPDWDALAAVRNRRKRLINQRLRLRNEAEAVLVSLALTVRAVLPQTSRVRPRLRALERAAASSIQVAAADRVNLAWLVEAAGDVTRLDAREGTRQEDPGPARPARLHAHRRVWHRAMDLLVEVGDPTRFATEAQFARWCGVAPMAVSSGEGDQAPTHHRLDLAGNRQVSSTLHVMHVTQVRSYPPARDYIASKRAGHKTKREARRAHTRHLANIVIRRMWADHAQRFETAANPATPTAA

SEQ ID NO: 404499 - protein, 343 aa, unidentified
MGEVSTIGLDIAKSVFQIHGVDVDGAVVMRKRISRAKLLEFFATLPGCLVGVEACPTAHYWSRRLGALGHTVRLMPPSYVKAYLKRSKNDANDAAAICEAVTRPSMRFVATKSEQQQSGLMLHRSRQLLVCQRTMLSNAIRGHMAELGIISAKGRNGTAELLEIIADEHDDRIPSAARFSLDVLARQYAVVRAQVVAIEKRIHAWHRSSEESRRLEEIPGVGPIVATALVAEVGDWKEFTSGRSLAAWIGLVPRQHSTGGKERLGRISKQGNRHLRWLLVAGAMAVIRYARQHGTKRPWLARLMDRRPLKVAAVALANKIARMAWAMMVRGERFKEPKLLPAA

SEQ ID NO: 404500 - protein, 310 aa, unidentified
MESITVGIDVSKDRLDVAVRPSGEAFAVERNAAGLEQLTIRLWELAPQVIALEATGGFETIAAAALAAARLPVVVVNPAQIRAFAKAIGQRAKTDPIDAAAIAHFAEATKPVPRPLPDDATRLLGDLVARRRQIIEMIGAECQREQRVTVPHLRQSITRLLKALEKELASLNTDIGDAVRGSPAWREKENLLVSVPGVGRVISSILIAELPELGQLGRREIAALAGLAPFTRQSGKWRGKSFIGGGRTAVRTALFMGAFVAKRHNPVLKAFFDRLVAAGKPKMVALIAVARKLLTILNAIIRDNRPWQIA

SEQ ID NO: 404501 - protein, 358 aa, unidentified
MTRMTQPAPLDQSSPDIVLGVDTHKDVHVAAVVTAAGAFVESRSFPTTAEGYEQLLDWARTLGHLSQAGVECTGSYGAALSRYLHGQGITVFEVNQPDKATRRRRGKSDIVDAEAAARAVITGRATATAKAGDGPVEVLRLFKLAKASATKSRAQAINQLKAVLVATDPELRESLAGLSNPKLIRACARLDNSASGTAGAAAHTLGLLARRIQHLTEEIEDLTTRIRDVITQHNPQLLECYGVGPDTAATLLIAAGDNPERLRSEASFAALCGVSPVEASSGKTQRRRLNRGGNRQANSALYTIVLARLRWGTRTRGYIDRRISEGKTRREALRCLKRYVAREIHQLITRTTTHVLAA

SEQ ID NO: 404502 - protein, 410 aa, unidentified
MIKENYMYVGIDLHKETHTAVIIDCYNQKLGEITFPNRPADFPKLVAKVKKCNTAGKEVVYGLENAYGYGRALAVWLIDKGYFVKDVNTAISHRQAKHRGAMYRKSDSDDAKAIALATLNMLDKLPDACPNDAYWSLGQLVHRRDNIMKQRTRLVNQLHEQLCIAYPSYKQFFNDISRPTALYFWENYPSRKYLKGKSVEDLRAELVPVSHNKCSTRTCEKILDAIAGDKVKNNAYQDARDMVTLSIVSDLQHYDKQLAEVDKMLEQMYKMLGCTLTTIPGVNVITAVKILAEIGDIKRFSNANKLAQFAGIAPLHLSSSGKGKDVATKQGNRRLQATIYFLAIQMVQVSSKGTPRNSVVRAYYEKRKAEGKTSQQALICISRRLISIIYGMLKNGTEYRMPVVENAGEK

SEQ ID NO: 404503 - protein, 350 aa, unidentified
MRKVRWIGLDVHADTIAVAVAEPGGEVRSLGMIPNRPESVRQLMKKLGPPEPLRVCDEAGPTGYVIYWQLTALGVQCEVVAPTLVPTKAGDRVKTDRRDAEKLARSSRAGDVTPVWVPDAAHEALRDLVRAREAAQNDQLRARHRLGKFLLRHGRRPPTTMTPWTQRHLTWVRQVPFEQPAQEATRLDDLPEVDHAADRIARLERAIDDAVKTAPTRMRAVIDALQALRGIALISAVTIVAEVGELSRFTRAPQVMGYSGMGAREDSSGTRTRRGGITKTGNAHLRRIAIEAAWAYRHQPALGGTLRKRQATLSEEVKAIGWNAQLRPSMLLSKSFEDRADLTGRSISDR

SEQ ID NO: 404504 - protein, 473 aa, unidentified
MSKGSGLSRSERRRNARKERLRGLVPRDGAVVGIDLGEEKQALALIDHDTRVLWRKTARVRAHRLGEALDLAAAAAREAGFARVTVACEPTGPRWMQVQRLCAERGLTLVCVQPLASHIAREQQDYTCHKRDESDAVLIARLACELHCYVPEELDEAWAHLRQLGRRREQLVKAATAAVRRVRDFLSVAWPAAEAAAAGPFKSLTWLASLETVASRCGGDPARLAGLGEQEFLGLVTDQARAWGAKRADRRIARGVLAVLDDPDAVGWSRRGLFRRIAAELGDLRRLRAQLAGTEAEMTAVLGGELGLGRLGDIPGLTLTGAAVILAETGDPRRYETSKSLVKHAGLSPADTSSGAFEGASRISRRGRPALRTAAWRAVTPLLLHNPVMAAKYRALTAAAEDAARAAAAAARPGSAQAAQAGRAARAARAKARVACAAALLRWVCFMTVHDAGWDPAAASGGRITPEGLPEAA

SEQ ID NO: 404505 - protein, 417 aa, unidentified
MDTLFAKVAGLDVHLKAIQCAVRCCHESGKLLRQVRSFGTMTRDLRALANYLQALGVTHVALEATGVLWKPVWNVLEGRFTLLLVNPRHLKKVPGRKTDVSDAEWIAQLLQYGLLRGSFVPPRPLRELRDLTRHRAQLSGEHTRVANRIHKLLEDANIKLGAVASELLGKSGRAMLRALLRGEQDAKELAELACGRLRGKIPQLRLALEGHCTEHHRYLLGKLLSHLNYLESQTYQLSTRISHRLDELLAIEERERLDRIPAVNRLTIENVVAEIGTDMGIFPDEHHLASWCGVCPGNEESAGKRLRSRIRKGNRWLRRALTEAAWAASHLKNSYLSAQYRRLAARRGKKRALLAVAHSLLVIMYHVLKQKVEYRDLGRDYFDRLEPERLRRYLVKRLRGLGYEVTLAPKTPDDHAA

SEQ ID NO: 404506 - protein, 388 aa, unidentified
MNITTDQPEAPTAIRTELGAIFVSLELSRSSWLVTSLSPSGGEKMSKHAVRGGDVSRLLERFLQLREKARARTGKVFPLIVIQEAGLDGFWIDRVLQNEGIESHVVDPASIATSRRRRRAKTDKIDGETLVRSLLAYKRGEPRVCSMVKAPTPEEEDQRRLCRERKVLTAERVLHVNRIKGLLFCQGICGYEPLRRDRRDRLEELQTGDGRPLPPHLKAQVERELDRLELLLKQIKTVEGERDALLAVAITSMPAPAAMLLDIKGIGPEFAAVLWSEGLFRHFDNRRQVAAYAGLAPTPWQSGAIDREQGVSKAGNPRLRTTLIQLAWLWLRNQPQSALTIWFHERVLRNGGRLRKTTIVALARKLLVALWKYVTTGVVIEGATMKAP

SEQ ID NO: 404507 - protein, 355 aa, unidentified
MSRDIKYIGMDVHKEATVIAVLNANGNLVMESIVETKAGSLLQFIHGLRGELHVTWEEGTWAAWLYDLLKPQVQVLVCDPRRNALLKEGNKSDKVDARKLADLLRTGMLRPVYHGEHGLRTLRELGRSYQTISQDLNRVMNRLKALYRGWGIACAGTQVYAPRYREEWLQKIEHAGVRRRAELLYQQLDGLQALRRTLRPELLAESRKHKATKLLRQIPCIGPIRAARLLALMQTPHRFRSKRQLWTYCGLGIETRDSAQYRFVRGQLQRAKKPQQIRGLNRNHNHEMKEIFKGAATRASCGMGPLRDFYVALLDKGMKAEMARLTLARKIAAIALTLWKKEERFDAEQLKTQAA

SEQ ID NO: 404508 - protein, 370 aa, unidentified
MNSIAYVGLDVHKATISVAVAEGQRGGEVRHVGVFPNRPEQIAKLVERLGKGERRLSFCYEAGPCGYGLYRQLTDLGHDCVVVAPSLIPVKAGDRVKTDRRDAVMLAKLHRAGELTGVWVPDAAHEAMRDIRARATAVRVLGKARQHLQGFLLRHGHIYPGKKGWTGAYRRWLARVRFDHPAQQIVLQDYIHAVEDAEAWVERLTSQIEDLLPTWSMRSVVEAVQAMRGVGLIVAVTVVAEVGDFSRFQNPRQLMAYLGLVPSEHSSGATIRKRGITKAGNALARRVLIEGAWTYRMPARVSPKLHARLETLPKIVRDIAWKAQVRLCNRYRRLAACGKAKAVVTTAIAREMVAFIWAIACRVQEASATA

SEQ ID NO: 404509 - protein, 356 aa, unidentified
MIKGNKLDFTGQPIYVGLDVHKKSWSVSIGTKYGEYKTFSQPPEVDKLVGYLRHHFPGARYKAVYEAGYSGFWIHEQLRENEVDCLVVNPADVPTKNKERKTKRDRIDCRKLNRSLRNGELEGIYVPPRWKLEDRSLIRTRLSMGRKQTRCKNQIKGMLFFYGVVIPEEREMGHWSRRFIQWIEGIRMERASGDMALKIHLEELCHLRQIIAKLNRAILALSRTEQYRPWVCLLRTVPGISTLTAMILLTELGEINRFASIDQLSSYVGLIPDTEASGEKEHVGGITQRRHSQLRWLLIEASWIAIRKDPALMMAFDQYCKRMRKTRAIVKIARKLLNRIRYVLRNQIEYVPAVLE

SEQ ID NO: 404510 - protein, 317 aa, unidentified
MIYLGIDIAKHKFDAALLTQGKFKTKVFANDQAGISACLKWLATRAASPVHACLEATGAYGEALARALFNAGHTVSVINPARAKAYAASLGLRQKTDAVDARMLAHFVQAQQPAVWTPAPSELRALQALLRRLDALIEMHTQEHNRRGVAEPTVAASIAQHLDYLKLQIDALKTQIESHIDQHPGLKQQQALLESIPGIGAATSAWLLGELNLKRFESARQAAAFAGLTPRMRDSGSSVRGKPRLSKQGNSLLRKLLYFPAISAMTPNPLVRALCVRLKAKGKHTMAIIAAAMRKLIHIAFGVLKSGKPFDPSFANS

SEQ ID NO: 404511 - protein, 360 aa, unidentified
MEKVRSTSLAGRLVSEVRMTQIKYFVGIDIASSTFTAAVGAMPWKVVLKPQEFKNEADGFQVFMDWLTQHQLIANHTIVCMEATGVYGECLAYFLQVKGYRVCVEPPLKVKRAFKPNGPKSDAVDSLQIAEYAGRYFDQLTLWHPRSEILEQIKVLLATREQFVVQRTTHKNALQAIQRKVVKTPFAEQVHLQMIEQLKQQIRAIEQEIRRLIDSDSTFKPMLLLLMSIPGVGFLLAAHLILLSQVSLNHRQLASYLGVAPNEYSSGSSIYKHATSRHFGPQTIRKLLYLAACSVRTHRHEFKIYFQRKTAEGKSPRLVLNNIENKLLKIICAVLRSNTPYDPNYCSVQPPLSTTALTGS

SEQ ID NO: 404512 - protein, 415 aa, unidentified
MNRLIERCAMLDVHKAQVTACVRVPDGDGGRRQEIREFRTTTAGLITLADWLRSWAVTVVGMESTGVYWRAIYYLLEDEFECQLFNARHLRHVPGRKSDVQDAEWGCQLIEHGLVRTSFVPPRPLRELRDLVRYRKAKIQERGREVQRVEKTLQDAGIKLSSVASEVLGKSARLMLDAMISGTHDPALLAELAKGALRKKIPALREALEGRFTGHHALLVGQMLAQIDFLDETIATLSERVEELTRPFSREIELLDTIPGVDQRAAEMLLAEIGPDMSRFPTDAHLASWGGMCPGQRESGGKKHSAATRKGSKWLRGTLTECSKAIVRTKGTYLSARYHRIKSRRGHAKATVATAHKILTAAYHVLDKGVPYNELGEEFFYRRDTENTERYKRRLVHQLERLGHQVTLEPLPEAA

SEQ ID NO: 404513 - protein, 342 aa, unidentified
MNIVYVGVDLGSSNFHQVAVNEARVRKVNREFATSEANLIKAFADQRGEIHVHLEAGELAPWAISIIRPLVSRVVCSHPQSNAWIAKDADKSDRIDAFKLADLLRLNRFKEVHYPQPQSRRDFKTLVQHYDELTQQQARLKTKIKARLRMQGVIVRGEGLFSSQGRKAVLAAVKSVAVRTAIKQLYAVLDQSIESQTEARLLMRRAAQAFPEIRILQTAPGVGPIGACRFSAYIHTPSRFSSTRKLWKYCRLSVSHRSSNGKPLRRPRLDRNGCGRLKDVTRKAFEAALRTQRDNGFQRAYRRALETTHDKTHARLTVQRKIVSTLRAMWLNQTPYRDELMR

SEQ ID NO: 404514 - protein, 411 aa, unidentified
MNNTLFVGIDISKRSNVATFMNCEGKVVGRLTFSNNGSGADRLVARILSYYEKEDFEAIRIGLENTSVYSKNLVWFLYEHEALNEHKLSIIPLNAIMVANYKKSFLDMDKDDITDSFAIADFIRIRPGLLPFKLDDRQEALKIMTRSRYNYVQALSRMKSQFLTRLFLSFSEMEAGKPFYSIFSKTSLSLLEEEFTLDELAEKPIPELVEFLQEKGGGKFQNPEEIAKVLKKAASSSYRVPAMVRESLNRTMASDMEIMRILENEIHNCDKNIEKLMKSVPAILVSIPGIGPVLAAGIMSEIGDISRFQKQESLGKMAGFKWKRNQSGKKESEDKAAVLSGNKKLRYYLVEAANRVRIHDPVFEAYYRKKYAESKTHAHKRALILTARKLVRVIFYLLKENKLYKPDVGIS

SEQ ID NO: 404515 - protein, 317 aa, unidentified
MPQKTRFVGLDVAKSKVDACIRSEGLRMSAPSTPEGRAELVAWVRANRVGRAVMEASGGYERGWAEALRAAGVEVRIVDPKRVRHFAKAAGRLAKNDPIDADTIARFAEAFPDGEAQPHDPARDEIDRLVAARTALKDVEDRIKQQGEHGPPPIVAKALAAIAKTTRAELRRLEAAIAAKIKANPGFARRAEIVTSVPGLAGQTAAGVIAWLPELGRIRNEAAAALIGAAPYDDDSGGRKGQRHIKGGRRKLRNLLFMPVMGAATQHNPVLKAYYQRLRARGKEAKVALIACMRKLIVILNTMLARDETWNPARAAA

SEQ ID NO: 404516 - protein, 477 aa, unidentified
MPIIAPIPRGERRLMQKAIHKTRDKNHARRLTAMLMLHRGERVSDVARTLCCARSSVGRWINWFTHSGIEGLKSLPAGRSRRWPFEHICTLLRELIKHSPGDFGYQRSRWSTELLAIKINEITGCQLHAGTVRRWLPSAGLVWRRAAPTLRIRDPHKDEKMAVIHKALDECSAEHPVFYEDEVDIHLNPKIGADWQLRGQQKRVVTPGQNEKYYPQYVKPFVRGQKNDGNDAQAIAVALMQPTMQFVPPKSPEQQDIQALHRARQRIVNHRTATVCQIRGLLLDRGIPIGSAVSRVRRAIPLILEDAENGLSSRMRRTIAELYELFNDLGRRIHFFDKEIETVFRQSEACQRIARVKGIGPKTATAVVAAIGKGTEFKNGRHFAAWLGLVPRQHSSGDRQVLMNMTKKGDKHLRTLFIHGARAVVRVATNNNDGHMNQWVNQLKERRGFNKTTVAVANKNARIIWSMLRNETEYQVV

SEQ ID NO: 404517 - protein, 339 aa, unidentified
MLIIGCDFHPGFQQVAIFDNQTGEIWERRLQHREEAEQFYGGLGGQEVRVGMEACGHYPWFERWLEKCGIELWVGDAARIRATEVRRQKTDRRDAAQLLRLLLENRFPRLWVPSLEERDVRQLLVHRHKQVQARTRTKNQLQALALSQGVQKKYKLWTAMGRAELEKLELLPYATVRRQRLLATLDALEAEIQALNQQVEQEVKRRPAAVRLRTHPGVGPMTALAMVLTLGPVERFRSAKQVGSYFGLIPSEHSSGGRQQLGRISKQGNSFLRFLLVEAGQTAVRYDAELGRFYRRLAVRKHRALAKVAVARKLAMRLYLMLREDWDYAQLCKAVCRQA

SEQ ID NO: 404518 - protein, 410 aa, unidentified
MEVLYPHCAGLDVHKDTVVACVRHMVNGSVRREVRSFKTTTKELLALSDWLVGEGCPHVAMEATGVYWKPVWHVLSDGDFTLVLANAAHVKNVPGRKTDVNDATWLADLLAHGLIRSSFVPDEQTQEMRTLLRTRKQLVRECSRHVQRLQKTLEDANIKLDSVISDIVGLSGRRMIEALIAGQTEPGALAAMAHRRIKATPDQLEAALRGRVTRHHRFLLQLHLQQIDAVNAAIDQIDQEVDACVEPFRATVRLLTTIPGIDELSACVILAEIGRDMSRFPTAGHLISWAGLCPKNDESAGKRRSTRMRKGAPWLKTTLVQCAAAAARKKASYLQAQFHRLRARRGAKKALGALAASILTSVYHMLISGELYRDLGPHHFDHRAKAVNTRRLVMRLQNLGYAVQITPLAA

SEQ ID NO: 404519 - protein, 314 aa, unidentified
MNPSRIYVGIDVAKDRLDVAQRPGTEAWSASNDDRGIADLVARLKTLRPALVILEATGGIELPLVGALAAAGLPVVVVNPRQVREFARATGRLAKTDAIDAQVLARFAEAVQPALRPLPDAATQQLSSLVTRRRQVMEMLTAEKNRLRTTAPAVRDHVKEHILWLERSLSDLDKELEQAIHSSDIWRAQDDLLQSAPGVGPVLSTTLLAELPELGTLNRKEIAALVGVAPLNRDSGTLRGRRTVWGGRSQVRAVLYMAALVATRFNPVIRAFYQRLQAAGKPKKVALTACMRKLLTILNAMMRHQIPWRICSTS

SEQ ID NO: 404520 - protein, 425 aa, unidentified
MKSTRGMRRRSAKLARRSEIVTRGALVAGIDIARKECVVVFVRAADKARIGRLRVPTTPAGLLAIAGRGRQLAEQHGADRLVLAMETTGHYWKILARTADRAGLPYVTVQSFVVARARELDDLTRDKTDQRDAGLIADLAAELRFNEVQLETGAWAELRSLANARDHYRVDQRAALQEQRALLELTWPDLLTQTPDLDGSHLQAMLRLGLSPVQIGGLSRARFTARLRRETVGRFLPWMAGRLWAAARCAVPEDQAPSATLRLQLAAQRNRAGTIAVARLDAELAAAFEATGLAWLRGQIRGLGDSQLHNLLALTGDPRRLDDARCMVKLAGSNPTERSSGEQQAAGGIHRRGRPLLRLLAHQAAVCLVLHHPDFEARFAELTNRPHRPLHKKQAYLAVANKLLRTLWALAVTGQPYQHTLARAA

SEQ ID NO: 404521 - protein, 351 aa, unidentified
MMIIGVDYHPSFQTIAFLMEETGECGEQELNHSDRQAEKFYRDLKQRGICVRVGMEATGYSRWFERLLAELGFELWIGDPAEIKAKRVKKQKTDREDARLMRKLLLENRFPRIWVPDPENRDLRQLLWHRHRLVQMRTRIMNQLQALAMNEGYRWKKKLFSEQGRAQLEKLSLAPWASRRRQELLELLDRLNPTIEELTAAVEREARKRPAAQRLMTHPGVGPLTALAFVLIIGTWERFPRGKQIGNYVGMIPSEDSSAGKQRLGHISKQGNSLLRFLLVEAAQAAARCNPDWRRRYFHLAMRRQKNIARVAMGRRMAVRLYWMWRNGCEYSPSLEFGSYAGQLVTGHGAK

SEQ ID NO: 404522 - protein, 318 aa, unidentified
MAQVVSFEQIVARGCGLDVHKKTVVATIDGEGLKKETREFSTITRSLTELKEWLLSMGITHVVMESTGVYWKPVYHILEPSGITVWIVNARHVKYVPGHKTDKRDSKWLCKLLLAGLLKPSYIPSREQRELRDLTRYRRKLIEQIASEKNRIIRLLEDSNIKLSSVLSDTQGVVGTKLVDRLCENGRISMADIEEVYHGKLQASKEEIYEACEGFLTEHHVFMLHAIKEDIRSCEAIISKVTSRIKEMLSPYDNVVELLKEVPGLSTKSIEDLVAEIGLDMSVFPTEKHLASWAGVAPGNNESAGKKKVDVLHTETSK

SEQ ID NO: 404523 - protein, 342 aa, unidentified
MGSVIRRGRSRHTMSALVCGLDVHKDSTYATILNSEGKIVDQARMENDKVASYLSRFKVGRVAMESSTCVAPLYRQLKKKGFDAVVSHPKKTKLIAETKIKCDRVDSMAIAQLFRTDWLPLSYVPDEEMDALREKVRRRAFLVRERVRLRVKIKSYLMYQGLKWPTDHGLWTKAGVVWLHGLGLAPVESYLRLIGLFSEEIKLLSGELQGLARGDGDVGLLMTIPGVGYYSALLIASEVSDVGRFSCGENLCSYAGLVPSTYQSGGVVRHGKITKEGSRWLRWIMMECASTHVSKYDTWISRSYRCLAGRRGRKTARVAAARKLLVVCYSVLKFKRPFFDQP

SEQ ID NO: 404524 - protein, 404 aa, unidentified
MTEPALGIDIAKLKFNVCLIKHDGKLKHKVLPNNEAGFEQLTEWFSRQGAGRVHACLEATGTYGEALALFLHQAGHAVSVVNPAAIKAFAQSRPSRTKTDRVDAELIARFGQAQEPPRWTPPAVEVRELQALVRRLESLIEMRVMEENRLSSGITVDSVRQSVEELLNHLNEQIKHCEELIRQHIDNHPGLKRQSELLDSIPGTAESTAAALLAEITGIKQYKSARQVAAYAGLVPRERQSGTSVRGRARLSKIGNARLRRALYFPAITALRCSPFFQAWAKGLQERGKSKMSVICAVMRKLVHLAYGVLKTGKPFDPEWEKIACLPTQYLTGRTFNYITVKLTMKAALFALRLNELLDRPLSILFNFVSASLSFATHDLILWFREGCLRPEWTRAEGVSLSDR

SEQ ID NO: 404525 - protein, 348 aa, unidentified
MRFYTKQHKFYCGIDLHARSMYLCILDQKGKTMLHRNFKSSPEAFLRAIKPFGDGLVVAVECMFVWYWLADLCAQQNIPFVLGHALYMKAIHGGKTKNDKIDSKKIATLLRGGTLPVAYVYPRTMRSTRDLLRRRNHLMRKRSELLAHIQNTNSQYNLPDFAKKLAYKANRDGVPEHFPDPCVQKSVEVDLQLLDFYDRLLTELELYIVRKAKGHNSRTFYLLRSIPGVGKILSLVLLYEIHTIDRFPRVQDFVSYCRLVKCPRESGGKKSGSKNSKIGNAHLKWAFSEAACLFLRGNEQAQLYHERLVSKHGKGKALSILAHKLGRAVYFMLKRKEPFNMDVFFARA

SEQ ID NO: 404526 - protein, 328 aa, unidentified
MDHFAGLDVSVKDTSVCIVDETGRIVREVKVASEPDALLAVLTNPAYHFKRIGLEAGPLSQWLFSVLAEAGLPVICVETRHMRAVLKAQINKTDRNDARGIAQMMRVGLYRPVHVKTLRSQKLRMLLTHRKLLQSKAIAIENDLRGTLRNFGLKVGMVGTVKFEARIKELIANLPDLAELIEPLLIARQVIRDQFTILHRRLLAIVRDDEVCRRLMTVPGVGPVVALTYRATVDVPARFRNSKAVGAVLGLTPAKHQSGERDQTGGISRCGDEMMRMMLYEAAQDADAFSQMVLAQGLGDEDCQAPRAEKSDRGAGASVGRDHAPHLG

SEQ ID NO: 404527 - protein, 360 aa, unidentified
MDLHKNTSTFVVKDKEGKLVNSAKVLTDKNDVRRYINSLKRNSGGKELSLAVEPVSQWYYYADLIENLGVDVHLAHPMDVKAIAHARIKTDKIDAGVLADLLRTNFLPEAYFAPAEVRSWKEQCRFRASVINLRTQVKNKIHAILFKHSLRHNFSNLFGKSGRRWLAGLDLKEPFKGNLDKYLLLIDQLTEQVVRAEEIITNTVINCPQAYLLISIPGISYCSALTIMAEIGNIDRFISVKHLQSYAGLIPSTYNSGDKQIHGKITKRGSKWLRWIMIEAAYHQMNCKRIPGFGSYYNTLKKRKGSKTAAVATARKLLAVVWRLLKDNRPYEAIDPRCWKSRPIASKYSSVSTVVNTTED

SEQ ID NO: 404528 - protein, 404 aa, unidentified
MEERTAGIDLASEEHRLVVVDAEGRQLDERRVVHDEEGITALVRRLDELDVARVAIEQPNGLVVDRLLEVGISIVAVHPNQLAASRDRYRAGGGKSDGFDAFVLAELARTDMHRLRLLDADSDETKALRALTRAREDLVEQRVALTNQLRAQLDAFWPGAGRIFADLDSPICLAFLERYPSPQDASSLGVKRLAGFLARNGYSGRSNPAQLLARLRTAPHGRTGGAELEARRAIVLALVAALKPLTEQIKLLTSQIADAVRTHNDGAIFLSLFRNPKTVITAAELLAEIGDRRERHPTSASLEAIAGQSPVAVQSGKKKVACFRWACNKNLRDAVSVLADSSRKHNPWANDIYQRARARGHDHPHAIRILGRAWLRVIWRLWQDGAAYDPSRHRSLNRLLATKG

SEQ ID NO: 404529 - protein, 423 aa, unidentified
MTSMTLDPPLTNPLPPGSELVAGVDTHKNTHHVAILDLVGRPVADREFRADGRGYAQIVAFLHAHGDVVRIGVEGTGSYGAGLTRALTTAGLTVIEVARQDRQARRRRGKSDPLDAHQAAVAVLSGTDTAIPKSGDGAVESMRILLAERRSAAKARAQVMNQIHALLITAPELVRQAFRALSGQRLVNTLAKTRPGTITSPDPAVVARQTLRRFAVRHLTMQAEIDLIEQQLEMLVRQVNPTLLSLSGVGPVTAATLLVAAGDNPERLGTRASFAALAGVAPIPASSGQRTRHRLSRGGNRHANAALHRIVLLRMRHREPRTMAYFERRRSEQLTDRDIMRCLKRHVANEIYAALLNPATDNPVGRELRARRQAKGIPISVLAATLGVPYQRLRRLEIGTRADPELEARATAILEQISPPLAA

SEQ ID NO: 404530 - protein, 336 aa, unidentified
MQYKRIAIDTSKHVFTLHGVDEHERPVLRRNLKRVEMETFFGKLAPTEVVMEACGGAHHWARLLNHLGHQVRLIPAQYVKPFVKRAKNDRADAAAISDAASRPDMPAVAVKTAAQQADTMILKHRELLIGQRTAAINALRGHAAEFGVIAPKGTVQVEALLDKLANEDAVPAAAKTMFARMGDHITALDQQITALDTELLALHKTNPMSRLLAEVPGIGPIIAITLSLSVEPAHFASGRHFAAWLGLTPKEHSTGGKPRLGKISKAGNERLRSLLVVGATAVIRHAKPGKSSAWLLQLLGRKPRKLAAVALANKMARIVWAMMARGEAYRHPPIAA

SEQ ID NO: 404531 - protein, 457 aa, unidentified
MRKKTKRTAGIEEAHPFSGMSRIHPHAAGVDIGAIEIVACVPGDENTQIVKAFGNYTVDLQALAQWMKGHHIQTVAMESTGVYWIPLFEELERQGFECLLISSRSLRRVAGRKSDITDAQWIQTLHTYGLLEGSFRPQGDLVALRTLLRHRSQLVEHRSPHIQHMQKALLQMNVQLSQAVTDITGMTGQKIIRAILAGVRDPQTLAALREPGCKKSEEEIGKALTGTWREEHLFVLKQSVLLYDFYTQQIQSCEEEIERLYGLTRPEWEEGEVEPFTRRKKNSHSKNLPQHPEEIRKHLKRISGVDLSVVDGFGVSLAQTVIMEVGTDMSKFPDEKHFCSWLGLAPKHEISGGKVLKNNTLKTRNRAGQAFRMAAQSVKKAENVFGIFYRRLRARLGPSQATVATAHAIARVVYRMLKYKVEYEPLSVNEYQRQYEAQQIKYMKKRAAKFGFQLVPT

SEQ ID NO: 404532 - protein, 361 aa, unidentified
MKKPAQHLIAEVPRRQAKVEITIGIDLGDVWSHYCTLNQDGEVVDCGRFRTTPKAIEKWFTDVAPARVAMEAGTHSIWISAQLQELGHEVIVANVRELRAISHSDRKSDQVDAEKLARYARLDPNILRPIAHRTVAQQQALTLIRARALLVRLRTAAVNAVRGLTKSCGYRMPASATTCFAQRSLAVMPPGLAQALGPVLQQIAEMTVKIKQYDRQIQQLGQTDYPETQALLKVHGVCHLTALAFVLTLGSKERFGRSRDVGCYLGLRPRRSQSGDHDPQLGITHAGNAYLRSLLIECSNHILRPHGRDSALRQWGLRLAARGGKQARSKAVVAVARKLAVLLHHLWSTQATYMPFYEQAA

SEQ ID NO: 404533 - protein, 343 aa, unidentified
MAHYVGLDVSVRHTSICIVDDVGKVVREARVTSEPEAIIPILTAQHLACRRVGLEAGPLSQWLFNTLASAGLPVICVETRHMKAALAAQINKTDRNDARGIAQMMRVGLYRPVHVKSEPSQEKRTLLAARKLLQGQNRAIENDVRGLLRSFGLKVGSTSAGAFDARIRQLVEGLPRLTAIIRPLLEARAVLRSQFAVLHRMLLDLVREDPVCRRFMTVPGVGAIVAITFQATVDIPQRFTSSKAVGAHFGLTPRAFSSGETDYTGRISRCGDALMRATLYEAAHTLLTHTQRWSSLKAWGVRVAQRRGLSKATIAVARKLAVILHRMWIEKTEFRWSARPATA

SEQ ID NO: 404534 - protein, 403 aa, unidentified
MNSVGIDVSKGRSMVTAIRPMGEVTLTPYEVVHNELELEKLAYSIIGLGENTRVVMEATGRYHEPVAAALHELGIYVCILNPIVIKQSGAGSVRKVKSDKKDAFKIAKYGLDNWTKLREYTPMDAIRQQLKLFSRQYNLYMKTSVSMQNNLISLLDKTFPGADKLFDSPARDDGHQKWVDFAMDFWHCDCICRVGEKAFIERYRKWCKRKGYNFSDVKAEDVYASSCGHFTTLPRNDNTKLLIQSAAAEVVATMKVLATVKAEVIRLAKQLPEWETVRSMYGVGDITGAQLIAELGDARRFANRGSIVAFAGIDPEVNESGNYRRESNPSTKRGSPHLRKTLFQIVSTYLKKSPTDEPVYQFLDKKRSEGKPFYVYMTAAANKFLRIYHARVRDALNKVEPEE

SEQ ID NO: 404535 - protein, 328 aa, unidentified
MENEIHFIGIDVAKAKLDVDMLRPDGRHRSKKFANTLGGHDELVSWLRGHQVIHAHICMEATGTYMEDVAAHLSDAGYQVSVINPMLSKAFVQSQGIRSKTDTVDARQLAYFCREKRPAIWEAPHPVERALRALVLRHQALTEMHVQEQNRRESARDVQLPGIDMHLLWLDTELKRLEKQIKDLTDDDPDMKHRRKLLDSIPGIGPKTSAVLLAYVGLKERFREARQFTTYAGLTPRQHESGSSIRRVSRMSKMGHVSLRRALYMPAMVTLYKTEWGREFRERLEKNGKNAKLIIGAMMRKLAQVAYGVLKSGRPFDATLHTKNACMA

SEQ ID NO: 404536 - protein, 346 aa, unidentified
MHYIGLDVHSKVTMACILDECGNTVERKFPGSWRDLVTRMKALKKELGGPIKVCYEASSCSGWLHDQFVALGFQVQVAHPGKLRLIFRSKHKNDRVDAAKLALLLRLDQVPLAHMPPAEIRQWRALIEFRARLVGQRAACKCRIRALLRSVAIVPIRGLWTKKGLAWLAVQDELSSLQRVQREMLVHELADGAKRINMVEKELKTFAAKMPSVALLMTIPGVGIRTAEAVVAYIDNPDRFRRNKSVGCYFGLVPCEDTSVNIRLGHITKDGPSLVRWLVTEAAWMAIRRDPTVRAFFERVMKGDPDRKKIALIATAHHLLRVMHAMLRDGTPWQTAETEVTDPAAA

SEQ ID NO: 404537 - protein, 347 aa, unidentified
MRFYTRQHGYYCGIDLHARTMYVCIISQDGTVLVEKNIRARRGPFLDLVAPYRDDLVVAVECIFTWYWLADLCDEEGIHFVLGHALYMKAIHGGKAKNDRIDAGKIAALLRGGMIPRAYVYPCPMRSTRDLLRRRLHLVRHRARLLAHIQNTNHQCNHDDFRKKLTYKANREGVAEQFDDPSMRKSVEVDLALIGHYDGIIRDLELFIVRMAKQHDTDMFHRLRSITGVGKILALTILYEVHDIARFETVQQFASYSRLVKCSRESAGKRMGTGGAKIGNVHLKWAFSEAAVLYLRKNPEGQKYLARLASKHGKGKALSILAHKLGRATYFVMNRSRSFDEKKFLAA

SEQ ID NO: 404538 - protein, 396 aa, unidentified
MISVGIDVSKGKSTVCILKPYGEIVSKPFNITHTQKDLSELSSMLFRLNDEVKIVMEATGIYHLPVLTYLQEKGFFVSVINPYLMKSYRNESLRKAKTDKIDSRIIANYGIDHWFKMKEFQTSGEIYEELKLLGQQYRHYMKLHLLSLAELTHLLDLTMPGIKNLLASWNETNRKDKRSDFVERFWHYDVITSMSEQEFTEEYILWAKEKKYVPSQEKAKVIYALAQESIPTLPSETSSVKILVTEAVRVLKEVDATLGLILSRMQEIAKTLPEYSVVREMGGVGNTLAPKLIAEIGDVRRFRNGKALVAFAGIDPPPYESGQFVGCNRKISKRGSASLRKVGYETMRSLKMRSRPEDPVYRYVVKKESEGKSKKNIEISRKIYRACLKNHFCNTF

SEQ ID NO: 404539 - protein, 364 aa, unidentified
MEITTIGIDLAKSAFAVSGADSSGRVVVRRQLRRAQVLSFMRGLPQCTIGMEASGGAQYWARQLTALGHAVRLMSPALVMPYRKGNKTDRNDADAILEAVTRPSMRFVTVKSVAQQDLLALHRVRAQLVKSRTALCNQLRGLLRERGVVVRVGVAGLKRGLPAALADESSELSGELRELLGEMGQWLRTLEQRIASCEAQITRKFKHDERCARLAEVPGVGPLTATALVAAVGNAQRFKNGRELSAYLGLVPRQHSSGGKTVLLGITKRGDRYLRTLLIHGARSALRQCKDDARSDWARRIRAERGPNVAAVALANKNARVLWALLARGDRYRSTRVATPAALHSSAPPAVKRARATRLRALKD

SEQ ID NO: 404540 - protein, 426 aa, unidentified
MKFNTQNAKITAITDKTLVIGIDVGSETHFARAFNWRGYEFSRKPLEFGNTEEGFETLRTWIMELKEKHGMDKVIPGMEPTGHYWFNLGKFLQDEEMRPVHVNPHHVKKSKEMDDNDPSKNDRKDPKVIAGLVNEGRYFYPYIPDGIYAEIRALSGLQVLARSEITRLKNRIARWFSIYFPNYKDVYGNVGAVSGLMVLKEAPLPEDIVKLGVDGVNRIWRDAKLRGVGLKRARILVTAAEHSVGSREAQEAARIELRILLADYERYTAREKELMALIEEKIGEVPYVDKLLEIRGIGLKTVIGFVAEVGDIKRFDDPKQLQKLAGYAIVRSQSGKHKGESHISYRGRKRLRYVLYEAAVSVVSHSPEFRSIHRYYTTRDRNPLKKMQSLIAVACKLIRVFYLILQTGATYKAEKMMEDIRRPAAV

SEQ ID NO: 404541 - protein, 375 aa, unidentified
MTKHSEVFVALDTSKLRNAVAIAEAGRAGEVRFLGEIENTAAATTKLVRKLEAKYERITFCYEAGPTGYELQRHIRGLGHECIVVAPSLIPKKPGDRVKTNRRDAVSLVKLSRAGELTAVWVPDRRHEAMRDLTRAREAAVIDLRAKRQRVSALLLRQGRSYPADKKTWTKVHMNWLASQRFEQPELGVVFAEMMFATRQAQERVERLEQAIRTAVPDWSLAEMVTAFMAFRGIDLVSATCLLAELGDLTRFPTAPEVMGYVGLGCSEGSTGDRIKRGGITKSGNRRARRTLVECAWSYQHPPRVGIAKQAKVAAAPTKVREIAWKAQCRLNRRYRVLLRRGKLKTVAITAVARELAGFLWAAARELSSPQRVAK

SEQ ID NO: 404542 - protein, 400 aa, unidentified
MNPVVGLDVSKGESQVQVFLDKGQPYGKSFSILHTREGLVTFLHFLKNVESITGQQPPVVLESTGHYQTPITQCLEEQDYLYIVINPLISYQAKKSNLRKVKTDAIDAYHLCELYYKEELQPYKKRGLQLLNLRNLTRQHDSLTDLCVQAKLQFHASLDQVFPEFRTVFGNLFSKVSLHILLEFPTSEEVLKARESELTKRIEAICISRSNAWAQEKAKKIMDAASRNPFQKAVYESHLISLEMYIRMILQYQEHLSNLEHRIDALASEIEEYKIIQSIPGIGEKIAATIISEIGEIERFNHPKKLVAFAGIDPSVHSSGKFTATINRITKRGSSRLRHALYMAVLCGIRSSRNKKLKEFYDRKHAEGKPLKVTIIACVNKLIHWIYTLLKRKETFLDMA

SEQ ID NO: 404543 - protein, 405 aa, unidentified
MKYFAGLDWGTATHAVCVVDQAGRVVLRTEVRHDAHGLVSLHRQLKRIAPAIPIAIERPTGLIVDALLASGHPIVPIHPNVVKACRPRYTAAGGKHDPGDAYLLADVLRTDGHRFRPLTPASDAIKALRAMVRTRDDLVAQRIALANQLRALLDSFWPGAAALFHQIDSTIALAFLHRYPTPTSAAHLGQKRLSAFLRGEGYSGHQTVPQLLARLRAAPVGRTGKLEEQAKGELGRALANVLTTLLQEIATLTARIEDAVAQLDDGVLMMSLPRTGRLNAAQILAELGDVRERLPTADHLAAEAGVAPVTRQSGKSRAVRFRWACNHRLRLAITTWADNSRHASPWAAHIYATARARGCRHPHAVRILARAWIRILWKIWTTRTLYDPLKHTGAQPFFKAPSATA

SEQ ID NO: 404544 - protein, 315 aa, unidentified
MSRKSFVGIDVSKDRLDVAVFPADQVVAFDNDETGREQLVSYLQPLAVQLIVLEATGGYELAVTASLVAAGLPARVVNATHVRNFARSVGQLAKTDKLDACVIARYAEAVKPQLRPLAGPEDLELKALVARRQQLLGLIGQERNRLRMAPAKVAQSVRASIDFHKKQLAELDQDLDRFIRSSEVWSEQNDLLQETKGVGRVVAATLLAELPELGRVGRREISALVGVAPFNRDSGKLRGSRCIWGGRAHVRAVLYMAAVVASRRNPVIAAFYQRLLAAGKKKKVALVACMRKLLVMLNAIVRDSLKSQPITLPNA

SEQ ID NO: 404545 - protein, 367 aa, unidentified
MKKINTAAAKPSRNISQQKLTMGLDLGDRSSWYCVVDESGQIQREQRVGTCGKALQEVFGALPRSRIALEIGTHSPWISRLLSELGHEVIVANARKVRLIGESRKKDDRLDAQTLARLARIDPELLYPVKHRSVQAQADLTLIRARAGLVRARTGLVNTARGLAKSYGERLRSCNVRNLNPEKAESLSPELQAALEPLLNAIESLSERIVEYNERIENLAQQSYPQVALLKQIKGVGTLIALTFLLTLEDPHRFRKSRDVGCYLGLQPGRRNSGQSEPQMHISKEGDPYLRTLLVQGAQHILGPFGPDCDLRRWGLKLAERGGRNSKKRAIVATARKLAVLLHHLWVSGEVYEPLHNSSPTTVAAAA

SEQ ID NO: 404546 - protein, 421 aa, unidentified
MRAVFGIDVSKTSSEVAILVNGEKVHGYTMLNDAFGFNRLLGDLKTVHNPEIIFEATGVYSRRLQAFLEEYSYAYTRLNPLEAKKQLDSLRVRKTDKIDAEKLAKSQLVHNRKPTYVQEEVYQHLRDLSRFYQNMTEDLVRTKNRLHKVLQVTFPELETLLSTPTGEQYWNLVMAFPCKEFVLSLSQSNLCEIIRQSTSKRISEKRIAYLTDKLIKLAKQSFCAVKNTSPMLEEVRYYAQELLRLSERRQVVLNDMVALAQPLPEYDILRSIPGIAETTATSIIGELGDIRRFQSTNQINAFIGIDLRHYESGNFLAKEHITKRGNPYARKILFKCIHNIASASHTNPCHIADFYEKRKRQSTIASTKPHTIASIHRLIRTIYYLFLIFTKKIYFLLYIVYFKFPNTFFIVLSLSKRSKET

SEQ ID NO: 404547 - protein, 334 aa, unidentified
MALELLAIDLGKRSFHLYGIDSDGVILSRKISRTKLAEAVGELAPKVIAMEACASAHYWARCWLAAGRQVRLINPRFVKPFVKGSKNDAADAEAIFEAAMRPTMRFVPVKSPDQQDLQSLHRARDRLICQRTALINHTRGLLAEYGIVLPQGPWRFTSQAPAAIADADLSELARAIFGELLDQLSDLDRRIKKLDARMVGLCRTNPTCRRLAKLPGVGPVIATAIVAAVNDGRQFRSGREMAAWIGLVPRQYTTGGKPRLGGIGRRANHYLRRQMIHGARAVVSRLPKNADRQATWLQALVARRGFNRTIVAFANKTARIAWALLTRQEAYAAP

SEQ ID NO: 404548 - protein, 322 aa, unidentified
MNRKTFVGIDVSKDTFDVAILSDDRIVAKANFINSKKGYTQLSKWQKKYDLNPHICMEATGHYSEPIAEYLFAAGFKVSVENPYKIKQFARMRLTRNKNDQLDAEIIARYTQQNMPADFKPRPKAQKEIRELSQLIDTLKEGLVRLRNQLSSAQTTRAKTAYKQIITQRKKQIQKLKLKLDDIVENHDEFKQAIDLLQTIKGFGRDSAITLLAYLPDISLFPSAKSLAAFIGLSPRQNQSGRFIGKTHLCKFGSPRLRRIFYMPALSAKRFNEALQPFVRRLEDSRLAPKAIVGAMMRKLVHIIYGILKHQRPFDACLACAA

SEQ ID NO: 404549 - protein, 391 aa, unidentified
MVCVGIDVAKDKHDCCILDSDGTVRADCFTIPNNSDGFKRLLQTIQDCTQKSDKIKVGLEATGHYSYNILGFLLDNGLPTYVINPLHTNLYRKSLSLRKTKTDRVDARTIATMLLSDVDLKSYTDVAYHNEELKSLTRYRFEKVRERAKLKQSVSRLVTILFPELEQLVPTLHIASVYSLLSEYPGAKQISEVHLTKLTNLLTTASKGHYGKEKAIQIRDAARVSIGSVMPAKSLELKHTIKLIRELTSEMDEIEVSIQKIMDELNPPILSIPGMGIHSAAMILAEIGDFSNFESSDKILAYAGCSPSTYQSGKLSNCYAHMEKRGSRYLRYALYNATKYVCHWNPIFAEYLAKKRAEGKHYNVALSHATKKLVRLIYALQKSGKAYLTAA

SEQ ID NO: 404550 - protein, 358 aa, unidentified
MRIIGVDLHARQQTIAMLDPETGELVEKTLKHEGETVREFYSALPHPVLVGIEATGSMHWFLELLEELGIERQVGHPAEIRAAEPRKQKHDRRDAALLLKLQVENRFPSIWVPSTELRDLRALLRHRHQWVRMRTRVQNTLQAIALSHGLRRGQSLWSQAGQQAIASLPLAPHAAHRRTELQALNCKLGKQIDELGERVMDQALQRPGAKLLMTHPGVGPITALATDVFLGDPARFDDGKAVASYVGMIPSEYSSGGRQRLGGLSKQGNPLLRFLWCEAGIHAVRRDPELKRFYRRKLQQKGLGKTRVAVGRKLGIRLWIMLRDQIDYQEFCRRGQMRQKSGGARAGMPEGVHSPARS

SEQ ID NO: 404551 - protein, 444 aa, unidentified
MTRRCIGLDVHRDFAQVAIWQDGLVRQAGQIAMNAEALAVFADSLAPTDEVALEATGNTNAIVRALRGRVARVVVGNPQKTRAIAEAKVKTDKVDAEILAQLLAADYLPAVWVADEATQVRRRQVARRAHIVRQRTRLKNQVQAVLHRNLIPRCPAADLFGIKGRAWLAEQPLPADERQAVSALLRQLDFHGQELKLIDQELARIALRCQDTKRLMTIPGVDVTVAMSITAAVGDFSRFPSPNKLVSYLGLNPRIKQSGGQPASHGRITKQGRAHARGMLVEAAWVAVKTPGPLRAFYERVRARRGMQIAVVATARKLTVLCWHMITRGEDYAFARPSLTAKKLRALELQAGMSPRRGQKGRAAGYSLKEVRAREKQMAEQAERAYRQLVADWRAKAPATKSVGVAAANGARLSRPSNGATAARQASAPEPALRSGVDHAHTRG

SEQ ID NO: 404552 - protein, 355 aa, unidentified
MNDAKYIGMDVHTATISAAVRDSGGNLVMEATLETKAETVLEFVHGLRGSLRVSFEEGTCAAWLHDLLKPHVSEVLVCDSRKNALLRVGNKNDREDARKLSELLFLNKLHPVYHGETGIRTLKELARSYLTITRDLTRVMNRLKAIYRGWGIACAGQQVYAPRYRAEWLAKITEVGVRRRAEIYYQQFDALAALRQEVRRDLLAESRKHPAMRLLRQIPSIGPIRAALLIALMQTPHRFRTKRQLWAYCGLALRTYDSGEYRFVGGQLKRSKKAVTIRGLNKNHNHDLKNIFKGAATRAASTAGPLQNFYEARIANGMKPPMARLTLARKIAAITLLVWKKGVRFDAEQLKQQAA

SEQ ID NO: 404553 - protein, 339 aa, unidentified
MPLYVGLDLHSNNNFLAVMNKQGKRVDHKKLPNDPEIILEALRSHRGKIGGVVVESTYNWYWLVDALMAAGYPVHLANPSAIQQYSGLKHADDQHDAFWLAEMLRLGILPEGFIYPKEERPIRDLLRKRGHLVKLRTSLIISLQNIISRNCGVQFKVGEVKRLKEDRVSPLLESNEDLALAGRASKETIDYLTRQIRRIEATIVKRIELRESYRYLLTLWGVGKILALTIMLETGPISRFAQVGNYVSYCRKVPSQWTSNEKAKGKGNKKNGNKYLAWAFSEAAEFARRHHAEARAYYNRKMQKTNFMVAHSALAHKLARAAYYIMKDQVPFVPEKLFG

SEQ ID NO: 404554 - protein, 335 aa, unidentified
MSRELLAIDLGKRSFHCHGIDSDGVILSRKVSRAKLLETIKELAPKAVTMEACASAHFWGRRFLADGRRALLISPWFVKPFVKGSKNDAADAEAIYEAALRPTMRFVPVKSTEQQDLQSLHRARERVVCARTALINHMRGLLGEYGVILPQGAWRFLKQAQEAIAAADLSDLARGLFVDLFDELRALDLRLDKLDRQLLGLCRTNEACKRLSKLPGVGPVIATALVAAVDDGRHFRSGRELAAWIGLVPRQYTTGGKPRLGGIGRRANHYLRRQMIHGARAVMVRLTKHEDRRSQWLKGLAARRGFNRAIVALANKTARIAWVVVTRKEDYLAAA

SEQ ID NO: 404555 - protein, 345 aa, unidentified
MEHYVGLDVSLKLTAICIVDRTGKIEREGVVASDPETIAAFIKSHAPHVARVGLETGATSTWLWTELNKMGLPVICIDARHAKAALKLQINKSDRNDAVGIARIMQCGWYKEVRVKDLDSHALKALLVSRALLVKIKRDIENQIRGLLKNFGLVIGQAKMNVFSVRAAELAEARPELTVAVEPLLRAREAIGRQIADLDGKVMRLARNDAQVRRFMTAPGVGAITALCFLATIDDPTRFKRSRSVGAYVGLTTRRYASGEVDWTGRISKCGDKMLRCYLYEAANVLLTRVAKWSALKAWGIRLARRSGLRKAKVAVARKLAVILHRMWIEGSEFKWSSKEANQPA

SEQ ID NO: 404556 - protein, 345 aa, unidentified
MENMYYIGLDVHKKTISYCVKDGSGRIYAEAEIPATRLDLDMWMKTLPQPWTAAMEATIFTAWIYDHLKPHAAAVKVAHPLMLRAIAAAKKKNDRIDAHKIADCLRCDFLPECYMASTEIRERRRTLRYQNLLVRQAVQMKNKIAVLLMEAGVSYNKQKLHKVGYFRDLLATNQDIDEGLKPLLRLCRETVVRLGKIESVLVRSLQRDSLLRERVERLMTIPAVGPITALTWALEVGDVQRFSSIKKAISYCGLCGAENSSANVIKRTPLSKQRNKHLQTTLIEAAKMAPRNSVDLAMLYDREKQKDNANRATLAVARKLVAYLVAVDRRQKDFLVVASENRTAA

SEQ ID NO: 404557 - protein, 325 aa, unidentified
MTHSLLPDSSYFVGIDVAKATLDMARSDTGEILTVNNDSEGIRRIVDSLRSTPPQMIVIESTGGLERPMLDALLDADLPVALVNPRNVRHFAVGIGILAKTDPIDARVLFEFAKLASPRLAEKRSANQVELDALTTCRRQLTQLRAIQINRRGTTTSKAAIKTIDAVLKALGREIQKLDKKIRALVESDDDFDSSDKLLRSVPGVGAVVSATLLAELKELGSTDRRRVSALVGVAPYNHDSGTMKGQRSISGGRASVRSVLYMATVTAIRCNPVIRAFAERLDKLGKTKKVQIVACMRKLLGFLNVMIRDRLNWNQLKVVKALEN

SEQ ID NO: 404558 - protein, 373 aa, unidentified
MPRYSTAFGMDVHLRSTTVCALDAETGEAVARRFRGNPWGEVAEWMSGFPGPSLAAYESGYLGFAPQRELSGLGVDCVVAAVSKVPRSAADSASKNDRNDAARMAKAILAHDISPVWVPSPEVEGIRDLAGAYGGATARLATAKQRLLAFLAKRGFVYGGTTPAGNPRKYWTYDFLRWLDKVRPEDDGGVRTLAALRNEVEAAAEARADLLSEYRAAVDASPIAAEVAALQSIKGCAFALAAAFSAEVGDFTRFRSGRQVTAYFGLAPSQRSSGDSVRLGGISGAGNALVRKLAVEGSWCYAAARHQPKLMPRDTGVPLEIRMHGRKGSERLLRRREEMLARGMPAAKANAATAAELVRWLWALGMMCREGAE

SEQ ID NO: 404559 - protein, 358 aa, unidentified
MDLVDHVVGVDPDRDRITAAVVSAKTQGELAWRTFPATARGYRAVQRWAGEFTETGRRAWAIEGSGSFGAGLATALAANEEYVIEFDHPRSRAATDGAKSDALDAVRAARETLGRAAWSSPRARGAREGLRTLIVARDSAKIARVAAINILKALIVTAPEDIREQLRKQPLGQLLTRCQRLRPETSQDPERAATKLSLKSTAHRIADLTRECEQLEAAMLPLVKHLAPRLLDETGIGTLVAAQIIISWSHPGRCRSEAAFARLAGVAPIEATSGQTQTRHRLSRGGDRQLNRAFHQAVLIRAKVHQPTKNYIARRIAEGKTKREAMRCLKRYLAREIYHLLPPVATTNQYSQTREKAA

SEQ ID NO: 404560 - protein, 317 aa, unidentified
MSDIFVGIDVSSQTLEIASHGESGTWQVANDSDGIESLVNQLGQIKPELVVLEATGGYEFEAACALQASGLAVAVVNPRTARDFARAMGTLAKTDALDARMLAAFARVLHQHPERNRFIKPLADAEQQRLKALVLRRRQLVQMLSSERLRIRLAHAATRPSIERVIEFLKKELDDSNAEVAAHVQQHHAELARLLGSVPGIGPASMAVLLAELPELGSLDRRRIASLVGVAPLNRDSGRMRGQRSIWGGRADVRSTLYMATLIAVRYNPVLKVFYERLVGAGKRKKVALVACMRKLLAILNAMAKHRSNWNPMPHLA

SEQ ID NO: 404561 - protein, 397 aa, unidentified
MPSFLGIDVAKKSLSTHLVIDGVGKPKSFTNNRAGFSKLICWLAKRDVTDLRVCMEATSTYHRGVATALYEAGYTVHVANPWSVKQFAKALLKRGKTDKIDAEVIARYSEANINQHPWAPLCQERQALVQLVRHRERLKKQSTALQNELDIEEHEAVRASLERQQVFVREEIDVTKRAIRAHLGAHRDLKEHDANLRSIPGIGEETSSLILAELGRFERFSDQRQVAAYAGLTPAARQSGSSVDGEARLCRLGNMRLRNGLYLPAVVVFRTRKLFGSLISRLLDEGRSKMTIIVAIMRKLLCLAYGVLRSGKPYDPEWEARRHERAQEPGHEPGLVAGEAESEGGMLRGSGETEAGSAEEQPAKGQPDGAHQPVNVGDGSGLQMLGLSPVAHTITGR

SEQ ID NO: 404562 - protein, 400 aa, unidentified
MKSVLSVDVAKGKSMIMLSTEYGEVLIEPKEIKHNFRDFNELKDKIESFNLEDLTIFMESTGIYHLPVERYFKENNFNTLVINSLTTKNNYDTLRKTKTDTKDCMRLAKLFFVNEVEYHDLSKKDLYANLKAMTRQYFYLTQLNVSCKNRYKRLINICFPEFEEIFKGSRIYEETALNFIKTFPHAYIVKEKRIDALYNNLYKTNSRHDYYYKRLANKIKDIAVNSYPGVDKDHSDVKNLSDMAAILQENIKTINELKEKMIKTAKESPYFDIINSFYGIGEVLTTELLGELGDITRFDNHRQLIAFCGLDPTIIQSGKSINVHGTISKRGNKYARWILFNISQIVVKLGHQCPGHPVYDYYLTKKAEGKHYYENLTARSTKILRMLYTMCKNNTTFKIN

SEQ ID NO: 404563 - protein, 338 aa, unidentified
MNISTIGIDLAKNVFQVHGTDAKGKRVLKKRLNRSKFLPFFANLPPCVIGLEACGSSNHWARRLRAAGHEVRQISPQYVKPYVKTNKNDYNDAEAICEAVSRPGMCFVPVKNVEQQDIQAVHRVRERLVHGRTALVNQTRGILREYGIFIPVGIHPFRKRIPEVLEDAQNELTPLAREIIADQYACLHDLDRRIAEYDQRINTLFRSNELFQRLTVIDGVGPMTATALVAAVGDAKTFHNGRHLAAWLGLVPRQHSSGGRHRLLGISKRGNTYLRTLLIHGARSVLQRCDSRTDARGRWLQGVKVRRGFNRACVALANKNACILWALMARGESYRQAI

SEQ ID NO: 404564 - protein, 347 aa, unidentified
MLIIGCDFHPGFQQVAIFDNRTGEIQEKRLQHRAEAEQFYQSLAGEEVLVGMEACGHYPWFERLLEELGIELWFGDAARVRASVVRKQKTDRRDAEHLLDLLRTDRFPRIWVPSLEVRDVRQLLVHRHKQVQARTRTKNQLQAMALSCGIQKKRKLWTKAGREEIEQLPLLPYAAQRRKRLLEALDSLEAEINELDRRVAEEAGQRPEAVRLMTHPGVGSVTALAMVLTLGPAERFGSGKQVGSYFGLIPSEDSSGGKQRLGKISKQGSSFLRFLLVEAGQTAARLDPQLKRFYRRLAVRKNRSVAKVAVARKLATRLYLMLREDWTYAQLSQAVMQVSPSHSVAGE

SEQ ID NO: 404565 - protein, 344 aa, unidentified
MDYYAGLDVSLRSCALCIVDAKGAVLLERELPCEVSDIAVCLASFPHPIERVGFEAGTMSQHLFHGLKAEGFDVVCMEARQVNAALSAMRNKTDRTDARGIAQVLRTGWFSPVHMKSREAHGVRALLSTRKALLKKTMDLANEVRGLLKIFGIRLPMTVKHGSFDGVVRPLIEMDDVLAHALVPLLDARVVLYQHFLELDRRVKRAASHDEICLRMMTVPGVGPIASLTFKAAVDDPTRFKRSRTVGAHFGLTPRRYQSGEHDNPGRISKAGDRDVRATLYAAANALLMRTMAGSQIKSWGMRLIRTKGRRRAVVAVARKLAVLLHRMWIDGTEFRQDQVGGTA

SEQ ID NO: 404566 - protein, 415 aa, unidentified
MEIVYERVAGIDVGKKEIAVTVRVPGQTAGIRSQQTRKFRTFYQVLRQMVGWLVDHGVTHVAMEATGVYWKPIFHALCETDTLEVVLVNARHVKNVPGRKTDVKDSEWLAQLLECGLLRGSFIPPREIAAIRELTRYRKKTIQTRTRELQRLSKVLEDAGIKIDSVASSITTLSARDMIEALIAGERDPRVLANLARGTMRNKIPDLAMACAGRFADHHALLARMHLDHIDHLTSMIGGLDERIEQVLAPFAPQLRLLRTIPGIGERAAQVLISELGVDMSRFPTAAHLASWAGLCPGNNESAGRRLSGRTRKGNAEVRDILTECAWSAGKTGSYIGAQFHRLHRRFGKTGGGKAAVAVAHTLIVIVWHVLHDQSEYRELGHDYFTRRDHPDTTKRRLIHDLEALGYRVELTATA

SEQ ID NO: 404567 - protein, 395 aa, unidentified
MFYIGIDIGKSNHEASIISEDGDLLCKSISFQNSFAGCQKLLKMLEKFDANITNSLIGLEATGHYWLSVYSYLSELGYNLKVINPIQSDSFRNMYIRQTKNDSKDSFLIAQIIRFDSANTTILSDENMLALKQLSRYRIYLVDSCSDLKRKVISLLDQVFPEYASLFSDIFGVTSTAILEKYQTPEDLLNISTTKLTNLISKMSKGRFDREKAEQIRSAAKNSFGIKYAKDAFSFQIKQLISQIKFIEDQVLELEEQIDFIMSEINSPITTITGIGNVLGAIILSEIGDISRFDMAPKLVAFAGLDVTIRQSGQFNSTHNSLSKRGSPYLRRAIWQAATVAAFKDPNLSHYYQELKNRGKHHGTAIGAVCRKLCNIIFAVLRDNAQYDPLFEQNR

SEQ ID NO: 404568 - protein, 316 aa, unidentified
MSPESSFILGIDISKEWIDAHLLPGEQSWKISTVPDRLQQWIDHLPHDITLAVMEASGGLEMPIAATLSNAGIPVAIVNPRQIRAFATALGQQAKTDAMDARVIARFGELIKPPSRPLPSETRALLDELITRRHQLIQTAVAEQNRLSTMRSIHTRQSIESHLQWLKSQVKEIEKQLGKMIKESPSWMVDTKLLTSVPGVGPITSSILLAALPELGKLSHREISSLVGLAPVPRESGKWLGKRFIRGGRANVRSAIYMCILSAIRFNPIIRAFYVRLLAAGKEKKVAMVACMHKMLIILNSIIRDQKPWHFNPIPS

SEQ ID NO: 404569 - protein, 427 aa, unidentified
MSYRIAAVDVHKKMLAVVVADVEGDGEYQFERRKFGATPGELHVLAQWLGQQEVEEVVMESTAQYWKPVWGTLEQYWKPARQRREGAGKMSGTLHLCQAKSNHGPRGRKNDFLDGERMIKRLVAQELVLSFVPDSEQRLWRTVTRRKHQLTRAKVGFRHQLESLLEQAHLKLSSFVSDLLGVSARRMLKALAEGETDPAALAALADCRLRATPEQLRDALGACQQLNGAFRRLLQMALDELQLIETHIEKLDREAMGLMKEHQDVVQRVAEVPGFGVDSAMQMIAEVGPQAATFPSAKKLSSWVGVCPGNEESAGESHSTRSPKGNRQMRRLLDQAAQSAVKVKGSIFEVTFHRLLPRLGYKQAIWAIAHRLCQLLWLILHKGVRYEERGPAVTAKSKRTRTARMIRELKKLGYRVEGGPLPAVAQA

SEQ ID NO: 404570 - protein, 425 aa, unidentified
MSDVEIDSEFHFERRWFGSNPEQLRSLAAWLLEQEVEEVVMESTAQYWKPVWEALERYWKPIREKREGARRRSGTLHLAQALSNRGRRGRKRDFPDAERLVKRLVSRELTLSFVPDPEQRLWRTVTRKKYQLTRDKVRLQNQLEALLEEAHIKLSSLVSDLLGASARRMLQALAEGETNPAALATLADQHLRATPEQLCDALGACTDLKPVYRRLLKMALEQLQFLEQQMGQLDQEMANLLSQHQDAVQRLAEVPGLGVDSAHQIIAEVGPSAATFPSEECLSSWVGVCSGQEESAGVNYSHRSPKGNRNMRRLLNQTANAAVKAKGSIFEIVYRRSVPRLGHNRAIGAIAHRMCRLIWLILYRKVRYEERGPAVSQKSKQARTSRMIRQLRRLGYRIEPPILNTPVQHRCSDFRPCRARLCLGF

SEQ ID NO: 404571 - protein, 403 aa, unidentified
MNPCITIDVSKETSHVQGFLDNNVPLSKPRKILHTKEGFSNILTIYNQIVYKTGIKPTVFFEYTGVYHKSLMAYLKANNLSFIPIPPLVAAKVRNADLRNKKTDTRDCKTISFVFYEDKIKKYYEPTKDEKRLKDLQRYYMITEKQYQEITVHLYEMIDTIYPFYKSIMSEFDCFTSLKFLQKYPHPDYVTSHREKTLIKDFMEITGHGEKYATNVIHKLLNVINDTIPGCNSDDFEIEMLKDYAAQALFYKTRLNKTLEEINRIINQDSSKKSLVENIDSIPGVARNTAARFIAEVSNIDRFNSSKALVAFAGTDPNINQSGIVDGKHLSITKCGNKRLRTILFIMVRSMIRKRVPANPIKDFYKKKTQLGLPPKVVLVACINKLLGIIYQLNKTGEVFVLK

SEQ ID NO: 404572 - protein, 366 aa, unidentified
MEKSSTAFIGMDVHKESIDIAIADAREARHFGRVGGDAASVDRAVRKLRAAHRRPVFVYEAGPCGFWIYRRLRAQGLECMVVSPSMTPRNAADRVKTDRRDAMRLARLARAGELEPIYVPDARDEAMRDLVRAREDAVCMQRQARQRLQALLLRNEMRYVGRSSWTRAHRRWISGIKLPSPAQQIAFEEYVQACEESERRVERFEQAILAELEPWRWRPVAEELQALRGISALHAVRLVAELGDFQRFETPRKLMGYLGMIPSEDSSGPRRRQGAITKAGNSSARRALIEAAQAYAHPARVSWVIARRQVHASERACDIAWKAQLRLCARFRRLAARRLPRNKVIVAVARELAGFVWAIAREVKPV

SEQ ID NO: 404573 - protein, 370 aa, unidentified
MRKSIMYVGLDQHKESIEIATADEGRDGEVRRYGRIDGELHSLDQVVRKLVSTGKDLRFVYEAGPCGYHLYRYLTAQGLACKVVAPSLIPKKSSDRVKTDRRDAVNLARLERAGELTAVYVPQVEDEAMRDLSRAREDAKRAETRARQQLLALLLRHGLKYSGKTAWSQPHLRWLARIKLPQPAQQIAFQEYVEAISEAAARVERLTTQIRMLLPQWRMAPVVEALQALRGVSLVTAVITVAEIGDLTRFTNPRQLMAYLGLVPSEHSSGPHRRLGAITKAGNSHLRRVLVESAWAYRLPARVTPIIRRRQEQLPKAVCEIAWRAQLRLCARYRRLILKGKTKQVVVTAIARELVAFMWAIAVEVKVTNS

SEQ ID NO: 404574 - protein, 392 aa, unidentified
MNPFALGWDNHRKFSKVSLMEQTPEGEIRAVERARLEHGDKEAMRVWLSRLDPEIPVALEATFGWPWVADLLEELGHPVHLAHPPVVRALAKHEAKTDRCDSDRLGKFQLRGILPESYLAPPEVRQRRERTRYRMALSALRTAVKNRAQAVLHRHGILHDFSDLFGKAGRQFLDHLQLPEGSRQALDGCLQLLDSLTLLIDAVEQWMVENLEEDDIVRLLMTIPGVGLILAHVIRAEIGEIERFPTHRHLASYSGLAPISDDTAGREGPRHCSSACNHVLRWAFIEAVHGVQRTKGQHGLRLRQLYARLCGSGRPKGRKNSAKVAVAHELSKVVHVVWTKRVPYTDAPPPRPGSREGRHEPQETPTATTTLRSNQPRHPMVRRRATVGQTRS

SEQ ID NO: 404575 - protein, 373 aa, unidentified
MKKRSISQKMQKRTVKTKRVQESVTIGMDLGDRTSRYCILGSEGEILREGQVQTSKAGMMETFGSLGRARIAIEVGTHSPWVSRLLGTLGHEIIVANPRQVKLITESSRKDDRLDAQTLARLARIDPQLLRPIQHRSEVAQTALTVIRVRAALIAVRTSLVNTARGLAKAMGERLPKCDAAQMGVLRAESLPPKLRQLLEPLLKEVESLTEKIKDSDREIEQIARKDYPETALLQQVGGVGPLIALTFVLTIDNKNRFQKSRDVGCYIGLRPKRSDSGQRQPQLRITKEGDPYLRTMLVQGAHYILSRRGPDTDLKRWGLRLAERGGKRAKKKAVVAVARKLSILLHRLWVTGEVYEPLRNQNLRDLCKKSAA

SEQ ID NO: 404576 - protein, 324 aa, unidentified
MHPIYIGIDIAKASFSVAVPQPNGRFLDYTLANNQTGFSQLLDLLPTHCQCILEASGPYYLPLALWLTQQDLPLSGLNPLVVRRFSQMRLRRTKTDKADARLLSEFGLNQTPPLWQAPATLMSQLSQVQTLLEQYIKQRTALRNQQESFTHSGVPNPVLEQSLHKSLDHLDEQIQTLEKQLDQLATTEYPRLYANLRSIPGVGTKTALCLLVLTRGFSRFDSAKQLVSFVGLAPRIFESGSSVKGKAHICKLGNSRIRQLLYMASMQAKKANPACAALYDRLVGSGKPKLVALMAVAHKLVRQCFAVARGGVKFDPNAAFALAS

SEQ ID NO: 404577 - protein, 378 aa, unidentified
MPSETTVYVAVELSVSSWLVAARSAGAEKSRLHRIQGGDTTTLLALITKLRSRASTKLGRAVDVACCFEAGRDGFWLHRLLTAHGIAAYVLEPTSILVNRRARRAKTDRLDAEGMLRVLATWLAGDRQVCSMVRVPTPEEEDAKRPHREREHLVQERVRIENRIEALLFTQGIRKRPSLRSWVRDVAELRTGDGRELPCLLRIELERLRRRLVLALELIHEVEAERAEALAATADDKMTQKIAALQRLRGIGPNFAAVLVREVLYRSFANRRQLASYVGIAPMPYQSGGMDRDRSISRAGNPRARTTLIQLAWLWLRYQPGSALATWFRERVGILQGRTRRISIVAMARKLLIALWRYVETGVMPEGVEIRAEADATA

SEQ ID NO: 404578 - protein, 419 aa, unidentified
MSFKILKNNCCGLDVHKTWIFACIGITDSHSRTEYKQARFSSFTKGLQELCNWLAKYNCTDVCMESTGKYWIPVFNVLEKNNIWVTLSHPKYTKPQKGNKTDRKDARWICDLYMCGMVKPSFIPPADIRELRDLVRYRFKLTCMITGEKNRAHNCLTVSNLKLDDVFSDIFGRSSRSITEQILQHPGETFDVAPFVDGRCKTPIEEIQAAVDGAISTEQAVKLRQCLDHIDELEKHQAEIEREIFRLSDKYESVLNLIRTVPGFDKNPMTAIQVLSEIGGDMSVFPTAKNLVSWAGCCPRNDQSNHKIKSTRISRAGSYFKPVLVQIANALIKSKKHPEFTTRYRRIKARRGHKKAIIAICRMILTAIWHILTDLKPYTPEGFLEQRPVKRSKILTTSQALNLLKQRGYIIKEDTIPVT

SEQ ID NO: 404579 - protein, 417 aa, unidentified
MIRKVMEVIHQRVGGLDVHKKMVMACRRRLLGDGQVESEVLEFGTSTLQLCALSKWLAEWGCTHVALESTGVLWIPVWNVLEADFKSLLTNAQQLKKVPGRKRDVSDAEWLAQLMQCGLLKPSFVPSREIRHWRTLTRQRMKLIDQHTGVVNRLHKVLQQGNIKLSSVATDVLGVSGRAMIREMIEGESDPEKLASLAKGRLKSKHAQLVESLAGRLNEDDRWVMKQLWEQLEYLEEETSRYDEQIKEKMSAYEESLRRLTTIDLIERRSAENILAEIGPDMSYFPTDDNLVSWAGLCPGSDESAKKNRNGKTPKGNQWLRRALVEPSWGAARRKDGYLGALYRGVAVRRGEKRAVVAVARTILQAAWHMLSKGVDYKELGGDYFDRMNSEQTKNKLLKRLEKLGYEVDLKPKQAAA

SEQ ID NO: 404580 - protein, 347 aa, unidentified
MTSHCQFYNYKKSGGSYLSFKILKSNCCGLDIHKTWIYACIGITDSNNRTEYKQARFSSFTKGLNELCNWLAKYNCMDVCMESTGKYWIPVFNILEQHNLWVTLSHPKYTKPMKGNKTDRKDAKWICDLYMCGMVKPSFIPPADIRELRDLVRYRYKLTCMITGEKNRAQNCLTVSNLKLDDVFSDVFGKSSRSITEQILQHPGKNFDVAPFVDGRCKTPVEEIQAAVDGAISKEQAVKLRQCLDHIDELNQHISEVEQEILRLSDKYEAALNLIRTVPGFDKNPLTSIQVLSEIGGDMSVFPTAKHLVSWAGCCPRNDKSDRKIKSTRISRADFYFNQFWCRLQML

SEQ ID NO: 404581 - protein, 334 aa, unidentified
MKRQETPVGIDVAYRTLCVHIDGESTVREFDNDDSGRRALVAELTRRGRHVRVVMEATGTYHVDAALALSAHDRCRVSVVNPRQTKHFHEAQNIRAKTDTVDAKSLCAYALRMDFVEWTRPTATALALRALVRHHAQLTKEQTRIKNKAHALEVSASTPAMLLEMLSQQREFIDQQRKAIELALEQFEREHPSVAPYVRRFMTIPGFGRTTALSLLSEYLVLDSAMTSKEITAWAGLDPRPHESGTSTRRRSISKRGSARTRAALYFPAVTAARLQGPLQDFYLRITERTGQKMVGITALMRKLLINSWAMHRSATDWDAEKAAPRTQQNQKAA

SEQ ID NO: 404582 - protein, 377 aa, unidentified
MKKVRFLGLDVHAETITVAIAEPDGEVRSLGTIPNGEESVRKLVKKLGPAEQLQACYEAGPTGYVLYWQLTGLGVKCEVVAPTLVPVKVGDRVKTDRRDAMKLARSYRAGDLTAVWVPDAAHEALRDLVRARESAKQDQLRARHRLSKFLLRQGRRAPLGVRPWTLRYMQWVREQVQFEQPAQDYTRLDYLHEVEHANDRVRRLEEAIGEAVKLVPVTMREVIQALQALRGIAQISAVTIVSELGPISRFAGARQLMAYSGAVPSEESTGQRIRRGAITKTGNAHLRRVVIEAAWAYRHRPAIGATLHQRQQGVCEEVKEIAWKAQHRLHKRYRSLAAAGKNQPKVVTALGRELLGFIWAIGVHVERDASPQHQWAA

SEQ ID NO: 404583 - protein, 467 aa, unidentified
MAARKQKQRRMNAQVVEDEDYQLRYEIVAGIDVAKESAVVCVRMPPAAGRKHRTSHLQTVPATVPAIGELAAELKALGVQMVSMEATSDYWRIWFAVLEEAGLAVQLVNSSQARNLPGRPKTDKEDARWIARLTEMGMLRSSFVPPPEIRALRVYTRHICDLTADRTRYWQRLEKLLEDALCKLSAVVSKLAGHQTARAVIEAMIAGERDPRALAALGQGRMRNERLPALAEALSGMQFGPQHAHAAASLLRAIDLLEAELRDLQERVTAHLAAIPASWGVDADGVTGPEAGRAGDAAALPAADRLDEIPGLGREAAAALIAEIGLDMSRFATPQALVSWAGLTPTARQSGPRKGRGKKGHGNTYAKRIAVLAAYAAANTDTFLGERFRRLASRPGGGGRKKAGCAVGRSILVIVWHLLNDPAARYRDLGPDWHARHTDRSRKARNAQRQLEALGYDVIITPREDAA

SEQ ID NO: 404584 - protein, 425 aa, unidentified
MIQQPTSQEFVALIGIDWADEKHDISIQVPRGKKITRQQIKQSPEALNQWIGYLRNRFRNGPISVCLEQSKGALINFLICHDLFVLYPINPKTLAKFREAFRPSGAKDDPDDATKLLEIVANHRNQLTPWKPAEEIVRIIDILARNRRDAVDRRKQVINQLRSVLKAYFPQAIDLVSEDICSPLTWDFLMKWPTLQKLQKVKDATLRKFYHDHHCYKKKVVETRLQLIRQTQPLTSDEAILKTSPIEVKLLCQLLKQYTQSIAEYEQQLKELYPQHPDAEIFRSFPRAGTVHSARLASAFAADRERYKSPESLQKYSAVALAPITISSGKSKVALARYKCPKYLRQNFIEYAGQSLQYSLWTAAYYRMQIEKGKTHNVILRALAFKWIRIMFRCWQDKIPYNGLNYLQSLTKKGSKILNYMTAAT

SEQ ID NO: 404585 - protein, 315 aa, unidentified
MEGQKAGIDVGKKNLYLSYQGKIYKLNNNEQGYEEIRKMLPRGTKIILEDSGIYTRKIIRALGKDFEIRIVNPLIISKHKSIRGKKSDKIDAKKLAEIKLDETRMGKISKERELTTQWDFITRTTSKIKNRIRRNLNSLGLDDKLNKDNLEKAMNMNEPEADEIKFLLQELKHFEERKKKIEEELKTVIPRDHVIFTIPGIGETIGSLIVARVGDFSRFSTKKKFVAYCGLDPFIEQSGSRILTQGISKRGDALLRKLFYLSALTAIRVNPTIKEFYENHKGKLKGKKLIIACARKLAVITWAVCYYNKAYSELQ

SEQ ID NO: 404586 - protein, 443 aa, unidentified
MSHEVAETTAAPEPEWAAFVALDWADQKHYWRLVGAGSQKQEQGELDHTPEAVTAWAADLNVRFAGRPIAVCLEQARGSLVYMLLKFPQLVLFPVNPQMAARFREAFRPSGSKDDPNDTGVLLDILLHHRDRLRRLKPDTAETRLLQRLAEQRRLMVNEKTRQNNRLTACLKLYFPQMLKWFDDPTSPLVGDLLERWPNLEQLQRAHDGTLRKFFHQHNCRSEERIQERIDAIRQAVAATTDAAVLGAEAMAAHCSIKLIATLRANIAELDEQIAKAFAAHPEKALFDGLPGAAAALSPRLLVAFGTDRERFATADEIERYSGIAPVRVASGQSEWIHFRWACPKFLRQTFHEFAGHSIAKSEWARAYYDLQIGRGKSHHAAVRALAFKWIRVLFRCWKNRTPYDEQVYLQSLQKRHSPLNALLPGAGWKDVAGFQKLTENPS

SEQ ID NO: 404587 - protein, 283 aa, unidentified
MVTTIGIDPHKATHTAVAIDETETVLGELTVPADRDQTKTLLDWAQNLDGDGRVWAVEAAGGLGYLLSQQLIADGEQVVDVPPVLASRVRLLGSGRSDKNDPNDARSVAIAALRQPRLAVVRPEDHTQVLRMLAKRHLELTGLRTQAVSRLHAVLMLLRPGGLRPRLSATKARRMLQGMRSLDPIGEQRRMMARAHLGDIRRLDREIKTNTVSSSKAVAASGTTVTGVYGVGPIVAAFLIGYTGDIGRFASANHYAAYNGTAPIEVSQEERNATGCRCEATGC

SEQ ID NO: 404588 - protein, 427 aa, unidentified
MNYNQNQKITQIKPSTLIIGIDIAKDKHVARAQDDRGLEFGKRLIFENRIHGFQKLLDWMGKHQRQNDKKDVIFGVEPTGHYWLNLAYFLTAKGYDFVLVNPMHVKKSKELDDNSPTKNDTKDAKVIAQLIKDGRYSVPNLLDGIYAELREGVKLRDQLVQQLMITEGRIQNHIQRYFPEFFDVFGDWEGKAALCTLKMFPFPTQISEMSPDEVLARWKPFVQRGVGIKRATKLVETAKRSIGIKIGLQFAKQEMSCLLDQYELYKEQLEQLDQDLESLVETIPGANEMMKIPGLGTTTVALFFAEVGDITKYSHPQQLVNLAGLSLREHSSGKFKGQTRISKRGRSGLRRALFLAIRPLVAHNPTFKTLHHYYTKRPERPLKKQQSLIALCCKLLRVLFVIGNKQCEFDGSKLLKGLPQIETLQAA

SEQ ID NO: 404589 - protein, 353 aa, unidentified
MITIGVDAHKRVHVALALDEAGRELGQWRGPNSTAGWQALGQWALAFGGDRQWGIEGAWGYGRGLAQHLVAAGETVYEVNARWTASGRRSARRPGKNDRLDARAVALLVRQEAPTLPQVQAEDETAVLDLLTTEREQALSEATRLRNQIHALLLHLDPEYQVHLPVLKSRASLAALETYIAPGGGPLQLERAASVRRLAQRLRLALTQAEELASRIRDSAAEDFSPLTRLCGVNLLTAGTLAGVLGPGRRFATDAQLAAYAGVAPLEASSAGLVRHRLNRGGNRRLNAIVYRIALTQAHHSSEARAYLDRRVAEGKTRREAIRALKRFIIRAIWRLWQECRSVSNTSLEVRAA

SEQ ID NO: 404590 - protein, 309 aa, unidentified
MNSDQKIYCGVDVSKKHLDAFIQSKTVRFANTINGVDQLMKRAGTLHYVFESTGGYERLAAWRLLGAGQTVSVVNPGRVREYAKSIGQVAKTDRIDAKIITRFAELVCPREAEMPSADQRRLTVLVERRQQLIEMRTAETNRLDTAGEPEARKMIHKHCQWLEKQILEIEQAIEETIRSNEEMLRKAQRIQSVKGLGTVSASTLLAVMPELGNLSRQEVAALAGVAPYNRDSGTFRGRRHICGGRKNLRACLYMAAVSATRSNPHLKVFYNRLVEENHCPKKVALTAVMRKLLIAANSAVKNPDFLVAT

SEQ ID NO: 404591 - protein, 386 aa, unidentified
MRPTGNPTLSTAALDYDSTMIGALELSSKKWVFAVQCPGVKKHSRHVVEPNGSALAELFERLKGRCAVAGRPIARVIITHEAGRDGFWLARFLERRGVEVHVMQSSSLPVDRRARRAKTDLIDVEMLLRTLMAWLRGEPRVCSMVPVPSEADEEARRAHREREDLVGARRSLLNKIGGILATLGIEGYQALRRDRRARLADLRQPDGAALPAAALARIERLLDRLELVMTQIKGVEKARDAVVAKPAAENDNERMIRDLAGVRGVGAESATLLVREAFCREFANRRSLGAYAGLAGTPFASGGMQREQGIGKDGNRRLRALIVELAWFWLRFQPDSALAQWFRERVGQARGRVAKIMIVALARKLLIALWRFAKDGVIPEGATMKA

SEQ ID NO: 404592 - protein, 408 aa, unidentified
MNAVGIDVSKGKSMVAALRPMGEVALLPQEFLHTEVGLEQMAYAIIALGENTRVIMEATGRYHEPVAAALHEYGIYVCVLNPLFIKQSGGGSIRKVKTDKADAMKIAKYGLDNWVDLREYTPMDTVRQQLKLCSRQYNLYMKTVVSLQNNLISLTDKTFPGVNELFSSPERADGHQKWVDFVMTFYHCDCICRVSEKAFTERYQKWCKRKGYHFSAEKALDVYAGSCGHITTLPKNDNTKLLIATAAQQLLSGKMTLAALRAEMTRLAKQLPEYDTVRAMYGVGETTATQLMAEIGDVRRFPRRSSIVGFAGVDPAVDQSGKHSAKSVPTTKRGSPHLRKTLYQIICTYLRKAPADEPVYQFLDKKRAEGKPYFVYMTAAQNKFLRIYYARVKECLEAFDAQQDTSQR

SEQ ID NO: 404593 - protein, 398 aa, unidentified
MESLIVGADVSKESFSAAGLDGKGTRCFSEDCTMDIDGFSKFLKTIRSQQPDLSAVVVGMESTGCYHINLFSYLTSQGIRAVVINPLLISNFAKLSLRKTKTDKKDALTIAQFLRAHKDKISQMSVSQDMQDMRDLARERESLSHLISATKTEIKRVLQTTFPELERLCSVHTGVMHEFLKEFPSARLIRLAKPQAIAKALEPRGQGNRISAFTADDVINLAKNSVGTVSPAKETILRGKISTLLHLEARRDELTDMLRDYCNSLMVEDLDIVTSVEGISNGTGTSFLAELGKIDNYETHKHLIAYAGIDPTVYQSGKYQGKSKISKRGNKHLRHVLWLMTVSVILHNETFRAYYQKKKQAGMPYKKAVMATMHKLIRMLFAMLSQRKRYAPESVNCI

SEQ ID NO: 404594 - protein, 414 aa, unidentified
MESSYKIAGMDVHKKMLAVVISDVAQVGEFRFERRKFATGAMELPALAQWLAEQEVREAVMESTAQYWKPVGQALEGQCRRQLAQAHSNRAPKGRKRDFADAERLVRRQVAGELILSFVPDPEQRLWRTLTRTKQQWTRDRVRLQNQLEGLLEEARIKLSSQVSDLLGLSGRRMLQALADGENDPVQIAKLAAPGLRASQKPLADARSAAATLSPLHRQIMKLFLQRLKLIETPMDALESRVAEPLRPFQDAVKRLAEVPGLGADSAQQIMAEVGPRAATFPSPDQMASWVGCCPGREESAEVSTSDSSPKGNKHMRRLLSQAANAAVKAKGSVFEILYRRLAPRRGHFKAIWAVAHRLCRIIWKILHEGVDYEERGYRTNPHAVQKRTNRLVRELRRLGYQVQLTSSKAGAPA

SEQ ID NO: 404595 - protein, 400 aa, unidentified
MFYVGIDIAKHKHEASLIDASGKALVDSISFSNTKEGCEKLLTLLERFNVEKDSVIIGMEATGHYWLSVHAFFFELGFDVKVINPIQSEAFRKMYIRQTKNDSKDSFIIAQIMRFGQFSATNLSEEGVVALRQLSRYRLALVDSCSDCKRRIITLLDQVFPEYDKFFSDTFGTTSKDVLLNYPTPEDMLTISTNELAELLNKSSRGRFKDNKAEELRSLAGNTFGVHFAKDAFAFQIRQLIQQLVFLENQIDELEVEIALLLEQMGSFITTIPGIGDTLGAIIISEIGDIHRFDAPGKLVAFAGLDVKVNQSGEFNSTKNKISKRGSPYLRRAIWLAANRAAFCDPILSKYYQSLKSRGKHHLTAVGAVARKMCNIIFVILRENRPYELTPPKLNSKDRR

SEQ ID NO: 404596 - protein, 414 aa, unidentified
MEQKMIYVGIDWANDHHDIVITDDSAKTLDQFRIDHTCDGFALLHSHIANHQTPPSLVLIAIETSRGLLVHELLQKGYTVYAINPKAVNRYKDRHVLSKAKSDVLDALSLGHLLRTDRHLFRPLMPLPEDYRLLDRLCGDLRKAVDEKSRILNQVISCSKEFYPKALEMFSLNSQIFIDFLKAFPDHDTLSACKKKTFLAFLRKHRYSYPAKAEELWKTIQSPSLQPDKVTACSGRLRLGMLLGQLENLKEHITHYEREIQHILDHLPESTPIKSLPGVGERLAPELVSILGPNSKDGHHRFQAAAEIAKLSGCVPVVRESGKWRTVSLRYACVKPLRRTFRDWAFTSINHSRWARAFYDYHKQRNQNHSTILRNLAKKWIKILFALWSQGTTYDETVHIQNLKAKNVPWAMAL

SEQ ID NO: 404597 - protein, 330 aa, unidentified
MKNWDFTLGVDVSKNTLDVCCAEIKEHIQIKNGSEGFLQFKKWCKHFDIKLQRSFLVMEYTGGYEYKLIQFCEANNILYTRIPGLAIKNSLGIARGKNDKVDAARIAQYGEEKHKLLNADKPLNVAIVKLKELLNFRKRMVRENAGYKSSIKERRHMYGDNKKDIIVKMLEQKQKENVKKIAAVELALLKILTADEKMRTNYTLLTSIKGIGKINALMTIAYTENFVSFTNPRSYAVYVGVIPFDHSSGTSIRGRKRVSHIANKELKQELNQAARSAMEWDKEMKLYGQNKMKTKCYKIVLNNIKFKLILRMFAVVKKGEMYVDNYQNAA

SEQ ID NO: 404598 - protein, 341 aa, unidentified
MYYAGIDVGSEEVVVAVKDKKRLLKTKPFSNDASGHKALIKYLTYQKSGTRVCVEATGSYHFDLSVRLSDSKNIEVMVLNPRQSKHYAEVLNHAHKTDKIDAAILADYCHRMEFRSWKRPNNSKLILRAYSRRLVAMVHQKAQLNNQLHALQASDFTPEEIINNVLTMIQFYEKEINGIETAAIEHIKKNDDLNKHFELLNSVKGIGNRSAVILLGELSVLPEDMNMKEWVSYAGLNPRIVQSGKSVLKQTKISKAGNKYLRMGLYMPALSATRSDPYVRGYYLHLIEDNGLKKMQALCAVMRKLLHAIHRMMGNTELFDSQRFYSKPVELPSRKKQQLAM

SEQ ID NO: 404599 - protein, 323 aa, unidentified
MTSMICGVDIASSSLAARIGRDGIAATFANTPDGIAELAAFCQVHAVDLVAMEATGGYEQRSFAQLSEQGLPVAVLNPRSVRQFAQSMGALEKTDAIDAGMIAWYAETKRSQPTCLAPATQLELRARVTRLRQLTEVRTAQSNQQRLVTNTAVRKSFSAMLQFLDEQIQELELAIAALIDADPLWHQLNRAFRTIKGVADRTVSRLMAEMPEIGTLSNKTISKLAGLAPLANDSGKRQGRRAVRGGRSAIREILFIVGSVVARHEPDFIAFQQRLRAAGKPPKVVRIAVAHKLLVRLNAKAREVRQHMGQASQNTQPETVMAT

SEQ ID NO: 404600 - protein, 360 aa, unidentified
MTGTVTWAGLDVHARSIHAAVVDARSGEIVRQRFGGETEAVVAWLAQLPRPLRACYEAGPTGYGLARACAAAGLCCEVIAPSKTPRASGDRIKSDRKDAELLVRLLMAGSLTPVRVPAPELEAVRDLVRVRAGLRDDLSRERQRTSKMLLRYGRVYPGKSCWTRAHRLWLADQCWPYPAQELAWCDHLAAVDGLAARRAAIDEQLSLLMHADFLWPTIARLRCFRGVDSLTALALHVEVGDWARFARPAQLSAWLGLVPTLSQSGESLRRGGITKTGSRHARRLLVESAWHYARPPRLGVTLDRRQAGQPAHILQIAWRAQCRLHRLSTRLRGAGKPANVVTVAVARELACFLWAAAVAA

SEQ ID NO: 404601 - protein, 389 aa, unidentified
MVTNIKYSVGFDVSKEEVEVCLSVINSMQEVKIKASRKSKSTISSFKELKQWIEKHLKEKLPVTVTMEATGVYYEELAMFLFNNGFYVSVVLPNKAKKYAQAKGFKSKNDKIDAKGLSYMGAEQCLARWEPFSENIYELRALTRQNEDLQIQRTMILNRMEALKCSGYKNRFIEKQELKILKLINQQVEEVNEQIEKTVREDEVLNNKINKICKVKGLGILTVATIVAETNGFKLFRNQRQLTSYAGYDVVENQSGKRVGKTRISKKGNSHIRRALHMPALNMVRYEQLGYKELYERIYLKTGIKMKGYVAIQRKLLVLIYALWKKDEEYDPNYLKRGMDKTSGDDESKSLFSLNFGEVAKKIGDIKSPTLDKLPYDESPEVLFSLVQS

SEQ ID NO: 404602 - protein, 347 aa, unidentified
MNFYTQQHKHYCGIDLHARAMYVCILDQHGTKLVHKNLSTTPEAFLRLIAPYREDMVVGVECMFTWYWLADLCAKEGIAFVLGHALYMKAIHGGKAKNDKIDAQKIAVLLRGGMFPQAYVYPAEMRATRDLLRRRCHLARKRAELLAHIHNTNSQYNLPEIGKRLANRANREGVAEHFPDPSVHKAIEVDVSLIDHYDHLLGEVELYLTRSAKAHDVQTFARLQSVPGIGQILALVILYEIQDIARFPRVQDFVSYCRLVKCAKESGGKRLGTSGKKIGNVHLRWAFAEAAVLFIRQSQPGKAYFAKLEHKHGKAKALTVLAHKLGRAVYYMLTREHAFDLQRFVTA

SEQ ID NO: 404603 - protein, 416 aa, unidentified
MNFNKLLSGNITKYQKEGFIMISVGIDVSKGKSTVCIMKPCGEILELPFDIGHTADELDSLISLIKSFDEETRVVMEDTGHYHLPVATYLSSHNIFVCCVNALRMKKFCSQSIRRAKTDKIDSIKIASFGITYWNELVKAYPSNVIYDELKFLARQYYQVTGMLVKSKVNFSNLLDQVMPKINDVLSNQGENHKLTEFVSRYIHFQNILDMGEMKFTSDYCKWAKKKGYRLNERKAAEILALAQNGIPTLPNSQSVKIAVSEAVKLIHSIEESRNTILAQMQDLCNTLPEYSVVKEMDCIGDTLAPRIIAEIGDVRRFKNKHSLIAYAGIDAPPYQSGAFHASERHISKRGNSYLRKTGYEIMQSLIKHKPADNAVYDFIQKKRSEGKCGKEAMIAGLNKFLRVYYGKVMEFYSEH

SEQ ID NO: 404604 - protein, 342 aa, unidentified
MKYFAGLDVSLEDTALCIVDDAGRIIREARVASEPETLVAFFGACGMTMDRVGLEACSLTAWLHAGLTEAGIPAICIEARQAKAAMGAMPNKTDRNDARGIAQIMRTGWYRAVHVKSPSCRTWRALLTARRMVLNKRRDVENGIRALLREVGLKVGTPSRKDFPARVRELAADDPVLMSLAEALLSVIDVMTREVEKLTKRVLDEVRVEPTCRRLMTVPGVGPLTALAFRATIDQPGRFRKSRDVGAHLGLTPRRYQSGETDVQGRISRCGDELARTALYEAAHSLLIRSTKWSALRAWGMSIAKRRGMARARVAVARKLAVILHRMWADGSEFRWGKQAAA

SEQ ID NO: 404605 - protein, 343 aa, unidentified
MQIRSVGIDLGKTTFHLVALGDNGKVLLKKKFTQRQLITFTANLQATLIGLEACAGAHFLGRALREQGHDVKLIPAQFVRPFVKSNKNDFLDAEAIAEAVDRQNMRFVPIKTDDQLDLQALHRVRDRLITRRTSVINQLRAFLLERGLVFAKSPAKLRERMPEILENAEEDLTPRMRNLLALLWNEWKDLEQQVVDLNHEVELIASSDAACLRLRQIPGIGPLVATAIVASISNGAAFHKGREFAAWMGLVPKQYSTGGKAKLYGISKRGNRYLRKILIHGARAMVLRCKRDRVPMGAWMTALEARAPRNVLIVAAANKLARIAWAVLSSGQDYRAVQEPVAA

SEQ ID NO: 404606 - protein, 458 aa, unidentified
MPRRQRRTTRPVTMPILHPHAAGIDIGATELYVCVPLDRDPQPIRRFGTFTEDLLAIADWLQECGVATVAMESTGVYWIPLYQILETRGLEVCLVNARHVKNVPGRKTDVQDCQWLQYLHAVGLLRASFRPPETVCAVRSLLRHRDTLVQLAATHTQHLQKALTQMNLQIHHVLSDITGVTGLAILDAILAGERDPQVLAGHRDHRVKASAETITKALVGDYRSEHLFTLRQSLDAYRQYQRLIGECDREVQSLLGAFASAIDPATHPLPPSTGPRRKSRGAPGIPGFDLRLELYRVLGTDLTQVPGLQTPTVYTLFAELGADLSPFPSGAHFASWLGLCPDNRISGGKVLSVQTRRVKHRVATALRLAAQSLFRSQSVLGGFFRRMRAKLGAPKAITATAHKLARIIYHLVTTRQPYDESRLATAEAAHRRHSESRLRAQARALGFQLVPVIEQSVS

SEQ ID NO: 404607 - protein, 311 aa, unidentified
MTHDTIGVDISKDHLDAYRMSDGASRRFTNDRAGHTALLSWLGASHPRVIYEPTGPYHRTFERRLADAGFALVKVNPRQARRFAEATGKLAKTDRLDAAMLARMGALLELEARPACSPILSDLKDLHMAREALVKDRTAAKNRAMTLTLAILKRQNGEQLRQIARQIAAIDAEIMTHIEADPELAHRFAILVSIPGVSTITAFALLIDMPELGLLNNGQAASLAGLAPIARQSGTWTGRAFIRGGRANVRRALYMPALVAIRFNRDLKAKYDQLKTAGKASKVAITAIMRKMIILANALLRDGRKWEQSVT

SEQ ID NO: 404608 - protein, 331 aa, unidentified
MENDQYIGIDLHKASFHVCAMAQTGERLWEGRFPRDPERLAAFVARCTPRMAVAVEATSPTWSFVDAIVSHVGRVCVVDTRKTKLKAGYAAKTDRLDARRLADALRRESVVSIYVPPPAIREQRELARHRLMLTHMRTRVLQRMRALLLRHGLGDPPTKRLRSAAGQAWLDHVVLPPQAHRALMTLRQIERDLCAQLAPVEADIAREAITDPIVRRLQTVHGIGPVVGVMLRAEIGDIDRFPTPAHLASYAGLMPQVDSSASRTHYGRITKDGSPWLRWALVEVGVHTLRRRDPLGRWGRKLAVRKGKMKAYVALAREMCREIMNVWQHAA

SEQ ID NO: 404609 - protein, 343 aa, unidentified
MQTITTIGLDIAKSVFQVHGVDAAGQVVIRRQLKRRYVLAFFQKLPPCLIGIEACASSHYWSRELQALGHTVRLMPPAYVKPYVKRQKNDATDAEAICEAVARANMRFVPTKTPEQQSCLMLHRTRHLFIRQQTAVINSIRAHLAEFGIVAPVGRKGVTELLHIVADPSDKRVPEVARACLAALGNQLLSLKEQIVEFDRMIMVWHRSNETSKRLHYIPGVGPMLATALVASVADPRTFRSGRNFSAWIGLVPRQHSSGGKDRLGSISKQGDRYLRSLFVAGALAVIRYAKIHGTKHRPWLTALLARRPTKVAAIALANKLARMAWAMMAKGERYRQPVALAA

SEQ ID NO: 404610 - protein, 376 aa, unidentified
MERGSLMLNTTTFVGLDVHARSIKAVSLDVMTGEARCATFGYDAGAVAGWVRSVDPKARCVYESGVTGFDLQKRLSGLGVDCAVGDVSKMIKPSADRRRKNDRNDAEFLARMLSVGNVVEVWVPDDGCEAARDLSRALDDAREDLKRRKQRLSKFLLRHGYVFSETTPTGRRKGSWTAAHWAWIKSISFPEKADDDVLAYYVDAVRQAMEDKKRLEKLVEAEASKPRWKRRVDSVRCLKGIDVTSAADLVFEAGEFSRFKSARSFAAWLGLTPSEHSSGESVRQGGITKAGNKHLRRVLVESAWHYLGCSPHSKDLAKGQVPDPAARRHAAKGVRRLVERRRAMLERGVHKNKANVATARELACWCWAVGRMVENG

SEQ ID NO: 404611 - protein, 454 aa, unidentified
MSQAPKATKQVAEVDSLTIINSNAAGIDIGLEEMWVSVRADRDAEPVRRFGMNTPDLIAVAEWLKACGVETVAMESTGVYWIPLYEVLEERGFQVYLVNARHAKNLPGRKKDETDAQWLRRLHTFGLLNNSFRPAGEMCAVRAYWRHRADLIEHRAAHIQHMQKALHQMNVRLSPTVKDVTGVTGMAIIRSILAGERDPVTLAQLRDPRCAQPESEFVKALTGNYRDEHVFALKQAVALYDAYTQQILECDQELERKFSALKPVHDDDLPPLDTTDKRNTHSKNAPAYDGRSLLYQLLGVDLVAVDGLNEVTAQIILSEIGTDMSRWKDDKHFCSWLGLAPHNDISGGKVLRSRTLKTHNRAGQAFRLAAQAVSKTDTAYGAFFRRMRARHGPMKAIVATAHKIARTVYFMLKNRTPFHDINAEEYTQREREREIARLQKKATQLGFTLAPASV

SEQ ID NO: 404612 - protein, 336 aa, unidentified
MIAVGVDTHKHEHLARALDGLGQLLGGLTVDASLAGYVKLTEWLRTLGEDVLVGIEGAGSYGAGLCEYLLAEGITVVEVERPRRQDRRRGKSDEIDALMAAKKVLANDGLSTPRAGGTRQALAALLIAQGTCKGERTRLLNQIQALNTTAPVALRERVGEGNGRKLATRLVKMRTRSDRPASEQMIFTIMRDLARRSQELAAQARTYEHELTLLISSLDTALLEEQGVGPISAAKLLVCDPKRLKSEAAFARCNGTAPKPASSGQTIRYRLSRGGDRQANNAIHTIALHRARRDTQTRAYLDRRISEGKTPREAMRALKRHLSRRLYKQLITIPLT

SEQ ID NO: 404613 - protein, 346 aa, unidentified
MSYSTTVGVDLAKNVIQVSVVSGRGKELLNRSLTRKKFSEFLGKQKPALVAFESCATAHYRARAAVRHGHEARIIPAKAVAPFRQGHKTDSNDALAVAEAARRPNIKEAPIKTVEQQGLQAILRARDRLIQECIAQSNHLRGILLEFGIAIPQGFAALLRTLPEVLEDGDNELPDFYRPTLHRLYHRMLELRQDIDAMTKEVGQLVKTHAVCSRFTALEGVGPIGAMSLHATIGSGAAFSKGREASAYVGLTPRQYSSGGKANIVGLSKRVGNRKLRSVLIQGALAYVYRMKEPRSAKDRWLKDLVERAGPRRAAVALANKNVRTAWAMVTQGTEYQRRGQLEMAA

SEQ ID NO: 404614 - protein, 403 aa, unidentified
MDRCAGLDWAKDTHQVCVLEADGEPLLQRGFAHGERDLDGMCELLVELGVKRIAIERPEGVLVERLLEAGLVVLPIHPNQLKAARPRFRAAGGKSDAFDAFCLAELARTDHRRFRTLAPDSAETKALRALTRAREDLVKTKVSLTNRLQAELDAFWPGAALIFRRLDSPIALAFLERYPSPTDARALGEKRLAGFLIRHGYCGGKSASELLAKLRSAPRGRARETEETARRTAVLSLLTVLRPVVEQIGLLESRIADAVRAHPDGEVFLSLFRNPDSTLTAAKLLSEIGDRRERYPSAEALAADAGMSPVAKESGRRKVATFRRACDKRLRDAMTTLADSSRLHDPWAKDIYLRARGRGCDHPHAIRVLGRAWLRVVWRMWQDGAPYDPHKHGARKRLNAARG

SEQ ID NO: 404615 - protein, 435 aa, unidentified
MTTLGIDLAVRAAHVATLTDERGKVVWAKRRFRNCCDDLMALSAAAGATDDLTVVMEPTRNSWVLVAAHFKAAGAKVVLVAPEQSADLRRYYKKHVKNDRLDSMLLARLPLLHPDGLDELADLGPADALKRAVRRRVKLVEQHLACRQRLDTMLDLLGPGYVDVLGIRASKTSLLVLERYGDPRSLRRLGLNRLTAVLRRTSGGKWNAEHAQRLLDAANEAIAMWSGGGLDFTELAWDLASEVRVLRQLEHEITRLDDRITELYTNADPKKIVLSAPGIGPVLAAGIRGRLGDADRFANLAAVRSFSGMVPRVNQSGNTDTRPGITKQGDPGLRRDMWFAADLARHQDPQLAAKYYRLIVERRLHHSSALCHVSTTLLTRIAACWRTGQPYVVRDVDGRAVTPSEARAMIAARYTVPPEARRHSRVPDAKSEPTK

SEQ ID NO: 404616 - protein, 421 aa, unidentified
MDSEKIDYAAWIGLDWGSAKHAICLKPADSEAVEHHTLEQNPQTLHGWFMNLIARFGGRELAIAIEQTRGAIIHFLLALDAVHIFTIHPKCLKNYRDAIHPSGPKDDPTDAELLLQFLTLHRNRLKPWIPDKPELRLLLRLVEFRRKMVGKRVRLTNELTQLLKEYFPAALDCCGDLDTVMACDFLLKWPTLEKLQKSKPETIRKFYQKHGSRRLNLIEDRLKQIRSALPLTTDAPVIEPSVLLVQSIAPQLHAVIDAIAQFDGRIKEVFENHPDAPIFSSFPGAGSVLAPRLLAAMGSDRSRFGSSLEVAEYSGIAPVTERSGKKMWVHRRFACAHFVKQSFHEFAAQSILYCGWARCYYDQKKREGKAHNSAIRALAYRWIRIIYRCWKDRIPYDESKYMKALQQRRPAWAQSSPLIKP

SEQ ID NO: 404617 - protein, 428 aa, unidentified
MQYALPLVLPDVPAGGVCAGIDWATADHVACVVDMTGRVTDRFSAAHDKAGIAALITRLRRSKVTEVAIERGDGPLVDALLAAGLTVVVITSRQVKNLRSRFGAAGAKDDRFDAFVLADTLRTDRARLRPLVPDTPATISLRMAVRARRDLVRHRVAVCNQLRAHLAVAFPAGTRLFHDLDSPISLAFLARFGSQDAAAGLDEQAIGAWLATIAVRGRPAPASELHARLHAAPPGATGTDGAAQAGVTAALTATLTTLSAQIKALETQIAGQLAAHPDAHIFTSLPRPGTVRAARLLAEIGDCRSRFPDPESLAGLAGVAPVTRRSGTRIAHGFRWAVNRQLRDAICDFAADSRHASPWAAGIYDDARARGKDHPLAVRITARAWTYVIWRCWHDGTAYDPAKHNALQRVLGQQRAAEADSPVSQEDR

SEQ ID NO: 404618 - protein, 368 aa, unidentified
MKNYTTVVGLDVHKKTVVAAVLPPGSDRVTERVTIENHRKAVEKLVRRLAAQGPVEFVYEAGPCGYELQRQMATMGQRCAVIAPALTPVRPGDRVKTDGRDAEKLARYHRAGELTEIRIPSMEEEAARDLVRTREDILSDRLRAKHRLSKFLLRQGIVYSGTKSWGVNYKLWLQGLQFQWQPLQQTFEAYVRAVEEAESRRETVDQQLSDLAQKEPYQTQVKYLSCLKGIDMLTALTLAVEAQEFGRFEKARGFMSYTGVVPAENSSGQRVRRGSITKAGNAHIRRVLVEAAWSYRRPSAISAAVSKRREGCPPEVIRIAQKAQNRLHRKFVRMVSQNKPNQVTAVAVARELGGFVWSIARHFPAVAA

SEQ ID NO: 404619 - protein, 424 aa, unidentified
MKVTYQTCCGVDVHKSFLVATIVKTTGGIEPSYQKERFSTFNNSILEFKQWLLDNDCHDVCMESTGKYWVPVFNLLEDDINVVIANPKWVKAVKGNKDDTKDSKWIGDLFRLGLVKGSYIPCKKVRILREYTRYRYKLVSCRSSEKNRYQNALTVCNVALDSVVSDIFGKSSTSIIDYLLEQSGSSINHEEIASKLLRSLKSKEDAVIESVEGYQMTDAQKYRMRLVRAHMDYITAEINDVDKMIENMISSNTDFENAVQFLCTIPGVKRDSAITIISEIGTDMSQFSSSKRLCCWAGLTPGSNESAGKKKSVRITRAGVYLKPALVQCAHAAVKSDKSPYYKKKYESLVKRRGKKRAIIAIARMILTAIYQMLSTGEQWNPSNLYKIDMPVALVEKQKAKAIKQARKLLQREGLLPPDEPLAS

SEQ ID NO: 404620 - protein, 411 aa, unidentified
MVKENFIYVGIDLHKETHTAVMIDCYNQKLGEITFPNRPADFPKLVTKVKKCNTDAKEVVYGLENAYGYGRPLAVWLIDKGYFVKDVNTAISHRQAKHRGAMYRKSDSDDAEAIALATLNMLDKLPDACPNDAYWSLGQLVHRRDNIMKQRTRLVNQLHEQLCIAYPSYKQFFNDISRPTALYFWEHYPSRKYLKGKSVEDLRAELVPVSHNKCSTRTCEKILDAIAGDKVKNNAYQDARDMVTLSIVSDLQHYDKQLAEVDKMLEQMYKMLGCTLTTIPGVNVITAVKILAEIGDIKRLSNANKLAQFAGIAPLHLSSSGKGKDLATKQGNRRLQATIYFLAIQMVHISSKGTPRNPVVRAYYEKRKAEGKTSQQALICISRRLISIIYGMLKSGTEYRMPVMENTGETV

SEQ ID NO: 404621 - protein, 486 aa, unidentified
MANRKQSTFERLTSGPLNRKQRRELERKLTTENPGLEIVNRNVAGIDVGNESHYVAVAPSRDPQPVREFGSWTADLERMADWLKACGVEMVVMQSTGVYWMALYDVLEARKFKVCLTNARHTKNLPGRKSDVQESQWLLKLHTYGLLRDSFHPSEEIRALRSLWRLRDRHVKEAGRAVQHMQKTMTMMNVQLSNAISDISGATGQAIIRAILNGERDPWKLAKLRDRRIKATEEEIARSLEGNWRDDLLFELKQAVDAYDFIQKQIAECDQRLQGLLAALPQREVRATEVQAEAPARESVKRKQKRKKSRADGNAPRFDLQAELKRVCGVNLTSIDGVDIMTAQTIVAELGTDYSRWKNESHFTSWLGLTPSRDISGGKIVKQESRKIKNPVAIMLRMAASSLIRSESYLGARYRSLRTRLGAGKAIKAMARYLACLVYRMFMHGQDWVDRGTQEFESKRTQRELSSLQRKAANLGYRIVAQPTSV

SEQ ID NO: 404622 - protein, 340 aa, unidentified
MGEQYVGIDLHRRRSVIVRLTPGGEVLETIRIDNDPVALSLELAKAGPDPEVVLEATYGWYWAADLLQACGAKVHLAHPLGVKMFGYQRVKTDARDSTNLAELLRMDRLPEAWLAPAQVRELRELVRYRAKLVALRSGLKAQVHAVLAKEGVRVPMSDLFGVAGTRLLDQLHLGHAYALRVASLRTLVAVYDQEIAMLGREISTALAGDVGYLAIQTIPGVGPVLAAVFVAEIGDVHRFAAAPQLCSWAGLTPRHRESDTTVRRGPITKQGPRLVRWAAVEAVQRLPGGSKQAADFHRIADRRGTGIGRVAAARKLLTLVYYGLRDGQVRCLASAPAEAA

SEQ ID NO: 404623 - protein, 357 aa, unidentified
MKKITIGLDVGDRFSQICAVDQEGAVVREERVPTTRGALRERFPATAACRVIVEAGTHAGWISRELAALGHEVIVANSRKLRWLYHNEHKTDRVDATYLARVGRWDPTLLAPIRVRSARADGALRLLRARASLVRARTRLINHVRGAVKSVGCQLPPCDATSFARRVATHLPAELHLALQPLLGQVAGLTQTIARYDRQVEHLAAHAYPHTARLRQVTGVGALTALAFVLTVDDPQRFVNGRAVGAYFGLCPRRADSGGQRPQLGITKCGDGLVRQLLVQAAHYIVGPFGPDCRLRRWGLELARRGGKNAKKRAIIAVARKLAALLYSLWVHDTRYAPQPAAPERHDDPDLPVSVTA

SEQ ID NO: 404624 - protein, 275 aa, unidentified
MEYYVGLDVSLKHTSICVVNPTGSIVQEGVVDSDPEAIALFVRSRAPGTVRIGIETGPTTTWLWTELNRLGLPVICIDARHAKAVLKMQINKSDRNDAAGIARIMQTGWFKEVRVKDLDSHAVKALLASRALMVKIKRDLENQIRGLLKNFGLVIGRGKFNVFAVRAAELIDNRPELIAAVRPLLEARNAIEQQVDDLNRKVHKLARHDVQVRRFMTVPGVGPITALCFKATIDDPTRFKRLDAMLPGKSIGPAESRSAVTPCCACICSRQPACC

SEQ ID NO: 404625 - protein, 350 aa, unidentified
MLIGVDYHPSFQTIAFFVEETGEYGEQELNHSDGQAERFYRDLKQRGICVRVGMEATGYSRWYERLLAELGFELWIGDPAEIKAKRVKKQKFDREDARLLLRLLRENNFPQIWVPDPENRDLRQLLWHRHRLVQMRTRIMNQLHALAMNEGYRWKKKLFSEQGRAQFEKLALAPWASRRRQELLELLDRMNPTIEELTTAVQQEVNKRPEALLLMTHPGVGPITALAYVLIIGTPTRFQRGKQIGTYVGMIPCEESSARKQRLGHISKQGNSLLRFLLVEAAQAAARIHPDWRRRYIHLAMRRHKSIAKIAMGRRLAVRLYWMWRNGCEYSPSLEFGSYAGQLGTRNGVK

SEQ ID NO: 404626 - protein, 340 aa, unidentified
MGDVSIIGLDLAKTVFQVHGSDADGLPLFNKRLSRSSVLKFFSKQPPCLVAMEACASAHYWGREIGKLGHEVKLIPPIYVKPFVKRQKNDAADAEAISEAASRPTMRFVAVKGEDQQAACMVFKTRDLFVRQKTQLANALRGHLAEFGVIAPKGIVHLKRLAAVIEEDAGILPASVLEYAGMILAQISALQDKIDQLEKRVQNHARGNDITARLMTIPGIGPITASALCAFAPPAETFSKGRDFSAWLGLTPKQHSSGGKERLGRTSKMGQRDLRRLLITGAMAVVRWAVRRGPKEGSWLARMLERKPRMLVAVALANRMARIAWVLMAGNESYKEPAAA

SEQ ID NO: 404627 - protein, 423 aa, unidentified
MNAMFDWYVGIDWASEVHQVCLVDATGTVRGERAVRHGGAELAALVDWLVATTGADPARIAVALEMPHGPVVETLLERGFAVHAINPKPLDRFRDRFSVAGAKDDRRDARVLGDSLRTDTRCFRRLHPDDPVMVELRERLGMAEECRQERTRLTNRVREQLWRYYPQFLELGDDLGAAWFRELWALAPTPARAARVREATVAKLLKRRRIRRLDAAEVLRRLRRPALGVAPGTVDAACAHIGALRERLRLVNRQIAAAEKRIDAILAELAAPPEAPETPETAPGQPPQQSDAAILLSLPGVGRTVCATLLVEAGALLKAADHGALRALCGVAPVTKRSGKSCVVVMRHACSQRLREAVYHWARVAVQHDATSKARYRALRQAGHSHGRAVRTVGDRLLETACAMLRHRSLYDPQYAGRMRQAA

SEQ ID NO: 404628 - protein, 360 aa, unidentified
MNTARNTKTDTTIIGIDLGDKSNETCTLNQAGEIIERGTVLNNQAELIRFSKANGGATIIMEAGSHSPWISRLLEGRGHKVVVANPRKLRAIYDTDNKNDQRDAELLARIGRFDRNLLYGIEHKCEAHQRALKIVQARDALVAARVKLINHVRGSLKSLGIFLPSGCSTEAFARKATEHLEAEDYALVAPVIETIADLSARIKAEDKHIDAMIEKDFPEAQKLLEIPGVGPITALAFILIVGSPDRFKTARDVGPFLGLVPGRDQSGDSDKPMRITKAGDRMLRRLLVSCAQYTLGHFGPPSALKEAGERKAQKGTKIAKKKAVVMTARKLAVMMLALWKDPEAEYMPFPKPPKRAAIAA

SEQ ID NO: 404629 - protein, 415 aa, unidentified
MKVVFPTCCGVDVHKTFVVATIITTPADSLQPHYQKKRFSTFNSDLNRFADWLLEHNCLDVCMESTGKYWVPVFNILEKRGIRVVIANPKWVKAVKGNKDDTKDSKWIGDLFRIGLVKSSFIPELNIRILREFLRYRYKLVSMKSSEKNRFQNAFTVCNVALDSVVSDMFGKSATAITDYLTSDESFDPDHCVSLLQRSLKKKAEKVLESIEGYSISDEQKTRIKIIREHYDFIEKLIAKVDTCVNEMVEKYEGEINLLCTIPGIDRNSAITIISEIGTDMSQFGSSKRLCCWAGLTPGNNESAGKKKSVRISRAGVYLKPALVQVAHAAVKDKANPYYALKYERIAKRRGKKRAIIAIARMILTAIYTMLCTGEVWNPVDLFKIDMPEHLKEQQLAKAIKQATRFLEKQGLTVA

SEQ ID NO: 404630 - protein, 374 aa, unidentified
MRSVALDLGGKITFCEVASGEVVGRKTVKAFDHLEDVLGPRTPKARVAIEACREVWHIADRLEAWGHDVLIVDTTRVRQLGVGHHGRKTDRNDAEVLARAVEQGRIPLAHRLSPHRQALRMYLGVRRGLVETRAGYVTMVRSVARSYGVKIPGCETEDFVGVVKATALGEEVRSIVEPLLTMLAVLEPQLRATDAKLARLCQEEPAVLRLGTTPGVSVVIAAQYVSVIDDPTRFRNAHQVESYLGLVPSEHTSVHRKLGSITKQGNSYLRALLVQGAWCILRSKAKDPLVLWAKAVQQRRGKRIAAVAVARRLTGILWAVWRRGTVYDAEHLARVGQRGIEEQQQSLEQQKAALARAERKARHSLSWKGELATT

SEQ ID NO: 404631 - protein, 355 aa, unidentified
MSSEKYIGLDVHQATISVAVMNSEGKVVMESILETKASTLLEFFGGLRGSLFVTFEEGTWAAWLYDLLKPHVTEVLVCNPRKIPLLKHGNKSDKIDARKLAERLRLHDLKPVYHGETGIRMLRELARSYLTVVKDLSRVMNRLKALYRSWAIPCAGRDVYYRRHRSELLEEIPEAGTRRRAEQLYQQLDLLQHLRQQARRELLAESRKHAITAKLRQIPSLGPIRSALAVALIQTPHRFRSKRQLWTYSGLGLETRDSGEYHFVKGQPRKRKKQATIRGLNKDYNHDLKGLFKGAATRASVKPGPFQEFYQRSLAKGIKPTMVRLTLARKIAAITLTLWKKGEDFDINKLNSQAA

SEQ ID NO: 404632 - protein, 397 aa, unidentified
MSMLFVGIDVSKDYSSGQGLDPEGKKLFYLEFGMNGEGFSRLLNTLKTHCKDLSEVTVGMESTGCYHTNLFAFLCSEGIACVVINPLLISNFARLSLRKTKTDKKDALTIAQFLLAHRSKLSQVSYCQNSQDLKDLARERESLAVMIAGLKNDVRRLLQMSFPELEHRCKLFTETMLRFLMKFPSARVIRTAKATEISKALIHAEGKRKRVFISAEEIINLAKVSVASDSVAKELILSEKIETLLYLEGKQKRITEALVEACRSMRVDELDIITSVDGISAITGSTFLAEVGDIELFSSSKHLIAFAGLDPSIHQSGQYEGISRISKRGNRHLRRVVFLMTLCAVRSQNAFREYFLRRKEEGLPPKKAILATAHKLLRVLFAMLSSRSCFRKEVVEV

SEQ ID NO: 404633 - protein, 418 aa, unidentified
MKKHSKSCRRSEASSKRVKSRGPVQRDVKEVMAEVLGKLTAKLDAPTVSTRAQENRKGNTVSPNRDRLTVGVDLGDRWSQYCILGLEGETLGEGQLRTTREDVGEFFVGLTTARVVVEVGTHSAWVQDVITELGHEVLVANPRLMEGSKRRKRKSDRIDANKLARLGRVDPQSLYPIRHRSREVRQDLVVQRARDALVSVRTELINTTRGLVKSMGTRLPGCSSPSFAEKVKDAIPIEVGEALQPLVQLVETVNECIERYDEKIEELGRKKYGHTTLLRQVKGVGPITSLAYVLTLEDPQRFANSREVGPYLGLVPKQEDSGDCQPQLGISKTGDRMLRRLLVGSSQYMLGAFGPDSDLRRYGLRLCERGGKNAKKRAVVAVARKLAVLLHHLWGTGDVYEPLHRRETGTGIAQAAAA

SEQ ID NO: 404634 - protein, 339 aa, unidentified
MQVTTVGLDLAKNIFHVHGVTDYGEIAFNRALRRPQVLAFFDRLAPCLIGMEACASSHYWARELSKLGHTVRLMPPMYVQPYVKRGKSDAVDAEAICEAVTRPTMRFVEIKSEEQQALLSLHRARDFVVRQRTQLINMLRSLAAEFGIAIPRGVARAIYFAKGIIEGNHTELPELAQDVLRVLSRQLVDLHNRLRWYEVTMRIQARLSRQAQLLQTIPGVGPVTASAVAATIGSGHQFRSGREFAAWLGLTPRNHSSGGKERLGKITKMGDRYLRQLIVVGMTSRVRQVANHPERADPWLADLLQRKPARLATVAMANKTARIMWAVLTRNEPYRPHAA

SEQ ID NO: 404635 - protein, 323 aa, unidentified
MARIICGVDVSSSSLEGRIGREGAAASFPNHAEGIAELAAFCHTHQVELVAMEATGGYEQQAFAQLSQAGLPAAILNPRAVRQFAQSMGRLEKTDRIDAAMIAWYAEVKQSPPMCLAPHNQQHLRALVTRLRQLTEIRTAQLNQQRLVMDRSVQTSFRKLLAFVERQIGDLEKRIAKLIDQDPLWRELNQSFRTIKGVADRTVCRLMAEMPEIGTLSNKTISKLAGVAPLARDSGNYQGKRVVRGGRASVRDLLFIVASVVGRHELDFIAFQKRLRAAGKPPKVVRIALAHKLLVRLNAKAREVRQKMLEPQPGSPSLLLGTK

SEQ ID NO: 404636 - protein, 415 aa, unidentified
MALKIVYKVCCGIDVHKTFVVACIASTNTQGVTTYKSHRFSTYTKGLKELLQWLLEFNCKDVCMESTGKYWIPVYNVLEKDCSIVLAHPKYVKAIRGKKTDKKDAKWIADLFKHDLVAGSFMPPADIRQLRDLMRYRYKLTCFMSSEKNRLQNCLTVSNIQLGNVVSDTFGKSSKRILDKILENPQDTSFDIEPLIHGSMKDKIPELELAIDGYITPEQAGKLKIIKKHFEDLESRKTELEELILALASPYQQKLDLILTAPSFKNIFSAITVISEIGVNMESFPSAKHLCSWAGLTPTNNESAGKKKSVRVSKAGCYIKPLLVQCANSVAKSEKHPEIRNRYLRLRKRRGHKKAIIAIARMLLTALYNMLKKNEPYNAELYKKSDIIPTNREITVEQAILIAKSQGYRIKSATE

SEQ ID NO: 404637 - protein, 411 aa, unidentified
MATKFCGIDWGESRHDAAIIDNTGKVLARAKITTDAAGFTELLILLADAGDTDDDPIPVSIETDRGLLVAALRSTGRPVYPLNPLAASRYRARHQVSGAKSDATDAVLLANILRTDMAAHRPIPADTELAQAIRVLARAQQDAVWARQKLGNQIRSLLKDFYPAAIEAFAELPKGGLARADARTILAAAPTPAKGAKLTRTRLRALLIKAGRQRLLDTDTDKFYAILRSEQLRQPAAVEDAMGIQLAALLTQFDAACRASDDLEAAARERFEQHPDATVIASFPGMGTLVGARVLAEIGDDRNRFADARGLKAFAGTAPVTRASGKKTVITYRRIKNNRLVAAGSIWTLASLKASPGARRHFQSRRERGDWNRQAQRHLLNKFLGQLHHCLQTGTSYSETHAFPPPLELAA

SEQ ID NO: 404638 - protein, 345 aa, unidentified
MRVATATTVTGPIFVGLDYHTESVQVCVLDRTGRALVNQACANDWRVIRDTVARVGAEVRAAIEACGGAADLAEELVTRAGWHVDLAHPGYVARMKGNPDKTDYSDAKMLADLERVGYLPKVWHAPAEVRELRRLVRYRQQLVGQRRNVKLRVGALLRDNRVAAPDGVNPWTVAWVTWLAREAALSEQTRWVMDRHLARLGALAADVKAAEERLARVTADDPLVQQLLALKGIGLVTAATIRAEVGRFDRFRTGKQAARFCGLTPRNASSGQRQADAGLIKAGNPQLRATLVEAAHRLIRYDARWKKLASDMRARGKAGSLVAAAVANRWVRWLYHQMQPARSAG

SEQ ID NO: 404639 - protein, 321 aa, unidentified
MANCVKALQIGVDVSKAELVISVDGQPPFALENSAKAIKGWLKQLPAQCQIAMEATNDFHMSLATLAHAQGHRVYLLNGYRLNRYREGVGGRAKTDCADALLIVRYLQREQEDLREWEPAVKGYRELQVLLHRRATVIRAKTQIQQSLDGISVLDGVLKSLLKQIERVDQLIRKHILKIVEQAQWQGHLQRCQQIEGIGPITAAGLTMAYNRGHFKDSDAFIAFLGMDVRVRDSGAKQGKRKLTKQGDPELRRLLHLAAMQAKRQPAWQQLYQRYIDRGLAPIQVLNILARKLARVAFALMRNQADYEPRRLPDTQTMMNC

SEQ ID NO: 404640 - protein, 317 aa, unidentified
MNTISPTRHIGVDVGKDQLDFFCHESAEHFTVPNTASGIRQALKRLPLAEIACLVVEATGRYEQALVQAAQGKGVPVFIAQPIAVRRFAGALGILAKTDRLDSRVIAQYAASIRPQARPLPDRNTRKLKDLTVRRKQVIGMLTMEKNRLQVMPAFLGADIRRSIRGLKRQLTKLDDTIQTLSQEVSAWRERRLILESVPGVGTTLSTTLLSDLQELGSLNPKQIAALVGVAPMNRDSGKMRGKRSIRGGRAHVRTVLFMATLSAIQHNPVIRRFYRMLVAKGKVKKVAVVACMRKMIVMLNAMVRDGTSWEETKTMA

SEQ ID NO: 404641 - protein, 362 aa, unidentified
MMNNLMTLDVFGGVDTHARTHHAAVVDGIGRELGDCEFPATPAGYEALHAWLMGFGRVLLVGVEGTGSYGAGLMRTLNSAGTKIVEVDRPDRTARRAQGKSDPLDAYAAARAAASGRATGRPKSRDGVVESIRCLRLAQRSAIKARTQCINQIRALLVNGPTDLREQMKQLSTVQMLKRLSHIRPNSDFTRPDSACRLALRSLARRHANLNCEIKELHHVIADLIKHAAPELLERPGVGVQVAAQLLITAGDNPDRLGSEASFAHLAGVAPVPASSGKRQNRHRLNRGGDRAANNALYTVTLVRMRYHEPTRAYVQRRTAEGLSKKDIIRCLKRAIAREMFRALTKPPKPITQLTPPALVAA

SEQ ID NO: 404642 - protein, 346 aa, unidentified
MNISRVGVDLAKNVYQLHGTDRKGKTIWKRQLSRDKWLKVLFTTVKPGAVIGMEACTGAHHWSRILMSKGYEVRIIPPQFVKPFVKSNKNDANDAQAICEAMSRPNMYPVKVKTVEQQDIQAVHRIRNEIKNHRTAKANQIRGLVAEYGLVAPKELSSLRKAIPEWLEDASNGLTPFFRQILHDLQHDLHSLDQRMSKLDKQIALIAQQNPIAKRLQQLRGVGPLISTALVATMGDGKQYRKGRDMAAAIGLTPRQHSSGGKDRLLGISKRGDAYLRCLMVHGARSAMRTAKDKDDNLSRWIMRLQDRRHNNVAACALANKMVRIAWAIMTKDVEYDPNFKVIPVN

SEQ ID NO: 404643 - protein, 355 aa, unidentified
MDSEKYIGLDVHQATISVAVTDSTGRIIMESILETKAATILEFFAGLRGTLVVTFEEGTCAAWLYDLLKPHVDQLVVCNPRKNALLKDGNKSDRIDARKLAELLRGNQLKPVYHGETGVRMLRELARSYLTIVKDLSRVMNRLKAVYRSWAIPCAGRDVYYSRHRAEWLEKIREPGVRRRAERLYQQLDMLQHLRQQARRELLVESRKHPITAKLRQIPYLGPIRSALVVALIQTPHRFRTKRQLWAYSGLALETRVSAEYSYATGQLRRSKKLISIRGLNKDHNHDLKGLFKGVATMASVRPGPFQDFYQALLAKGMKPTMARLTLARKIAAITLSLWKKGASFDAEKLKPQAA

SEQ ID NO: 404644 - protein, 387 aa, unidentified
MSQPNDLSRSLAPFEQDSTLVAVIELSQSSWLIAASVPGVERQPLKKIVPDEAALLRLLHRWRDEAIRSGSTITRIAVAFEAGRDGVWLARWLTQRGIEIHVIHSTSVAISREHRRAKTDRLDTAMLMRVFMGWLRGERGHCGMVAVPTIEEEDAKRPSRERENLVGERTRIVNRMKAALTRLGIRGFKPELRKAPGLLESLRTPEGSPIPRNTLDEMRRDLARLAMLRDQIKDIEQTRLARLEQAPSTGPTGMIRLLASIIGVGIETADMLVHEVLSRNLRDRRAVARYAGLTGAPDESGSKRREKGLAKSGNARVRRGLIQLAWRFLMFQKESALAVWFRTRTEGASGTRKTKMIVALARKLLIALWRMVTAGEVPHGVVLRQPA

SEQ ID NO: 404645 - protein, 361 aa, unidentified
MLHSNKLNILDFRGQSIYAGIDVHNKSWKVSIYCGELSLNPMTMPPEPEKLISHLRKNYPGADYHCAYEAGYSGFWIQEEFRKEGVDCIVVNPADVPSRDKEKNFKTDRIDCRKIARCLSKGELEGIYVPSREELEDRNLLRLRHLTVKKSTRVKNEIKAMLSYYGIKNPDANYKRSWTKAHMKFLETVQMVNPSGNFSLKLLLEELNSLNGIINKITNEINKLSNQSRYKADFEKLITTPGIGKLSAMIILTELIDIKRFKSLIKLNSFVGLVPSEHSSGEKQIRYKITRRGNPYLKKTLIECAWSAIRKDPALLMSFKQYCNRMNSNQAIIKIARKLLNRIRYILINKKPYKLGIVEIV

SEQ ID NO: 404646 - protein, 339 aa, unidentified
MKITTIGLDIAKKFFQLHWVDMTTGEVHRKQLKREQMAEFFANCEPSVVAMEACGSAHYWARKLGAFGHEVRLVAAQFVRPFVKTNKTDAADARAIWEAAQRPEMKFVAIKTEAQQSVLTLHRLREQMVKLRTMQTNQLRGLLYEFGVVLPPGRAKGMPAAIEALCELEDSLPAMMIDALRQQMVRIEKFSEDIADIEKKLTLWKKEERSAAKIMEIPGVGILTATAAVATMGDAGAFKNGREFAAFLGLVPKQSGTGGRVRMQGISKRGNVYLRTLLIHGARARINFQKQRDPWIEQLLARRPFNTVVVALANKMARTIWALMAHGREYQKNYATSIA

SEQ ID NO: 404647 - protein, 315 aa, unidentified
MYVGLDISKEEIYVGSNLNKKAFKVENNEKGFPKLLEFINSLDSIEAVVMESSGGYEKAVCYFLLENKIPFAVVNPKNVRRYADAMGILAKNDSIDAYVIACFAFAIKPKPVTLLDKDIVELKELLRRREQIIGHISSEKNRSYLTDANIKKSINRVIDFLEKELKIIEYEIDTLLKKRSDLSQKVKVIESIPGVGRVLSSTIIGFLPEIEQISKKQTSSLIGIAPFGKESGKVKKKGKIVGGRFQVRKALYMATISAIRFNKPIKEFYLKLKAKGKPGRVCIVACMNKLIRIIRACLVHNTLWEESYALKQGAA

SEQ ID NO: 404648 - protein, 318 aa, unidentified
MTQDLFIGIDVSKAKLDVAASPGEHSWTVSNTEEGIQELISKLRQLGTPKIILMEATGGFERRPLVLLGAAGLPVTAINPRNARDFAKSIGLLAKTDRVDAKALALFAQKIQPPCRPLPDAETRALQDLIVRRRQMIDMLTAEQSRLAIVESAKVKREITQHIAWLKKRIHITDYDLDQTIKNSPAWQPKSDLLKTVPGVGPVTSSTLLALLPELGSLTNKQIAALGGVAPFNRDSGTLRGRRCIWGGRAAVRSVLYMATLAATRFNPTIRAFYQRLRNLGKLPKVALVAAMRKLLTILNAMVRDQTPWHSSNTEISS

SEQ ID NO: 404649 - protein, 364 aa, unidentified
MTTIAQSGEPRRVLGGVDTHKDVHVAAVIDDVGRTLGVAEFAATGPGYRQLYVWLSGFGEVVAVGVEGCGSWGAGLARSLTARGVQVVEVNRPNRQNRRRRGKSDTVDAEAAARAVLAGDATVTPKAGTGPIEALRQLRVVRGGAMKARTAAANQLLSLLDTAPDPVRAQLRALTFKKKVALAASWRPRNATTAEGASRYALCSVARRWGDLALEIGELDTRIKTILADIATPLLAVHGVGPDTAGQLLVTAGDNPDRLTHESAFAALCGSSPVKASSGKTNRHRLNRGGDRHANSALWRIVIVRMTSHQPTKDYIARRTAEGLSKQEIIRCLKRYVARELYPHVQAVIATPQHEAAQGDLRAA

SEQ ID NO: 404650 - protein, 391 aa, unidentified
MIYIGIDVAKDKHDCFITNSDGEVLFKAFTIFNNLDGFNDLYQKIESVMDDVTKVKVGLEATGHYSYNLLGYLIDKGLPAYVINPLHTNLYRKSLSLRQTKTDKVDARTIASMLMSDVNLKSYSDTSYHNEGLKSLTRYRFDKVKERAKLKTSISRLVCILFPELEKLVPQLHMASVYAMLSEFPGAKQVASAHLTRLTNLLSESSKGHYGKGTAITFRDAARASIGSYMPAKSLELKHTIKLIQELDSEIDEIENEIKIIMDKINSPILSIPGISYRMGAMIIAEIGDFSRFDSPDKILAYAGLSPSTYQSGQLNGAYAHMEKRGSRYLRYALYNATKYVCHWDPTFAAYLAKKRAEGKHYNVAISHAVKKLVRVIYHLEKTKQQYIKAA

SEQ ID NO: 404651 - protein, 312 aa, unidentified
MKQQHQDSEITIGLDLGERRHRFCALDGRGEVVEEGSLLNDRASLARLTARYPGALAVMEAGTHSPWVSRYLEGLGWEVIVSNPRKVRAIYQHERKSDQRDALMLARIGRMDRALLYPVRHGSEQAQQDLLRIKLRDSLVRARVALINSVRFSLKSLGYAVCNPSSERFHKVAMERLPERVQQMIAPSVQALAELSTRIAVLEREINVVARTKYPQTLWLQQVPGVGVLTALYFVLKIEDPQRFENVRDVGAYAGLCPRRDQSGQSDPQLRISKRGDPYLRRLLVSAAQYILGPFGPQSALRGYGLMLAAGW

SEQ ID NO: 404652 - protein, 370 aa, unidentified
MKKNSTVRQSPKRAAARKEGPITIGMDLGDKTSRYCVLGENGERVSEGSVATTRKAMTQRFAGMRRCRVAMEVGTHSPWLSRWLTSLGFETIVANARQVQLISANSRKNDRMDALLLARLARVDPQLLRPIRHRSEKAQADLLTIRIRAALVEARTSLVNAARGFAKAQGDRLPACDADAMGVEKMEALPAEMRERLRPLLEQVASLTVQIKQLETKIEQIARTQYPETELLRQVSGVGTLIALTFVLTVEDRERFRKSRDVGCYVGLRPKQSESGQSQPQLRITKEGDRYLRQLLVQGAHLILNRRGPDTDLKRWGLKLAARGGKNAKKRAIVAVARKLAVLLHRLWVCGEVYEPLRNSQPARSSKQAA

SEQ ID NO: 404653 - protein, 458 aa, unidentified
MSRKGRRTKGMEEAHPFAGMSQVNENAAGVDIGAVEIVVCVSGNENMQIVKAFGNYTVDLQNIGKWLKSYHVKTVAMESTGVYWIPLFEELERQGFECLLISSRSLRRVPGRKSDIEDAQWIQTLHSYGLLESSFRPQADLVALRTMLRHRSQLLEHRAPHIQHMQKALLQMNVQLSQALSDVTGETGRAIIRAIVAGERNPQLLAAFRDANCKKSEDEIGKAMTGTWREEHLFVLKQSLELYDFYTQQIERCDAEIDRMYTLIRPNWECGELPPLPNKKRNSHSKNAPENAREIRKHLKRINGVDLSVVDGFGVSLAQSLTMEVGTDVAEKFPTEKHFCSWLGLAPKHEISGGKVLKNKTLKTKNRAGQVFRMAAQSVKRSDCVFGMMFRRFRARMDNRQATVATAHAIARVAYRMLKYQVEYETISVNEYEKKYEEQQIKYLKKKVAKFGFQLVPV

SEQ ID NO: 404654 - protein, 387 aa, unidentified
MTARTVSNLPAAMHFDTARCLFAIELSKQNWVIGFVTPLSAKISRRILSGGHWKGLLDLIEEVRARVSRETGRTVDVISCYEAGYDGFWLHRLLEAHGIRNHVIDPASLQTDRRARQVKTDRIDTERLLRSLMAYLRGEPKVWSVVRVPSVAEEDARRLHRERDRLVSERVQHVNRIKGLCALHGIYDYQPLRPQAMARLEQLRTAQGISLPPRLKSEIKRELQRLELVVEMIATLEAERDAIVEDEASTHVNAKKIQNLHQLKAIGPEFAAVLVGEIFHRDFNNRRQLASYVGYAPSPFQSGNVAHDQGISKAGNRKGRTTGIELAWLWLRYQPDSDLSVWFRTRVGTTKGRIRRIAIVALARKLLVALWRYLETGLVPRGAVLKG

SEQ ID NO: 404655 - protein, 412 aa, unidentified
MDPIYNSCAGLDVHKRSITACIRRLRPERSIFQETRTFGTMTRDILEMADWLASAGVTHVVLESTGVYWKPVFNLLEGRFTVLLVNAKHVKHVPGRKTDVQDCQWLAQLLQAGLLKGSFIPERPQRELRDLTRHRAQLVAEKTKVTNRLHKVLEDTNIKIGAVASDLLGASGRAMLRALITGQQTPQEMANLARGLLREKIPQLVLALEGKVTEHHRFVLEELLDHLEDLEKRIERFSRRIEEVSGPFDQAIQALMRLPGIERRSAENVVAEIGATLEAFPSPGHLASWAGMCPGSNESAGKRKSGKTTKGSRWLRAALCQAAWAATHKKDSYFQAQYRRLAGRRGKKRALVAVGHSLLVVIYHILKDRVTFKDLGADYFEKLNVKRLIPKLVKRLENLGYEVNITPLQNAA

SEQ ID NO: 404656 - protein, 307 aa, unidentified
MNTKNYIAIDISKLTLQVCSCFFSGCFPYSDSGLKQLIQKVRTVDSPIVVYEATGGYERILADTLRQNSIAGRIVNPSRIRAFAKSDGLKAKTDPIDAALILRFAQQKQLEPTEPPSDTELNLKAMMNRRAQLVASITSEKNRLDKDPPCTHKSIRNVIRMLEKELAIFDRDINNLVSEDKQMSYRREIMSEVVGVGNITCLTILAYMPEITRLSRNELVAMAGLAPFNRDSGKYKGQRKIDGGRAKIRKCLYMAATTAAVHNKHIKSYVDALRSRGKPYKCAIVAAMRKLLIHLQSLLKINQFSLA

SEQ ID NO: 404657 - protein, 393 aa, unidentified
MKTVAENKKSALISQNITPPGAITEVYTTKERSTMNSTLSNNPAVVIGIDLAKTHCDVVGYDKNQKIVLKLPRISKEKLLERLTNMPRATVLMEACGGSHSFIRKVKALGHDGRLVNPGDVKRIRCGHQKNNMLDAAYIAWAWYIPGISFVAPKTQAQQDLQSLQRIYQGYMKTRIEFGNRIHALLLEYGLSSPQTSRFIAEQLPEFIETHTKDLTPLAEEALLMLRDSWLEASEWEKKAGQKYDELVRANEDSKRLMTIPGIGPKCAGALLTHCGEASRFRDSRQFAASLGLVPRQNSTGDRDTLGHITKRGPKHPRSMLVQGASALMIMADRLEGALGEWVRKIKASGKKYGVKVCAIAAKLARIAWRILCEKGMEYRPQPIKAGRSRAAA

SEQ ID NO: 404658 - protein, 283 aa, unidentified
MGLYAGCDLHAKSNYWGVVDGEGKRVFKKKLRNDAGAILEMLRGMGGDLVGVVVESTFNWYWLVDVLMEGGYWVHLANPTKMQKYSGMKYVDDEDDAFWLAEMLRLGVLPEGYIYPKEERPIRDLLRKRGHLVRVRTSVLLSLKNIVSRNCGKGVKSYILKGGKGVGGLLEGNEDLALAGQVSKEVIDYLSGKIEGVEKAILGRAEIRESYGGLLTLPGVGKILGLTIRLETGPIGRFGDVGNYVSYCRKVPSRWLSDGKWKGQGNRKNGNRYLAWAFSEAAE

SEQ ID NO: 404659 - protein, 359 aa, unidentified
MTIVADTYTYVVGVDTHAATHHFAVIHAATGAVIDDRAFPTTPAGLARALTWISDRAGGQVERTLISAEGTGSYGAPLAQLLHEAGYRVVEAPTPARARIRGRGKSDQADAITAARAITGMDLNTLRDRRSGGIRAALQALLARREELNDRHTTAINMLTSLLRTHALGVDARTALSAAQIHQIAHWRTRHEDRAQAILRRLAREYAREIQALATQRRANATQIHQIVTAQAPELLDLYGVGPINAAIILTVWSHPGRIRSAAAMNSIAGVAPIPIQSGNTHKVRLNRGGDRRLNKAIASIVLTRCRTPESKAYIARRVAEGKTPQEAKRCLRAYLTRKIYRVLTAAHPTPPQPDLTAA

SEQ ID NO: 404660 - protein, 330 aa, unidentified
MNSICLSTDQIAAALPVLGLDVAKQSVQAELRTNGKRVRFGFANNAKSFVQLERILKGHNAPKVWAGLEATGPYSHALALWLHGRGHRVSLLNPRRVKEYACSAGNRNKTDRLDAAIIADFIRAHEPPAWQPPKQEVAQLQALVRRREELSLMLQGEKNRLEGVAPNVRSSLERIIATLSAEKAHLEKLILRQIHSHQQLSWDHQLLCTIKGIGSLTAAILLAEMARPGQVERARQAAAHAGLAPRREESGSSVRRNRGLGKEGNRYLRKALYMPALVAIKHNAPLQHFASRLRAAGKPKMSIVCAVMRKLIHIAFGILKHQKPFNPSLA

SEQ ID NO: 404661 - protein, 404 aa, unidentified
MNNVAGVDVSKGKSMVSVLRPFGEVVAKPFSVGHTGSELKELADYLKSLDGETRVVMEHTGRYYEPVARFLHEEGIFVCAVNPKLIKDYGNNTLRKVKTDKADARKIARYGLDNWVELRQHTPMDTIRIQLKTLNRQQGLYSKTKTMMKNNLIALLDQTYPGVNDLFDSPVREDGSQKWVDFATTFWHVDCVRNMSLAAFTERYRKWCKRHGYNFRQGRAVEIHAGAQDLIAMLPKDALTKTMIWQAIDALNAVSMSLEQLKTEMHTLAAQLPEYPIVMAMRGVGDSLGPQLMAEIGDVTRFTHRNAITAFAGVDPGADQSGIHEAKSTRASKSGPPDLRKALFLVMDCLLKTMPQDDPVYRFMDKKRAEGKPYLVYMTAGANKFLRIYYGRVKEYLASTENSD

SEQ ID NO: 404662 - protein, 500 aa, unidentified
MYSIYSKGDEPLLKLFEQVKDPAKILCVAIDYAKAKHVILFCNGVGEVLKHSFAVENSAAGLEQLLAQMQATCHHRGILPKHVLCGGEDSPAYAANFTAALSQKKFLVVRVSASEAKTQRQNFQASNDNLDLYGMVACLITRRGRLLAIQNQEYAQLRILVRERDYLVRCQTALTNRFYPHVDQLFPGFLQPASAVVTPFGPACLWLLEHDFSAPQIARRASQRLVQGLKKHRVPEPDKAVEELQELARQALPPRAQTLGPCQISLAQLVPLRRGLQDAVQNLDRHIGRTLARTPAAVLTSIPGIGVTLAAGLGAEVGVLARLPSLDSLGSYAGIVPCTTQSGGPDQPPVTGHKSRQVNKRLKCCLMLGGEHMAAIQDSQAQRLRQRAEEKKQHACALLAKHLAGLARSLLQRQTIYLPPELYDPSSAPYDRAQYYQTLWPKWLEKWKTSGADLHEVFAATTPLGQWRTMVCQVHKLSLPLPGSAQQIHLCSQAKHTASA

SEQ ID NO: 404663 - protein, 408 aa, unidentified
MTVVGIDVSKGKSMVAAMKPGGELVTTPYEVKHSDIELSRFALDVLCMEPDTRVVMEATGRYHEPVAALLHSEGIFVSVLNPLLIKQSGAGSLRKVKSDPKDALKIAKYGLDNWSTLREYTPMEAIRQQLKLCARQCDLYSKNIVMLTNNLISLSDKTFPGVNELFSSPEKADGHLKWVDFYRSFWHCDCINRMSPDAFEERYKKWCKRKGYHFSADAADALYAASCGLYTTLPRDNNAKLLVTVATDQLIALRENQSKLETEMLNLCKQLPEYETVMDMYGVGKSTGPHLMAELGDIRRFPHRSSIVAFAGVDPGVVGSGKMQLSSVATSKRGSPQLRKALFQVVSAYVKRKPENEAVYQFYAKKRDEGKPYYVCTTAAANKFLRIYYARVKECLNAAESATQAEEG

SEQ ID NO: 404664 - protein, 411 aa, unidentified
MRRVIGIDVHRTFGEVVFWENGRLRHAGRIDMTRTALEGFGKTLLASDEVVLEATGNSMAVSRVLAPFVARVIIANPLQVKAIAQAHVKTDKIDAGTLASLQAAGYLPQIWTPDAETERKRRLVARRYQVVRHRTRLKNEVHSILHAHLIPKCPHADLFNGRGRAWLVAQPLPDDERAAIDRHVRELDRLAEDLALLDREIAQDAIDDSAVNRLMTITGVNLAVAAGIMAAIGDISRFNSPQKLVSYFGLNPRVRQSGLGAAHHGHISKIGRSHARAMLVEAAWAAAKAPGPLHAFFVRIRARRGHQIAAVAVARKLTVLCWHLLTKGEDYLWARPALVAIKTRAMQLQAGHPQQKGSRRGPAYAYNIKALRDREMLIAAQAEQSYERLVTQWKPRRPKTGARAPQLGKTK

SEQ ID NO: 404665 - protein, 355 aa, unidentified
MRFYTQQHQFYCGIDLHARQMYLCVLDAGGQTLVHRNMPASAEMLDRALVGFGGSDLVVGVECVFTWYWIADFCSERNIPFVLGHALYMKAIHGSKTKNDKVDSKKIAMLLRSGMLPQAYVYPAEMRATRDLLRRREYFMHQQSELLEHIQNTNTQYNYAPFPKRIQNLANRVGIEERFSDPLVAKSIEIDVQLLDAYHRILLELEAQILRHARHHDPVSLHLLHSIPGVGKVLALVILYEIQDVNRFPNVGNFISYARLVKCPHESAGKRSGSSHNKIGNAHLKWAFSEAAVLFLRSHEPGKKYHQKLVAKYGKAKALSIIAQKIGRVAYFILKRQMPFDSKRFFQDGVHESAA

SEQ ID NO: 404666 - protein, 424 aa, unidentified
MSRKKSSVAGLGALYGRVCGLDVHKKVIVACVRILDSKDGTVQSTLRRYGTMTADLTELRQWLGELKVTHVAMESTGVYWQPVFNLLEGHFQVWVVNAQHIKKVPGRKTDMKDGEWIGQLLQCGLLRPSFVPDRQQRELRDLTRQQTKLVQQRNAVDNRIQKVLETANIKLGSVASDVLGVSGRKMIEALIAGEKDVTVLAELAQKKLRDKIPELQRALEGELNDHHRFLLSQLLGQYDFLEKEITRVSERLGAVAPPSFRAAVEQLDAIAGVGERGARALLTETGTDMSRFPTHKHFTSWAGQCPGNHESAGKRRSGKTPAANRHIDAVLTEMAHAAVRTKNSYFKSQYHRLAGRRGKKRAIGAVKHSLLVIVYFMLRDDKPYKDLGGDYFDKLNPQQRIRYHVRRLQELGQTVELSPMADAA

SEQ ID NO: 404667 - protein, 344 aa, unidentified
MEHFAGLDVSVKETSVCIVDDMGRIVREAKVASEPEALLAVLNNPSYRFRRIGLEAGPLSQWLYSALGEANLPVICVETRHMRAVLKAQINKTDRNDARGIAQMMRAGLYRPVHVKTLRSQKLRMLLTHRKLLQSKAIAIENDLRGTLRNFGLKVGVVGAVKFETRIKQLVENLPDLALLVEPLLVVRRVLREQIAVLHRRLLHIVRDDEVCRRLMTIPGVGPVVALTFRATIDVPARFRNSRAVGAVLGLTPCRHQSGESDRTGAISKCGDEMMRVMLYEAAQILLVRSTRWSWLKVWAMQIARRCGLKKAIVALARRLAVIMHRIWVDGTEFRWARQAAAAA

SEQ ID NO: 404668 - protein, 402 aa, unidentified
MNCVGIDVSKGKSMIAVMRPFGEVVVSPFEVRHTASELSKLAGLLKSLDGETRVVMESTGNYHAPVAWLLHGAGFYVSVVNAMLVHDYGNNSLRRAKTDKKDAVKLANYGLDHWLTLPRYVPEEDTRLMLKTCYRQYQQYSKVQTMLKNNLISLLDTAFPDANRLFTSPPRADGSEKWVDFVATFWHCECVCGLSEKAFTAKYQKWCRKHGYNFSQDKALDIYASACGRFGVMPKTNTAKLLVEQAISQLQTTSAALAALKQEMQSLAASLPEYPVVMEMFGVGPTLGPQLIAEIGDVRRFHSKKALVAFAGIDAPPYQSGQIDVRSRSISKRGSASLRRTLFLVMGVLLQCAPMDEPVYQFMNKKRSEGKPYRVYMMASANKFLRIYYASVKAYLDSLEHD

SEQ ID NO: 404669 - protein, 353 aa, unidentified
MNKMQDYLVRGKRVFVGLEDSKRSWKVCVRSGGMIVQEVSLPADYSVLQKYLQRGFPECEVALMYEAGFGGFGLHDLLVADGVACVVTPPHTLTAEKVNRVKTDRGDARRLAKNLESGDYRVCQVPDRELREDRQLVRTLSQVQREITTTKNRIRKFFDFHGLNAGFPSGVWRKSDYERARSLPLGHSLQVCLASYFQILDTLEQVRVSLLLELKALCAQERYRRSVEIKASFPGVGWLSAIRFTLEWGAMSRFGSGKQLASFVGLTSREHSTGDQVHRGRITRQGSGIVRAWLIQCAWRALVLDPVMLAKFQAVWRNSGSKKKAIVAVARKLTVRIHSLERLGAPYQIGVLE

SEQ ID NO: 404670 - protein, 455 aa, unidentified
MPKTITGDRPELRPIDAGAAAIDIGSKMHMAAVDPTCTDVPVRAFGTFTQDLHALADWFKGCGVTSVAMESTGVYWIPAYEILEQHGFEVILVNARYAKNVPGRKTDVSDAAWLRQLHSYGLLRGSFRPDAEIATLRAYLRQRERLVEYAAAHIQHMQKALMEMNLQLHHVVSDITGATGMRIIRAIVAGERDPDVLATYRDVRCHSSIETIRAALVGNDRDEHVFALTQSLELYDTYQAKMLDCDRKLESLIAALTDKGAKPVGKLSRPRVKTKQVNTPSFDVRAALYGVLGVDLTEIHGMGPSLALKLIGECGTDLRAWPTAKHFTSWLCLAPGNKISGGKVLSSRTRRSSSRAAALLRLAATTIGRSDTALGAFYRRLSSRAGKAKAVTATARKIAVLFYNTLRHGMTYRDLGADHYEEQYRSRVLANLKRRAKSLGFVLQAVPRDAEVAVS

SEQ ID NO: 404671 - protein, 334 aa, unidentified
METLFRQCVGIDVAKSTFVASICRYLSNGKYEYVMAETFKNDSSGFNKLVKWIRKNSAKEYQVRIIMEATGVYYEALAYHLHGLKFHLSVLLPNKVKNYARCLNIKTKTDNVDAKIMARMGVEQSFSAWNPPAAIYRRMRMLTRHFQELKKDRTAMLNRLEAITHGAEEDKFLMRSNKRIVALIDKQIEECKEELRNLVSSDPELVEKIKTVETIKGVSFMTVCIVVAETQGFSMITSRKQLASYAGLDVVDRQSGTSVRGKGKISKKGNSHIRAALFFPAMTAAVYNKPLKEDYQRIVEKKGKKLIGLVALQRKLLLLIFTLWKKNELWNEDV

SEQ ID NO: 404672 - protein, 342 aa, unidentified
MTNTTIIGMDISKYSFELCGTDERGRHTLHRRLHRDKVSLFFANLSACTVAMESCSGSQHWARQLKDLGHQVMLIPAQHVVAFRQGAKNDRNDAAAIAEAATRPHLRTVPVKSIDQQDLQTLHRVRERLVHHRTALINEIRGLLLEYGIVCAKGMTRFLIWLREEFATHIADLSPLAQETFHALRDEFRALDERLALLNKRITAVFDSHPVCQQLATIPGVGALVATAIIASVCEPQRFKNGRQFAAYLGLVPRQHSTGGKPKLLGISKAGNRYLRILLVHGARSIIYHHRAKEDPRSKWVAKLVERRGFHKANIALANKNARVVWKLLTTPGERFSLPLAA

SEQ ID NO: 404673 - protein, 349 aa, unidentified
MGQVSTIGLDIAKNLFQIHGVDAEGMVVIRKRLSRGRVLEFFADLPPCRVGMEACATAHQWARELRKLGHDTRLMPPTYVKAYVKRGKNDAADAAAICEAVTRPSMRFVPIKDVEQQSMLMLHRARDLLIRQRTQLINALRAHLAELGLVAAKGREGLHQLVAVVTECGDERLPSNARFACQAIVTQLHAVQIEISGLDKRITQIQRTNADCKRLTTIPGFGVILSTAVAATMADPKVFRTGRDFAAWIGLVPRQNSTGGKERLGSISKQGDRYLRRLLVVGATSVINCARARPYKYPWVIELLGRRPTKVVAVALANKMARIAWAVLAKGEPYRAPTRSSNAVVPAAA

SEQ ID NO: 404674 - protein, 392 aa, unidentified
MLFVGIDIAKRNHEASVIAQDGHVVRKAMRFANSQAGYNKFMDMVRSLSEPVVFGMETTGHYWLTLYTHLRNDGFTVHVINPTQSDALRGMYIRKTKTDSVDSVIIADVIRFGRYCETSVDPGDLQAMRELCRQRFYIIDMASDLKRKVIALLDQVFPEYEKLFSDSFGLSSMELLSQYTTPEEMLSVSSQQLAEVLKKASRGRLGAEKAVEIQDAAKNSFGIVMVSSSFSLIIRQYIEQIRSLESSVDIFDTEIARLLSGFDTQLTTITGIGSTLAAVILSEIGGDIRRFSSPAKLAAYAGVDPTVKQSGDFSGTRIKMSKRGSPYLRRAIWLASTVAAFKDPVIHALYERKRAEGKDHMTVIGHVCRKMISIIFAVLRDNTPYVPAGISD

SEQ ID NO: 404675 - protein, 482 aa, unidentified
MKKRNIFQNRSQLLLGLFEKAGNRLKMMCVPIDYAKKDHMVMFCNGYGDIVRKPFSVKNTLEGVKYLIGQVMRSCRHRHIKKEYVFFGGEDVNSYAENFANALRNKGFLVANVNAHDAKKQRETLQASTDRIDLMGIATMLLNLRAKCSPAQDGIYRNLRTLVRHRKKLVVMKTEVKNRMHTLVDRLFPGFLNEKNSGLNPFSKSSLYLMEDRFSAQQIRRRKQATLIKILKRCATPDAGSIAAKLHSYAAQVITTPDEYAATLQLSLQHHIKHYRCLQENIDQLLSEIALVLAQTQAAFLTSIKGVGIVLAAGVSSEIGNPFEQKPLNNLTSYSGIIPRVKQTGGVEGHTHIGRVSKRSNHILKDYVVQSAFQMGMRGPQLLLQDYKRREAAGQHADFGIGRRFLRMGMCLMRSSQVYLPPTLRSPKAQMQERAGYYLTAWPLLRDKWKKAHAHQAAFAKDQPLGQWRQMVQELYDIKLKL

SEQ ID NO: 404676 - protein, 310 aa, unidentified
MAEIVITAGIDVSKDRLDLALWPEPGANGSFTPGEIEPLISWLGAHRVSRIGLEASGGYEREVVRRLSAAGFVVVVANPLRVRRFAQAKGRLAKNDRADAATIAEFTATLAPQRQLREAALDRLGEYLMVRRQLQQAVTDTVNQLEHLREAELRRLVAAQRAGLKRRIQQLDRRIAALVAEQPHWQALAKQLRSVPGVGPVLAHTLIALLPELGRLTRRQVASLVGVAPFDDDSGRRNGARQIAGGRTAVRGALYMAALVAKRCNPTIAAFARRLAGKKPKVILVACMRKLIAILNAMQRDGKPWQPVAA

SEQ ID NO: 404677 - protein, 411 aa, unidentified
MDTLYPRCAGIDVHKNNVVVCIRCCDRPRKVFEEVRTFSTMTADLLALADWLAEHGVTHVAMESTGVYWKPVFNILEGSVHVILVNAEHVKQVPGRKTDVKDCQWLAQLLQHGLLKASFVPPEPIRELRDLTRQRTQLISERSAAANRIQKVLEDANIKLASVATDVLGVSGRDMLQALIAGENDPAKLADLARKRLREKMPQLELALRGRVTEHHRFLLRLHLDHVTQLEELLDRLNVRIEEALAPFAEAATRLQTIPGVSQRVAETVLAEIGTNMDQFPTDGHLASWAGMCSGNNESAGKRRSGRTTKGNRWLKRILVQAAWAASHSKGTYLTARYRRLAKRRGRKRALVAVGHTLLVIIYRMLKRGSTYAELGADFLDRLEPERLTRQLIKRLEALGHKVLLEPTPAA

SEQ ID NO: 404678 - protein, 361 aa, unidentified
MKRVQSNKLDFSGQNIYVGIDVHLKSWSVAILSEYSALKRFSQSPEPEALHKYLVSNYPGANYFSVYEAGFCGFWIHEKLTGLGITNIVVHPADVPTMSKEKLRKTDAVDCNKLARELRSGSLEGIYVPKADVLEIRSLIRTRNMIVKDSTRTKNRIKSLLRFHGVDIPEEFTRSSIGRWSKRFLAWLHSIELSTEYGKKTLELHLEQFVRLRNMLLKETRAIREISRKAPFEKPMRLLTSVPGIGVTTAATLMVELDDIVRFKNADHLASFIGLVPMCHSSGESNGTGDITVRRHFMLRCLLVEAAWIAIRKDPAMTVDYTEYRRRMNPQKSIIKIARRLVNRIYYVLKHEKEYIPCVVE

SEQ ID NO: 404679 - protein, 507 aa, unidentified
MVSDPCFWNVWMVTALRPRAQVDDEGPTGNQTIICRREQLVSDVRLGIDVACRADHRASLADDRGEFLWSSWRFRTTTVDLERLWAKIPEGARVTVILEPTRNAWVPLAAWLEARGATVVLVPPEQSSDLRDYYNKYTKTDRLDSRVLARLPMLHPEGLRGIDDLGPAESLRRATRLRASMVKRRTASGLRLDALVELLGPGWADSLGSGSYPKTSLVLLEKYGDPRALKRLGRTRLAALLVRSSRGLWREDKADELLAMATETLSLWSGGGIDFAHLAEDIAAEVRILRNLDVEIDAIDVRIGALYAEADPCGVVCSAPGLGPVSAAAILGSIGDFRRFDNLAGIRSFTGFVPKVDQSGLVAGHKGITKAGDAGLRQALFLAADKTRRIDPTLAARYYRLVIVEGKHHNSALCSVAAVLITRIAACWRNGQRYALRDEDGNPITEDEGRAICEERYKIDPAVRAARRRTTPAKTFKQRAGRGKKESTTKDAPAIDPPGGEATEKVA

SEQ ID NO: 404680 - protein, 352 aa, unidentified
MTAVMIGIDPHKASHTAVVISGAEEPLGELRVRASTAQAERLLAWAAAWPERTWAIEGAGGLGHLLAQQLLPAGERVLDVQPKLGARVRLLDTGNVNKNDPDDARSVAVAALRSPGVREARPDDHAAVLKVWSKRRRDLASSRTQVVCRLHAVLCELVPGGDPKKIIADRAARLLGSITPPDAVAAARRELAAALVEDLRRIDGQLRETRKKLDTAVRASGTSLTGLFGVGPVTAATIIGEVRDVSRFTNRDRFAAYNGTAPIEVSSGQRKVHRLSRRGNRRVNHAIHMAAVTQIRQKHSEGRAYYDKKLAEGKTRKEALRSLKRQISDAVFTRLRADARRATAQVRDPGGQ

SEQ ID NO: 404681 - protein, 448 aa, unidentified
MTKGTSKKTNVVSMPLVNPNAAGIDIGDTIHAVAVPEGRDTVRVKTFGTMTCDLEEIIRWLQHCQIESVAMESTGVYWKPLFSMLSKSGFEVYLVNSKQAKNVSGRKNDEDDALWIQKLHSCGLLRSSYLPDDEQEALRTLVRHRKTLMLDRNRFVLRMQKAMEMMNIKLHTLIRDITGKTGTAIVEAIIAGERKAENFLKYVDKGIKADHVSIVKSLQGNWRTEQLYLLKDCYESYNYYKERIAACDVAIRHGLEKYQAEVFPNATIDKTKKSTKQVTKNTPSFNTYIYLKAILGVDVTAIFGLSDISALEILSETGTDMSKWESSKHFVSWLNLCPNNKISGGKLISSMLMKKKPNIASQAFRNAANGVQRSDHWLGDYFRRMKAKGGNRYAMVATANKIASIYYKMVLNKIEFNPPELQAYQQKYRQVKIAYLERKLNELKKVVA

SEQ ID NO: 404682 - protein, 341 aa, unidentified
MTLYIGVDIHARQQTLSYLDTEDGTTGQVELQHERDDVKGFYSKFQGEVIVGIEACGYTNWFEELIEQLGHKLLVGDAAEIRRLARRRQKNDRRDADLLLDLLVHNEFPALFRYSRESREVLRQLRYRHKLVKLRTMVVNTLHALAINCGLSLRAKLLTKGGRQQLSALQLSAISQQQRDELLSLADELTRRIQTVELWLQTQAKSDARVQRLQTHPGVGLLTSLCLVHTLGDLTRFSSTRKVAAYVGFDPMEDSSAERKVYGGISKAGSRLLRYLLVEAGQTAAKDDEHLKQFYRRLLPRRGKARAKVAVARKLLIRCFLMGRAEIDYAEFLRRGQKETE

SEQ ID NO: 404683 - protein, 377 aa, unidentified
MKRIKFVGLDVHAETITVAVAEQDGEVRPLGVIPNRVESLRKLVKKLGPVGQLRFCYEAGPTGYVVYWQLTALGAKCEVVAPTLVPVKAGDRVKTDRRDALKLARNYRAGELTPVWVPDAAHEALRDLVRAREAAKKDQLRARHRLIKFLLRHGRRPPTGVKPWTLNYLSWVKHEVHFEQMAQEATLLDYLHEVEHAELRIARLNLAIEEAVKLTPPKMRAVIEALQALRGVAQVTAVTIVAEVGEVSRFTGARQLMGYGGIVASEHSSGESTWRGGITKTGNAHLRRVVVEAAWSYRHRPSVGESLRKRQVVVSEEIREIAWKAQHRLHTRYRKLMARGKEKEKVVTAIGGELLGFIWAIGVKAEAALENTERRAA

SEQ ID NO: 404684 - protein, 465 aa, unidentified
MPHSNKRKSSAGSPRPIEGLPIVRHKVAGIDLGSERHWVCAPMIDGSGREVADFEATTPELIRMAQWLKACQVESVAMESTGVYWIAAHEVLEAEGLEVLLVDTRQLARVPGRNKKSDPLDCEWIQRLHSCGLLMGSFRPKEAVCMLRTLVRDKGNLVAEAGDWLRRMQKSLDQMNVRVHRAVSDIDGQTGMAILRAIVDGERDARKLAKLRDRRCHKSEEEIAEQLSGHWRADHLFSLRQALKMYDSIQERITDYEKEILRKLAEMEREECRGQAVPPLNNPQKAKLIRKRGEEPMRQALYRMSGVDLTGIDAIGVETVQLVLSEYGPDLSRFPTEHQFVSHVTLAPHKPTSGGKPVKKPKKRGGASSRVAAGLRMAALSLRHSETALGAYYRHVARRKAGDVAVFATARKLATLIYRLLRWGQPYADEGAAAYEKRYQQARIKSLTATAKDLGYRLTPTASQA

SEQ ID NO: 404685 - protein, 407 aa, unidentified
MDVVHPKCAGLDVHAQTVVACARLGSGKAVTYDRRTFGTTTPELLALSDWLTAHGCTHVAMESSGVYWKPVWHVLDGHVELVLANAMHIRNIPGRKSDVNDATWIADLLAHGLIRSSFVPPVSGQELRDLTRTRKQLVREIAQHTLRIQKTLETANVKLTSVLADIMGVSGRAILAALVAGESQPERLAALASDKVKASRADLTAALHGRITDHHRFMLRLHLDQIAALEVAVRDVEARLGEALAPFRAALDHLITMPGVSDTVARVIVAEIGFDMTRFPSAAHLVSWAGLCPRLHESAGKRLSTRTRASNPWLKTTLVQAAWSAARKKDCYLRAQFLRIKSRRGPKKAVLAVAASMLTAAYYMLRDSADYRDLGAAHFDRRDKAKLAKRLIARLHDLGLVVDVRAA

SEQ ID NO: 404686 - protein, 341 aa, unidentified
MSEVSTIGLDLAKRVFQAHGADACGRVVFRKRLRREQVLTFFAGQPACVVAMEACSSAHYWARAIGELGHVVRLIPPAYVKPFVKRQKNDTTDAEAICEAAQRPTMRFVSVKSETAQANAVVFRARDLLVRQRTQAINALRGHLGEYGVVVAKGPSHVAKLIAHVEDPAAGLPEAARTVLRVLIASLQFLSERIDLLDREVARRAREDKEVRRLTTIPGVGPVIATALAALAPPAGAFRRGRDFAAWVGLTPSQHSSGGKQKLGATSKMGERTLRRLLIIGASSVVRKAIKHGTRSGSWLGQMLARKPRMLVIVALANKMARTVWALLATGGIYRAPLAAA

SEQ ID NO: 404687 - protein, 359 aa, unidentified
MDGKDKATRGIIGGVDTHKDLHVAAVVDDCDRVLDTCSFPTTRQGYRQMLAWMRSFGDLQRIGIESTGSYGAGLLRYMQTAVVDVLEVTAPDRHDRRKRGKNDDLDAQSAAHAAFAGQRTVTPRSRDGMVESLRVLKACRKTAVNARRIALQMIQNTIIAAPDGLRDLLRRMTRMQLIRTLAAWRPDLTAYRDIEAAYRICLKSLARRYLELHDEIADLDMMIGAIVLDLAPELVAQNSIGHNSAAQLLLTAGDNPERLKSEASFAALCGVSPVPASSGKTVRHRLSRGGDRAANSALHIIAVGRLRTDVRTKAYVARRVAEGHSKLEALRVLKRYIAREVFGIIMRRHKDINRTRIAA

SEQ ID NO: 404688 - protein, 343 aa, unidentified
MGEVITIGLDIAKSVFQIHGVDGDGAVVIRKRVSRGKVLEFFAGLSPCLAGIEACPTAHHWSRELQSLGHTVKLMPPSYVKAYLKRAKNDANDAAAICEAVTRPSMRFVATKSKEQQGALMLHRTRQLFVRQRTMLSNAIRGQLAEFGIIAPVGRLGFARLLEMMDGPEELGVPKTAWVCLMGLAEQYQRIQGEIGKLEQCIQAWHRSSELSRRLEEIPGVGPIVATALVGTITDPHAFASGRHMAAWIGLVPQQNSTGGKDRLGGITKQGNRYLRWLLVAGAMAVIRYAQKHGTAKRPWLARLIERKPTKVAAVALANKIARIAWVIMARGERYRGPAPLAA

SEQ ID NO: 404689 - protein, 456 aa, unidentified
MKIPQSTIRLLTGRLVKILLNKEVSIMKSNTQNAKIEAITENTLVLGIDIGSETHYARAFDYRGIEYSKKPFKFSNTEVGFMSFKAWIQDMKEMHEKDKVVPGMEPTGHYWFNLGKFLQDNEMRPVLVNPHHVKKSKELDDNHPTKNDRKDPKVIAGLVREGRYMIPYLPEGVYADLRTASNIRFQLQAELTRIQNRISRWFNIYFPEYKTVYGKPDAKSGMMILKVAPLPEDILTLGIDGVNQIWRDAKMRAVGKARAKTLMEAAEHSVGSKEGAVSARMEIRMLLEDYESRNVRLQEVMALIEELVKQIPMAEKLLEIKGVGIKTVSGFLAEVGDISRFNNPKELQKLAGLALVENSSGKHKGETRISRRGRKRLRYLLFEVAMSLVSKNAEFKELHIYYTTRRINPLKKMQSLMAVAAKALRIFYAILTKGVAYDPKKMINDIKRPKIYLQAA

SEQ ID NO: 404690 - protein, 387 aa, unidentified
MQPAHIQDFTLDDQTLTASLELASKNWKMALQDGMHRSPSEHKAEQEGAADRLEEAIGLIETTRREWGLPPSCRVVIVYEAGQDGFWISRALQKRGYEVVIVDPASIPVERQARRAKTDRLDAIRLLCCLRGWLRGERDRLHAVRVPELEAEEMRHLMRDRGLLQKEVGQHRDRIRKLLRTVGCWVRVGPAFAGQLERGEVVCHDGAALPPCLRQRLMRECERLDLVTRQLKELEAALPEQLPEATARSVATLQRLRGVGQIGAHRLVLELFWRRFDNARQVGSCVGLVPQPYDSGQSRVDQGISKQGNRRVRALLIEMAWMWLRYQPDSALTHWFARRTTTGAGDPSAGKRGKRVAIVAVARKLVIALWRYLKDGVIPDGAELKYG

SEQ ID NO: 404691 - protein, 331 aa, unidentified
MYFSQFIGVDISKNTLDAAIYPAKDKKLDFLHFDNTQKGLGEMLSWLRRRGVKPSEMVICAEHTGVYTNPLIAFAAKRGLALSLNSPLDIKHSMGIARGKNDVVDAGRIAEYAHNHRDKLRLYEKPSEAIIKLQYLLTERRQYIRQRTALINLNSAMGKYETPEARTRNESAIHHCEKLVKKVEEQMMAVLCSEPEVKRNFDLVISVKGIGLINAINTVVYTNNFKAFETPRRYACYIGVAPFDHTSGTSVKGKTQVSKICRTQQKAELSMAARSAVIHDPGLKRYYQRKMKEKGGGKDAHGLVLNAVKFKLILRMFAVVKSGQPYKVLNY

SEQ ID NO: 404692 - protein, 359 aa, unidentified
MTTIAQPRPEVRVIGGVDTHKDIHVAAVIDELGRFIATESFPTTRHGYRRLLVWLQSHGELISVGVEGCGSWGAGLTRYLTARDIAVIEVNRPNRQNRRRRGKSDDVDAAAAARAVLAGEANVVPKAGTGPVEALRQLRIARSGAIKARTAAANQIHSLVDTAPDPIRAQLRGLTMRKKVTKAIGWRPGPDLGVDAASKRALGTVARRWRHLDDEIRLLSADIKAILDDLAPDLVAIHGVGYETAGQLLITAGDNPDRLAHERAFAALCGTSPVRAGTGKTNRRVRVNRGGDRQANSALWTIVCTRMATHPPTRAYVARRTAQGLSKPEIMRCLKRYIARELFPHIAAITVGDHTNIAA

SEQ ID NO: 404693 - protein, 409 aa, unidentified
MIYCGIDWAERTHDVALVDDTGTLVAKRHITDDAVGYELLLELLAEHGDTEENPIPVAIETSRGLLVAVLRTGKRKVYAINPLAAARYRGRRSASRKKSDAGDALVLANILRTDMHAHRPLPDDSDLGRAIAVLARAQQDALWNRQQLANQLRSLLREYYPAAQDAFATWTYGLCRPEARELLKTAPTPARAARLTRTQLQAALKRAGRKRGIAAEADRIRDIFGAEWAHQPPLVEDAFGKRMLVLLMQLDAACTAAGQLAKAVEDALPQHPDVEILLSFPGLGIQLAAWILAEIGDDRTRFADARGLKAYAGSSPITRASGKKSSITWRWVKNGRLNHAGYLWAFAAPNGSPGAKAHYRRRRDERGDWHAAALRNLFSRMLGQLYHCLQLRVLFDERTAFPTELAAAA

SEQ ID NO: 404694 - protein, 411 aa, unidentified
MDVVYQTCCGIDVHKMKLVACLCKGHKQEIKEFSAKTKDIKAMVDWLEGNKCEMVAMESTSVYWKPLVNIFEMRGLKYMVVNAKDFKAVPGRKTDVLDSAWLADLLRHGLLKSSFIPSREQRELREATRYRKAITEERARALNRLQKLLEGANIKISSVLSTMTGKTTMNLLDYVLNNDEMMDEKTAETLIISRISASVKEVTEAMEGIMTPFQKTMMKQVLTHLNELSERIEEMDIIIDTYMAEYWEAIKKLEQIPGIGKKSAEIILAEIGLDMNQFPSAGHLASWAGVAPGNNESAGKRKSGRTRKGNKILKSTLAQAAKSAAKNKNSFFHAQYQRIAIRRGKNRATLAVAHSILIAIYHMLKDNQEFIDLGSDYYNQFNTEKKINSYLKKLAALGYRVDEHSTISPVG

SEQ ID NO: 404695 - protein, 341 aa, unidentified
MKHYAGIDVSLEHSSVCVVDADGKIVREGKVASEPETLIGWFNAVGFAVERIGLEAGPQSQWLFAKLMQAGFAMELIETRHAHAAFTAMGVKTDRKDARNIAHLMRLGWFRPVHCKSLPAQETRALLTARKLVQAKLGDVEMSLRGTLRGFGLKVGRTTKKQFAGRVTELVEGHAMLEVIAQALLAVREVMLRELNALEKRVLMIARSNAVVRRLMTTPGVGAIVALTYASAIDDPARFTSSKAVGPHFGMTPRRYQSGETDYTGRITKVGDGTVRTALYEAAHVIMTRPVKGGALKSWALRLAKRVGMTKAKVALARKLAVILHRMWVDGTCFNFAAAAA

SEQ ID NO: 404696 - protein, 433 aa, unidentified
MGQTETSSSPVDASSFHYVVGIDIGSQSCSFCTLKPDKSQVIKPTEFPNAMPGFMFLHEKLERLGVGPSQVLIGLEATSRYGENLYHFLESQGYQVCLLHARQTHQFAQQRGLRAKTDKLDASTIARVLLSGEARRGDVPTEVIATYRELVRLHSQLGEEVARYKNEIHALLSVLFPEFVQIFTDPCRPTALGLLKRYPSAQAFVAAGVEAITATLHELAPRHDGHGTAQQVVALAQHSTASGVAVVARASSLKILCDQVEHTQRNLAHLEEEIDKLLAADDGSKGLQSVPEFGRKTVAVLRAEWGDVTRFQRADQVVAYAGLDIQVKESGKWKGQAKLSKRGSGRLRRLLYLTAVRCIRLEDSAFGQYYHRLVARGMRKIEALMAVMRKMLVVAYRLLSTGEMYDPMKVCAVPLAPVAQHTPSSGKLANARA

SEQ ID NO: 404697 - protein, 349 aa, unidentified
MNKHKIIGIDLAKRVFQVCVVDTHRPRVQVNKELKRHQVLDFMRRQPACRVFMEACGGSHYWARQLQALGHTVALISPQFVTPFRKGHKTDANDALAIVEAGLRPDMRFVPLKSVEQQDIQSLHRIRERYIHQRTQLINQVHGLLQEYGVISGRGQKALKQRVWLALEDADNELSMLMRDLIAEQMAELDRLNERIQSLDKRVEQMSRAVMPCRQLLAIEGVGPVVATQLYSALGNGDAFKKGRQASAYLGLTPTQHSSGGIAKIKGIGRTGQISLKAALIRGAHSVINTMGDKQDAKSRWLRSLVARVGKNKAAVALANKTVRTAWAVLHSGQSYCREFNDGSALMVS

SEQ ID NO: 404698 - protein, 341 aa, unidentified
MTEVSTIGLDLAKNIFQAHGADAAGAVIFRKKLRREQVLAFFSTQPPCLVAMEACPGAHYWGREISNLGHTVRLIAPAYVKPFVKRQKNDAADAEAICEAAQRPTMRFVAVKSEEKQASAVIFRTRDVLIGQRTQLINAIRGHLSEFGFIAPQGPSHIQQLIAQVEDPSSTLPEAARCCLYLLVEALRRLEAQVRELDAEIKARAKADDTAHRLMSVPGIGPLIATALEALAPPAETFRSGRDFAAWIGLTPLQRSTGGKERLGRTSRMGERTLRRLLIIASSAVIRWAKRKGVPSGSWLHRMLMRKPPMLVIVALANKTARIAWALMTKGGIYRAPTVAA

SEQ ID NO: 404699 - protein, 313 aa, unidentified
MKEEKTFIGIDVSKEKLDVGVRPQVDFMTFANTEDGISLMTDFVKSKQPELIVLEATGGLEMAALRSLVVARLPAVCVNPRQVRDFAKAMGVLAKTDKIDAHVIARFADSVRPEIRPLKTEETERLDAFNTRRSQIIIMLTAEKNRLTTASKWTKKDIEKSIKGLEKALAKINLEVETLIKKSPHWRHRDKILQSVPSIGPVMSLTILADLPEIGTMNRRQIAALVGVAPLNRDSGKYKGRRAIWGGRARIRSVLYMCAISGICHNPKIKAFYNRLISSGKKHKVAITACMRKLMIILNTMIKNDTCWNESGC

SEQ ID NO: 404700 - protein, 426 aa, unidentified
MFCRINACFVLFLFDLTACQQVLDFDIRTDVEVNEFAVHGLHDGQGGKTRFVDVDDLARLFEVLHTKNGIKELVSFVRSLDGDTRIVMEHTGRYYEPMLQWLAASDLFVTAVNPKLIKDFGNNTLRSVKTDKADAKKIARYALDNWCDLRQHTGMDTTRAQLKTMNRQFAFCMKQKTACKNNLIALIDQVYPGANTYFESPARADGSQKWVDYVAAFWHVDYVCSMRLSTFTERYRKWCHRHGYNFQSDKPRMLWEKAKDLIAMLPMDKMTKSLVQTAVAQLNVLSKTVETLRTQMIELAEKLPEYQVVIAMNGVGATLASQLIAEIGDITRFPRRGSLTAFAGVDPGAKQSGTMQLRSNKTSKAGSPHLRRALFQIVSGLLMRAPDDPVYNFMAKKRSEGKPYYVYMTAGANKFLRIYYGRVNEY

SEQ ID NO: 404701 - protein, 356 aa, unidentified
MRQSNEISFKGQNIYVGLDVHLKSWSVTVLSENSVLKRFVQDPDPEALHKFLTRNYPEAEYHSVYEAGFCGFWIHERLTALGIENIVINPADVPTTAGERIQKTDAVDSAKLARSLRAKELKGIYTPDSTTLEVRSLIRLRSTITKDVTRQKNRIKSHLRFLGYEIPAEYCNRYWPKRFITWLRELEMKTQSGRQSLDFMLDLLENLRKEKLQMTRALRALSRTEQYEKPLELLMSVPGIGQQVGMALLAEIVDIKRFQDAEHLAKFIGLVPMCHSSGESEGVGDITVRKHAFLRTLIVEAGWQAIRQDPAMTLAFETYCKRMKPSKAIIKIARKLVNRIYFVMKWQTPYVTSVVS

SEQ ID NO: 404702 - protein, 448 aa, unidentified
MEESVAVRKRELTVMYPNAAGIDVGSKSHYVAVPPDRCEHSVREFESFTEDLMQLGDWLASCGIDTVVMESTGVYWIPVYELLESRGFTVYLVNARHVKNVSGKKSDVLDCQWLQQLMSFGLLAGAFRPDGEVCALRAVVRQRATLIDGQAQQIQRMQKTLTQMNVQLTNVISDIAGKTGQDIVRAIVAGERDPYKLAQLRNYRVRASEAQIARSLCGNWREEHLFCLAQALQLFDVLQTLIGEADAKLEAMLASMQRHAAGELRPDKNKGRAKHAPRFDVRGALARWAGVDLTRIGGIDVSTALKILAEVGVDLSKFKSAKHFASWLGLCPGTHITGGKRISGVTKRIPNRVAQALKLAAQGLHRSQCALGAYYRRMAARLGAGKAITATAHKLARLVYAILTKGEEFIQRSQDHYEDQVRARTIRYLHKKATSLGFSIQPITAVCT

SEQ ID NO: 404703 - protein, 337 aa, unidentified
MDTSKHIFQLHGVNAAEVPVLRKKLRRKEMVTFFEKLAPTVIGIEACSASNHWARLLHSFGHTVKLIAPQLVKPYVKRGKNDAADAEALCEAMSRPTMRFVPVKTAEQQAALMLVGVRDRLIRNRTQLSNAIRGYASEFGYTAAKGKAHLGPLLERLQADSNLPGLARELFAAQAQEYAQLQAQIDAIDAKLLAWHRADECSRRLAKIPGVGPIGAVLLTMKTPEPELFRSGRQFAAWIGLTPKDHSTAGKVRLGVITRAGDEGLRSVLVVGATAVIQHVRRGGRASPWLTALLKRKSPKLAAVALANKMARIAWKLMITGENYAVKPAPVVLAGAA

SEQ ID NO: 404704 - protein, 395 aa, unidentified
MKKIIYYIGLDVHKETIAVSIAPANSTEVRRYGIINGTLDAIDKLVKKLSQAGIELRFVYEAGPCGFVICRHLRSKGIHCDLVSPSMIPKKASDRVKTDRRDADQLARLFRAGELTAIHVPDQEDEAVRDLIRTRDAASEDLRRARQRLKGFLLRHGFRYSGKSSWNDAHKRYLSALVMPQPPLQIAFQECIHAIDDAGARLERLTQAVLNALPGWKWEPVVRALMSLRGMQELSAMTLVAEVGDFSRFEDARSLMHFLGLTPSEHTSGGSRSQGGITKCGNAHCRRVLTEAAWQYRLSPKVSAAIQRRQEDQSKEVRMIAWKAQERLHKRFKVLSAKKKSVVAATAVARELAGFIWAIACLVKPAAKPATPEVIRTSGGKVYRLDPSKKMQKAK

SEQ ID NO: 404705 - protein, 403 aa, unidentified
MSNYFAGLDWASKTHALCVIDERGGVVERFDIDHDAGGLTELRRRLRRFGSPPVAIERPSGLLVDTLVDADFTVVPIHPNAVKASRPRYRSHGGKSDASDAYVLADLLRTDGHRFKALTPQSDEIRALRALVRGRDDLVATRVHLANQLRTLLESFWPGAAAVFADIDSPIALAFIERYPTPQSASRLGPKRMAAFCAQHAYCGRRSPDELLARLQEAPSAVSAETEMEAKGELARCVARTLTRLVEQLRLLSSRIEHLVASLDDGRILMSFPRAGRICAAQILAELGSVRERFATDAQLAAEAGVAPVTYESGKSKAVTFRWACNHRLRAAITCLADNSRHVNAWAAHVYANARARGCDHPHAIRILARAWLRVIWRAWTDRKTYDPMQHRAAQLLLKAAGG

SEQ ID NO: 404706 - protein, 400 aa, unidentified
MHDSDEIGVFLGLDVGKTNHHGHGLTPAGKKVFDKQLPNTEPKLREVFDKLREKFGTVLVIVDQPASIGALPLTVARGTGCQVAYLPGLSMRGIADLYPGEAKTDARDAAVIADAARTMPHTLRSLELTDEIAAELTVLVGFDQDLAAEATRTSNRIRGLLTQFHPSLERVLGPRLDHQAVTWLLERYGSPASLRKAGRRKLVEVIRPKAPRMAKRLIDEVFDALDEQTVVVPGTGTLDMVIPSLARSLSAVHEQRRATEAQITALLEDHPLSKVLTSLPGVGVRTAATLLVTVGDGTSFPTAAHLASYAGLAPTTKSSGTSIHGEHAPRGGNRQLKRAMFLSAFAALHDPASRTYYDKCRARGKTHTQALLRLARQRINVLFAMLRNGTFYEPRTPRLA

SEQ ID NO: 404707 - protein, 346 aa, unidentified
MRNSNTIGVDLAKNVIQVSVVTPANKELSNKELTRIKFAEFLAKQKPGLVAFEACATAHHWARLATTYGHQVKIIPAMAVAPFRQGHKTDKNDALAVAEAANRPNIKIAPMKSIDHQAMQSIQRSRELIIQERTATSNHIRGLLLEFGIAIPKGLVYLRKHVPLILEDAENGLPMSYRPTLHRMFMRFHATEEDLAFMDEQIKQIVKSNDGCQRLTALEGVGPIGAILLFATLGSGEAFKNGREFSAYIGLTPKQYSSGGKANVIGISRHVANRRLRSVLIQGARAYVHKRKHAASSKDEWLLALVARGGTGRAAVALANKNVRTAWAMLTQGTEYNCKPCLGNAA

SEQ ID NO: 404708 - protein, 465 aa, unidentified
MKFKRSPGKPRVSPTLLERINPNVAGIDCGSAQHHVAVPPDRDPNPVRAFSTFTNDLIQLADWLTACGVRSVAMEATGVYWIPVYEILEARGFAVVLVNARHFKNVPGRKSDVTDCEWLRELHSVGLLRGSFRPTEGIVALRTYLRHRQTLVETASTYTLRMQKALVQMNLQLPLVVSDITGVTGLRIVRDLLAGQRDPECLAQHRDPRCRATQAEIVAALTGHYRPEQLFVLQQQVKLFDACHAHIAQCDIAIEAHLQALTAPLPAPAAPLPAARSRRKTPKANDLRFDVRTPLFHLTRGVDLSQIDGLAAHSALKLVAEIGTDMTRWPTADHFTSWLTLAPKNKITGGRLVSSRTQPSANRAAAILRMAAMTLGRSRTALGAFYRRMAARKDKAQANTATARKLAILVYRVLKGELVYRDPGVAAYDAQQRSRQLHRLRQQATTLGFDLLNRTTGEVLATGVS

SEQ ID NO: 404709 - protein, 426 aa, unidentified
METMHERVAGLDVHKATIVACVRIWTGAKVERECRTFDTTTDGLLALLAWLVECQCSHVAMEATGVYWMPVWKILSDGAFSLIVANAAHIKNVPGRKTDMNDAMWIADLLACGLIQASFVPEEDVQELRSLMRTRKQLGREQTRHVQRIQKTLTEANIQLDSVLSDIMGASGRRIIEAMISGLRNPRKLAALASAQIKATPKQLYDALHGRLTDHHRFLLKLHLQQWDGLDATIREIDREVEARIARADKEVKAGEAPFRDLIKLLSTIPGVSTLSATTILSEIGRDMSRFPTAGHLVAWAGLCPGQNESAGKRKSTRLRKGAPWLKTMLVQCAWAAKRKKDSYYKAQFFRLQSRRGPQKAICAVAASILTAIYHILKDGTPHRDLGVEHFNRRSTEGQAKRLVAQLTKLGFQVQLQRKAEAASMR

SEQ ID NO: 404710 - protein, 315 aa, unidentified
MAEQVVVGIDVSKAKLDIAVLPSGEQLTVSNDHKGIAELVPRLKHLAPTRVVLEATGKLERRAVSELAGVGLPVVVVNPGRVRHYAKARGKRAKSDPIDARLIAEFARDLELEFHPLPDADTQALAALCQRRNQLMEMQQMETNRLERAEPATRKSIQASLRFLQRELEQMEEEIERRIKKFPGWEAKRELLASMKGIGTVSCSALLAWLPELGQFSRQKICALVGVAPYDDDSGEWHGRRHIAGGRAAVRRVLYMATLSAVRYNPVLHAYYQRLRKRGVEPKSALIAALRKMLTILNAMVRDNTPWRPPCPALQ

SEQ ID NO: 404711 - protein, 342 aa, unidentified
MLIIGCDYHPGMEQIAWLDEQSEEYGEQPLEHSTGEAERFYRELKRRGVQVRVGIEASGHTRWFERLLAELEMELWIGNPAKIAAQRVRKQKTDRGDAQLLLQLLREGRFPKLWVSSPENRDLRQLLWHRHRLVQMRTRVKNQLHAIALNEGVQRRSRLWSKAGRAQLESFALAPWTARRRRDLLQLLDQLTPQIAELSQAVEQEAERRPEVQRLMTHPGVGPITALAFVLVLGRPDRFRCGKQVGSYLGLIPCEDSSAGKQRMGHLSKQGNTLLRYLLVEAAQAAVRCDPQWRRRFVHLAMRRQRNIAIVAMARRLAVSLYWLWRKAEDPPAAPQSGSHVG

SEQ ID NO: 404712 - protein, 373 aa, unidentified
MREFNKFIGLDVHKSTIAISIAPEDGGEVRYFGEIKNTKEALTNFANKISQGSLKLSFCYEAGGCGYEVYRLLRNIGHDCMVVAPSLIPRKAGQRVKTDRRDSLNLARLHRAGELTGVWVPDAMNEALRDLTRAREDMKHLQRQAKQRLIAFLLRHGWTYSGKSNWTKDHFNWLETVKFQHAAQQIVFQEYVDTVKYCGKRVESVTQQIEICSRESACWPVIESLMALKGIDLITAATIMAEIGDLTRFDSAPKLMSYLGLVPSEHSSGSSVRRGGITKTGNSHVRRVLVEAAWTYRFPARKTAHTQKRAKVTSEAVQEISWNAQKRLCQRYKELNANGKIKVQTCTAIARELAGFVWAIGQTVPLKQSANAQ

SEQ ID NO: 404713 - protein, 449 aa, unidentified
MEVLYARCAGFDIHKKTVRVCLVIRQENGKTHKEFRTYSTTTQDLLNLLEWLLSLGCTHVALEGTGVYWKPVYNLFEGHLEVLVVNAQHIKAVPGRKTDTKDAEWIAELLRHGLLKASFIPSAPQRELRDLTRYRVRLTEERAREVNRVQKALEGMNLKLGDVVSDIMGKASRMILWSIADGESDPARLASLAVGRVRASQEQLEAALTGTVSEPHRFLLREHLTQIEHLERAVERITAEITRRFSTPSPPEEAERSKPEESLRKEASTNPSQPVLPPSKQGLCWEEALILLCSIPGISERAASGILAEIGVNMQQFPTASHLASWAGVCPGNHESAGKRLSGKTRKGNPWVRRLLLQAAHVVARQKHGYLTAQFQRIAARRGKKRAGMAVAHSMLVIIYHLLQEGVPYEERGDAFFEEQDRQLTEKRLIRQLERLGHQVTLQPLAQAG

SEQ ID NO: 404714 - protein, 396 aa, unidentified
MKTLGIDIAKRSHNATLLNQDGEVIFGNFTFANDHKGLERLMDQLKTHGAIASNLLIGMEATGHYWMLLYHALKAEGLEVSVLNPIVVAARRNIGIRGTKTDSSDSKLIANTMRDPTCKKSSLPDEQTKQLRDLTRMRFECAQSIIAEKLRLLSLLDVTFPEYTSMFSDVFGATSRELLLQFPTAEMLARVDIRRLTTLLSKASRGNFGREKAKRLKEAANNSFALKGTVDGLALEIKFIVQRINLALEQLAQLDKKMKEPMQEKQALLKTIPGIGDVWAPTILAEALPFFHPEEKNGAKKLVAAAGIDVKQKQSGNSQGKGHMSKRGSKYLRTAILQAAEIAVHICKDPLFLGIYERQKERGKSHRVALSHVGNKLLHVIFSILKNEKEYVPILS

SEQ ID NO: 404715 - protein, 360 aa, unidentified
MCRVGKPVSSLLSFLTSQINIMTIQSKKIVQETKSLFAGIDVGAEELILLVRKNGTSYKPQKFANAPADRARLAKKLAGLPGIIVCLEATGVYHFDLSIALHDAGVALMVVNPKSSHNFAKVLMKNSKTDAVDADTLAQYAERMDFVAWTRPSDEKISLRSFARRIDALTRQKAAAKNNSHALNASGETPKAVLRDVELSISQLEKRIACLSKEALALIGKHPDLERVFLLLTGIKGIAQTSAIALMGELLLLPKGLSHREWVKSAGLDPRAFDSGKSVHKKTRISKAGNRHIRSALYMPALSAKQHDPYVKAYFQHLVGNGKLPLQALCAVMRKLLHAIHGMLKHDKPFDNTRFYAIPA

SEQ ID NO: 404716 - protein, 428 aa, unidentified
MEEISEEPVQVVARVCAIDIGKAGLVACVRVPHPSRPDRRVQEVREYATHTPALLELADWLRVERVELVAMEATSNYWKPVFYLLEAEGFQCWLLNARHVKNVPGRPKTDRLDAVWLAKVLERGMCRPSLVHPKPIRQLRDVTRYRRSLIREQTREKQRLEKILEDAQIKLDTVISDLHGVSGRQMLQAMIDGQRDPKVLAELAHTSMRRKIPQLRQALTGHFDEHHAFICATMLRRIDALAADIADLDAKIEELIAPFALAVEKLDEITGIGVRCAQEIIAEVGVDMVVFPTAAHLVSWAKFSPIDASSAGRKKGNSTGKGNPWLAGTLGEVIAGLARTNTFLGERYRRLARRRGKKRAIVAVGNSVLTIIWHLLSNPNARYQDLGPGYHESRINKQRRQHDLIRQLEHLTGQKVNLQPQPDLPTAA

SEQ ID NO: 404717 - protein, 339 aa, unidentified
MLYVGIDIAKNKHDVTALNVQGKTVLKPLTFSNNKAGFELLDLSLRQLNQDCLIALEDTGHYAFNLLNFLHEQGYKVYTYTPLLIKEFAKSLSLRKTKTDKKDAHGIALKLLSDPNREQFQHDNRQVELKILTRHIHHLKKKQSDWKVQYTRCLDIIFPELDKIVGKHSEYTYQLLTRYPNPQKRLEAGFDKLIEIKRLTASKIQDILSVAPRSIGTTSPAREFEIIKHYKRLIDKAETCVNDLMAEFNSVITTVTGIGNRLEAVILAEIRNIHAFDNPAQLQAFAGLDSSIYQSGQIDLAGRMIKRGSPHLRWALIQAAKACARFSPAFKAYLKTKLE

SEQ ID NO: 404718 - protein, 314 aa, unidentified
MTTLSATYVGVDVAKDSLAVCSSPTAKTITVPNTAQALDGWLAGLPATAHLICEATGRHHRMLQQLCAKHARALSCLNPARVRDFAKSLGKLEKTDPLDAAVLWRYGHERQPTPTPVPSPALQRLGDLLMARQAVTEQICAFHSRNDLLSAPTRRQLQCVIRTLTTHRVALERELAAWLDSVEGSPWQDRVYTLCLAPGVGVLSALALIAYLPELGTLNRRQIAKLAGLAPLPWESGKMKGLRRIQGGRAPVRRVLYLCAMVAARWHEPTRDHYRQLRARGKTATAAYVAVARKLLTYLNSLLRPAHAAERPAA

SEQ ID NO: 404719 - protein, 339 aa, unidentified
MGLYTAFDLHSNNAYLGIIDESGKRLFKKKLPNDTEMIKTTLLPFKAAIEGIVVESTYNWYWLVDMLMEEGYQVHLANPAKIQQYSGLKYSDDKHDAFWLADMLRLGILPKGYIYPKESRPIRDLLRKRSHLVKLRTSLIISLQNIIARNVGSKLKASDIKVLTIDRVKPLLEYNEDLALAGKVSKGAIDSLSQQIKTIEKNIWGRIHLRSPYDHLLSIPGVGPIIGSTIMLETGSISRFPKVGNYCSYCRKVPTGRFSNDKRKGSGNPKNGNHYLACAYSEAAEHAKRYDEESRKFFNRKLKSTNAPIAHNALAHKFSRAAYYIMRDGVDFMPEKAFT

SEQ ID NO: 404720 - protein, 312 aa, unidentified
MDAITVGIDVAKDRLDVCIRPSGESFVVDRTGAGIEALAKRLHGLRPRIIAIEATGGFETVVAAGLASAGLPIVVVNPAQVRAFARALGKRAKTDPIDATVIAHFVEATKAEPRALPDEMTRLLADLVARRRQIVEMMAAEGQRERRMTDKRLKKSIARLRKAMEKELAELDGEIDDHVRGSPVWAEKEDLLASVPGVGPVIARTLIAELPELGTLDRRQIAALVGLAPWTRQSGQWRGKSFIGGGRKSVRSALFLAAMVAAHHNPILKPFRDKLVAAGKPKLVALIAVARKLLTILNAILRDKRPWQPKIA

SEQ ID NO: 404721 - protein, 343 aa, unidentified
MDVGVLGIDLGKNSCSVVGLDPTGRVVLRRRMRRESIVALAAKLSGCVVAMEACCGAHHLGRLLAAQGHEVRLMSPEYVRPYVKAQKNDDRDAEAIAEAATRPTMRFVALKTEAQLDVQVLHRVRDRLVGQRTALTNQVRSILLERGIVVPQGRRRLLDALQVISDQPDGSGVGPRVRLLLDDMLDQWRGLDRRISALDDEFAAMARNDPAARRLATIPGVGVLNATALVAAIGDGRTFSRGRDLSAWLGLVPRQASTGGRPKLLGITKRGSKYLRKLIIQGARAALPSLSRTTTPLGSWLRGLLSRAHGNTAVVALASKLVRIAWALLRNETAFAAGGLAAA

SEQ ID NO: 404722 - protein, 385 aa, unidentified
MAQPASPITPVLDYSTTIIGALELSERKWVLAVQLPGNNRHSRHSLEASCGDLFGLIERLKARCAAAGHKIKRVILTHEAGRDGFWLARFLQRRRIEVHVMQPSSLPVDRRARRAKTDAIDVEMLLRTLMAWLRGEPRVCSMVPIPTEADEEARRAHREREDLAGERRSIVNKIGGILATLGVKGFKALRRDRRKQLDLLRQPDGDPVPPLARARIERLLDRLELVLKLIEEVETARDAVLDKASPANEAERMIRSLAELRSIGPDFATLLVREAFVREFRNRRALAGYAGLGGTPFSSGGSEREQGIGKDGNRRLRATMVELAWMWLRWQPGSDLSGWFRMRTGQAGSRTKKIMIVALARKLLVALWRYVKEGLVPEGARMKTA

SEQ ID NO: 404723 - protein, 354 aa, unidentified
MAQIVRVGVDLSKTVLQIHAVDDAGATIVNRAVSREKFFEWCIQLPEGCVVAMEASSGAHHIGRKLTAFGLDVKIIAAQFVAPYRIQGKTGKNDANDAAAICEAASRPHIHAIPIKSAEQQAIMSVHKVREGVKEERTACINRIRGLLAEFGIGVSRSPEVLRRRLGDIIDDATNEMPAFARLVIRQAYSHWIELEEHLAWCDDRINEHVRRDPQARRATELVGIGPITASALVAYVGDFRQFKSGAQFGAWLGLTPKQSSSGGKANLGKITKRGNSYLRCLIVTAAKAAIFSCAKRNDPSSVWAKKLCDRIGWQKATVALANKNARILWAVLALDRKFDRAYASPSPFSTSSS

SEQ ID NO: 404724 - protein, 345 aa, unidentified
MDVMIGIDPHKSSHTAVAIDGHGEVLDQLRIAADRRQLALLLAFADKWPRRRFAVEGANGLGRLLAQQLLEAGEAVIDVPPTLSARVRLLSGGSARKTDAHDARSTAIAALHGARLRMVAAEDLSVVLRLLSDRRDQLSRERNRIVCRLHDQFRDLKEGGAKLNLTADQAARLLKGIRPAGLVAIQRRQLARELLADLRRVDKQLADIDQRIIEAVTAAKTTLTHIVGVGSVLAATIIGHAGDITRFADRGHFASYAGVAPIEASSGDVRRHRLSRRGNRRLNAAIHMVALGQLSHPSSGRDYYDRKLAEGKTRREALRALKRQLANVIWRHLVADADAVDLAAA

SEQ ID NO: 404725 - protein, 348 aa, unidentified
MLVTQYYLGIDLHKRTSFLTVLNKDGEVLAEKNLHNEKVRSWVKENVPYESIAVIEATGNWSYLYDELENIIQQVVLVHPKKVKAIASAAVKTDRIDAGVLATLARLNYLPQAYAAPKELRNLRSLTRFRETRVRTKTKLKNGVHAILMKHNLHLSAADLFSPKGRGLLQEATDELEATEQIILEYSLQEIEQLEEFAQKMLEQGIALLNPEQMELFTLFQTAPGIGPVHALTILAEVGTITRFSSHKAFANWTGLVPRVRNSGGKQHHGHISKQGSRYIRAAFTRAASSAKLSSPALRKKYNQYLERMSKVQATVALGHKLAIILYFMWKRQEPFDETKVLAPLRKS

SEQ ID NO: 404726 - protein, 349 aa, unidentified
MMLMGVDYHPSFQTIAFFVEETGEYDELNHGEGEAERFYRDLQQRGIRVRVGMEATGFSRWFERLLAELGFELWIGDPAEIKAKRVKKQKYDREDARLILRLMREGNFPQIWVPSPENRDLRQVLWHRHRMVQTRTRIMNQLQALAMNEGKRRKSKLWSTQGRAELEKLALAPWASRRRKELLELLDRLNPCIEELTTAVKQEANKRPEALLLMTHPGVGPITALAYVLIIGTPERFDCGKQIGTYIGMIPTEDSSAGKQRLAHNSKQGNSLLRYLLVEAAQAATRINPHWRRRYLHLAMRRHKSIAKVAMGRRMAIRLYWMWRNGCEYSPSFEFGSYVGKLETGHGVQ

SEQ ID NO: 404727 - protein, 429 aa, unidentified
MNYTQNEKIEQVTDSTMVVGVDIGSQIHYARAFDNRGRELTKRIFSFHNDLEGFNSFKLWAETLKTENKKTAVLIGCEPTGHYWFAFAKYVNDHQKRLVMVNPFSVKKIKELDDNSPKKTDSKDPKTIAKLVVDGRYSIPYMPEGIYAEIRDLVYSRDRIMKQHNISANRIQRWLAIHFPEYLGLYTRFDAISGLAVLEKAPLPKDVIALGVNGIRKIWHDKKMRGRGVTEDRAKTLVEAAHNSVGLDGGIGTKSELYMLLEEHRLWTSQLEAVNKVLEEMILKVPHMEKLLAIKGVGSITIAGFIAEVGDIRRFDSPKQIQKYAGLELVENSSGKHKGRTRISKRGRRKLRKILYQVMVPLLARNKEFRGIYDYYVTRVKNPLKRRQAMVAVSCKLIRVFYAVLTKGVEYDRFKMMSDIHRKSDIIAA

SEQ ID NO: 404728 - protein, 352 aa, unidentified
MDRYVGLDGHSQTCTLAVMSRTGKRLTSKVVETNGRALVDAIRSFPGDLHLCLEEGAQSAWFYEILSPHVAETVVTVPEQVRGSKDDLRDAWARADDLRTGRIRTRVYKAPKQLAGLRSAASAYRLATQDMVRTKNRLKAVFRSRGILTDTKVYDAAARNKWLKQLPYGHRELAEWLGRELDGLVPLRDEAEEWLLKESKSHPIIRKLMTGPGMGPIRTGQLVAIVGAPQRFRTSRQFWSYSGLAIVRRSSSDWTRNKGGEWVRGEVHQTRGLTRKRQPVLKSIFKGAATTVIAQLPDDPLHAHYQRMLESGIRPNLAKLTVARRIAAIELSMWKHEEVYDPKRHPVVTDET

SEQ ID NO: 404729 - protein, 321 aa, unidentified
MAMPVQPLLIGVDVSKATLALCLAPDQPVQTLANEPQAIAQWLTTLPSGTACLAVEATNTFHIDLVEQAYHAGHTVYLVDGYRLSRYRDSIGGRAKTDASDAQLLQRYLVRERADLRPWSPPPKGYTTLQRLLHRRATLVQARVALQQSLAGVPELKRAASTLLRQLDRLDALIQKHLRDTLAQLNWTSDALRCQAIEGIGPLTAAALTMTFHRGAFAHSDAFIAFLGLDVRVRDSGQLRGRRKLTKKGDPELRRLLFLAAMQASRSASWKDFYQRYLARGLSRIQALVILARKLARIAFALLKNQADYRPKSLQEACPQT

SEQ ID NO: 404730 - protein, 457 aa, unidentified
MRNSEKKSTPIRFHNGLQQLRKDAGGMDVGAREIWVDVGMENDSEPVRRFETFTADLNRMAEWLIDCGIQTVVMESTGVYWIPACQILEDKGIEVLLVNPRYAKNVSGRKTDVLDCQWLRTLHSYGLLPASFRPVREIVTLRNYLRHRQMLIEYAAAHIQHMQKAMTQMNLQLHHVISDITGLTGMRIIRAIVGGERHCKKLAGLRHERTYANEATIEKALEGDYRTEHLFALKQSLEAFDHYQKQIAECDQEIAKHVRSLETKAESDRVLKAARKAKRKGRNQMEFNVREEAFRISGVDLTQIDGISESAALSLISEIGINMSLWPTEKHFASWLTLCPNNKISGGRVLKRYTRKSANRARTILRLCAQSVFGSRSALGAFCRRMCSRLGKPKGLVATAHKLALLIYRMLKYGRDYADIGQEQYENQFKQRALKSLARKAKDFGFQLVPTPEKAVP

SEQ ID NO: 404731 - protein, 343 aa, unidentified
MPCFAALDVSQETTAICVVDETGRVLAEKKVPTCPDAIADYLAIKAPELVRVGLETGPLAVWLWNELAIRRVPILCIDARHANALKMRPVKTDRNDAAGLAQIIRTGWFKEVRIKGRDSYQVRSLLVSREMLVRIRVKIENEIRGLLRTFGVLFGKRVGGFTGRADEIIAGELDASPEMRIIAETLMKARASVRDQIKVLDRRLMAIAKANPIVRLFMTAPGVGVITALSVASAFDDASRFKRSSSAGAYLGLTPRRYESGETSRNGRISKQGDKMTRKHLYEAATTLLTRNLRFSTLKAWGLKLAKVSGFKKARIAVARKMAVILHAMWKTNTPFRWSSSAA

SEQ ID NO: 404732 - protein, 392 aa, unidentified
MYIVGIDIGKNHHEASIVSPEGKQIGRSLRFATTHKGADSLMSFIFKNIGNSPCVFGMEATGHYWYPIYSFLKAKGYTIYVINPIQSDSLRKMYIRQTKNDSIDSFLIAEVIRFGQFGTTSMADENILAMRQLCRYRDSVISSRTEIKLRIGTIMEQIFPEYEKQFSSLWVSTSMGILEKYLTPENIENTPIDELFEIIKDKSHNRLTRAKAISIKEAAADTFGIKIAQDAFSFQLKQLIDRMNFLDKQIEALDCQILEYYEKFDCYLHTIPGIGIIGAATILAEIGDISRFKNSSSLIAFAGIDPTVRQSGEFNSTHNHMSKRGSPYLRHAIFLAATTCSFHNSPLNAYYKKKRDQGKHHLTATGAVARKLTTVIYAVLRDSKPYEPKKFC

SEQ ID NO: 404733 - protein, 397 aa, unidentified
MYIVGIDIAKRKHEAAVIDGEGAVIIKPFSFTNNCSGYNRLLAMLTKAKLPLDEVSFAMEATGHYWLALFTRLQKEGFRVQVINPVQTNSIRSFYIRQAKTDPRDALLIAEVIRFGHFSESTLHPENIYELRELCRGRHAIVSMQADVKRKVVALLDQVFPEYETAFTNLFGDTSMAILQACPTPKELSEMPLEELCHLIEVSSHKRFRMAKAQELQELARNSFGFAMAGDVFSTMIRLYAKHLVFLKQQVREMDRKIAEIMDTLDTPITTITGIGPTLGAYILSEIGDINRFSSAARLAAYAGIDPTMRQSGEYNGVRNRMSKRGSPYLRHAIWLAVSSAVLHDPALKLYFQKKRDEGKPYMASVGHACRKMVSIIYAVMRDNKAYTPCIPNEISA

SEQ ID NO: 404734 - protein, 398 aa, unidentified
MKKPSTKEMPWKTTYVGIDAHKKEHVICILYPGDPHGHLVRIPNQPREVRRLVKKIVKRAPGEVRMCYEAGPCGFTLQRQIQEAGAQCVVIAPALIPVKAGERVKTDRRDAYKLAVYLQSDLLTEVVPPTPAEEAARDLCRCREAARIAQSRARQQLSKFLLRRGCIYSEGVAWTQKHERWLHTLSFPDPLDQEVFEEYVAEVAHGTQRLARLDQRLEALAREAPYAEAVGWLRCFRGVDTVTALTFVTELYSFGRFGSPRELMAFLGLTPREHSSGEKQKRGGITKTGNRRVRRVLVEAAAHYDKRSPKSGAVRKRRQGQPAWVINVAEQAEERLHKRYEQLRHQGKERNVAVVAVARELAGFLWSVVYVQAEEVHPGRESAPGHGRPVDCAAAAGA

SEQ ID NO: 404735 - protein, 360 aa, unidentified
MRHLSAKLLSDRISSEWEPSMGEVTTIGLDLAKHVFQVHGVDAEGATVLRKQLRRAQVLAFFSRLPPCLVGLEACATAHYWARELRALGHEVRLMPAQYVKAYVKRNKHDAADAEAICEAVGRPTMRFVPVKTADQQAAVLLHRGRERLVRQRTGLVNALRGHLAEFGVIAPQGLRNVGKLIDIVRDEGDARLPDLARQVLQVLAAQIEQLEAAVAAIEKQLMAWHKSNPVSQRLASVPGIGPIIATAIAATVVEPSGFRSGREFAAWLGLVPRQNSTGGKHRLGGISKRGNQYLRRLLINGASANLLRSKATNADPWVIGLRRRRPPLVVAVALANKTARIAWAVMHRHENYQRVAAAA

SEQ ID NO: 404736 - protein, 453 aa, unidentified
MSKKRKNKAHPTPAINTQLHPNAAGIDVGAEEFVVAVPADRCPESVRTFPSFTSGVEALCEWLLACRITTASMESTGNYWITLYDRLTAAGIDVYLVNARHVKGVPGKKTDVCDAQWLQQLHSAGLLKKSFRPTLEIVPLRFLMRHRSEMLGDSARQLQLMQKTLTEMNIKIQHVFSDIDGTSAQAIITAILQGERDPAKLADLRDGRCRSSVSAIMEALKGDYREEYLFVLGQSQSAWHQLSQAIGECDKKIAVLMGEVHTQEGPPLPPASGQQHRMTKNCPNLPIFEESWRFFGVDLSAVPGVGGGLLSTLMTELGTREQILKQFGSTSALSSWLGLNPDNRISGGKVLKAKTRKVVSRLAKALRMGVFGLQKSNTKLGEYVRKMKARLGKAEGIVAGAHKLVRIIYGMIKNQKPYDETEAFKTTPQTAARRRRNLEKQAAALGLQLVAAV

SEQ ID NO: 404737 - protein, 375 aa, unidentified
MKEKVRFLGLDVHAETIAVAVAEQDGEVRSLGTIANREESIRKLVKKLGPVEQLRACYEAGPTGYVLYWQLTQLGVECAVVAPTLVPVKAGDRVKTDRRDAEKLARNHRSDDLTAVWVPDEGSEALRDLVRAREAAKQDQLRARHRLSKFLLRTGRRPAMGLKAWTERYLAWVQQIHFSQSAQEATLLDYLHEVQHMDERVQRLEQAIAEAVKLASPQVQEVIRGLQALRGVAHLSAVTIAAELGNISRFESARKLMGYSGAVPSEDSSGKRQRRGNITKTGNAHLRRIAVESAWSYRFRPAIGPRLRQRQEGVPEEIKEIAWKAQIRLHKRYLKLMAAGKDKQKIITAVGRELLGFVWAIGIKAETSGKLQMAA

SEQ ID NO: 404738 - protein, 321 aa, unidentified
MTKDKKIYGIDISKNVFDVYSKSDGHIQFNNDEKGFLSLAKKVSKDGLVVMEATGYYHYRLAQFLHKKGVAVSVVNPLSVKRFIQMKLAKVKTDKSDAKAICEYGQMNAVPLYTALTGVQAECLQLFRLLDNYLKQRTATKNKLHGEETLGKPSSYVYRSLKRQLKHLNKEIEGLESRLLELVRQEQQHQLTLLKSIPGMGVKTALFLIVVTDGFSKFENASQLCSYVGITPTIRESGSSVRGRSRISKVGNKKLRNLLFLCAFSACKHNRACRELYERIVNKGKSKKLAMIAVANKLLKQAFAIAKSGLPYDENFVSKLA

SEQ ID NO: 404739 - protein, 401 aa, unidentified
MQEPLQHNSIDVFVGVDVGKGHHHAVALDRSGKRLYNKALPNDEAKLRALINELKAYGQLLFVVDQPATIGALPMAVARDEGVLVAYLPGLAMRRIADLHAGEAKTDARDAAIIAEAARSMPHTLRSLRLADEPLAELTMLCGFDDDLAAQVTQTSNRIRGLLTQIHPALERVLGPRLDHPAVLDLLERYPSPAALATTSEKTLANRLIKLAPRMGKRLAAEIVQALSEQTVVVPGTQAATIVMPRLAKQLAALLQQRDEVAGEVERLVHAHPLYSVLTSMPGVGVRTAARLLTEVAHKAFASAAHLAAYAGLAPVTRRSGSSIRGEHPSRRGNKVLKRTLFLSAFAALRDPISRAYYTRKIQQGKRHNQALIALARRRCDVLFAMLRDGTFYQPQTAPNA

SEQ ID NO: 404740 - protein, 375 aa, unidentified
MDELSKIHVGLDVHKDSISVGVADPGRAAARVVGKIAHDGGKLTKMLSRIGPPEQLHVVYEAGPTGYGLQRSLAARGYLCEVIAPAQMPRRAGDRVKTDGRDCVQLAECSRAGQLRAVWIPDPGDEAIRDLSRAREDAVNSRTQARHQLKGFLLRHGLRFAGKTSWTKAHHAWLGCLSFEAQPAQTALTEYWLAVQAADTRVQRLTHAVRDSVTGWRFEPVVKALQALRGVDVVTAVGLVAEIGDLRRFEHPRKLMGYLGLVPSEASSGDRVHRGSITKTGNAHARRLLTEAAWHYRFKARVGSHAQRRQQDLSQPVREIAWNGQLRLNKRFALLQARGVQINKACVAVARELAGFVWAIARQSMIESGDWPRAL

SEQ ID NO: 404741 - protein, 375 aa, unidentified
MTMMHHRQIRYIGLDVHKATISAAIAEESGAPTSYGRIPNDPAAMRTLMTRLGGPQVELRVAYEAGPTGYALHRQLTSMAISCMVVAPSLIPRQPGNKVKTDRRDALKLARLLRSGDLTPVWVPDEAHEALRNLVRARADAKADQLRAKHRLSKFLLRQGCWPPIGVRTWSQRYFQWLRQLEFEHLPDQVVFADYLAEVTAEGERIKRLEAALHQCAQSSSQVALIRALQAFRGIGFLSAVTLVAEAGDLRRFRTAPQFMAYVGVVPSESSSGGKQQRGAITKTGNTLLRHVLGEAAHHARHAPRVSGTLKRRQADLPRELVELAWRAQVRLHTRYRHLSVRIGSLKALTAIARELAGFVWAAGQVFQEEVPAAA

SEQ ID NO: 404742 - protein, 414 aa, unidentified
MSSKRIALDRTLVVGVDVASEEHVALIRGPGGLEVGPFPFANDRSGFRLLASKVSEARAASGVEEVALALEPTGPYGEALAWWARERGWRVLGVLGAHTKRAKELWGNSPLKSDLKDARVICDLAIEGKWVTFSLREGAYAELKGLAVYRQQLVRKQTALKHQTRALMYVLFPEFLGVVGRGLFKKSGLMLMERFPTPRSYATTDEDQLALLLRGCSRGRLGKERAQQLLRAARESVGVTAGLKTRSWVLRRAVRRLRALEREILAVEARMERWLRRIPYAACLLSMPGVGVVTAASLLGECGDLQDYPGAGEILKFSGLNLVSWSSGKRRSRNRISKRGSGLVRHQLYLLAGRLVKQDALWRSDYDRLRGRGATRKEALIALSRKALRVLFAMARDGASYAAPVLETNLKKAA

SEQ ID NO: 404743 - protein, 346 aa, unidentified
MKYYAGLDVSLKEISVCVVDGDGTAIERGACPADPESVAGWFRNRQITPCRIVHESGQLSIWLQRGLTGLGLPATCIDARKAHNALSARLNKSDATDAEGLAQLARTGWYTSVHIRSEDADRLRSLTGARERLIRLRKDLEGHIRGVLKTFGIRMTGIGQGRQRQAFRDQLTMAGESDPVLRSIADGFIAAHVTLCQAADDLDKAVKKKAKAHPVARRLMTIPGVGPVNALSFIALIDDPYRFSRTSNVGAFLGLTPKRHQSGEVDWSGRVSKCGDGAMRGLLFEAASCVIRQVKRFSPLKSWAVRLAGRRGFRKAAVATARKIAVMMLTLWKNETDYQWTKEAAT

SEQ ID NO: 404744 - protein, 319 aa, unidentified
MTTSAIVVGVDVAKDRLDVAVRPSGERWSVANDEAGVTTLVAWLQPLGPALIVCEATGGFERAAIAALAAAGFPVVVANPRQVRDFARATGQLAKTDQLDAGILALFAERVRPTPRPLPDAAAQLLDAVLTRRRQLLEMLVAEKNRLGFAPKPLHRGIQAHIRWLERQLDDVTKELAGLIEASPVWRAKDDLLQSVPGVGPIVSYTLLGELPELGTLSHKQIAALVGVAPLARDSGTLRGKRMVWGGRASVRTALFMAALCGRRWNPQLKVFYERLKAAGKPTKVALIACARKLLTILNAMVRDHARWAVPAPSLQYSC

SEQ ID NO: 404745 - protein, 403 aa, unidentified
MNNVAGIDVSKGKSMVSVLRPFGEVVAKPFSIGHTGSELKELADYLKSLDGETRVVMEHTGRYYEPVARFLHEEGVFVSAVNPKLIKDYGNNTLRKVKTDKADSRKIARYGIDNWAELRQHTPMDTIRMQLKTLNRQQSLYTKTKTMMKNNLIALLDQTYPGVNALFDSPVREDGSQKWVDFATTFWHVDCVRNMSLTAFAERYRKWCKRHGYNFRQSKAVEVHTGAQDLIAMLPKDALTKTMVRQAIDALNAVSASLERLKAEMQALAAQLPEYTVVMAMHGVGDSLGPQLMAELGDVTRFTHRNAITAFAGVDPGADQSGTHEAKSTRVSKSGPPELRRALFLVMDCLLKTQPQDDPVYRFMDKKRAEGKPYLVYMTAGANKFLRIYYGRVKEYLASLEGN

SEQ ID NO: 404746 - protein, 326 aa, unidentified
MTLSHLTDNTFVGIDVGGAGLDVAWHRGDSAHYANRPDAIATLVERLRTGPEVTRIVLEPTGGYEKALVKALRQAQLPVEVIHTTRFNAYRALVGVKAKSDTSDAKLLASYAAAPDEVRGRKAGHVELPEDAVREELSELASRRDQLKHMIHAETCRLGTVRNDELRQMITTHLATLRAEDKQVHRMMLELVRQRDDLRRDQRLLKTIKGIGVKSALVLLASVPELGRIDNKAAAALIGVAPFVRKSGTMNAPARIHGGRAPVRSILYMAAVTASKHNPLLSPFYDRLIANGKPPKVALIAVLRRLVVFANAVLRSGQPWKGASAT

SEQ ID NO: 404747 - protein, 413 aa, unidentified
MRNLLEVCCGLDVHKEVLVACILRGGIDEEPEPIIKEFSTLLCGLDEFKRWLMENDCHDVAMESTGVYWYPIYNVLESIIYEDAQTNIIVANPHHMKNVPGKKTDIKDAHWIATLLRAGLLASSYIPPKKIRELRDWTRYRDILIRELVGHKNRIEKHLQQCGFKLSTILTDIFGMSGTMLIQRLCQKGKLSEADVIVCLQGTLKNKSIEVQQAVAGQLSEHDRGFLTNLVKVMENCQREIEEVERQVTDFANKYEPTLRLLETVPAIQRRASTVIVSELGTDLSMFPTAGHLCKWAGLCPGDNESAGKKKSTRITKGNPRIKSIMVQCAWAATRCKNTFLRDWFYKLRTRRGTKKALIAVARKLLSIAWQILTTGEIYKETRYEETRKKEEEKRKQKLKAEATKLGFKLVPV

SEQ ID NO: 404748 - protein, 328 aa, unidentified
MCTLGIDVSKNKIDLCLLTAGPGGKKKHKVLTNEPAVARKVVDWLNAQKCVPESVTVVLEATGIYHENLAYGLHEAGVSVCMANPCRVREFAHGMDILNKNDAVDAFVLACYGELKSPAVWVPPSPEVRKLRALLRQRDALREDVQRTVNRLEKANSTSTPQEVIRSLERMKSWLNEELARIEKLIADHTDNDPGLKADLDLLKSIKGVKDQVGREMLALLKDGTFKSASQVAAYLGLTPVEKTSGSSVRGRPHMSKTGPSGVRAKLYVAALTASRWNKQAKAIYERLVAKGKAKKAALGAVMRKLVHLCFGVLKTRLPWDENYVATA

SEQ ID NO: 404749 - protein, 399 aa, unidentified
MFYGLDVHKEFIQVCQLDAKAANRKDYRIGGSAEEIDGWARRLGPRDQVVLEITFHSWAIHSIVSQYAGRVVVANSLQVKAIAYAKIKTDKVDAYTLARLLHADFLPSVELPDEKTWALRQLVSHRRLLVKQRVAIKNTVLATFHRCLICPPQGNAFTARGRRWMRSAELAPTERFLVHNALDLLEAIEARLDATDQQLLNTAAVEEQAHLLMTIPGVGVTVAMGLLAAIGDIRRFPSPGQLASYFGLVPRVSQSAGRCHHGRITKAGPGNARSLAIEAAQMLARSPSPIATTFYRVRRKKGYNVAVTALARKLIVLVWYMLQNGEPYRYAPVESTRRKLRSLIPKHERTRADRPPRNVDEVYQEAGLTLPAPPSKAERRAAASNRRTRTRLTRLQAKT

SEQ ID NO: 404750 - protein, 322 aa, unidentified
MTTRNQAMPVIIGADVAKADIVVCHHDLNQLQTIANQPRALAQWLKTLPITACIAVEATNTYHLTLVELAHKRGHRVYVIDGYRLNHYRKGLGGRAKTDSSDARLLARYLAHEGTQLRPWTPPPPAYRLIQRLLRRRAAVVKTRVALAQSFDDDASMRHLIKPILLKLNQLIRQLERQLMQVATQADVDHDIRRCQAIEGVGPLTATALVMASLRGTFSNSDAFIAFLGLDVRVKESGTFSGRRKLTKQGDPEIRRLLHTAAMAASRQAAWRPFYQRHLARGLKPIQALVALARKLARIAFAIITQKAEYQPKQLSQACSAT

SEQ ID NO: 404751 - protein, 281 aa, unidentified
MRFYNTNHQHYCGIDLHARNMYTCVLDQEGKVLLHRDLPTNGDVFLKAVAPFRENLVVGVECIFTWYWLADLCAQEGIDFVLGHALYMKAIHGGKAKNDRIDALKIATLLRGGMFPQAYVYPPEMRSTRDLLRRRLKMVRQRGHLLVHIQNTHYQYNLPTPKARLNYRCNREGIAEKFSDISASESISSDIELAGHYDLLIKNLELFLTRKAKVHDPGNFFRLRTIPAVGKILAMTMLYEIHDITRFERVQNFASYARLVKCERSSSGKRLGTGMLSRQGL

SEQ ID NO: 404752 - protein, 417 aa, unidentified
MKCFVGLDISSTKLDVCIMLSDTSTPVTASLSNDLSGATEIKNHILDLNHTYHFERIVIGMEATSLYSFHPAMFFHEDRQLKELHVEIMVEQPNKIKKYRDAFEENKNDTIDAFYIADYFRIERFSPSFLKEEKYMALQHLTRTRLQIIEQLTRTKQHFIENIYYKCNTLAYQFKKEELSTNLWSSTMMTLMTDEMTLDELANMPLQELDDWLQKLGKGHFKDSEKLAQTIQATIRGSYRLSKLQQDSVNVILGLLAREIRNLEKMIKEIDKAIEDMVETIPEYQCLTSIPGVGKVYAAGIIAEIGQIERFKDHPQVAKFAGLNWREKQSGNSNSQHTSLVNRGNRYLRYYLVEAANSVRRYDDEYKDFYKKKYHEVPKHQHKRAILLTARKFVRLVDVLLRNHQLYTPPRRIMEDN

SEQ ID NO: 404753 - protein, 370 aa, unidentified
MGEYSEAFVAFDTSKMKHAVAVAEGGRRGEVRFLGDVASSPARVERLTRKLAGRYDKLHFCYEAGPTGYGLYRQIRELGYDCTVVAPSLIPKKPGERIKTNRRDAVTLARLLRAGELTAVWVPDATHEAVRDLVRAREAAAQDLRRKRQQLLSFLLRHGRIYDGRQHWTLAHRRWLAGQSFTHPAQQIVFQDAIEAIEEAMARLRRLEQQLVAIVPSWSMAPVVEAYQAMRGASFLVAVTVAAEIGDLRRFDNPRQLMAFLGLVPRERSTGDTVRRAGLTLAGNRRARRVLVEAAWSYRYPARVSETLRARLEGLPKPVRDIAWKAQIRLCARYRRLSATGKKLPVVIAAIAREMAAFLWAIAGQVGPAA

SEQ ID NO: 404754 - protein, 365 aa, unidentified
MTVKATCLVGLDVHARQTHATVLDRASGELSVRRLRGTPEEAVLPFLERLRTTDLLAVYEAGPTGFGLAREAGRRGLDVRVVAPGSIPRAPGDRVKTDPRDSLRLVRLLAAGELSFAFVPTVEDEHFRDLVRTIEDVRGDLMRARHRLGKFLLRRGQRYPGPGRAWTARHLGWLRALRFEDACSQATFADYLASVELLLGRRATLHTTLENAIPDSSHAPVVGRIRCFRGIDTLSAAGVCAEVGDFRRFPRPTLLSGFLGIVPSERTSDTRRRQGSITKAGPVHARRLLVEAAHHYRHRPIVGEVLARRQADQDPRVIAIAWRAQRRLHQRWQHLHHDRRKPSGIVAIACARELASFLWEAAVLD

SEQ ID NO: 404755 - protein, 423 aa, unidentified
MSQTPVQPSDQPVLFIGIDWADQKHDIYVIDRHGKRFHEEITHSPETIDTWVGEMLKLAGGQPIAIMLEQSRGALMYSLMFRKNVLLYPVNPKQLARYRESYPGGGKDDPTDAMYLARMLRERIITLTAWQPDDENTRLLANLSQQRRKIVDGQTKLRLQLTSLLISYFPLLLELFGKDHQLPLLLSVLGRWADPRKLRRADRRLIRRVLRDHSRGSEEQQDQILARIRSAQLLCDDEALIAPSAMTAKLLVSQIQQSQKTIRDFDAKIDEVVKQHPDAHLFTSLRGAGKILAARLLCAFGSQRDRWKDADSIASFSGIAPVTKQSGKQRQVHRRFACPKYLRQTFHEFAASARLYRPWSKARYQMLRDRGMRHHAALRKIARSWIRILFRVWQTRTPFDSQRYIAKLQQRCPEITQYLNQKN

SEQ ID NO: 404756 - protein, 414 aa, unidentified
MSYKIAGIDVHKKVLMVVVIDATTPESKPERRRFATMPSDLCRLSSWLREQGVEEAVMESTAQYWRSVWLELEPYMLLHLAQAFSNRAPRGRKHDFRDAERLVRRLIADELILSFVPNGEQRTWRNMTRMKTQLTRDRVRLQSQMECLLEEMRIKLSSVVSDLLGASGLRILRALAEGETDPKKLAALGDDRLKCSKEQLVDALTGSSQPMHREMLALQLERLQLIDTQIAKLNGMIAQAMKPHQEAVIRLAEVPGLGVDSAQQVISEVGVQASTFSSAAELTSWVGTCPGKDESAEENHSSRSAKGNKYLRRVLNQAAHAAVKKNGSHFQAVFRRLLPRLGYQSAIWAVAHRLCRVAWKILHEGVRFIEQGREPDPKAKKQRARSLARALRKLGYNVAITPINPATAEKAMQL

SEQ ID NO: 404757 - protein, 388 aa, unidentified
MIYVGIDIAKLNHFASAISSDGEELIKPFKFTNDNDGFQLLLSKLDPLDKDSLIIGLESTAHYGDNLVRYLVAKNYKVCVLNPIKTSTMRKNNIRKTKTDKVDTYIICKTLMMQESLRFVTFYDLDLIDLKALGRFRQKTIKQRTRLKIQLTSYVDEIFPELQYFFKSGLHQKSVYSLLKEAPTPEAIASMHMTHLAHLLKVNSHGRFDKEMAQQLRVLAQKSVGASDSSLSIQVTHTIQQIELLDSQLERVEAEMTEIMKFNDSVIMTIPGIGYINGGMILGEIGDIHRFSSPNKLLAYAGLDPSVYQSGNFQAKKTRMSKRGSKVLRYALVNAAHNVVKNNATFKAYYDAKMAEGRTHYNALGHCAGKLVRIIWKIMTDNVEFNLD

SEQ ID NO: 404758 - protein, 351 aa, unidentified
MLYLGLDGHSKWMTIKGFNPLTGELMEIDRQPNDPESLAECFASLPGPLYGVMESGTNSWAVYRILEPYFEELMVVDPATVWGKEGRRGAKTDRRDAMKLAVKLHRGELEPLYVPDVATQDQRALGRGKINASRHVTKLVNELGALLRSWGVIVNCSLLSKEGQELIEASKPRLPEYSLKVLELWLVMLKTAQEAEAELERATKEEASKDEQCRLLMSIPGVGPLTALVVKSEIGDIRRFASSRQLICYSGLSPSVSQSGDSVYYGKLNRFCNRFLKYVLVLRAQRMGCMKKDNPMRQTYWRVVLRHKTNPAKIVVARQLVRVIYAMLKKNEHWDASKITHRWEPRAPAAA

SEQ ID NO: 404759 - protein, 344 aa, unidentified
MIFVGIDVAKDKHDCFILNSEGTVLADVFTIANNRIGFETLLSRIQSCSQGESKIKVGLEATGHYSYNLLGFLLDSGLATYVINPLHTNLYRKSLSLRRTKTDRIDARTIAMMLMSDVDLKSYSNTAYHNEELKSLTRYRFDKVKERAKLKSSVARLVNILFPELEKLVSSLHIAVVYALLSNYPGASYIANANTEELAETLCTASKGRYTKSKTAEIQVAAGVSIGSKMPAKSMELKHTIALIRELDKEISEVESAIDKITSQMDSPIFTIPGIGRHMGAMILAEVGDFSNFASADKLLAYAGLSPSTYQSGQLQNCYAHMEKRGSRYLRYSLRIYAFDVLCV

SEQ ID NO: 404760 - protein, 350 aa, unidentified
MSIRNKPRDAAVFGIDIGKTVFHVVGLDAEHSPIQKATFRRETVLQFFERASPVLVGMEACPGSQWLARKLQAMGHTVRIVPAQFVKPFVKSNKNDIIDAEAIAEAVTRPTMRFVEIRTPEQIDLQALHRVRDRMIAHRTRLISQMRAFCLEYGIAIHQGAGKFKADMPRVLADEGNELSPAMRHLLNEVFGELGDLEQRIAAMNREIEAIAARSDTARRLMTVPGVGPLASTALLASAGNGRQFRKARDLAAWLGLVPREYSTGGKTRLLGISKRGNKYLRRMIIHGARSCVTHLDRSRDRLGPWLDGLESRMHKNKVTVALAAKIARILWVVLTKPGASYERRDPAFG

SEQ ID NO: 404761 - protein, 339 aa, unidentified
MELYAGLDLHSRNTYIGIMDKTFNRVFKKRVPNHLEHILQTLDPFRDQIKGFVVESTYNWYWLVDGLMEAGYSSAHLANPSAIKQYEGLKHSDDQHDAFFLAQLLILGILPQGYIYPKKDRPVRDLARKRMFLVQHKTAHILSLQSLIQRHCAMKVRANDMRHLTVKKLEELLEEKYLVLSAQANLDSINFFKQNIQRLEKAIRKKVKLKKAFHCLKTVPGIGDILALTIMLEVGDINRFNKVGNFTSYCRCAPSQRLSDGKSKGHGNRKNGNRYLSWAFTEAAQLGRRHNERFRAYYNRKVAQANTSLATKALGNKLARICYYIIKDQVSFQEELLCH

SEQ ID NO: 404762 - protein, 469 aa, unidentified
MPDLFIGCDVSKGHADFVVLDEHSQVVEESFRFDDTKRGHTALEQFLEKLVRKYPESVLHIGFESTGCYENNWLRKAQELSVKFPLKSARINPCGIKKFKEAELTRCSTDAVSAVAIASYMQTHPDKVMYDQDDPFYTARRQWKCISLLKKMSVQLQNSLQMQLYTANPGLLLYCKHGMPRWMVPLLSKYPTAKELERARLESVMKCARLTEAKARGIINAVKASVCSTTDETTAINIKHLLIQITSVEESIGVLEAELSKRWADHPLVKLVNTINGIGVFSALGLLINIKDIGLFPSVSNLVSYFGVHPSYRQSGDGSYGFHMSKKGRVEPRIILFMCTLSAIVHNPVIKECYARCLKKKMPKMSAIGVCMHKLLRIVYGVLKNQTAFDPEIDRRNREKGRIVSAIDPEVQRQKKICRYQPMDEFAPVSARQAKKRKGNGSQSNVITENGITTPFEEKNSEKMVLVQN

SEQ ID NO: 404763 - protein, 356 aa, unidentified
MGCKVIGVDPHKRSHTAVVLDEDEEITAQLLVAADRRQVERLLAWAEGWPQRIWAVENANGLGRLLSQQLVLAGEQVVDVPASLAHRTRRLSGKSGRKTDEHDARSIAIAAANPGRLRTVELEDVSQALGLILDRRRHLVTFRHRTICRLHALLSEMVPGGAPTKLTTTTAAKMLRTVRPATVVEFERREVAKQLLTDWRWCDRQLPAVERRLHEALEAHGSTLTGIFGIGDIGAATILAIVGDVGRFPTAGHFAAYNGTAPIEASSGDVRRHRLNRRGNRQLNSVIHIAAVTQVRHHGPGHAYLQRKLAEHKTKGEAMRALKRQLSDIIYRRLTSDAQRRAAARGGQTGTRLASA

SEQ ID NO: 404764 - protein, 348 aa, unidentified
MGGVDTHKDLHVAAVVDQNNKVLGTQYFSTTRQGYRQMLAWMTSFGTLKRIGVECTGTYGSGLLRYFQSAGLEVLEVTAPDRMERRKRGKSDTIDAECAAHAAFSGIRTVTPKTRDGMIESLRVLKTCRKTAISARRVALQIIHSNIISAPDELREQLRNMTRMQLIRTLGSWRPDASEYRNVTNVYRISLKSLARRYLELHDEIADLDVMIAAIVDELAPELIKRNAIGYESASQLLITAGDNPQRLRSESGFAALCGVSPVPVSSGKTNRYRLNRGGDRAANSALHIIAIGRLRTDAKTKEYVARRVAEGHTKMEAIRCLKRYISREVYTLLRNQNRRINSIPITA

SEQ ID NO: 404765 - protein, 337 aa, unidentified
MRVTTIGLDLAKNVFQVHGINEDGEVAFNRALRRAQVLKFFEDLEPCLVGIEACGTSHHWARELIKLGHNVKLIPPVYVKPYVKRGKSDAVDVGAICEAVTRPTMRFVEVKTPDQQAILAVHRTRDLIVRQRTINMLRGQLAEFGVVLPQGVYHALQVAKDCLNGEQPDLPEVAGDVVFELCDQLLFLHSKVLRCSRQMTQIAKLEKRVALLRTIPGVGPITASAIVATIGSGKQFNNGRELAAWLGLTPLNKSSGGKERLGHISKMGDQYIRRLLVLGMTSRIRSIRATPEKFDPWFADILSRKPSRVAAIAMANKTARMIWAVLTRNEPYKVRAA

SEQ ID NO: 404766 - protein, 475 aa, unidentified
MNIKGTKKKNQVVTVNIFEQQELLKKAEVIRENLTASTWRELETNGKFGKNEKLSFVSDDMLILGCDVGSDTHYVRAIDTRGRELSKSAFPFSNTLEGFQSLMDWATKIAASNDKKQIILGLEPTGHYWFCLATWLIGNGISVVQVNPYAVKQTKEVEDNSQLKDDRKDPKLIANLVKDGNFGMPYLPEKLYADIRRLSMLRDQINEDRIRDLNRLHREMKIYFPEYKDAFGKIDGTFCLEVLKVAPFPEELVTLGVEGIRQIWHEAKLRGRGYVNATSIFENAKKSIGIQDGAESGKLAVKWFVHRMMESNEQLAEIESRLHQMCMEIPYAENILEISGIGENTLSGILAEMGDISRFDDVKEIQKLSGLGLVACSSGKHKGETKISHRGRKRLRYWLFQAAKSAVAHANEFKELHAYYTTRKDNPLKKKQSLVVIACKILRVIFAILTKGTPYDPKKMLGDIVRPNEQSVQVA

SEQ ID NO: 404767 - protein, 385 aa, unidentified
MSQLNDLSRSLTSLEQDNAIIAVIEMSQSSWLVAGIVPGIERHPLKKLEPNEGELLRLLMRWRAEATKMGCTITRIAVAYEAGRDGFWLARWLRAHDIETYVIHPTSVAVSREHRRAKTDRLDTRLLKRVFIGWLRGEPDHCHMVTIPTLAEEDAKRPNREREGLVRERTRIVNRMKSCLARFGVRSFKPTLRKAPERLATLVTPEGVPLPANTLLELRRDMARLRFIMDQIKEVEEARGQRLEQAPQEKSHAMVRLLARVIGVGIETADMLVHEILSRSLRDRRAVARYAGLTGAPDESGSRRQEKGLAKAGNARVRRGMIQLAWRFLLFQKDSALAQWYRTRTESAGKKRKTMIVALARKLLIALWRLVTIGEVPAGVVLRAA

SEQ ID NO: 404768 - protein, 317 aa, unidentified
MDSKTEPDRYVGIDVAKGHVTVHVRPDAIAFNCKTDAQGLADLLDRLRPLTPKLIVLEATGGYETVVAASLAEADLPVAVVNPRQTRKFAGALGRLAKSDTIDAADIAHFAEAIRPEPRPMPDEQTVQLRALLARRHQLVVMAGAEQQRHDRAETALARRSCAAMLRSLTAEITRIERAIDKLIIASPVFCAKQDLLKTIPGVGDVVARTFIAELPELGTVDRHKIAALVGLAPMNHDSGKMRGERHITGGRPQIRSPLFAACLSVIQHNPPLRGFYQRLLKAGKPKRLAIVAVMRKLVCIANAMLRNQQPWAHAQS

SEQ ID NO: 404769 - protein, 359 aa, unidentified
MAIKVKRNKINFKGKMVNIGIDMHKKSWRITALVEGDIVMAVTLARPNYDSFKKLLVQFLGNYVRIVYEAGPGGFDLYDRLTDDGVECIVTPPSLIPTASGSRVKTDKKDSYKLARLLESNMLKEVWVLSPEERAHRQLARTRRQIANHRSDVMRQIKSLLLFHGIQTPFPGKQQWSGPFITWLKELDLGDEYLNKSLEALIKLFDYLSIEKKSLTHEVIKLAREEKYGSRVKLLKSVPGIGALSAMEILVELQDIARFKTADELAAYLGLTPSQHSSGEHTRMGHITHAGNDRVRTTLVESSWILIGKDPEIKKKYDNIKYRSGGKRAIIAVTRTLSARIRRMLLDQIPYKIDLKKAA

SEQ ID NO: 404770 - protein, 450 aa, unidentified
MEVIHPFAAGIDVGSRSHFVAIGQNKTDVKEFGVYNEDLLAIAQWLLDNDITDVAMESTGPYWQNLFSTLQEAGLSVTLCNGKFTKNIKGKKTDIIDCQWIQKLHMLGLLSGSFLPDAVTEQIRTYCRHRSNLIELSADSSRKMQKNLQLLNLRLDVVVNDICGVTGLAVIEAVCKGETNPEGLAALRNGNCKKSEAEIAKALQSNKRPDYLFALTQELQLYRQYQQQIAACDVEIEKAMRLSICRDENRKNLRAAAKPHKRANKNAPKNMDVNQLSYQYFNGVDLMEIEGVSHSTIMTLISEIGAEGFKKFDTAKQFSSWLHLSPNVKITGGKVISSHLSKGSNRAKIALRNAANAIGNLKDTHLSNFFKRISFRKGRAAAISATARKLAVIIWNMVVKNMPYKPPVDYLFSDQKRKQKLVANIKRSITKLGLKADDLGFVTGSFSVTS

SEQ ID NO: 404771 - protein, 366 aa, unidentified
MKKITTVQALSNEIFKEQKLTIGLDLGDRWSFYCVLEEAGKVILEQKVPTTTEGMKQTFAKIPGSLIALETGTHSPWVSRLLTELGHEVIVAHAQKVELITKSNRKDDRHDARTLARLARIDAELLGPVRHRSAKAQIHLTVIRARAELVSARTALVNAARGLVKSYGQRLPKCGTQQVSRELAAGLSTEIREVLEPLLKEIESLNERIQEYDERMEKIAKEVYPEVSLLKQVKGVGTQIALTYVLTIEDPHRFPKSREVGCFLGLRPGRRNSGESEPQKKISKEGDRYLRTMMVQGAHYILGPFGEDSDLRRWGLKLAERGGTNAKKRAVVAVARKLAVLLHRLWVSGEVYEPLRNSNKAMRAAA

SEQ ID NO: 404772 - protein, 408 aa, unidentified
MQVTFGIDVSKSNSTVCELIGESKNELTITNDRPGFIQLLHELAAFSKHPQIIFEATGVYSRTLQSFLEDYGYDYVILNPLKAKKEMDMGLRHNKTDKTDAYHLALIQRLYHHPINQLQSQTYKQLNALSRFYDQLTADLVMAKNRLHQALQSTFPEIENLFSSAKGKNYWQIVVRYPHCDLVRREDKKQLINWLMSLKGIAFKHALRTADKLIELAYQAYPVVSCSSIEVEQVQYYAHRSLNLSDQRENLIARMVKLAKSLPNHDLENLESIPGFAQTTAVRVLAELGDLRRFSNPNKINAFIGIDPGRYQSGEMDSNLSITKHGNAVARKLLYRAIGQIDNAAKTNPCHIADYYESKKLSSQTKGFKKIAIASIHKLIRTIYALIINDQPYDYNVATHNQKDFSRN

SEQ ID NO: 404773 - protein, 454 aa, unidentified
MARNGKNKTQKQKSLPFIQRDAAGIDIGATEIYVAVPEDRDIRPVRKFATFTEDLHALADWLIGCSIKTVAMESTGVYWIALFQILERRGLEVCLVNARHVKGVPGRKTDIQDCQWLQYLHSVGLLRGSFRPTDAVCAVRSILRHRDNQLKSASRQVLLMQKALTQMNLQLHNVISDITGVSGLAIIDSILLGEREPSKLSGLCDGRIKASRQVVAKSLVGDYRPEHLFCLQQALESYRHFQNQIAACDEHIEQMLARFDSQEQCAEAPSAKYKAQGNQPAFDVPSEMHRILGVDLTAIPGMSAQGVLNFFCEVGPQITRFPSSKHFASWLGLCPDNRISGGKILSSKTRNVRCRLANALRMAATTLYRSHSGLGDYFRRLRARLGSPAAITAAAHKLARILFAMLRDRRSFDPQLLGALNEKHLRRRQNSLRKYAASLGFELVPIQNLARSVS

SEQ ID NO: 404774 - protein, 391 aa, unidentified
MNKAWAGVDAGKEFHWAHVLDASGRELLSRKIENDEADISMLIDEVISLAEEVVWAIDQPGGGAALLLALLWKRDQRVFYIPGLTVNRARDIYRGESKTDARDAHVIADQARMRSDISELRPGEEEIAELQLLLGRRRDLLTDQSRTITRLREVLLSLFPALERTLDLNRRGPLILLTHYQTPGQLRRAGHKRVAAYLRNRCVKGFNSVAHKALTAARSQSVALPAEGVAANIVAELAQEILALKDRIESIDEELGQRFFVRPEAAILCSLPGMGALLGAEFLVAVGDLCAFESAAQLAAYAGLVPAANDSGKRVGNNRRMRGGNKVLKRVLYQSAFASLRASPESRVFYDRKRSEGKRHTQALIALARRRVNVLWAMLRDGTTFETRSAA

SEQ ID NO: 404775 - protein, 435 aa, unidentified
MNCVNDIRLEQFLQLKKEIRGSEKHLIVGIDAAKEKHNAFFGTARGKTLVKNLVFDNTLEGFQKLLAYVERIKVQYSLTVVVFGIEPTANYHKPLAEHLIKCGHLVVLVGGVAVKNNRQLLDGRWDKHDVKDAANVADLIVQGKCLFYEYPLMTLRNVRILIALKRRLKRREHGMSVCIRNNLIAQYFPELDQHYGPSETLAVVRECLDPSEIAGMEYDAFCRTVAPGKMTLAKGRRVGTIWRAAVDSIGCTMGEAASFEAQVMVDSLKQIRQTIKSVEEKLEDACIEFPEYTYLLSIPGFGPDVSSKVLGAIGDPHRFTSAKQVLKMAGLDLCADRSGKRSNSAIPVISKQGKADLRYGLYQAAVIASLKNKDFIAYFTNKLKGRAKENGIATKMRVKLAAKLLVIAWTLMKKKECFDPKYLKQEDQDAQKKAA

SEQ ID NO: 404776 - protein, 350 aa, unidentified
MFIIGCDFHSRFQQIAMLDPTTGEVVERRLEHENGEAKTFYATLPSPARVGMEATCDARWFERILQEHHHELWIGDAAEIRAAMVRKQKTDSRDALHILDLLLANRFPRIWVPSPPERDLRQMLRHRHKLVRFRTSVMNQLHALAMGQGLCRRKKLWAKVGRKELEGLVLDPWASLRRKELLQLLDQLDPWIDKLDEAVTRSAESRPPAVCLMQQAGVGPVTALVFVLTIGPVSRFANSKKLVTYLGLNPSEESTGGRQRLGAISKQGNPMMRYLLVEAAQTASRLDPELRRDYQRLKFRRGSGVAKVAIARKLAVRLYWKLREAEQPVPSARMQGSPASPVLGESLSPY

SEQ ID NO: 404777 - protein, 312 aa, unidentified
MIPNRVYLGADVAKATIDCRLLDQSFTIANTSAGFAKLGTRLKPLAQPGVHVICEATGGYQNALVDYLHSHKVVISVINPRQVRDFARSRGILAKTDRLDAHVLAEYGAANNPAPSTPQPEHLKRLAALLAQREHLVAERAVHKTRLHQIEDRWLRVQTERVIGFFKREIEKLEAQLIKLRDADLDLKTKAERLDQASGVDWRCALALVGYLPELGNLSRRAIAKLAGLAPLNQDSGQYRGQRHITGGRAPVRRLLYLASLTAIRKNSILKTFFHKLKTAGKPSKVALIAVARKLLILLNSSLKNPKLSLVS

SEQ ID NO: 404778 - protein, 346 aa, unidentified
MMIIGCDFHPSWQQVCWLDTETGETGEQKLVQALGDAERFYRQLSAPALIGMEATGNCHWLVDLLSELGHELWVGDAAQIRASYVRQQKTDKRDAAHILKLLVEGRFPRIWMPSSEVRDRRQLLLHRHKLVIIRARVKNELQHLCLNQGVQKKHKLWSRAGQQMLRELPLKPWAGRRREDLLRLMAMLDQQIEPLDQAVKTEAQRDKMALLLQTQPGVGPITALAYVLTMGEVSRFPRGKQVASYLGLIPREHSSGGRQKLGAITKQGNRMMRMLLVEAAQSAVRLDPQFRKEYLHRCHSKPKAVAKVAAARKLAIRLYWMLRTQKRYPAVVRIESSQRVPLVSAS

SEQ ID NO: 404779 - protein, 410 aa, unidentified
MAQSGMTCGIDWAENHHDVALVDDAGRVVVKRRVTADMTGFRELLELIAQHGGEPGATPVAIETDKNLFVVALAAAGFTVYPINPRALARYRERHGQSGGKSDPADAIALANVLRTDRHLHRPLPANSDSALRLKALARQHQEAIWAMHQTVSRLRSVLLEFYPQAVKAFPNLQHYAATAVLAAAATPAAGTRMTKRRVEAIFRRVGRRNDPALVEQILTDLKTPALRQSEPVEAALGTVVEGLLQIVETMRGAVEQLERALTTELEQHQLAPVLRSAPGIGAVLAARILAEIGDDPTRFTTAAGLRAFAGTAPVTRASGRSRYVKARKVRNKRLGDACHWWAFAALTRSPAARAHYDRGRAAGDHHNAALRNLANKLLGNLWWCIVHGELWDEAAAWPNAQPRELTAAA

SEQ ID NO: 404780 - protein, 339 aa, unidentified
MNVTVFGVDLAKRVFQLHWVDITTGEICRRQLKRAQVVEFFVNREPSIVAMEACGSAHYWGRKLVAMGHQVRLIAGQFVRPFVKSNKTDEADAHGIWEAAQRPGMKFVALKTEAQQSVLTLHRMREQLVKMRTMQTNQLRGLLYEFGVDLPQGRQKGMARIVEELSRLEGRMPAIFIDAIRQQLQRIESLGHDISEIEKKLTLWKKEDKASKKLMEIPGVGLLTATAAVATMGDAKTFKSGREFAAFLGLVPRQSGTGGRVKLMGISKRGDVYLRTLLIHGARSVISHKKEQSPWLAKLLARRPLNAVAVALANKMARMIWALLAHDRTFSKDYAWSTA

SEQ ID NO: 404781 - protein, 344 aa, unidentified
MYHYAGIDVSLEYSSVCVVDGTGKILRERKVASEPEALIAWFRSQGLALERIGLEAGPLSQWLYAALREAGFAVELLETRHVRDAFKAMPVKSDRNDARGIAQLMRLGWFRPVHCKSIEAQETRAVLTARKLLQSKLRDIENSVRGILRGFGLKVGKTTERTFAERIRELVAGHPGLELVAQALLQAHAVLVREFNGLDRHTQRLARSHPSAKLLMTTPAVGPIVALTYASAIDDPKRFSSSKATGAHFGLTPKKYQSGQTDYTGRISKIGDASVREALYQAAHVMLTKPVKNCSALKSWAMRIAKRAGMRKAKVALARKLAVILHRMLADAKPFNPMAKAAAT

SEQ ID NO: 404782 - protein, 448 aa, unidentified
MFTMHYKRLLALIDSVSSYLSVGLDVGADFTWMSIALPNGSFIGKPFKIVHSDPGSRDLAVAKIKEAQETYSLKSRCFLESTGIYHIPLLCFLRDKGFDCSVINPIITKNSTNISIRKLHNDKFDSKKAALVGLNVSLKTSIIPDDSVLDLRNLIRDYYYFKDLQSSVALKLTAELKVSFPAYAKVFSKVTTQSSLKLLSSYPLAEDMLTAPKDDIVKIIRSTARFGEAYALRKYDAIIAAAQDAAVFGRALPSNAVRIRLYIDTYQEYQKHLDALLKALHETVDQLQDTLIYDQICLLQSLRGIGFLSAVVLIAEMGNFKLFSSPKKLYAYFGLDPAVKQSGKLNGDRVHMSKRGSSLARRVLHMAALNNVKVDKGSGTPVNPVVYDYYTRKCSGKKKPVAMGAVMHKICNIIFAMLRDNKPFEVITPEEHCRRFAAEHPDKIQKAA

SEQ ID NO: 404783 - protein, 406 aa, unidentified
MKKEVVEFDQVVECGCGMDVHKDLIVATIQGKIIKTQTKSFKTFTSSLIKLKEWLLKNGVTHVAMESTGVYWKPIFNVLGDDFRILLVNARHVKNVPGHKTDKQDSLWLTKLLLSGLLKGSFIPERPIRQLRDLTRYKTKLVNQISAERNRFQKILEDANIKLSSVLNDVFGATGTKIINHILMHESYRPEELLQYVHGKVKANRQDIKESLTGYITPHHRFMLKTILGNIAKIESTVAEVDTQIEICIEPYKTERKLLESIPGVGIEGATCIIAEVGVDMEQFPDQNHLASWAGVCPGSNETAGKNKSGRITYGNKYLRSLLVECGWAASRTKNTYMSAKYKSLVGRRGKKKSIIALGHKILIATYFIIKNKVAFKELGEDHLNNFRKDRLIAYYTQQLEKLTAA

SEQ ID NO: 404784 - protein, 334 aa, unidentified
MKSDTVHIGVDVSKEKLDVFVPARKEGVRPTSKEVDNCVAGFREIRDLARKAKATVCVEPTGGYELELIAFLHKFEVPVAYTDALRVRQFARAEGCLSKNDTIDAALISRFADKIGVRVLEPQEVEAVELKRKAKFRQTMTDFRTAIINRLETEIDPEMKALLKEQIKHMDKIIDKAERLCMETVEKDDRMNTLRKRFTRVGGVGDLTAMSILAGLPEIGSLSDEKLNRLVGISPEARQSGTKEWQRRIWGGRKDVRNALYMACLASIQWNSILGAYYHKKRAEGHPHKWAMVPTMRKMLSLLNRIARDPSFAPSPEPESTKLNANAGRKRKAA

SEQ ID NO: 404785 - protein, 318 aa, unidentified
MKKAFFCGVDVSKDKIDVCFLTSITSEKAKFETLPNNHELIKVYFDSFKNDEILVVFEATSNYHLALQKALSDLGIRYCVTNPYKSSLFLKHLSTIKTDTSDSYGLAVYARTFKSEIAPDKYNAEYLEIKSYNSTLNLLQKINTQLKNFKSSQKTLNNKVIDDVIANLIKEIAKLQAMLQKLAFDLVKKTIPETEEIIKENKGFGIDLALNLFPQLHFNRDKSEKQFISFIGLSPRIFQSGSSVHKSQKINKMGNSNIRRILFMTALCAIRFNAKFKARYERLLANGKKKMTAIVAVMCAIVRYLKSLFPFNPEIKAI

SEQ ID NO: 404786 - protein, 355 aa, unidentified
MSQEKYIGMDVHQATISVAVMDAGGKLIMECLLETKAGTIVEFLRGLHGTLWLTFEEGTSAAWLHDLLKPHVNRLVVCDPRKNALLKDGNKSDRVDARKLAELLRGNQLHAVYHGENGVRTLKELGRSYLTITQDVTRVMNRIKALYRSWAIPCAGTTVYAARHRAEWLAKIAEPGVRVRAQRLYQQLDLLQPVRLEARREFLAESHKHSAVKLLRQIPSIGPIRSALLVALLQTPHRFRTKRQLWAYSGFAVETHDSGEYRSVRGKLQRNRERMTVRGLNDNHNRDLKNLFKSAAISASTRPGPLRDFYVARVEKGMRPTMARLTLARKMAAISLTIWKKGVQFDPQQLQRQTA

SEQ ID NO: 404787 - protein, 390 aa, unidentified
MRQPKDDLSRSLVAFDQNTTIVAAVELSSRTWLVGGVVPGIVPNPLKKLMPDEQALLKLLYRWRDEAKKAGQKIKRIVVAFEAGRDGFWLARWLRARDIEAYVIHPTSIPVSREQKRAKTDRLDIGLLIRSLLGWLRGEKKHCSMAAIPTLEAEDAKRPQREREQLVGKRTGIVNRMKASLVRLGIRGFNPKLRKAPPQLAALRTPEGGPIPANTLAELQREMAHLRFINEQIRQIKNARLKELKEAPHRASNGVVSQLERINGLGIDTSDMLANEVFSRDYRDQRAIGRYVGLTGSPDESGKRRRQKGLAKAGNARARRGMIQLAWRFLDHQKNSALAQWYRARATEGKKRKTLIVALARKLLIALWRFVTTGEVPPGVILRPASRLAK

SEQ ID NO: 404788 - protein, 402 aa, unidentified
MFSVGIDVSKGKSMVCILRPNEDFVCKPFELLHCKEDMELLDELLQKLDGEVRIVMEATGIYNLPILTFLIEKDYFVSVINPCVMKKYARNNNFRNVKTDKHDSITIANYGIEKWFKLQKYERSGLEYEELKLLGRRYRHYMEMHVAALQELTHMLDYVMPGIKGMFNSWTESNSRDKLCDFVERFWHYDLITAMSCEEFVKAYNDWAKEKKYHQNESKARQVYELASNGIPTLPSNIPSTKMLVLEAINSLRTADDSLNAILTRMKELAKSLPEYSTVRAMGRVGDVLSVKLIAEIGDIRRFHSAKALIAYAGIDPPPHESGQFVGNKRKISKKGSSTLRKVGYELMRVLKSHGKPKDAAVYDYILKKESEGKSKKQAKIAGLNKFLHIYYARVTEVYQQA

SEQ ID NO: 404789 - protein, 356 aa, unidentified
MQSKAISFKGQKVFIGIDVHKKTWSVTSLLEVGMPKTHSQKASAKELFDFLNRHYPEAEYHAVYEAGFSGFSTYYALKEYGIECTVVNAADVPTTQYESVMKSDPIDSDKMARALRAGMIRGIYIREKDNLDDRGLVRLRKSIQQDLTRYKNRVKHLLHANGVEIPELFDRSPNWSKAFINWLREEVVLLSSSRVSLDMLIEQVETLRQNLLTVTRKVRALRLKEEYAEKYDALTSIPGIGPICAITLLTEIYDVKRFRNERQFASYLGLVPTCHSSGEKASFGEMTFRGNKHLGPLLIEASWVAIHWDDALSVAFTNYRRKGLMPQESIIRVARKLSNIIFAMLKTGNHYAPANA

SEQ ID NO: 404790 - protein, 360 aa, unidentified
MGQVKTWAGLDVHAAKVVAAIADAESGELRVQRLPGQTRRIVEFCAGLAAPVNVSYEAGPTGFGLARALEAEGISCVVAAPGKIERPAQDRVKTDRRDAERLVRLLMIGGLHPVRVPSPHEEALRDLVRAREDVRGDLMRARHRVGKLLFRHDQRFDGNNWTTAHRDWLTKLELSDPVAQLVLLDGTGAIDALLVRREQLERQMGAIVPDSPWAQTIGRLRCLRGIDTLSALGLCAEVGDFERFERPAQLMSYLGLVPSENTTGEKRRQGSITKSGSRHARRLLVEAAWHYRRAPRKGRELDRRQAGQPQHVLAISWKAQQRLHRTWRRLDHERGKRRTVCAVAVARELAGFCWAVATAD

SEQ ID NO: 404791 - protein, 428 aa, unidentified
MKKSEYLSTLFVGIDVSARENVICALNFEQDRLLEFAVANSQPGADEIADKLSVLLSSCKFTRVVIALESTSFYGIHIANFLSSCALLAPYSTYVYCLNPKIIANYKKSFIGMSKKDPIDAFVIADFARVGRITSEPWRGSQFLALQRLTRHRLHLVECLTREKTYMLSNVFLKFSEFATLTKGNHPFSNKYGAAASAVLTDFLSNEQIAEASIEDLIAFVCEKGKNRFSHPQEVASILQAAARNSYRLDKCLYEPLTIAIASSLNCLKAFEAEIKSIDKAIEKTVSGLNPAEYICLKSIPGIGPVFASGILAEIGSIQAFDSHSALAKYAGIVWTENQSGDFQSDDTRMSKAGNRYLRYYLIEATGSVVRHLPEYNAFYQKKFDEVKTHQHKRALALTSRKFIRLVFGLLAKNQLFVPQGVDHTPNS

SEQ ID NO: 404792 - protein, 341 aa, unidentified
MKNKSFIGIDISKNVIDVSFFCEGTPIKDFPHDVFNNSRKGFGEMCTWLKKNHVVLSNCLFGMEFTGSYSMELEKFLNAKKYQFCMLSTHVVKHYPMGPKDKSDKIDSAKIADFLYRYNGTECVKPYKMPDKTMQRLKALMNERKFLVEQRTCFINRRQLCTTKEDALLYDGYIKKFDHDIENIELEIQKLLETDDSLSTTYKNLLAIPGIGFVNAMNVIVITRNFTAFETARQYASYVGVAPHSHTSGTSVKWRPRPSARCDGQAKADLSMAATVAVQYDAELQSFYNRKLGGKQDSDTKRKALNAVKFKLILRMFAIGKQNRKWEPLDSKSSNEKLAIS

SEQ ID NO: 404793 - protein, 419 aa, unidentified
MFKIFRKNCCGLDVHKTWIYACIGITDANGRTEYKQARFSSFTRGLRELADWLEKYGCKDVCMESAGKYWIPVFNILEKTCFVTLAHPKYTKPQKGNKTDRKDAKWICDLFMCEMIKPSFIPPPNIRHLRDLVRYRSKLTNCLTGEKNRAQNCLTVSNLKLDDVFSDVFGKSARSITNHILEHPGEPFDVAPFVDKNCKHPLEEIQAAVDGSISHEQAIKLREILRHMDEIKVHKLNIDVEILRLAAPFKSLLELLYTVPGFSANPMTAIAVLSEIGADMSVFPTAKNLSSWAGCCPRNDQSGGKCKSTRISRAGVYLKPLLVQVANAIIKSDKYPECKERYRRIKARRGHKKAIIAICRMLLTAIWNILSKLEPYSSKGFLADRQDNPSMVITKAQGLLLLRSRGYLIKDDIPPPAPA

SEQ ID NO: 404794 - protein, 369 aa, unidentified
MSIVMGVDQHRAQITAEWIDLDSGEISRARVSPADRAGVRRFLARFAGQQLEVALEATTGWRFFVEELRAVGAVAHLAEPAETAALRGNKQRAKTDRADARHHRELLIAGRLPESWIPPDHILDLRARVRLRHTLIEQHSEWQQRIQAVLYHHGCPQRRKLMVGEGRDWLNAQPLPEAAREQVTVALAVINALERQIAPMDAQLRPYARRQTGCKALIDSYYGVGELVAVTILAELGDCQRFANSRDAVRYGGMDITVYASDRHRAPGHLSRQGPPALRWALYEAAQHARFPNSPDREYYLKAAEKLGGNRACLALARKLLKRCYHTLRELGDDALAPPTDPRPSAAPRRDAPTTDRPVTRKPTDALAA

SEQ ID NO: 404795 - protein, 355 aa, unidentified
MDTTKYVGMDVHTEAITIAVVNSAGKIVMESTLETKANTILEFFQGLRGNVQVTFEEGTWAAWLYDLLKPHVTTVVVCNPRKNALLKDGNKGDKIDARKLAKLLHLNNLKPVYHGENGIRTLKELSRSYLTITKDLGRVMNRLKALYRSWAIPCAGQQVYAPRHRSEWLSKITEAGVRRRAEYYYQQLDALQALRHEVRRDLLAESRKQTATKLLRQIPCIGPIRAALLIALIQTPHRFRTKRQLWNYSGLGVKTRDSAQYRFVKGELQRSKRPQLLRGLNENHNHDLKNIFKSAATMATISPGPFHDFYESLLVKGRKPTMARLTLARKIAAITLIVWKKGDSFDAKHLKQQAA

SEQ ID NO: 404796 - protein, 414 aa, unidentified
MVEDVVDYCAGLDVHRDTVVATVRFPEGNRRCSVTKTFGTDTAELVALGDWLISQSVTRVGLESTGVYWKPVFYQLEERIAQVWLLNAQHLKNVPGRKTDVADSAWIAQLVEHGLVRPSFVPPPQIRQLRDFTRHRRVLSEERTRMVQRLEKVLQDAGIKLTSVASTVLSKSGRAMLEAMLAGQSDPVVLAELAKGRMRSKIPQLIDALRGNFRIDHHGVLVAQILAHVDFLDGQLTDLDEQITTLVADLEPIIERVQTIPGVARRCAIGMIAEIGVDMTVFPTPAHLASWAGICPSNNASGGKARSGHTRRGPVALKTVLTEAAQAAGRTKNTYLGARYHAIRARRGTFKAVGAIRHDILIAYWHIVSEGDMTYHDLGPEWVVRRRSPEYQIAALAKQIEKLGATVTVTLPAA

SEQ ID NO: 404797 - protein, 366 aa, unidentified
MQKISTMQASESKNFQAGQLTIGLDLGDRWSFYCVLDEAGKVILEQKLSTTPEATKQIFQKIPRSRIAMETGTHSPWLSRLLTELGHEVIVAHAQKVELITKSTRKDDRHDAKTLARLARIDPELLGPVRHRSAKAQLHLTVIRARAELVRARTALVNAARGSVKSYGERLPKRGTQQVSRELGEALSSELRQVLEPLFQEIESLNERIKEYDRRIEKIAQQEHPETKLLKQVKGVGELIALTYVLTIEEPHRFRKSRDVGCFLGLQPGRRNSGESEPQMHISKAGDEYLRTLLVQGAHYILGPFGEDSDLRRWGHKLAERGGKNAKKRAIVAVARKLAVLLHRLWVSGEVYEPLRNSQKVMSAVA

SEQ ID NO: 404798 - protein, 415 aa, unidentified
MTDVIIGVDPHKLSATIEVVDHQERLLGSGRFSTDKAGYRAMRTYVKTWPRRVWAIEGANGAGRPLAQRLVEAGEGVVDVPAKLAARVRLFDTGHNRKTDALDAHSIAIVAVRTAGLRVLAPDGELEALRMLTDRRDELARLRVQTVNRLQRLLSELLPGQRKRDLSALQAKAMLATVRPRDIAGKTRRRLAAEELADLVAVDAKLKKIKAELKTAVQQRGSRLMQIHGVGPAGAARTLADVGDVARFTDRNRFASWTGTAPLDASSGEQIRHRLSRAGNRRMNHVLHVAAIVQLRNDTEGRAYYRRKLAAGKTPLEALRCLKRRLSDVVYRQLVADADTAEETGPGGHCGASLDSSAVDLPPHVDTSDQPLPGPAQPTLPQPRPVRTPTRPRQPAVRNDAQEPSRWSAPPNERP

SEQ ID NO: 404799 - protein, 413 aa, unidentified
MEILHTRCAGLDVHKKVVVATILVSDEHGQLTKETRSFETMTASLLALSDWLTGFGITHAAMESTGEYWKPIFNILEENFEILLVNAQHIKAVPGRKTDVKDSEWIADLLRYGLLKASFVPPKGQRELRDLTRFRTTFIKERATLINRVQKALEGANIKLASVVTNIEGVSGRAILDAIIEGKATPEAMAELAKGRLRTKRDALEQALAGRVQAHHRFILQELLCQIDSLDETIERFDTEIQDYCRPFDVAIEHLDTIPGVARETAEVIVSEIGVDMSRFPTANHLASWAGVAPGNYESAGKRLSGRTTKGNQALATALTQAAWAASHTKNTYLSAQYHRIASRRGRKKAIVAVAHSILIIAYHLIMDKQTYQDLGGNYFDRRNSEATAKRLVQRLEKLGYKINLERPIAVAA

SEQ ID NO: 404800 - protein, 400 aa, unidentified
MFAGVDWAENNHVACVIDADGGVIERVTVGHDKAGIARLIAVLSAAEVAGVGIERGDGPLVTALLAAGLTVFVIAPSQVKNLRGRYGSAGNKDDRFDAFVLADVVRTDRRRLTPLVPDRLDTQSLRALVRARRDLVGHRLAVANQLRAHLLIVLPGVIGLFSELDAVTSRAFIADFGSQDAVDALSVERLQRWLTGRHYHVKPAEVLLQRLREAAPGITGAPGQVLAGITQAYLAALNTVMAQVEALETQIADALAAHPDAGIFTSLPRAGTVRAARLLAEIGDCRARFPSAASLAGLAGVTPSTRQSGHTRVVAFRWAVDKQLRDAVCNFAGDTRLSNPWAAELYQQARARGKNHNHAVRILARAWLTVIFKCWTTNTAYDPTQHRALQRLLTQHQPTG

SEQ ID NO: 404801 - protein, 480 aa, unidentified
MNVKATRTKKQVNVENQAIKLLSKEELGIKIEVIKKELRSYTWRDLETNGKFAKNDKLSFITDDMLIAGCDIGSETHYIRAIDVRGRELSSGAFEFSNTSEGFANAKAWVLALAAKNDKKQIVLGLEPTGHYWFALAAWMVSNGISVVQVNPYAVKQSKEIEDNSQLKDDRKDPKLIANLVKDGNYGMPYLPEKVYADMRRLSMFRDQLTEDRIRNINRLHRELKIYFPEYMDAFGKIDGAFTLEVLKVSAIPSDITALGAEGIKNIWHNEKLRGRGYSRANEIVSYAEKSVGLTDGTDAGREAVKWYAEQILKLDEQLAVIESTLHEKCREIPYAENILEIRGVGENILAGILAEMGDISRFDDVKEIQKLSGMGLVACSSGKHKGQTKISHRGRKRLRYWLFQAAKSAVSHADEFKQLHGYYTTRTNNPLKKMQSLVVIACKILRVIYTILKTGTTYDPQKLLEDIKRPTASQAPMAA

SEQ ID NO: 404802 - protein, 389 aa, unidentified
MLLDHPSDGLTAIRTHIGAIFVSLELSRSNWLVTSLSPGKGEKMSKHSVAAGSVAELLVLFAELKRKTEVRTGRSYPIITIQEAGLDGFWLHRVLQQERIESHVVDPASIATPRRRRRAKTDRLDGETLLRALLAYKRGEPRVCAMVVAPSPEEEDRRRLCRERRTLIEERITHVNRIKGLLFAQGISGYAPMRRDRRARLEALRTGDGRELPSHLRAQIDRELDRIELLLGQIKAVEAAQDALLAAARKPASEEAAPDPVTMLLALKGMGANFAAVLWSEAFYRQFANRRQVAAYAGLAATPWQSGGIRHEQGVSKAGNPRLRTTMIQLAWLWIRHQPQSALTRWFKERSPQGRKRAIVALARKLLVALWKYVTQGVVIEGAVMKPAA

SEQ ID NO: 404803 - protein, 427 aa, unidentified
MQQIPVPVERVVGLDVHPDSFTAALVEGPNPRAAIVHKTFDKVPMAQLLSWTKKHTTPDDLIVLEASGNSFHVARSLMEIGRKVDVLESAHLGKLKEAHANNDKISAVRIAKAFLAGTTKSVWIPDAETQRRRDWNHAHRKAVEQVTRSNNSLLSYLSDNGVRADKRNLFLKRSLEQNTEWIRSAKQWSPSQWLVIEIQLHDLHHAMDTRQRWASLIAQEVAQDPILLSLVRLFGVREVVAFALGAVIGDIHRFADPSKLVSYVGLNPAFDDSGNEKWSGGIGGHGHKGLRTLLIESAHSLMRSRSPLGDWGRKLLARRGEFKLAVAAVARKLLTAVWYLLMGRFDAVQEIPKSLDIKLGVIISHIGKKSLDRLNLTRQALRDQMHQTLKTGRVYVLKPVRQSPGNQAPKENTASELEAELDRVVPA

SEQ ID NO: 404804 - protein, 434 aa, unidentified
MEDVEDEPLYLERVCGLDVAKGQVDACIRVPSGKNPKRRAQEVRTFGTTKKELLSLADWLRVHGVTDVAMEATGDYWKAPFFRLEAEGFDCVLADAKQVKHLPGRPKTDKADCVWLAKNFERGMLAACFVATEEFRTIRLHTRYRRNLTQERTREKQRVEKLLEDALIKLSCVLTDVHGVSGRAIMEALIAGQKDPRTLAELAVRRARSKIPELVEALDGADTFQEHHAFLLRKMLDRIDRHTADIDDITAQIDVLLAPYEEQPSQIDSVTGFGRRSGQDLLAEIGVDMSRFRTAAHLVSWSGFCPLMKQSAGKLIGRNARTKGNRYIGAVLGESSTAAGRTKTRLGARYRRLAKRRGKPKAQVATGNTQLKIIHCLLSTPGMPYEDLGPDYYETRMHHRRQVRNHVKSLERLGCTVTLDTTPAATHPPEEEVA

SEQ ID NO: 404805 - protein, 245 aa, unidentified
MSKASLAVCYLRQEQVQHLEVSNSKAGFQQLVKACGTHCLFVMEATGTYNLAVAYYLHEQGGQVAVLNPLVIKRFIQMHLSKGKSDRKDAQWLLRYGQQQVVKIWQPDEQVLVECRQLEQVNEQLLKQKTMVSNSLEALQQQPVISKLALKRLQQTLQALTKQVQTVEAEVLALLEQRFQTEMTLLCSIPGIGRKTAGMLLLFAGGFTRLDNYRQLIAMAGLSPREHSSGTSIRGKVRITKMAGV

SEQ ID NO: 404806 - protein, 400 aa, unidentified
MLLFFEVITMIFVGIDVAKDTHYAAVSDDSGAVLVKPFAFQNNAEGFCLLLKKLSEFDRSKLLIGLESTGIYSENLICFLYESGFRLAVINPIQTATLRKTAIRKTKTDKVDTMLIIKSLMVNSYRLYSQRDADSLKLKTLCRFHQNLKKSKARLKIQLAGYVNLVFPEFGKFFKSGIHIAASYALLKKYSSPKEIAALHTSTLCTLLSKASHGRFGKDTAEALKSLALSSVGVKNPYISIQIAQTIAQIELLEQQINDLNSAIEEAMESINSVLMTVPGIGVVNAACILGEIGDIKRFSKPCKLLAYAGLDPTVRQSGQFTAKSTRMSKRGSALLRFALINSAWQLTLVDPTFKAYYDLKRSQGLNHYGALGHVAHKLTRVIFKLLTSDTPFNPAKLVA

SEQ ID NO: 404807 - protein, 315 aa, unidentified
MDALVKVIGIDVSKAKLDCWALPAQEAWGIDNDDGGIAALLTQLRTRAPELVVLEATGGYETQAATALAAAGWRVAVVNPRQVRRFAQALNRLAKTDRIDAQVLAEFGRAVNPQVRPLPDAQTQELAALVARRNQLVQMRTQEKNRLPMTLPPLRPRVKEHVAFLDAAIARLEIDLTAKLRSSEVWCERRDLLLDVPGVGPILTCTLLAQLPELGQLNRQRIAALVGIAPFHDDSGKHQGRRTTWGGWREVRTVLYMATLAARIHNPVIRAFYQRLRGNGKTYKVAMVACMRKLLTILNSMIKHGHAWHYEIKIA

SEQ ID NO: 404808 - protein, 424 aa, unidentified
MKVTYQTCCGVDVHKSFLVATIVKTSGGIEPSYQKKRFSTFNNSILEFKQWLLDNDCHDVCMESTGKYWVPVFNLLEDEINVVIANPKWVKAVKGNKDDTKDSKWIGDLFRLGLVKGSYIPCKIVRILREYTRYRYKLVSCRSSEKNRYQNALTVCNVALDSVVSDIFGKSSTSIIDYLLEQSGTSINHEEIASKLLRSLKSKEDAVIESVEGYQMTDAQKYRMRLVRAHMDYITAEIKDVDKMIENMISSNPDFENAVQFLCTIPGVKRDSAVTIISEIGTDMSQFSSSKRLCCWAGLTPGSNESAGKKKSVRITRAGVYLKPALVQCAHAAVKSDKSPYYKKKYESLVKRRGKKRAIITIARMILTAIYQMLSTGEQWNPSDLYKIDMPEALVEKQKAKAIKQAKKLLQREGILPPDEPLAS

SEQ ID NO: 404809 - protein, 340 aa, unidentified
MKEVATVGIDIAKHVFQVHGIDAQGVVVMRRKLRRSEVSEFFQCLPPCLIGIEACATAHHWARRLMALGHEVKLMPAAYVKPYVKRQKNDAADAEAICEAVQRPTMRFVPVKSEEQQGVLMLHRARELLVRQRTMLINALRAHLAELGIATRLGPMGVKDAVALIEGMEPHLIPEIVRHALSPLCDQLRHVHTKIEEMDRQILEWHRSSALSQRLSTIPGIGPVTASAIAATITDVSSFHSGRQLAAWIGLVPRQSSSGGKERLGRITRQGDPYIRRLLVIGATAVLRFSSKSKAASTQWATDLRTRKPGKVAAVALANKMARIVWALMTKETSFRTAMS

SEQ ID NO: 404810 - protein, 343 aa, unidentified
MEKIGIDVHKVSTQVCVLTEDGEYAEWRIRTDRDALTKAFAQRSKARILLEASTESEWVARHLESLGHEVIVADPNFAPMYASRSRKVKTDKRDARTLCQACHLGAYRLAHRSSDASRLLRKHLRARQALVQARTRMISVCRALLRQEGLRAPSCGAASFAHRVRALELADQLREALEPLLQIHDQLCTQIDATDKKVERNVEADDRVQRLLTVPSVGPVTAATFIAVVDDIARFESADKLQSYLGLVPREYSSGEKQQRGHITKAGNSRLRSLLVECAWGILRRRNPKSEALEQWAARIALRRGKRIAVVALARKLAAILFAMTKHARDFEPPHLKSTAAVA

SEQ ID NO: 404811 - protein, 410 aa, unidentified
MEVVHAHCAGLDVHKDTVVACVRHMTDGKVTTTIKTFNTATQELLALSDWLSAENATHIAMEATGVYWKPVWNILSDGEFELVLGNAAHIKNVPGRKTDVKDAAWLADLMAHGLVSGSFVPDQTTQEMRDLLRTRKQLVRERTSHTQRIQKTLECANIKLDSVVSNVVGVSGRRMLEALIAGQTDPKELAAMAHGRLQATPAELEAALRGRVTAHHRFMLKLHLDQIDSFDEAIARIDKEVKDNDKNFRAAVELLKSVPGVGSLAAEVIVSEIGIEMNRFATAGNLVSWAGLCPKNDESAGKRRSNRLKAGAPWLKTTLVQCAWAAARSKGTYLHAQYVRIRARRGNQKAICAVAASILTTVYHMLKDGTFYEDPGPDYFDKRNKDQQANKLVNRLQNLGFKVTIQPAAA

SEQ ID NO: 404812 - protein, 417 aa, unidentified
MKKKLRYVGLDVHVDSITVALAEEGDEPRSLGAIPNTSESVRKLIVRLGPCEQLRVCYEAGLCGFVLYWQLQEMGVHCSVIAPSLIPQRSGERVKTDRLDALRLVRCFRAGELVAILIPTKEQEGLRDLLRALQSVKRDQIRHMHQLAKFLIRQGRRRPPGMGLLNAKYLAWARAQQFEQAAQREVLNHYVLEFEHSTRRLQELKNALDDVSEQLPKPTAALVAALQALRGVAKLLALSLVSELGSLSRFRTPRQLMSYAGVVSREHSSGNRIRRGAITKAGNAHLRRMIVEAAWHYRHQPGLRHALGKRQVGLSEDVKGIAWKAQLRLTRRYRRLVARGKPKPQVIVAVARELLGFVWAIGIQAERESKLVMVAQPSARIAHPGRRAARRPNSRLKISLDSSPGEKPLINAPSSHG

SEQ ID NO: 404813 - protein, 343 aa, unidentified
MRYFAGLDVSLEETAICVVDEAGGIVREARVASEPDALVAFFDALGMTLERVGLEACSLTAWLYQGLSEAGIPAVCIEARQAKAAMGAMPNKTDRNDARGIAQIMRTGWYRAVHVKSPSCRSWRALLTARRMVLNKRRDVENGVRALLREAGLKVGTPSRKDFPARVRELAAGDAALTGLVESLLSVIRVMTDEVARLTKRVLDEVRVEPTCRHMMTVPGVGPLTALAFRATVDRPDRFRRSRDVGAHLGLTPRRYQSGETDVQGRISRCGDKLARTALYEAAHSLLIRSAKWSSLRAWGMQVAKRRGMARARVAVARKLAVILHRMWVDKSEFRWGKQAVAA

SEQ ID NO: 404814 - protein, 399 aa, unidentified
MLAVGIDISKSKSVAAILNQDGSMHTSPFEFHHTQPELDAFIKYILNSNQSATILMENTGHYHYPVLKAFREAGLPVCMVNAYQIKKFGDMDLRKAKTDKKDAVRIARYALEKSYSLVPYTSMEQKYEDLKFLARQYNQRMLTLKTNKVFLLNLLDETMPSITNILPLTTRTPETSLSVLFINRFKSYDRIKKMGKIRFLDAFEKIARKSRNRQTKTCGLAIYEAALRNITTRGENEYTLAAQDQCLELVCESQKAADSIILKMQTLAETLPEYAVLRSMAGVGDRLGPLILAEIGDIRRFHSGKALNAYAGNDAPPYQSGTFESHNRHISKRGNAALRKYCFEVMQALKLTRPQNDPVYLFLLKKEQEGKPYNVAKMAGVNKFLRIYYARAMETLKQQ

SEQ ID NO: 404815 - protein, 408 aa, unidentified
MKRYYMGVDWGDRLHQVYVGDQEGKKVREMKVRESPQGLAEIGRWLDEKRAEGFELWAAIEKPQGRIVDFLLDHGVEVYPVNPKAVDRVRDRYRMSGSKSDAFDAYVLAEFLRTDQAHLRALRPSSEKAQELKMLSRDQRRVVRHKTRFLNQLTTTLKEYYARPLEVFEDLETEIALDFLQRYPTPAHLSALTRKQFNRFATKQHHLSKQRCEELWEKLNKPQLAVPEHVVRAKAQLVEVLIEQLRASIKAVKIYNHRVESFFASSPAAQFAKTLPGGKSGTLVAAVWAELGDAQGRWESSRHLQAEAGAVPVTKASGKSRVVHFRFACNKHLRYTMYWFSFVSLNHSEWAKLYYRGQRDNGHSHHQALRALGAKWLKIIFVMWRDHKPYDENYHLANIARQMMRQAA

SEQ ID NO: 404816 - protein, 412 aa, unidentified
MTRMSFGWYVGIDWATQAHQVIVLDAERRGLGERSVPHTGGALAELADWLTEVCGGAVDRVAVAIEVPRGTVVETLLERGFHVFAINPKQLDRFRDRYTVAGAKDDRRDAFVLATSLATDQPAFRPVRLDDPLVIQLRELARLEAELHQEEGRLTNRLRDLLHRIYPQVLQLSPAADEPWVWALLELAPTPAAARQLTRPALSKLLRAHRIRRLAADAVLAQLQVPPVWVAPGTVEAVSEHIGLLVPRVRLVHEQRARCLRRIESVLAAMTGDASGSGEHRDVEILRSLPGVGRLVAATMLAEASQLLARRDYHALRAQGGIAPVTRQSGTRARVDMRYHCNHRLRNALYHWGRVSAQCDLLSRRHYEALRRRGHSHGRAVRGLIDRLLLILMAMLRSQTSYDPTRRRAHAA

SEQ ID NO: 404817 - protein, 420 aa, unidentified
MTKKIIGIDWASNFHVCYDLEEKKSFKIGDDHKSFQKLLDDHPDYVFVIEEANNRIGEYITNVGRELFVLPPYRSKKAREYHEGSGGKNDKIDAKIIALTFNEHPEYCIKITYDDFTVLLGRLITSYDALCITHQQLCNRLNATLKKYFPEFLKEIKKYKNKSSLFLLSKYPTPGHLKRATNKEIRENAKLNGIRIKSSMIKRINKLREAPSVWIKTPYESEMIAFLSKALLNIRIQKDKIISDIKRNINKSKYKIITTMPGIGPVTGAYILRAYLSHHFTNYRQLQSYCGTSPVIDQSGKRSFCKMRRRCDHDIRDKLHNAANAATICCSWAKKYYARKKKEGKRRGHALRALANTMLKIVFSMLKNLKAYDELLFLSRRGKIPSYENYTPVSHQFSSSDYSQYPSNISNVVIEFEGLT

SEQ ID NO: 404818 - protein, 392 aa, unidentified
MYIIGIDIGKNHHEASIVSPKGRQIGHSLRFATTHKGADSLISFIFKNIGDSPCVFGMEATGHYWYPIYSFLKSKGYTIYVINPIQSDSLRKMYIRQTKNDSIDSFLIAEVIRFGQFEATSMADENILAMRQLCRYRDSVVSSRTEIKLRISTIMEQIFPEYEKQFSSLWLGTSMGILEKYLTPENIQNAPIDELFEIIKDKSHNKLTIKKSVSIKDAAADTFGIKIAQDAFAFQLKQLIDRLNFLNEQLEALDHEILSYYEKFDCYLHTIPGIGMIAAATILAEIGDIHRFKNSSALVAFAGIDPTVRQSGEFNSIHNHMSKRGSPYLRHAIFLAATTCSFHNSPLNAYYKKKREQGKHHLTATGAVARKLTTVIYAVLRDGKLYEPKSFC

SEQ ID NO: 404819 - protein, 312 aa, unidentified
MMTDDSIGIDISKDFLDAHRLSDGGAARFPNTPTGFRALSAWLGGDIPARVVFEATGPYHRRFERALSRQLPLVKVNPLQARRFAQACGTRVKTDVVDARMLASFGNAFALEPDQPTDEKQYELRELFSARGALIKDRTRLINRLQTQTLALVRRQTKARIEQLTRQLKALQKAINVRLQDCPSRARANAILRSIPGIGEVAAATILIEMPEVGTLDRKKAASLTGLAPMTQQSGKWRGKASIQGGRKQLRDALYMPALVAVKHNPDMCKKYQSMIKQGKPQKVALTAIMRKLIELANTLIKADREWVQNRA

SEQ ID NO: 404820 - protein, 385 aa, unidentified
MGSQTFVVHNYDVFAGLDVDKKSIAATFSSHQGFIGSLSMPYKVEDLLNHVRNHFADQKVAFAYEAGPTGYGLYDGLAAQGYTCVIAAPSMIPRAPGQRVKTNRLDSKALSESLRGGQLKSIHIPSAVYRELRHLTQLRDTMISEAVAMKLRIKSLLLFEGIAFPPAPAGSQWSLIVKAKLRKLPCSNTVRFKLDQLLDSLEFAEKQVFKSTKEIRRFCQTDPELSQCIKYVMTVSGVGWIVASQLLARIGDWRAIENIRQWGGFLGLVPMEHSTGDKTDRGAITHTGDGRLRSKLIQAAWSAIRKDGELREFFRSVCQRHPRKVASRVAIVAVARKLSVRISVVLMKQRPYEVRQKVHSAPLTQEETSPRGTTRRQAEPGDKNS

SEQ ID NO: 404821 - protein, 393 aa, unidentified
MICVGIDVAKDKHDCFILSSEGKVLADVFTIPNNAEGFGTLLQTIRRCTRPTDKIKVGLEATGHYSYNILGFLLDKGLPTYVINPLHTNLYRKSLSLRKTKTDRVDARTIAAMLMSDVDLKSYTDTAYHNEELKSLTRYRFDKVRERAKLKQSVSRLVTILFPELEKLVSSLHMASVYAVLGEFPGAKQIAGAHLTHLKTLLNDASKGHYGRDMATELRNAARCSVGSVMPAKSLELQHTIRLIRELDTEINDIETAIQAIMEEMQSPITTIPGIGIRMGAMILAEIGDFSRFDSPDKILAYAGMSPSTYQSGQLSLSGAYSHMEKRGSRYLRYALYNATKYVCLWDPTFEAYLAKKRAEGKHYNVALSHAAKKLVRLIYAMEKSRRPYNTAA

SEQ ID NO: 404822 - protein, 311 aa, unidentified
MIDTIRIDISKDMLDVYWLSKHKHKQFANTKTGLNAMIIWIHHTEASLIVFEATGIYGRHLEVGLATHNIPFARVNPRQARRFCEGAGQLAKTDQVDAAMLAKMGALLELKIDQAKSQSLYDLKQLATARQALIKDRTAAKARLAATSHKLLSQQIGRRLKQIERDLSQVATAIDAIVAADNDLRQRAEILMSIPGIAKVTACAILTEMPELGTLSSKQAAALAGLAPISKQSGKWRGKEHIQGGRASVRQAVYLPAVVATRFNPDMKAKYQQLVSTGKCKKTAITAVMRKLIVVANTLLRDGRKWVEIPT

SEQ ID NO: 404823 - protein, 340 aa, unidentified
MNATTYGLDVAKRVFQLYWVDAQTGEIANRRFGRDDLIAFLAQRPAGRVALEACGSAHWWARKIQALGHEVVLLHAQFIRPFVQTNKTDAADAKAIWTAVQQPGMRTVAAKTEDQQAMLSLHRMRSQLIKFRTMQVNQLRGFLYEFGVTFRTGRAAGLAEVRQRMAELEDALPASIMLNLQDQLRCINAFEDDIDQLEKRIGAWQKQEVACRAISDVPGIGRLTATALVATIGDARTFRSGREFAAFLGLVPRQSGTGGKIRLGSISKRGDPYLRTLLIHGARSVLCHTKVPTAWQKGIQERRPANVAAVALANKIARTAWAILAHDSSYEANHVSVRPA

SEQ ID NO: 404824 - protein, 421 aa, unidentified
MDVEVLRVVGFDTAEDGHEAVLLTRDGEEEMRISCRNRVSSIENAFGRLMTQLAPGERLAVVLEAPRAHGRLVFEVASRLGCDMWQVGTVALNHYRDLEGQPRKDDHWDAFLAARMAFQRMLGCHVVSNPRPEERMLARLARARSRLSSQRVELMLQFRAILLELAPVVLHRDWKGPKYDSKAMRMILKRWPAFAGLGRSKRTTITGILRSCRYKRGRETETVDDVRRLEEEVVVPAQERAVMAMEIEVFFNQVELLERSIAELEAQLMALVKQHPIATKLMEMPGIGYITAAVLVGELLPVARNTPEASSATYAGVTPLSRKSGKSLNGSRLCRGSNKHILKALFLSSVASLQRSALDAAYYDKKRADYQGHPKPHTAAILALARQRHKVIYRLLTTDARYDKERLIASHLDRQRERRCA

SEQ ID NO: 404825 - protein, 395 aa, unidentified
MDAGGRRLAKARLPEGVAGIARLHAMVGGQLGEDADEEDAGQVAVGIETDRGPWVAALTAAGYTVYAINPLQASRYRERHGVSGAKSDAGDAHVLADMVRTDSHQLRTVAGDSAQAAAVKVVTRTHKTLIWERTRHTQRLRHALRDYFPAALEAFEDLDAPDTLELLARAPDPASAARLTTAQISAALKRARRRGIAGKAERIQAVLRAAHLGQPDIVTAAYAASVRALIAVLATLNEQVKTLQGQVEAYFGQHPDAEIITSQPGLGPVLGARVLAETGDDPARYASAKARKNYAATSPITRASGKKKTVMARYVHNDRLTGALMSQAFSALQASPGARAYYDRQRARGSGHNPALRQLANRLVGILHGCLKTRTLYDESTAWPQYAAKTEKTAA

SEQ ID NO: 404826 - protein, 428 aa, unidentified
MKDLNLTRLEEFRQLKKEIRGSEEHLIVGIDVAKEKHYAYFGTATGKSLLRKLIFENSMEGFGTLLHRASAIMSQEGLTKVVYGVEPTADYHKPLGEFLISNGQTLVLVSNGAVKQNRELLDGRWDKNDTKDCANAADLISQGKVLYYDLPEPEIRDLRNLASLKKKLKVQEHSLRMRIRNHLVSQFFPELDAYYGHRESENLAIIKWCLNPPGIAAMNFEKFFQMVTTRTMGGNQQARLRSIQEAARNSVGCQITASVAFEAKMLVEHLVRIREMLGETNARIAAVCREIPGYNSLMSIPGFGPVVTAEVITALGNPNRFTSSKQVLKLAGLDLSASRSGKNSANAEAKISKKGKAPLRYVLYQAALIATTRNKNFIEYFSRLIAGRERERGIKTKMRVKVAAKMLVIAWTIWKNEEVFQGKYLLQQ

SEQ ID NO: 404827 - protein, 444 aa, unidentified
MDLEIVNPNAAGIDVGSRSHYVAIGQRSDDVREFGVCASDHEEIISWLKECGIKTVAMESTGSYWQNLFSALQIAGFEVLLANGKFTKNIKGKKTDVLDCQWIQKLHSLGLLSGSFLPDETTEQLRTLCRHRSNLMDMAASTSKKMQKYLRLMNLRLDVVVKDICGLTGLKIIETICQGETDGKILASLRHGNCHKTEAEISKALQSNGRKDYLFALKQEYQIYNVLQEKIKLCELEIKTFFEVKIKSDLNTSDKIYKKANKNAPKSIDLNQIAYKYFNGVDLMEIEGISHSTILTLMSEVGPGGLKKFATGKHFASWLRLAPNNKISGGKILSSRIPKGSNRLKTALRQAANCIGNMKNANLHNFFIRICIRKGRTAAITATARKLAIIIWNMVVKMVPYRPPNQYEFLDQKRKRKVREMRKLVAKLNILPSEIGFSNICISI

SEQ ID NO: 404828 - protein, 385 aa, unidentified
MSQFSGSTQPALDYNSTIIGAVELSEKKWVLAVQLPGVIRHSRHVLDAGGDELAAFIERLKARCAAAGRKIARVILTHEAGRDGFWLARFLGRRGIEVQVFQPSSLPVDRRARRAKTDIIDVEMLLRTLMAWLRGEPRVCSMAPIPPEADEEARRAHREREDLTGERRSIVNKIDGILATLGVKGYKALRRDRREQLTSLRQPDGDPIPQEARARIERLLDRLDLVLKLIEQVESARDAVLKKAAPADEAERMIRSLTDLRSIGPDFATLLVREAFVRQFRNRRALGGYVGLGGTPFSSGGSEREQGIGKDGNRRLRAAMVELAWMWLRWQPDSALSTWFRARVGAMGGRIKKIMIVALARKLLVALWRYVKDGVIPDGAKMKAA

SEQ ID NO: 404829 - protein, 329 aa, unidentified
MHSKIHIAPKTTCLGIDVAKAKLDVCLLHNGKRHREQFLNSVKGLRDLISWLRTRHDGPLCVVMESTGNYSMLAATTLHNVGHLVSVVNPRWIKDHARSDGRRNKTDSLDAEIIAHYGLTHDSDRWQPVSPAQNILRALLRRLAGLEEMAQMEARRAETAEAVVVKSIQRLSKHIEQETASLEAAIQAHLTENEELLSDCKRLCTIPGIGIKTARWLCAELPRHLPNSRAAAAWCGLTPRLRQSGTSVHGTSSIGSEGNRFLRKILYMPAIVARRFNARLKAFADSLESRGKSKMSALLTVEHKLLRHAFAILKNKTTYDPTHHPLKTS

SEQ ID NO: 404830 - protein, 482 aa, unidentified
MKKRNIYQNQSQEIVNLFEAAGSNEKVMCVPMDYAKKDHLVMFCNGHGDILRKPFSVKNTPEGIAHIDDQVMRSCRRRGIKKEHVFFGGEDANSFAKNFVSTLRSKGFLVANVNARDAKKQRESVQASTDRIDLMGIAAMLLNCRGNCCPAQSGTYRNLRLLVRHRRKLVQMLTEVKNRVHGIVDELFPGFLKEKNTGIVPFTQSSLYLMEDRFSPKQIRRRRRQKLSEILKRFGTAKAEKTAAKLQHYAAKVLHAPVEYVDTMQLSLAQHVKHIRCLKESVAQMDKEIALNLSQTQGAFLTSVRGIGLVLAAGVTAEIGDPNEQKPLNNLSSYAGIVPRVKQTGGTEGKTYTGPVAKRCNRILKDYVVKSAYHLGLHGPQDLMVDYKRRDASGQHADFGMGRRYLRMAMCLMRTSQVYLPPDLRKDDYTPEEKASYYLMNWPYLREKWKKVGALEEAFASNRPLGLWRLIVQELYDIKLKL

SEQ ID NO: 404831 - protein, 459 aa, unidentified
MKRKRGGGKSVRVRRAEGNLSVTRPNVAGIDLGSVEHYVACPPRDGQANVKSFGTTTPELAALADWLEAEGVVSAAMESTGVYWIPLYEVLDQRGIQVVLVDARQMKHVPGRKTDMIDCQWLQLLHSCGLLRGAFRPADAFCRLRAVVRQKATLIAEQADWLRRMQKSLDQMNVRVHRAVSDISGQTGMAMIRAIVAGERDPQKLVGLRNERCVRSPRAMIEELTGNWRDDHLFNLKEALAMYDFILQRIAAYEAEIQRTLKELTPKAHPGLAPELNNPNKKKLLRARGQESLRQALYGVSGTDMTSIDGISTSTAEVVLSELGPDLSAFPSERHFVSFLKLCPKLAISGGKPIRKRPKGTASTRVGAALRMAALTLRNSKTALGGAYRRIARLKGASVAVFAIARKLAILIYRMLRYGTAYMDEGLQVYEQRFQAARLRMCQQIANQFGYKLIQQESA

SEQ ID NO: 404832 - protein, 321 aa, unidentified
MTYVGIDVSKATFVVAYSSAKGSETKTFKNTVKGIREFIQTISPKENHCVLEATGNYSMLLVYLLSKAGFVVSMENPLKIKNFARVMLSVVKTDEIDARLIALYGERMQPAPFKLRNDSILLLKQKRTVLRQLKKQLTANTNLEGSLKVLPFIDSKSKKVLEKTIKFLQKQIKEMEEELTSLAEIEYKKQMDLLTSIKGIGATLAAALIIATGGFTYFDNAKQLTRYLGLSPTYQQSGTSINVKGHINRNGDAHLRSQLYIGAMASLRCNTECKACFERLRSNGKPGKVAIIAVANKLIRQAFAVVTQEKPYVDGYKSVKP

SEQ ID NO: 404833 - protein, 320 aa, unidentified
MQIPTNVLNVGGDVAKDEIVVACSEGSFPTRPLANQRAALLAFLKTLPAGSRIGMESTGIYHELFANIAHKLGFIVFVLNPKDARNYAKGVGMRGKTDRVDAELLARMVAHEHTKLHAWIPPTPEQYEIAQLIKRRAKLSSLRAALGMSLKGVDGFGTDLKALKKRFNQLIARIDQRVQILVDTNPDRKQHDTNLRTIYGVGPVVSAALINTLERVPLKNADAFVAFTGLDPRPDDSGHHRGKRRLSKRGPSELRRLLFLAAMSAAKTEVWHPLYEHYRERGLSSTAVFAILARRIARTAWSIYSHKTEFDPKRLISALT

SEQ ID NO: 404834 - protein, 344 aa, unidentified
MEKIIRIGMDTSKSVFQLHGVNEVEQPVVRKKLHRKEMVKFFSQLEPTVVGIEACGGSHHWARALGALGHTVKLMAPQLVKPYVKRGKNDAADAAALCEAMSRPTMRFVPVKSLDQQAALMLSGLRDGLVRRRTQLSNAIRGYATEFGLVAAKGLERIERLLARAQAADLPALAGELFGLLGRDYACLQEQVREVEARLMAWHRENEVSRRLAQAPGIGPIGATMLVMKTPDPHAFRSARDFAAWIGLTPKDHSTAGKVRLGGITRAGDEALRSVLVVGAMSVIRQARQGKGHRSPWLAGLLQRKPPKVAAVALANKMARVAWKMMATGECYDAGRSSPAPKTA

SEQ ID NO: 404835 - protein, 403 aa, unidentified
MNSVGIDISKGRSTVAVMRPFGEVVISPFEVRHTDSELSELARQLKSLDGETRVVMEATGNYHTPVAKLLHDAGLYVSVVNAKLVHGYGNNDLRRVKTDKKDSVKLANYGLDRWLALTRYVPEEDTRLLLKNCYRQYRQYSKVQTVLKNNLISLLDTVFPNVNRLFSSPAREDGSEKWVDFVAEFWHCRCVSEKSEKAFANKYQRWCRKYGYNFNEAKAHTIHAEASGHIGVMPMSETTKLLVEQAVSQLRATSTALAALKHEMQALTSMLPEYPVVMDMFGVGPTLGPQLIAEIGDVRRFYSKKALVAYAGLDAPPNDSGDVTGRHKSMSKIGASSLRRTLFLVMSVYLQTAPLDEPVYQFMDRKRAEGKPYRVYMMASANKFLRIYYATVKAYLESLEHTA

SEQ ID NO: 404836 - protein, 360 aa, unidentified
MKKNSRESEWKERPERTVGVDLGDRFSHYCVLKRDGEVIEEGRIRTNEEAFRRHWEGEPRQRIVMETGTHSPWIYRLLKGLGHQVIVANARKVRAIWENESKNDRQDAEMLAQLGYSNPRLLSPIQHRSVERQRDLNLLRARDALVRARTMLINSVRGLVKSAGGRLPKCAADYFATKVSPAVPVELVTATRPLVDQITALTVQIRGLDQEIENLAKRYPEIPILRTAPGVGPVVAAAYVLTLDRVDAVAHSRSIGAFLGLRPKQSQSGESDPEHKISKTGNIYLRRLLVQAAHYILGRFGPDSALRRWGLKLAQGGKRAKKRAVVAVARKLAVILHRMWRTGQDYQPFPERTTEAVEVA

SEQ ID NO: 404837 - protein, 412 aa, unidentified
MDIYCGIDWAEDHHDIALVDRDGKLLARRRISDDAAGLAQLLDLLAEHGDNAEDPVPAAIETPRGLLVAALRATGRTVYPINPMAAARYRDRHSVSGGKSDPGDSYVLANVLRTDLHIHRPLPEDSELAQAIAVLARAQQDAVWDRTQAHNKLRSHLREYFPGYLHAFAGKDGGIMRPEARVILAAAPTPGAAAQLTPAQLAGLLKQAGRQRGIAAEAARLHEAFQLPQLRQLPLVEDAMGRKAQALLRQLDAACTSADDLEQAATTSFNQHPDARIITSFPGLGPLTGARVLAEIGDDRSRFTDAKGLKAYAGAAPITRASGKHKSVTHRRIKNNRLNAAGYLWAFSALTASPGARTHYDRRRDTGDGHAAAQRNLFCRLLGCLHHCLTTGHEYDEITAFPATPEKLHRAA

SEQ ID NO: 404838 - protein, 349 aa, unidentified
MSSYLLARIYYYIGLDIHKRTVSYCIKAIDGALIGQGKIEADRKSLGEWVQGLPGPWVGAMEATIFTGWVYDFLKPYAVDLKVAHPEMLKAITAAKKKNDRADAEKIADLLRVNLLPECHMLSEEIRELRRVLRYRNHIVRTAVKMQNKISGLLMEVGVSYSKRRIHGRKYFHEILDRVEEIPPSVKELLKLSRSGYEMFRTFQKRLVETLRTNTLIHDRVQRLMTIPGVGEITALTWVLEIGDPGRFASIRQAVSYCGLCSAQRESAGKEQRGPISKKRNKHLQTMLIEAAKLAPHWSEQLAIVHERELKKGNRNRATLAVARRLVAYMLAVDKKQADFKLPVEFQAA

SEQ ID NO: 404839 - protein, 383 aa, unidentified
MRASTVDTLTARHCGTIFVAIELSQRSWLVTLHCPDRDKISRHKLESGDHAGLLALIDRVRERAARVLGGAPAVASCYEAGYDGFWLHRRLLVAGITNYVFDPASIAVDQRARGAKTDRIDGERMLRTLMAYLRGEPRVVRIVRVPAAEQEDARRTTRERDRLIKEQTGHTNRIKALLRLVGMAVGNPRRRDYLTWLAAQRDWQGQAVPPRMLTEIKHEHARLMLLREQLAQPQAAADLSPAAAQMAQRSERLQRLKCLGPAFSTKLTNEVLYKDFRNRREVGSYVGLAPSPWKSGGIDREQGISKAGNPRARCAAIELAWLWLRHQPGSKLTQEYRRRTLDASKRIRRIAIVALARKLIVALWRYLTTGLVPEGAVLKAVEM

SEQ ID NO: 404840 - protein, 347 aa, unidentified
MRFYNHQHQYYCGIDLHVKTMYVCILDGAGQVLVHRNVPSTPAAFLEAVAPYRTELVVAVECMFTWYWLADLCAAEHITFVLGHALAMKAIHGGKAKNDKIDSHKIAVLLRGGMLPQAYVYPAAMRSTRDLLRRRLHLVRKRGELLAHIQNTRAQYNLPAFEKRLAYPGNREGVVEHFPDPSSRKSVEVDVALIDQYDALVIDLELTIVREAKRHDGDAFHRLRSVPGIGKVLALTILYEIHDITRFDRVQEFASYARLIKCTHESAGKKLGTGGATMGNVHLKWAFSEAAVLFLRHTTEGKRLLTRLEKKHGKGKALSILAHKIGRAVYYMLARGTVFSMEKFLAA

SEQ ID NO: 404841 - protein, 409 aa, unidentified
MDVIYPRCCGLDVHKREVVACVVITDPAGRPRKAIQVFGTMTPDILALADWLAAQEVTHVAMESTGVYWKPIWNLLEEQFVLLLVNARHVKAVPGRKTDVRDCEWLADLLRHGLLTGSFVPHRPQRELRELTRYRTSLVRERTAAANRLQKTLEGANIKLASVATDILGKSGREILAALVAGETDGAELAQLAQGRLREKLPQLERALVGRVGAHQRFLVAEQLAHIDFLEAAIARVSAEIGERLQPDEDAIVRLDTIPGIGRAVAEALVAEIGTDLTRFPSPKHLASWAGLCPGNHESAGKRRGGATRKGSPWLRACLVQAAHAAARTKGTYLAAQYRRLAARRGRAKAAVAVAHSILIIAYHVLTEGTVYGDLGGNDFDERDRQAVEHRLVHRLQGLGYTVSLTPAA

SEQ ID NO: 404842 - protein, 349 aa, unidentified
MNQHNETEEKRVVTVLGIDLAKQSFQIHGVDKDGNVLIKKSLKRHQLVAFIANLPPCLIGIEACGGSNHWGRVFSQFGHTVKMMAPQFVKPYVKSNKNDAVDAEAICEAVQRPNMRFVPSKKVDQQDIQSMHRIRSQLIARRTAQVNQIRGLLLEYGIALSKGINVVRKSIPEILEDAENTLTPLFRSLLQELYDELVHLDKRIESIEHKLTVICSDCADAQRLMTIPGVGLLTATALIAAIGDISVFKSGRELAAWLGLVPKQHSTGGKPTLLGISKRGDSYLRTLLIHGGRSVVRVAHKKNDKRNQWITTIKQRCGENISSVAVANKNARIAWALLSKQENYQAASI

SEQ ID NO: 404843 - protein, 356 aa, unidentified
MSHEVKYIGMDVHKEAIVIAVLNESGKQVIESVIETKASSILQFLHGLRGELHVTWEEGCWAAWLYDLLQPQVQHIVVCNPRRNALLKEGSKSDKLDARKLAELLRSGMLRPVYHGENGLRTLRELGRSYQTIGKDLTRVMNRLKAVYRGWGIACAGTRVYVARYRKEWLSKLPQAGVRRRAELLYQQLDGLQALRREVRPEFLAESRKHKATKLLRQIPCIGPIRAARLIGLMQTPHRFRSKRQLWTYSGLGIETHDSAQYRYVGGQVQRSKKPQQIRGLNRNHNHEMKEIFKSAATRASCGRGPFHDFYQALLAKGMKPEMARLTLARKIAAITLTLWKKEERFDAEQLKTQAA

SEQ ID NO: 404844 - protein, 429 aa, unidentified
MRTESTPGARGPVFCGVDTHADSHWPCVLDWRGRKVLSRQFPADAAGYEALAGAIAAAGEPACVAMEGTSSYGAGLTRHLASLGMPVREALSPARMQRRRPGQGKCDEADAERAARAAMSGSKLGTPKSQDGWVDGVRCMLAARSGAVKARTSAINTARSLLTTAPEGLRSRFRGMGGPRLMEELPSVRAEGALGAALGALADLWGAARDAALDMERAIEASLEENCPALLAMYGCGPVSAAKLAVAAGDNPGRLRSEASFAAICGACPIPASSGKTVRHRLNRGGDRQANSALHEIARQRVMRDPETAEYAERARGRGKSDREVMRCLKRYVAREAYRALMHPHEIRRPGDASELAAARRAAKVSQVRAASILGTSEKYISMLERGQRELKPIRRAYEAWVEAGLPLDWDRRAFEAEHKMDSKKHLAK

SEQ ID NO: 404845 - protein, 384 aa, unidentified
MEKSITLHVGLDVHKDSIDIATADLGRDGEVRHVGSIGGDLASLDKALRKLTSKGHRLHVVYEAGPCGFVIWRHLTALGQACDVVAPSSIPKRSGDRIKTDRRDAMLLARLDRSGDLTAVRVPGLADEAVRDLVRAREDAVRECRNARHRLKALLLRNGTPYAGKSSWTGAHLRWLATLKLAHSAQQIGFQEYLHSITEATARIQRLEQAMRDALADWTLKPLVQALMSMRGVQLIAAMTLVAELQDFTRFESPRKLMAFVGLVPGEHSSGPKRRQGSITKAGNSAARRMLVEIAWHYQHGPRVSPIIATRQDQLPRAITDIAWAAQLRLHAKFKRLVARRLMKNKAVVAVARELAGFVWAIGCEVQASGWQGITAEPANTAVS

SEQ ID NO: 404846 - protein, 361 aa, unidentified
MSSLTTFVGLDYHQDSVQVCVLDAQGKQLVNRSVANDANVIQRVATQHGAPTRVAIEACCGAADLAEELATRRGLPVELAHPGYVARLKRSPDKTDLGDAQLLADLARVNYLPRVWLAPEGTRQLRRLVRHRTQLVRRRTDVKLRVRALLRENRLRCSEARAWTKAWLAWLTEQAKLATSDRWLLEDHLAELRSLTERIAAVERQIAAATTDDPVVAQLLDLSGVGLVTAATLRAEIGRFERFDTGKQLARFCGVTPRNASSGARQADAGLIQAGNPELRKVLVELAHRLMRMLDPKWGQLAAGMLQRGKPKNVVVAAVANRWVRWLHHELRKETTSVSESTSAGARQKGSAPSIFTVAST

SEQ ID NO: 404847 - protein, 404 aa, unidentified
MEVVYERCAGLDVHKRTVTACIITPEERKTRTFGAMTKDLLGLVDWLMERRVSHVAMESTGVYWKPVWNLLEGSFALVLANAQHIKAVPGRKTDVKDAEWIADLLRHGLVRGSYIPDRAQRELRELTRYRVSLVQERSAEVNRLQKVLEGANVKLAAVATDIAGKSGRAMLHALLEGVQDPALLANLAKGRLRSKIPLLQHALTGRFGPHQRFLVAQQLAHIDYLDEAIAEVETHIEEEMRPFEAAIEQLVSIPGVKRTVAQVLVAELGTDMSQFPTAAHAASWAKLSPGNRESAGKRLSSWTGKGNRWLRRVLLQAAHAAAREQQSYLAAQYRRLAPRRGRKRAAVAVAHSILTIAYHLLERQCTYEELGANYFDERQREATIRRAVHRIERLGYRVTLETAA

SEQ ID NO: 404848 - protein, 355 aa, unidentified
MIIVGCDYHPSFQQIAFVDTETGELNEQRLEHRESAEAFYRELASRGEKVRVGMEASGHARWFERLLAELGIELWLGDAAVIRAKRGRRKPKTDRQDAQHILHLLLKDDFPKIWVPSWENRDLRQLLWHRHRMVQARTRIMNQLQAVALNEGLRCKKRLWREKGRKQLEAIHLAPWASRRRENLLQLLDGLNPTIAELSAAIDREVDKSAEAGRLMTHPGVGPLTSLAFVLIIGSAERFQCGKQIAAYLGLVPLEDSSGERRRLGHITKQGNSLLRFLLVESAQVAARSIPQWRNQYFHLAMRRGRKIAKVAMARKLAIRLFWMMRQGWDYEQMKKFGSHAGQPGNRDGVQQSIE

SEQ ID NO: 404849 - protein, 341 aa, unidentified
MEQIITVGLDLAKHVFQVHGAGRDGTVVMRKKLRRDQLLGFFAELPRCTVAMEACGGAHHWAREIGRLGHEVKLIAPAYVKPFVKRQKNDMADAEAICEAAQRPTMRFVPVKSEAAQASALVFRTRDLLVRQRTQLINALRGHMTEFGMVVAQGPMHVARLIAIVEDPESGLPESARIVLGVLITELHALDDRVLKLDAEIVRRAKDDPVARRLMTIPGIGAITATALVALAPAAATFRRGRDFAAWLGLTPVQRSSGGKERLGRTSKMGERTLRRLLIIGASAVAGWASRKGATPGSWLASMMARKPPMLVRVALANKMARTVWALLAHGGVYRAPAVAA

SEQ ID NO: 404850 - protein, 410 aa, unidentified
MEVLHQRCAGLDVHKKTVVAAVRLVEGNKVITEVRTFATTTAGLLALADWLTQNGCTHVAMEATGVYWKPVWHVLSDGEIELILANAAHVKNVPGRKTDVSDAVWLAELLAHGLIRASFVPDGQTQELRALLRTRKQLVRERSRHIQRIHKVLEDANIKIDAELSDMLGKSGRAMLNAMVAGETDPVRLAALAHPNVKSPQAKLAEALRGRVTRHHRFLLQLHLQQIDGLDVSLGMMDSEIEANLAPFRTAVDIVSTHPGIGKLSAHAVVSEIGTDMSRFATAGHLLSWAGMCPRNDESAGRRRSNRLRKGAQWLKTTLVQCAQAAKNKKGSYYQAQYLRLRSRRGPQKAICAVAASILTAIYHMLKNGTVYQDLGAEHFNRRSKTTQTQRLVKRLEHLGYAVEIQPLAA

SEQ ID NO: 404851 - protein, 394 aa, unidentified
MASMTVPALHPQPGQLTAVVVGGIDTHRDLHMVAVVDGDGMVLGTESFSTTRAGYRALLRWMRSFGDLRRVGIEGTGSYGAGVTRHLADADVEVLEVDRPDRTDRRRRGKSDTFDAICAAQAALAGRRTSIPKSRDGRVESLRVLKLTRATAIRARTKALQLLRHHIVSAPEELRDQVRNLTRMQLIRTCATWRPDTVGFRDPVVATRISLKSLARRILELNDEIADLDALIEPLVCELAPQLLAACCIGVETAGQLLVTFGDNPARIRSEPAFAMLCGVAPLPASSGMTQRHRLNRGGDRQANRALHMIAISRLRVDERTKIYAAKKTAEGHSKLEIIRCLKRLLAREVYYLLHPDATAQQAARSQTSQLAGSSITSQPAGAQVRSTSGGSQQ

SEQ ID NO: 404852 - protein, 408 aa, unidentified
MNPLFVGIDVSSRNNVAYLMKPDGSRHSSFSVQNNLGGAKLLSERIVSALGSMQLSDVVIGLEATSIYGDSLVYALREDGSLGRFQRKIHVLNPKQVRKFKEAYPDLPKNDWVDAFVIADHLRFGRIAKEVYMDDYRYQALRTLTRARFDVIQNLTREKQRFANYLFLKCSGIAQNKDIQNTSATTIALMERFETVDELANADLNELTAFISEAGRGRFADPDATAKTVQAAAKGSYRLPRTVNDTVNQAMAVSIASMRALKEQVKVLDKAIEQQFEIIPNTLTSIPGIGKVYSAGIIAEIGDVHRFESQASVAKFAGLVWHKHQSGDFEAEHSQMIKSGNRYLRYYLLEAANSVRRCDSEFRRYYDLKFKEVNKYQHKRALALTARKLVRLVFRLLKDNRLYIQPEG

SEQ ID NO: 404853 - protein, 416 aa, unidentified
MALKIVYKICCGIDVHKTFVVACIASTNDKGVTSYESHRFSTYTSGLKTLLQWLLKRNCKDVCMESTGKYWIPVYNILENDCSIVLAHPKYVKAIRGKKTDKKDAKWIADLFKHDLVAGSFMPPADIRQLRDLMRYRFKLTCFQSSEKNRLQNCLTVSNIQLGNVVSDTFGKSAQAILDKLLENPADTSFDLEPLVYKSLKKKLPELRDAIDGYITPEQAGKLKVIKAHYESLESRKAELEELILALAAPYQQELAILQTAPGIRSDFTAIGIISEIGTNMEAFPSAKHLCSWAGLTPTNNESAGKKKSVRVSKAGCYIKPLLDLVCKCCCYQQKKHPEIRNRYLRLKKRRGHKKAIIAIARMLLTALYHMLKNGETYNAELYRQSDLPPVDREITVEQAIIIARNQGYKIKSATA

SEQ ID NO: 404854 - protein, 351 aa, unidentified
MIIIGVDYHPSDQYIAFVDTETGEYGERQLNHSDRAAEKFYRELAARGVSVRVGMEATGYSRWFERLLAELGIEVWIGDAAEIKTKRVRKQKTDREDARLLLKLLRENNFPRIWVPSAENRDLRQLLWHRHRMVQMRTRIMNQLQALAMNEGQRRKKKLWSEAGRAQLEKLPLAAWASRRRKDLLELLDRMNPSIGELTAAIEREARKWPEVLRLMTHPGVGPITALVFVLIIGDPERFQCGKQIGSYVGLIPCEDSSANKQRLGHITKQGSSLLRFLLGEAALAAARWDADWRRRYAHLALRRQRNIAKVAMARRLAVRMYWMWRNSWEYREWVKFGSHAGQLGIRHGVN

SEQ ID NO: 404855 - protein, 404 aa, unidentified
MKTYILRETKTVESQKAVRRPRPQTTLPAPAQGPILFIGLDVHNDSIAVSLAPSDSTEVRRYGIIGGEHDDVLKLAKKLQVAHPQSTLKFCYEAGPRGFALCRCLRAHGLDCILVCPSKVPRKPGDRVKTDRRDADQLARLYRAGELTGIYVPQPEDEAMRDLIRARFQVGKAQHRARQQLKMYLLRHNLRYTGQTSWSAAHLRYLAQIKMPFPVQQIVFQEMLEVITEATARLERYDREIERAVPNWRWEPVVRALMSLRGMALLHAATLVAELGDFHRFAHPSQLMAYLGLVPSEHTTGNDRQQGGITKMGNGPARRALVEAAWQYVAPARISPPLRKRQEGLPKAVTDIAWKAQLRLSHRYQHLTRVGKKKSQVAVTAVARELAGFVWAIGTLVQPRADQP

SEQ ID NO: 404856 - protein, 366 aa, unidentified
MYYAWIDAHRSYLTVAIVDASGALVRERKRVAIEDGEPLLEALEGLRPLEAVVETCPFWPWIHDTLEPTEIRFRLAHASKVEAIGKSDVKTDEIDARTLARLLSVGLVPGVYAKPEEQRDLVRKVRHRKQLVRDRTKWVNRIHGHLHAQGLEIGRERLLREEGRKWLEEEAWPWLSGEQRRVVSSYLRLIDAVTEEIREADKGIRGEARENPAALLLQTIPGIGPFRSLLLAAELTPISRFETPDKLASYAGLEPRTRTSGGVTRHGRTPGGANRWVRGELVSAIPTHVRLAPESPLTKHYERTKERIGWAKARVATARKLARVIHRMLETGEVWRHSGPVEGTDGQGEARNTHAAGSVDPDRPAN

SEQ ID NO: 404857 - protein, 427 aa, unidentified
MAYRVAGIDVHKRMLAVVVADVAVETEYVFERRLVGTTPDQLRGLAAWFIECEVEEVVMESTAQYWRPVWDALERYWQAVRRLRPDAPPTAGALHLAQAQSNHGPRGRKKDFPDAERLVKRLVAHELILSFVPDVTQRLWRTVTRRKFQLTCNRVQLRNRLECLLEEMHLKVSSLVSDLLGLSARRMLHAVGSGTTDPAAVAALGSPRLHATPDQLRDALGGCTDLHPVYRRLLTMTLDELDGLETHIHQLDEELAQLLRAHQAAVQRLAAVPGLGVDSAQQIIAEVGPTAATFATAKRLASWVGACPGHDESAGVNHSRRSPNGNRQMRRLLNQAANAAVKTKGSIFELVYRRLVVRLGHAQAIGAVAHRLCRLVWKLLHDDVAYEERGPAVTKARAQRRAAKMIRELRSLGYQVERAQAPASSPA

SEQ ID NO: 404858 - protein, 398 aa, unidentified
MSIQAQCWYAAVDWASEKHDVVITDYEGKRLGRLQVEHSGEGLARMADWLVATTNGTPDAILIAIEVPHGPVVDTLIERGFSVHSINPKQVDRFRDRFTVAGAKDDSRDCDVMASALRTDRHCFRRLATRDPTLVELREWSRMHEEHGRDRRRYVSRLREQLIRYFPAFLQLEGELDADWKLELLERAPTPRSATALTKLRVSKILERHRARGRDAGQMLAVLQQQAVTTSPGTTKAAAAHVTALLANIRLAKQLEKEAKDNIERITYQLVDPNSDELESPCDAGKPTSEQSAPLRDAAILLSFPGIGPLNLATLLTEATDGVRDRDYQALRCQGGVAPVTKQSGKSRCVVQAGPAISAIGDARRRGQLSLFGCPNLGTSRSSPTSRSSRRSTRVEEP

SEQ ID NO: 404859 - protein, 359 aa, unidentified
MQEQINKLDFRGKNIYVGIDVHKMNWVVTIVLDQISHKTFSQPPCAKILGDYLRKNFPGGNYYSAYEAGFCGFSTHRLLEKEGISNVVVNPSDIPTTDKDKRQKEDMRDSRKIAYSLKQNALRGIHIPREETEELRSLLKCRVNLVKEISRYKNRVKSLLFQYGIHIPENFVNISKHFSNTYINWLKGIQFQTASGDIALKSLISTTIALRQELLKMNREIRAVYRSQRYKELVGILTSIPSIGEYTAIVFIAFIEDMRRFYSLDDLCSYIGLIPSTNSSGENEKTGKITRRSNKVLRGLIIESAWIAARRDPALMMAYQTLCGRMKPSKAIIRVAKKLLSRMRYVWINNEKYEYAVVA

SEQ ID NO: 404860 - protein, 587 aa, unidentified
MANRLLAISRLKPGQVKTFQIRFALRQFAAGCDIDKPVGTYCVLYPTPEGFQAQVQQFANSPSGCKDALAWVLSHAEKHLPPDEKPLFIIESTGCYHELPLKTFNDATEAVVVNPHRVKAILQADGKDDIKDALTLTKLVLSFDLKNSVLAVGAQKRLRKALRMKRKLIDNRSQVSNRIGSLLTENSVPLPNVVKVMTISGRAICNAIAQGQTNRDLLMLLWQGKNLPASGLELVVQGQPFLQVLAAFAPTMSKKELARLKEIYDALFYVPDLDQSLRNLLAQQLRLLEMYDQEIDLIEQEVILAIDAYKIELPGGGQRTAQEMIDLIRTAPVFSEESARMLVAEAGLNFPEIYGNADAFARNFGLTPGNSKSAGKVVGNAMVKGNQYFKPVIVQAATAFLRRQLEQPDNGWFLWLWGRRYQQRTDAQHARIAVARKITRSVYFMCRLWQPYDDTQHRRLREDYALQTANRLANTAQELSASDLVGLDAAAKLKQASFAINQALGLQVNRYKLCPFDHDFPVDTLDLSTRVVNLLLKNDILSISQLVLRLVSGTLLSVKGLGLKSAQEIEVILISQNFVELQTSEPL

SEQ ID NO: 404861 - protein, 432 aa, unidentified
MTVIAAAIERCGGIDVGKKFLAVCIMVGPLEGEPHVEIQRFGTTVLELRRLRDWLNQESITHVAMESTGSYWKPVFNILEDAVRVYLANPQDVKNRKGHKTDNKDGWWLAHLLRHAMIQPSFIPPRAIGELRDLTRRRRRLLGNGSSEKNRVQKILEDANVKLGNVLADVFGVSGQLMLEALLEGKAGPQEIAQLAKRRARQRIPEIAAALEEHQMNAHHRRMIRYSLEHMQFIEQQIIQLDKDIAQKIRESGLETQWELLQSVPGVQANSAATILAETGTEMQQFGDEKHFSSWAGVCPGNNRSAGKNKSNHTTGGDPWLRSALTECAWAAANLKTCFLKEKFWRVATKHGGKKAPAVVAVAHTLAHVIYDVLATGQPYHEKRAPVLTPSQKERIIRHHVRRLGKLGVTVYTPRPAPRHPHKRAGSTPVSE

SEQ ID NO: 404862 - protein, 355 aa, unidentified
MIIIGVDSHPEFQQIASVDTDTGEFQEKRLVHPAEAERFYRALAGTGQKVRVGMEASGQARWFERLLAELQFELWIGDASEIQTKRARKQKTDRQDAQHILKLMLKDDFPKIWVPSWENRDLRQLLWHRHRMVQARTRIMNQLQAVALNEGLRCKKKLWRAGGRQQLESFRLAPWASRRRRDLLELLDRLTPTIAELSEAIEQEVENHPEARGLMTHPGVGALTALAFVLIIGNVERFQRGKQIASYLGLVPLEKSSGNRRRLGHITKQGSSMLRFLLVEAAQVTVRSLPEWRSQYFRLVMRRGRKTAKVAMARRLAIRLYWMWRRGLNYEQLKSSVRTQDSPEQAMVCTRTPSN

SEQ ID NO: 404863 - protein, 343 aa, unidentified
MISVIGYSKFIAMNKFNHFIGIDISKEYFDAFLLSENGNQKHNQFINSTKGIKDFLKWIKKENTLVTNTLICMEHTGMYGKLLSSVLIANDCNLWIEMSFKIIRSIGIQRGKNDKFDSERIAYYAFKNQEQVKLFKAPKKSLEKIRTMLSLREKMVVFKASLVRNVNELKSFDKEIYTLTQKYQKQTIKGINHDIRKIEKELQVFISKDDELDSLFNNITSVPGVGKITALSLICFTNEFTAFEKPRELACYCGVVPFEYTSGKSVRAKPKVHYMANKKLKKQLHMCALSSIMHNPEMKTYFNRKVEEGKNKMLVLNNIRNKLIHIICACVRENRPYQIKKAV

SEQ ID NO: 404864 - protein, 355 aa, unidentified
MNTRQAEDHFALSVIGVDIGKDVFHLVGFDPAGNLVLRRRIKRLALTAAFEALPRCVVGMEACLSAHFVSRTLRGLGFEPRIIPAIYVRPFIKGQKNDYNDAEAIAEAALRPNLKTVTEKSQDQLDLQALHRVRSRLVSRRTATINQIRAFLIEQGITVRKGLRALKSSFLTILDERQDEISPRMRAILTGLYGDWLSLDERIETVTGEIEDISRTEENCSNAMTIPGIGPLISTAMVAAIGQGDAFDRGRDFAAWIGLIPRQYSTGGRTVLGRISKRGSRYLRMLFVQAANVVLMRPHHWSAFSFGDWLVRASSRMHRNKLAIALANKLARIAWSVLRHGTPFDAPRDEVMVGV

SEQ ID NO: 404865 - protein, 317 aa, unidentified
MKKFIRIGVDLAKNYFQVHALESENGRAVTRKLKRSKMHEFFSQIEPCLIGMEACGSAHYWGRELKAMGHEVLLMPPAYTKPYVKRGKNDAVDADAICEAMSRPGMRFVPIKSPEQQATLMLHKTRELLVKQRTMSVNALRGHLSEFGIVAAKGIGRVDELLDLAESDATLPNAARASVKVLAQALEGLDKAIDDLEKEISSAHAQNEMSRLLDKVPGIGKLIASVIAASVPDPSVFKSGRDFAAWLGLTPRQNSSGGKQTLGGITKQGNRYIRKLLILGGTSLLNVLGKRKGALRDWIVGLLAKKPARLVPTIAER

SEQ ID NO: 404866 - protein, 326 aa, unidentified
MEHELHYIGIDTAKEKLDVDVLRPDGRHRTKKFANTTKGHDELVSWLKGHKIGHAHICIEATGTYMEPVAECLYDAGYIVSVINPALGKAFAQSEGLRNKTDTVDARMLAEFCRQKRPAAWEAPHPLERALRALVVRHQALTDMHTQELNRTETAREVQRPSIDAHLLWLEAELKRLEKQIKDLTDDDPDMKHRRKLLESIPGIGEKTSAVLLAYIGLKDRFAHARQFAAFAGLTPRRYESGSSVRGASRMSKAGHVSLRRALYMPAMVATSKTEWGRAFRDRLAANGKKGKVILGAMMRKLAQVAYGVLKSGVPFDASRHNPVAA

SEQ ID NO: 404867 - protein, 334 aa, unidentified
MDTISLIGIDLGKHSFHIHCQDQSGKALLRKKFTRTKLMEFLADCSPATVVMEACAGAHFMARRIADLGHEARLISPQFVRPFVKSNKNDFIDAEAICEAASRPSMRFVQPRTEAQQAMRALHRVRESLVRDKVKTTNQMQAFLLEFGISMPKGIAVIKRLSTVLAEHPLPPYLVQILLRLQAHYHYLVRQITEIETALSQEITQDDTGQRLMTIPGIGPITASVLSSQLGDGKQYACSRDFAASTGLVPRQYSTGGKTTLLGISKRGNKTLRQLLVLCARSFMQQIEHRQGKLADWVKQQLERKHSNIVACALANKLARIAWAITTQHTVFVA

SEQ ID NO: 404868 - protein, 345 aa, unidentified
MKITTGGIDLAKNALQVHGVDEHGKAVLRKQLKRKDVVRFFANLEPCLIGMEACASAHYWARKLSELGHTVRLMAPQFVKPYVKTNKNDRNDAEAICEAVGRPNMRFVPVKTVEMQAVLALHRARQGFVKARTAQANQIRGLLAEFGIVIPKGIGHIAKRLPEILEDGENGLPGMMRQLLERLGEQQKELDRQVGELERQIKLWHRQNEPSRKLEEIAGIGPITASALVASVGDAKSFKNARQVPAWLGMVPRQDSSGGKATLGRISKRGDVYLRTLLIHGARAVIAQFERKPDQPDGWLKKLLARRNKNIAAVALAAKNARIAWALLAHDRIYQSDYVAKRAAT

SEQ ID NO: 404869 - protein, 388 aa, unidentified
MHIVTDRPHAPTAIRTDLGAIFISLELSRSTWLITSLSPGGGEKMSKHTVRSGDVAGLWARFSQLKDKVQVRTGQTVPIIVIQEAGLDGFWIHRLLQDKRVESYVVDPASIATSRRRRRAKTDKIDGEALVRALLAYKRGEPRVCAMVRAPTPQEEDRRRICRERKTLTAERVEHVNRIKGLLFAQGITDYEPLSRKRRERLEELRTGDGRPLPEHLKAQIGRELDRLELTLQQIKSVETERDAMLSPSDEGTRAPGAMLQNLKGIGAEFAGVLWSEGLFRSFSNRRQVAAYAGLAPTPWRSGSVAHEQGVSKAGNPRLRTTMIQLAWLWVRHQPRSILTLWFHQRVALNGGRARKVLIVALARKLLIAFWKYVTIGVVLEGAEMTAS

SEQ ID NO: 404870 - protein, 417 aa, unidentified
MEVISTMDVVYRCCAGLDVHKQTVECAVRRLTENGTVQVEIRQFGTMTDDLLEMVNWLKARGVTHVAMESTGVFWKPIYNILEGHCTVLLVNARHVKQVPGRKTDARDCQWLAQLLQYGLLRGSFIAPRWQRDLRDLTRERTQLTDEQTRVANRIHKVLEDANIKLGSVATDILGVSGRDILERLMAGEEDVDALAERARGRLRGKIPELRRALRGRLSEHHRFQLRLNWDHLQRLQELIERLDERIRESSQPYHPQIEQLDKVVGIDQTTAESIVAEVGVDMKVFPSDGHLSAWAGICSGNNESAGKRRSGRTPKGNRWLRRTLTLAAQAAGHAKDSFLASRFRRLAARRGKKRACVAVAHSILKIVYHLLKDGRSYQDLGGSYFDRLDPQRLTRYLVRRLERLGLKVTLEPATAP

SEQ ID NO: 404871 - protein, 440 aa, unidentified
MKDPLELPVINPKAAGVDVGSEKFFASIGGGEPKVFLTVTEQMKELCEYFKAQGVSSVAMEATGVYWINLYGALEEAGMKVVVVDGRQCRNFPGRKTDMKDCQWLAVLHAHGLLTSGFVPPADIRRLRDYIRLRGDLVSMAAQHVQHMQKALDRLNVKIHVVISDITGVSGMRIIDAILAGERDVEKLAKLCDEQILKSKRSSVVQSLRGIWREEHLFALRLALDSYQSYQRQIAQCDQKIAEALKKMSDGRATPELGRSKELRHNAIVLEDLQKQMAQIYGKDLTKLPCINESTAAMLLAEIGNDMSRWKDWRHFGSWLALAPCCAQSGRSRRRVKRYLTPAGRLLCRAVQCMAMGKHTWLASFYRRIRAKRGSKVAIKAAAYKLAKLIYLVLTQGWEYVEQGIANYEQRVREMQFRALQKLAKNLDFVLVPRAFVSAR

SEQ ID NO: 404872 - protein, 420 aa, unidentified
MKEIKPQKGKIVNQKTLVVTIDIGKTMNMGYWRTPGGSAEAKPFEFANNGLGFNKFWGHISKAMKTHNLKETVVGFESTGAYGAPLVHFLKKKKVNLVQVNPMHTKRLKELQGNSPNKTDKKDPKVIADIIELGHALTVVVPEGAAADLRRTTQARERTIQRRTALYNQLQDLVFLVFPEFLQVIKDVKTKSALYLLREYPTPQRIIKCGVEDLGGKLRKISRGKLGAKCAQELNKAAWQSAGIQQGRESILLEISESIDLIVACERFIAELEARMSDYLNQIPYSKFILSIKGVGEITTAGLIGEVGDFGKFRTISELEKLAGLDLFEISSGKHKGKRRISKRGRSLMRKILYFAALNVVRKGGVLHQWYQGALVRGMLKIKALVAVSRKLLGIIFALVRDHSEYIVGYSKTQGLKIAV

SEQ ID NO: 404873 - protein, 346 aa, unidentified
MRKDIKVLGIDLAKNIFQIHGTNAHGKKVLSKRLKRKELPEFIGNLTPCLIGIEACTGAHYWARTFENYGHEVKMMAPQFVKPYVMSNKNDKNDARGIAEAVTRPTMKFVSHKTLAQQDLLLIHRARSLSMNNRTAQANQIRGLLADYGVVIEQGIYHIRKLPVILDENKEQLSEEALAIFTNLHEQFKHHDEQIAYYDKRIDSHVAGDANCQALLEIEGVGPLSASGLVATIGDPGVFKNGRELAAWLGLVPKQCSSGNKIRLGSITKRGDNYIRSLLIHGARCALKYAKNKNDRKSQWACSLLTRMAFNKAAVALANKHARIIWAILTTGESYRKDEVALCTAA

SEQ ID NO: 404874 - protein, 349 aa, unidentified
MRNVTIGMDLGDTKHVITILDEEGVIARSCSLDNVRASIVKFFKKYQGSTVAIEAGTHSPWISREIKALGCNVLVGNPRKLRSIWNSDDKADVHDSEMLARIARFDPELLYPIAHRSKQAQTDLELLKARDMLVKTRTSLINHVRGAVKSFGERLPKCSAESFHKQCRDFLPENLKAVLQVIIETIEHITDRIKEFGRRIEKISREVYPETELLKAIGGVGPLTALAYVLVLEEPGRVSKGRQVGKFLGLTPRRDQSGETDKQLRITKAGNRFLRRLLVGAAQYILGPFGPDCNLRRFGLRLAERGGKSAKKRAVVAVARKLAVLMHRLWRNGEVYDPFYKSAMIRNAA

SEQ ID NO: 404875 - protein, 366 aa, unidentified
MKKNSTVAAERKQIFKQARLTIGLDLGDRTSYYCILDEAGNVIWERNLPTTSNGIRQAFGRIPRWRIALETGTHSPWVSRQLSELGHEVIVAHARNVRLIGESSRKDDQVDARTLARLARIDPGLLGPVRHRSAQAQIHLTVIRARAVLVSTRTALVNAARGLTKSYGERLNKCGTEQMNRDSSKGLSQELREALDPLLRGIESLNERIAEYNGRIEQIAKEVHPEVARLKQVKGVGTLIALTYVLTLDDPQRFRRSRDAGCFLGLRPGRRNSGKSEPQLHISKEGDRYLRTLMVQGAHYVLGPFGQDSDLRRWGLKLAERGGKNAKKRAVVAVARKLAVLLHKLWVSGEVYEPLRNNHKVVSAVA

SEQ ID NO: 404876 - protein, 412 aa, unidentified
MEAIVERCCGIDVHKKNIVVCLAVGKPHEKPLTTIKTFSTMTRDLLACRDWLVSEGCTHAVVESTGVYWKPVFNILEDSIEVILANARDVKNVPGRKTDVKDCEWLAQLLRHGLVKGSFIPPKPIRELRDLTRYREKLTQQRSSEINRLQKFLEDANIKLSSVVTDINGVSSQNMIRHLIQDDMNPQEMALLAKGRLRNKIEELEKSLEGYLTDHHRLILRLTLQMIASYDEAIEKLNTEIDKRMEPFQQKAEGIQAIPGVKKKFTERIIAEIGVDMSRFPSDAHLSSWAGSSPGNNESAGKRRSGRVTQGNKWLKSALIEAAWAASRTKGTYLSARYHRLAARRGKKRAALAVGHTILIMVYHIIKEQRTYKELGADYFDRLNEQHLVRRLTSRIKALGYEVEVNKLPIAA

SEQ ID NO: 404877 - protein, 398 aa, unidentified
MTESSDYESVQVFIGVDVGKDTHHAVAINRSGKRLFDKALPNDENKLRSLISGLKQHGQILLVVDQPATIGALPVAVARSEGVLVGYLPGLAMRRIADLHAGEAKTDARDAAIIAEAARTLPHALRTLKLADEQIAELSMLCGFDDDLAAQTTQASNRIRGLLTQIHPALERVLGPRLDHPAVLDLLQRYPSPEKLASLGEKKLAAQLCKLAPRLGKRLAADIAQALAEQTVVVPGTNAAAVVLPRLALQLITLRKQRDEVALEVEQRVLAHPLYPVLTSMPGVGVRTAARLLTEVACRAFASAAHLAAYAGLAPVTRRSGSSIRGEHPSRRGNKALKRALFLSAFAALRDPLSRAYYTRKMSQGKRHNQALIALARRRCDVLFAMMRDGTFYTPQAS

SEQ ID NO: 404878 - protein, 412 aa, unidentified
MSLALPEALFFTGIDWAAEIHAVCVVDAAGAIVAEFTIEHSADGIAVLIRRLARFGDPADVPVAIERPNGRLVDLLLEAGHPVVPVKPNAIKTWRDGEVLSGAKSDAGDAAVIAEYLRLRQHKLKVAVPYSDETLALRTVVRSRGDLVDMRVAATNQLPALLEAHWPGAKAVFADVESPIALEFLTRFPTPAAARHLGEKRMGAFCVKHGYSGRRSAAELLARLRAVPAGTNREALTEALRDAVLALVTVLKAANAAVKDLDRSAVAHLGEHPDGKIFTSLPRSGQINAAQMLAEWGDCRQAYEHPDAVAALAGCTPVTKESGKHRAVHFRWACNKGFRRAMTTFADNSRHASPWAAGIYAAARASGKDHPHAVRVLARAWIRVIWRCWLDGAPYDPVKHGAAAAITDTIAA

SEQ ID NO: 404879 - protein, 348 aa, unidentified
MHMLADLVELVIGVDTHKDTHTAAVVQAVSGAMLEQVTVPASPAGYRKLLALADRQRGRRVWAIEGTGGYGAGLTRFLAAHAEQVLELDRPKRVARRHGAKSDPLDAIRAAREALGRDQLAQPRATGPRAALSVRLAARRSAVQAATDAQRQLHALVVAAPDSLRGRLRGLTTPRLVATCGRLRQQTTWDVETAATAVSLRALARRIQLLNTEIADHTQAITTLVRAWRPDLLSRTGVGPIVAAIVLCAWSHAGRCRTDAAFAMLGGAAPIPASSGQTVRVRLNRSGDRQLNQALHLVVLTRLRYDPATRAYAQRRRAEGKTNREIRRCLVRYVARQLYRLLEAQPAL

SEQ ID NO: 404880 - protein, 334 aa, unidentified
MKKTKQDVAHFIGIDVGAEELHLVRRSAGQSSKPQRCFNRPRDCQQLAKKLAKVPNLIVCLEATGVYHQDLALALHDAGVRVMVLNPKVAHNFAKVLRRDSKTDPLDADTLAQYAERMPFEPWARPSTSALQLRALSRRIETLTSEKAAAKNQLHALGFSAETPKSVLNDVRKGIKQLEQRIAALSKEALALISTQPALERPYQLLLSVKGIAQTSAIALLGELLMLPGGLTHKQWVKFAGLYPRQGDSGKSVHKEPRLSKAGNRYIRKAMYMPALSAKAHDPYVKAYFEHLIAAGKKPLQAVCAVMRKLLHAIHGMFKNNQPFDNTRFYALTA

SEQ ID NO: 404881 - protein, 455 aa, unidentified
MEKTSSTVFEEMRRNVAGIDLALRAEHYVCGPRQEDGECEIASFGTTTAELHRMVSWLKERYVESVAMESTSVYWIAATDLLEANGIEVVLVDAREVRMVPGRKSDVQDCQWLQKLHSCGLLRGAFRPPEAVAAVRSILREKDSLTAMRTQSIQQMQKSLDQMNIRVHHAVSDIDGKTGTAIIKAIVEGERNPSTLAALRDKHCKKSEREIAGHLTGTWREEHLFNLGQAFKTLKFLDERIAEYDLKVSQMFASLAADDGASDNQPPPSMPCRKLSAKERVNSAEKANVQKFMGFDMTLIPGIGYDTAAVIASELGAKFDRFPDERHFASYMGLAPSLGKSAGKNVSQKKRCKNTSRAGRALRMAASTLYRSHTELGAFFRNVARHTDKKTAVKATARRMAHMIYRGVKYGKEYLDCGAAAYEARLRIRTVKTVNKLIKSFHINTSEIAGTLVHV

SEQ ID NO: 404882 - protein, 349 aa, unidentified
MEQVITIGLDIAKHVFHAHGADAAGHVLFRKRLTRAKLLGFLAAQAPCIVAMEACAGSHYWGREIGKLGHAVRLIPPAYVKPFVKRQKNDAADAEAICEAAQRPSMRFVPVKDEEQQANGVVFRARDLLVRQRTQCINALRGHLSEYGYVFRQGITHAATLIAHVEDPNCSLPESARAILRLLIDTFSALEVQIKELDGEINRRSRADPAARRLMTIPGVGPIAATAITALVPAAGSFRAGRDFAAWLGLTPLQKSTGGKQRLGAISKRGERTIRRLLILGASAVIRQASARGAGRILAGADAGPQAKDASHRRLGQQDGSRRLGSVSQRRHLPSSGRGSLKLIAVVRA

SEQ ID NO: 404883 - protein, 419 aa, unidentified
MKNGNTKKVKRINEETLLVTIDMGKVKHTGYYRFPDGAEGEIFEFSNSRNGFEEMWQRVCCAKRSRNLTDIVVGFESTGPYAEPLLHCLRKRNVRLVQVNPFHTKRLKELQGNSPSKTDQKDPKVIADIIELGHSLTVIIPEGAAAELRRLTQARERGIQRRSMLMSQVQDLVFLIFPEFMPVMKDITIRSTQYLLKHYPRPQDVVETGVTLLTQSLKKVSRGKLGKQRAEALYQAAEGSVGLREGQESIVIEIKELISAIENIESYVKELGKHMRKHLEEIPYSRFILSIKGIGEITTAGLIGEIGDFRGYRTIAEVIKHAGLDLFEISSGKHKGKRRISKRGRPLLRKLLFFASINVVRKGGILHQQYLHHLDKGMPKVKALIAISRKLLSIIFALVRDHSVYIAQYSEIQQLKEAA

SEQ ID NO: 404884 - protein, 360 aa, unidentified
MNNQSLSNHQTIVGGVDTHKDLHFVAIVDAYDRVLSSNSFPTTRQGYKSMLDWMQSFGEVKRIGIECTGTYGVGLLRYLQQFDIEILEVTAPDKTIRRKRGKDDTIDAENAAHAAFAGIRTVTPKTRDGMVESLRVLKMCRKTAIAARRIALQMIQMNIISAPEAIRESLRTMTRMQLIRTLAAWRPDMSGYRDISTAYKIALKSLARRYLELHDEIADLDVMISVIVDELAPELITGKAIGYESAAQLLITIGDNPERLKSEASFAALCGVNPIPASSGKVNRHRLNRGGDRAANSALHIIAIGRLRIDARTKEYVEKRLTQGHTKLEALRCLKRYIAREVYYTLRKRNNLINSAQIAA

SEQ ID NO: 404885 - protein, 422 aa, unidentified
MSNVQSTQSPAVLVAIDIAKLRHDVLIEAPGWKRRKRLILLNTAVEFRRLADYLHSFQMPVHIVFEATGNYHRPLAHFLLSQGFHLELIPSLAVARTREAMHNSWDKNDPKDAQVLLHLLRTGVTQRYHDPLVNRTHDFQELSLTYAQVSLEKTRMQHRLLTHYLPLYFPEIERHYHASRSLWLLDFLQAFPTPATITSLDREKFVQSAWPIIGRKVAKRRLLEDIYHRAQCSIGLPVAEDSEAVAMFRVLLNEMSRLCKLRQELEQRADGYLGNNDDFRRLKQIPGIGPILALTILAEAGDLRRFRHHRQFLKFCGLDLATQQSGQFRGATKLSKYGNARLRCAFWMAGTIAVKQRENSFREKFERYIRKDPLSADRKRMAYVAVAAKMARVVYGIIKSGTEYRCFHEAAAPSGRAVSVGP

SEQ ID NO: 404886 - protein, 408 aa, unidentified
MNPLYVGIDVSSKSNVVYFMLPDGSKHSNFSVANSHTGSSQLVKRILSAMTSCSLDSVLIGLEATSVYGDNLVYFLREDAALARFNSKIHVLNLKQVSKFKEAYNDLPKNDFIDSFVIADCLRFGKINKEVYIGDYRYKALQNLTRARYFAVSNFIKEKQRFMNILFKKYSTMTQEKVFSDTFSTTALAVYDEFESAEALADMDLHELTAFIMEKGKNRFPNPNAVAKAIQKAARSSYRLPKTVNDSVNQVLSISITSIKALEAQIKEFDKAIATQMELLPNVLISIPGIGPVFSAGIMAEIGDINRFHNQAQLAKYAGLAWKQHQSGDFEAQTTRLINSGNRFLKYYLCEAAFSLVRCYKEYSDFYHLKYKEVNRYQHKRVFALTARKFVRLVFRLLKDNRLYTSAE

SEQ ID NO: 404887 - protein, 345 aa, unidentified
MEEISVIGIDLAKNVFELCALSASGAVVLTKRLKRAAFIKFMEAEAPRCLIGMEACGGAHHWGRWFLERNFEVKLMAPKPVKAYRQGVHKNDARDARAIAEAASRSHVAAVRVKSERSQSVQALVRIRTRRVRQMVQTANQLRGLLNEFGIVLPRGHSRMLAAIAKFKEAGAIPAEAAPLVEALGAELVQQCRAVKEATEQLNARVDDEESCTRLMSIPSIGPINAASLSVALEMPSEFANGRAFAAHLCLVPRQSKSAESQTLLGVGRQSANETRRHLVLAAQSLLIRITRMKQLPDDKLLCWAQAMLKRKNRNVAAVAVAAKLARIAWALEARGKTYAPRLST

SEQ ID NO: 404888 - protein, 337 aa, unidentified
MERQYVGIDLHRRSSTIYRMSGDGEMLGCDKIPSQPTELAAVMAEAGDAPEVVLESTYGWYWAADLLQELGAKVHLAHALGNNWGNRRVKNDERDAKDLSAMLRLGRLSEGWIAPPQTRELRELVRYRFRLVCHRSSCKAQIHGVMAKNGILPVRGSLWGPSGSAQLDALVLPEAYAMRIASLRSLIDIYDTEVRRLDAHVHRELKDDRGYQAILRLHGVGKVIAAIFVAEIGDISRFDSPEKLCSWTGLTPKHRESDEKIQHGRITKQGSPLMRWAAIEAISKNHGGDKLRADFVRISERRGKYKARVAVARKLLTLVYYGLRDGEVRCLERQEAA

SEQ ID NO: 404889 - protein, 323 aa, unidentified
MNKDIKYFGIDISYLVFDVTDSDGNYHQFKNNVTGFKKFVKLLDINSHCVMEATGYYHYQLAYYLLESGIKVSVENPLAVKRFIQMKLSKIKTDKSDSKLICEYARQVELKLWQGNSKHQIECLQITRLLSVYTKQSTMLKNKLHGEAVLGNPSKVVVGSLKRSLKHVQKEIKTLEEKLLILVKQVHQDVLTRIKSIPGIGNKTALMLVVLTDGLDRFTSASELCSYAGLTPVIRQSGSSVKGRPRISKIGNQKLRNLLFMCSFTACKYNKACRDIYERIVAKGKSKKLALIAVCNKLLKQVFAIAKSGLIYDHTYRSTLVKN

SEQ ID NO: 404890 - protein, 331 aa, unidentified
MEQVTTIGVDIAKRVFQVHGVDASGAVVLRRQLKRHQVAGFFAKLPGCLVGLEACGTAHHWARQLRRLGHDVRLVPAAYAKAYVHRNKTDPADAAAICEAVSRPSMRFVPIKSEAEQAVASVHRVRERLIGQRTMLLNGLRAQMSEFGIIAAQGAGHVREMLERVDELPALLRPALLGVVRLLAGLEREIAAIERQLLEWHRNSELSRRLASIPGLGPITSSALAARVLQPQRFASARDFSAWLGLVPRQNSSGGKIRLGGISKKGDGYLRRLLVNGAQALLNSKRAKTDPWIARLLATKPRLVAAVALANKLARIAWAVMVTNTTFRVAA

SEQ ID NO: 404891 - protein, 420 aa, unidentified
MAYAVAGRAAGLFKRRHRPLGHRFRWLGGWILLVLPERTQVAWMSLVMGIDQHRAQITAEWLDTETGEVSRARVRPADRAGVRRFLARFAGQQLEVALEATTGWRFLVEELRAVGAVVHLAEPAETAALRGNKRRAKSDRADARHHRELLLAERLPESWIPPDHILDVRARVRLRHTLIEQHTEWQQRIQAVLYHHGCRQRRRLMEGDGREWLASQALSETAREQITVAMAIIDALDVQLAPLTKELCAWARRQAGCKALIDAYYGIGELCAVTVIAELGDCRRFQNSRDAVRYSGLDVTVYQSDRHRAPGHLSRQGPPALRWALYEAAQVARRPGSPDRGYYEQAAERLGGNRACVALARKLLKRCYHTLRELGDDALTPPVERPQPGPGSAAARRASSGSPRSLEPTTTNQRADVLAA

SEQ ID NO: 404892 - protein, 356 aa, unidentified
MITIGVDPHKRVNEAFAIDEHGLEISRWRGVNDAGGWVAVEGWASQLGTERQFGIEGAGGLGRGLAQHLVSDQQLVYEVNPRWTAMVRVRARRTDKSDRLDARAVALFVRQEAPDLPKVGCEDETVALDVLTSERDSAVGEATRLRNQIHALLQQLDPHYGDLVPSMKTPSGVERLKAFEVAVDVGAAQQARAGSVRRLALRLELALSQARELGEQIKALAAVHFTPLTEICGVNFLTAGALAGILGPGQRFSTDAELAKFAGVAPIEASSAERVRHRLNRGGNRRLNAILYRIVLTQSRHSIQARAYLDRRMSEGRTRKEAVRALKRYVVRAIFRLWTQCVGHAPGRPTPRSSCA

SEQ ID NO: 404893 - protein, 471 aa, unidentified
MSTTPPSSKQRRGVRIVSKTKVPLPPQLKRVNLDAAGIDIGAEEHWAAVPPGRDTEGQDVRRFGAFTGELCALADWLKQCGIQAVAMESTGVYWIPLYELLMERGFEVRLVDARQAKNVPGRKTDVLDCQWLQELHTYGLLRGAFRPVDQVCILRSYLRQRSMLVAYASHHIQHMQKALEQMNVKLSHVVSDITGLTGMGIIKAILSGERDPVKLAKLRDPRCKSSEATVARALEGHYREEHLFALRQAVELVEFYQQQMTACDRQIEACLQQFEEKSSETPVTTRRRKRRRGGIAFDACSYLYRMTGVDLTRIDSIEANTALTVISEIGLDMSRWPTEKHFGSWLGLAPGSKVSGGKRLSGRTKPSANRAAAALRLAAQSLNQSQSALGAYFRRLKARLGAPKALTAAAYKLARIVYRMLKYGAGYVDQGEAAYEERYRDRLLRNLKRRAAELGFQLTAVELNSGQAALT

SEQ ID NO: 404894 - protein, 340 aa, unidentified
MPLYVGLDLHSNNNFLALINKQGKRVDQKKLSNDRELILEVLRSYRSKIVGVVVESTYNWYWLVDALMEAGYAVHLANPSAIQQYSGLKHADDQHDAFWLAEMLRLGILPEGYIYPKEERPVRDLLRKRRHLVRLRTSLIISLQNIISRNCSVSCKVNEVKRLQEDRVSPLLESNEDLALAGQASKETIDYLTRKIRRIEAAIVKRIELRDAYRYLLTLWGVGKILALTIMLETGSMDRFAKVGNYVSYCRKVPSRWISNEKAKGKGNKKNGNKYLAWAFSEAAEFARRQHAEARAYYNRKMQKTNFMVAHSALAHKLARAAYYIMKDQVPFMPEKLFSR

SEQ ID NO: 404895 - protein, 407 aa, unidentified
MTFFVGLDWAATTHAVCVLDETGTVRWRGSIPHSAPGLAELVQRLDHFGPPATLSVALERPSGLVVDTLLDAGFVVVPIHPNVVKATRPRYTTAGGKSDLGDAYLLADLLRTDGHRFRPLQPLADETRALRALVRGRDDLVAQRVALANQLRALLERFWPGAAAIFADVDSPIALTFLTRYPTPQSAERLGERRLAQFLRRHAYCGRRSAAELLTRLRSAPGGRTGEAESEASGELVQAWVAILTPLVAQIQQLSAAITAALDQHPDGPLIQSFPRSGQINAAQLLAELGDDRGRFLTPDQLAAEAGAAPVTRASGKHRAVVFRWACNKHLRRALTTFADNSRHASTWAAAVYTRARARGCDHPHAIRILARAWVRVLWRCWQDRRPYDATQHRAAQSLLAFQPVGG

SEQ ID NO: 404896 - protein, 425 aa, unidentified
MNLLILKGVPMALKIVYKICCGIDVHKTFVVACIASTNDKGVTSYESHRFSTYTSGLKTLLQWLLNRNCKDVCMESTGKYWIPVYNILENDCSIVLAHPKYVKAIRGKKTDKKDAKWIADLFKHDLVVGSFMPPADIRQLRDLMRYRFKLTCFQSSEKNRLQNCLTVSNIQLGNVVSDTFGKSAQAILDKLLENPADTSLDLEPLIYKSLKKKLPELRDAIDGYITPEQVVKLKVIKAHYESLESRKAELEELILAIAAPYQQELAILQTAPGIRSDFTAIGIISEIGTNMEAFPSAKHLCSWAGLTPTNNESAGKKKSVRVSKAGCYIKPLLVQCANAVVTSKKHPEIRNRYLRLKKRRGHKKAIIAIARMLLTALYHMLKNGENYNAELYRKSDLPPADWEITVEQAIIIARNQGYKIKSATA

SEQ ID NO: 404897 - protein, 428 aa, unidentified
MEKREEILKFEELKASLRRGDPRILVGIDIAKDFHVARVEHSDGRVLVEKMGVENSRPGFDSFRERIEELRGRLGLEVVLAFEPSGGYQKLLGDFLIQSGYLVVQVSGVVANRNRQTLGDAWLKTDPQDARNLVDLLRQGKILRYATGAGFMEEAKRLVQCDRMLMYESNRLKVRIRNRLLPVAFPELEGFFPKDASHPDLLAILRHCPSAKEIATLSEEEFVGLVSGGGRIGGRIRRFRSIYQTAQKSIGMKVEDGFRWEARWVADRLQTVVRERKELQTEISRILSPYLGYRLVQTIPGVGKLLGAIFVVEIGDPWGYRHWRQVMKLSGLNLAVVESGKFSGTPRISRQGKGILRWAAYQAAVVATTKDPLFHQIYQKALENRATQKGAKKRALVKVAAKILKIAFAILRDQIKYAPELASPGQAL

SEQ ID NO: 404898 - protein, 354 aa, unidentified
MIIIGADYHPAFQQIAFVDTETGELQERRLEHPEGAEKFYRELAAQGKRVRVGMEASGHARWFERLLAELNVELWIGDAAEIHRKRERKQKTDRQDAQHILRLLLKDDFPRIWVPSWENRDLRQLMWHRHRMVQARTRMMNQLQAVALNEGLRCKKKLFREAGRKQLQAFRLAPWASRRRQDLLELLDRLNPTIAELTQAIEQEVEKCPEAQRLLTHPGVGPLTALAFVLIIERADRFQCGKQIASYLGLVPLEDSSGNRRRLGHITKQGNSLLRFLLVEAGQVTVRSLPEWRSKYVHLTMRRGRKIAKVAMARKLAVRLYWMMRKGWDYEQLKKFGSYAGQPGNRHGVKSNTE

SEQ ID NO: 404899 - protein, 432 aa, unidentified
MEQSTRFIGMDVHKATIAVAVTATGEAGKATAYGTVPNTTAALEKLVARLRQAGSGALKFCYEAGPCGYGIHRTLTRLGEDCMVVAPSMIPRKSGERQKNDKRDAASLAVLHRGGLLTAVWVPNAAHEAMRDLIRARQAAVRAVRAARQQLSAFLLRHERIYRDGRTAWTKAHRGWLADQSFTHPAQQIVLEESIEAVRLGEQRQNRVEGHLRAQIPTWSLFPLVQNLCALRGLDMIGGAGVAAAIGDPSRFASAPDFMAYLGLVPSEHSSGPKRRVGAITKAGDVHARTLLIEAAHAYRYPARVARHKLAAIDAVPEAVRAIAWKAQTRLCQRYRHMMAKGKPRQVVVTAIARELAGFVWSIACITSDPPIKSSAVTTASDEVCPTAAVSRAPHRRPLKGKVRRVKRSPTSQCRAGRGQPDGMIEHHHSGD

SEQ ID NO: 404900 - protein, 356 aa, unidentified
MSQKLDTSPAVIGIDIGKNSFHIVGQNRRGAIVLRQKWSRGQVETRLANLPPCLIGMEACVGAHHLSRKLQALGHQARLMPAKYVRPYSRGQKNDYRDAEAIAEAVQRPTMKFVATKTVDQLDLQALHRVRDRLVSQRTGIINQIRAFLLERGIAVRQGLRFLRLELPGILATRADVLSPRMMRVLEDLSGDWRRLDTRIEGLTSEIEALARQDQHCERLMTVPGVGPIISSAMVAAIGTGDVFSKGRDFGAWLGLVPKQLSTGDRTILGSISKRGNRYLRVLFVQAAWVVLVKLGPEKWERYGLKSWIEAAKKRLHHNVLAIALANKLARIAWAVLNKGRAFACIKTDAMASCPA

SEQ ID NO: 404901 - protein, 370 aa, unidentified
MKFEVTKNQLTLKSRTMSKVKELNFDGKTIYCGLDVHKTNWKVNIGMDKMELGGFSQNPDPEELIRHLKKNYPGAEVKVVYEAGFCGFGIQRSLKALGIDCIVVNAADVPSSDKERKRKNDKRDARKLRRELSEGELKHGIYVPDIEMEQARTLVRERHRLVQDQSRCKSRIWHMLMFSGIQLGLEQKRWSAKLVKELETLDCPTSLKMALNLALEEYKQIRSIIKQATLAIRKMALEPPFAALQPYLQSIDGIGLIGGMVIQTEIQDIKRFRTLDSLCDYAGYVPDISSTNDKDVIKGITHRRNEFLRETIIESSWILIRKDPAMLMKYQEYAKRMNSNKAIIRIGKHLLSRIRYVWNNKTQYVKGVVG

SEQ ID NO: 404902 - protein, 408 aa, unidentified
MQVTFGIDVSKSNSTICELIGESKNELTITNDRPGFIQLLHELAAFSKHPQIIFEATGVYSRRLQAFLEDYGYEYVVLNPLKAKKEMNMGLRYNKTDKTDAYHLALIQRLYRHPVNQSESQTYKQLNALSRFYDQLTSDLVIAKNRLHQALQSTFPEIENLFSIARGKNYWQIVARYPHCDLVRKDDKKQIINWLMKLKGIAFNHAQRTTDKLIELAHLAYPVVSCSDIEVQQAQYYARRLLNLSNQRQRIITKMVKLAKTLPNHDLENLESIPGFAQTTAVRVLAELGDLRRFSNPNKINAFIGIDPGRYQSGEMDSNLSITKHGNAVARKLLYRAIGQIDNAAKTNPCHIADYYESKKLSSQTKGFKKIAIASIHKLIRTIYALIINDQPYDYNVATHNQKDFSRN

SEQ ID NO: 404903 - protein, 332 aa, unidentified
MHYVGVDLHKRTSWFCVLDSKGHKVKSKNVNNDTAELTQFIKNIPQPFEIAVESTYNWYFFVDLVQSYAERIYLANSFSLKAFAKQHKKNDKIDAHLIADVLCKGFLPKVVIADKETRQIRELLRSRLALVADRSRNMLRLGSLIDKLGIPSGRLYPSVGNMDHHIVSENIPVIYRAIIEDYKERIVYLTKKLYQLRKQIMDIVQKDQDMKNLETIPGIGFFSAALIKSEIMDIKRFATFKRLCAYSGLAPKTFSSANKLYHGPINKNRRKLLQWILLENVYKFIKALPDKNEKFEKIKQAKNHNTAKVVLARDFLRIIYKILKEKRTFYYV

SEQ ID NO: 404904 - protein, 415 aa, unidentified
MELLVERCAALGVHKDTVMACVRVPGGAGGRQQQVQQFRTFTAELRRLRDWLVAQGVTQVAMEATGVYWRPVWHVLEEVAGLELLLVNAHHVKNLPGRKTDVADAAWLAQLLECGLLRGSFVPPPVIARLRDLTRYRKKLVEDRAKETQRIQKLLEDAGIKLDSVVSDVLGTLAREMLEALIAGVRDVEVLADKARTRMRPKIPELRLALEGRFAEHHAVMGRMHLDHIDYLGKAIDRLDQEVDREMVPFAEQARRLRTIPGVGVRTAQVIVAEIGIDMGRFPTAAHLASWAGMCPGNNESAGKRRSGKARQGDAALRTALCEAAWAAAHTNNTYLAAQFRRLQRRFGKKGETKAIFAVGHTMLVIIWHLLAGGCDYQELGYDYFDRRNETEAHKRRLVRQLEKLGHRVILEPAA

SEQ ID NO: 404905 - protein, 412 aa, unidentified
MKRALRRVGIDWGSESHQVCRIDGEEEPKQRSFPHTGEGLSALVAFVVEGEMDPEQIAIAIEVNHGAVVEALLAAGLRVYSINPKLLDRLRDRFSMAGAKDDRRDAFVLASCVESDAQAFRRIEAGNEENSRLQAATRLREDLKSEQRANANRLWNALREYRPALLTLCPGADEPWLWVLIEKAPSPSEGAKLTRARIGAVLKKHRIRRLTAEEVRTVLRGDVLSLRPIYIESHVARVLVLIERLKLAQAQIVTIEKQIKTALAERVKSEEQTERRDLTILLSLPGFGSLTVATALGESGDAFDRRDYNALRSGSGAAPVTKQSGGTRYVVMRQVCQPRLRVALHLSALQAIRIDPKFRDLYLRARARGQTIGRAIRNIVDRLLFLAIQLLKKNQLYDIQLRQLAPGMATAS

SEQ ID NO: 404906 - protein, 372 aa, unidentified
MNYNTVYVGMDVHKESFTLCSCKYEDEKASHYQRTPASYKNVLRYLAFLRTIYGEYTRFVCGYEAGCLGYSLYHQLENFNVECVILAPTTMLEQRSKRRIKTDKRDAEIIARSLAQHNYSPVHIPTETDNQTKEFIRMRDDHKAELKKIKQQILSFCLRQGYQYDGSGNWTAKHVKWLRSLKPAGLYKEILDEYLLTYTILTDKLNRLDQRIEELASKEEYKESVSKLTCFLGIKTHTALSVIVEVGDFQRFVSARKFAGYLGLVPGQHSSGDDRNGLGITKAGNTHVRRLLVESAQSYTRGKIGYKSRVLRSRQAGNSPQVINYADRANERLRRRYYKMVLKDGKKYNIAKTAIARELACFIWGMMTDNIY

SEQ ID NO: 404907 - protein, 424 aa, unidentified
MNDTLNKKIEQVTDKTLIVGVDIGSEIHYARAILVRGYEVSRRPYRFENTDEGFSGFITWAYNLAVENKLTKIMIAVEPTGHYWFNFAEYLKKYDVQLVLVAPQHVKHSKEMDDNTQEKNDRKDPLVIAKLVPEGRYLIPYIPEGIYADLRTAFNRRCELVDAQVRNSNRMNRWFDVYFPEYKTVYDRTDAISGLAVLKRAPLPADILTLKEDGIYQIWREEHIRSVGINRARKIIAAAENSVGVKGGAAARWEFWQLMEEHDLIVRQLHDIMLLIEEYLRQIPGADRLLKVPGAGIVTVAGFLAEVGDIKRFTDPKQIQKLAGLAVVENSSGKRKGMPGISRRGRGRLRWILFQLARTMVKFNKEMRTYHLYYTTRKENPLKKMQSIMAIAARIARIFFGILKNGTEYDPAIVMKDFNKAVAA

SEQ ID NO: 404908 - protein, 346 aa, unidentified
MKQISRIGMDTSKYIFVLHGVDAAEQVVLRKKLSRKQVLEFFAKLPPTVIGMEACGASQYWARELGKLGHEVKLMAPQLVKPYVTRNKNDWRDAEGLCEAMSRPSMRFVPVKSAEQQAALMLTGIRDGLIARRTQLTNTIRGHAAEYGLIAPKGLDKIEPLLAQIAQDQTLPTMARELFTVLGRERARLEGELEAIEAKLMAWHRGDAMGRRLAKIPSVGPIVATALVMKTPDPRAFRSGRHFAAWLGLTPKDHSTAGKTRLGKITRAGDEDLRRLLVIGATAVIQQARRGRGHHSHWLLALIKRKPPKLAAVALANKVARIAWKLMATGESYDAARMNATAAVAA

SEQ ID NO: 404909 - protein, 343 aa, unidentified
MQMITTIGLDIAKSVFQVHGVDAGGQVIVRRQLKRRSVLAFFQKLPPCLVGIEACASSHHWSRELQALGHTVRLIPPAYVKPYVKRQKNDAADAEAICEAVTRANMRFVPTKTPEQQSGLVLHRARHLFIRQQTAVINAIRAHLAEFGIVAPVGRHGVEELLNVVADPNDNRVPEIARACVAALGAQLRRMKEQILEFDRLIRAWHRSNEMSMRLEEAPGVGPVLATALVAAVADPKSFRSGRNFSAWIGIVPKQHSSGGKNRLGNISKQGDRYLRGLFVAGALSVIRYAKIHGTKHRPWLTALLARRPTKVAAIALANKIARMVWAMMARGERYKEPVALAR

SEQ ID NO: 404910 - protein, 423 aa, unidentified
MSRYQSVELTRVESARINDRVENQRTIVGIDIAKTVQYATVMVPDNDVVVTVRWRHPAQTPLFVAFLEELPASSVEVVLEPTGTYGDALRHQLSAGGFDVYRINPKRVHDAAEVFDGVPSSHDAKAANLLCVLRQMGVGELWPLGDEQRRTLTAAISVMELYDEQYRRNVNRLEALLARHWPELSSLLELTSLTLPALLAQFGSPDGVNAAPEEAAALMATVSKGNMRQPKITAIIASAETTVGQPAVAGERESIMAIASDTLRARKSLRQARTAVEQLSEQVPAAAAMGRVVGKSSGAVLVSKLGDPKDFPSARSYEKTAGANLKERSSGQHQGRLSLTKRGSPVVRKYLYLAVLRLIQHDPVIRAWYLKKVERDGGVKMKALVAVMRKLVRALWHVGRGAPFDSTKLYETKRLGLPAVSKT

SEQ ID NO: 404911 - protein, 407 aa, unidentified
MEVLYPRCAGLDVHAGSITACMRIATGATVTYEQRKTPTTTRGLRQLAEWLTEHGCTHVAMESTGVYWKPVWHVLEEHFTLILANAMHIRNVPGRKSDMNDARWIADLLAHGLIRSSFVPPAPIQELRDLTRTRRQLVHEAARHVLRIQKTLEDANLKLTQVMSDITGVSGRAILNALIAGETDPGTLADLTRGRLKATRAELVDALHGRVTDHHRFMIKLHLSQLDALDAAIASLEARIGAALGPFRPAVSLLTTMPGLSETTAHVLVAEVGTDMTRFPTVGHLISWAGLCPRLDESAGNRRSTRTRQSAPWLKPTLVNAAWAASRKKDSYLRAQFLRIKSRRGAKKAILAVASSMLTAAYFMLRNGVEYQDLGPRYFADRDKTRLTKRLLQRLQDLGVTVEVKAA

SEQ ID NO: 404912 - protein, 346 aa, unidentified
MKIIGCDFHPSFQQIAVFETETGEMTEHKLVNGNGEAERFYRSLPVGSLIGIEACGNSHWFIDLLGRLGHQVWVGDAAKIRASYVRKQKTDRRDAAHILSLLLENRFPKLWTPSRQERDQRQLLIHRHKLVQMRARLKNSLQHLALNQGVQKKQKLWSKAGQKVLIQLPLEGWTAVRRQDCRELLAQLDERIARLDKAAEQAAEAHPQASLLMQQKGVGPITALAFALTIGDVSRFQHSNQVASYLGLIPSEHTSSSKRKLGSITKQGNGFLRMLLVESAQSVTRFDPQFHKHYVHLCRNKHKAVAKVAAARKLAVRLYWVLRTDQNSQNAVPIESSPRVPLVGGS

SEQ ID NO: 404913 - protein, 370 aa, unidentified
MDQVLERVAGLDVHKKTVTVCVRVPGPRGGRRQEVRTFGTTVPELLALREWLETQGVTHAAMESTGVYWKPVFYILEESVTCILANAAHIARVPGRKTDVQDCVWIAQLVEHGLVRGSFVPPAPIRDLRDLTRARKALSQDRTRAANRLHKVLEDAGIKLASVANDVLGVSGRAMLEALVGGTTDPTVLADLARGKLRAKLPALRHALAGRFRPHHAFLVGQLLAQLDFLEEAMAQVSAQIDEVITPFQAELERLDAIPGVNRRTAEVFIAEVGVDMRQFPTAKHLASWAGLCPGNRQSAGKHKVSPTRRGDRWLRTALVEAALSASSACADARLRRWSVRAIAFPWNRPPEDRSTAAHHDASLRPRGIS

SEQ ID NO: 404914 - protein, 351 aa, unidentified
MNNITVGMDLGDKEHVVCVLDISGNVIHSSVIDNSQKSILRFFKKYKGATVAFEAGTHSPWISRQLLSIGCNVLVGNPRKLRAIWESDNKTDIRDAEMLARIARFDPDLLYPIQHKGKQAQIDMTMLHARETLVKNRSNLINHMRGSVKSLGGRIPSCSTESFHKQAVAHMPEELQNIFQSMLGIIEQLTVEIKAFDKQIEQISTERYPETGLLRAIKGVGPLTSLAFVLTLEDPARFNKSRQVGKYLGLTPRLDQSGENDKQLRITKAGSSFLRKLLVNASQYILGPFGEDCNLQRFGLRLASRGGKNAKRRAVVAVARKLSVLLHRLWHYGEIYNPLYKRASQPLAKAA

SEQ ID NO: 404915 - protein, 363 aa, unidentified
MNKISKSKSDGKAYSKNNLVMRRYVGMDLHKNYLQIAVVDEKGIVLKNSKIENNIKKIGKFFDQIDHSKIKNHDTNRTTTKVVMESSCVWYDIYEYLTEEKNLNVKLSNPIKTRAIASAKIKTDKLDAVKLANLLRGDYISECYVPDKRIIELRELVRHRSALVRMRTKLKNKIHGILLMKGIKITDHHPFSIGYIEQLKKLNNYRIDTYIRIFTNIDDEIRIISKNIISFTRQNATTKLLMTIPGINYYSALLVMSEIGDINRFPDSSHLCSYAGLVPSTHSSGGITHHGPITKTGSKYLRWIMIECTRSHVRYNKISNVTTFYNKLVKNKGSSSKAIVAASSKLLKIVYWVMKENIEYNYN

SEQ ID NO: 404916 - protein, 385 aa, unidentified
MDINKTLVCRFEVEGSIAGYKELLDRVKRETRGDGKAVFALEPTGHYWMVLGQFFEDHNQSYVLIHPLVVARSREVNRLNKGKTDPMDARLIGELACDRLITRTQIPGDYWATIRLYAREYMDREKGIVREKNRISSYLETTLREFVDIFPNPVCMTGRACIRALTHFREALKGDLEHFEKHVRSQFPGKRLVTSRIRRLHEMLMRGDALGLRAGRQAMVYRIINSLDRLEIYEGQQEAVRQALVDFYEKSEYKQYLDSIWGTNATANALVLGFMGDPALYDSPASLVKLAGSEPVPDESGKFKGGTSISHRGRSFLRKAGDRVSFILEKKNCVFRSFMNHLMHRQKNRLTKRQARIACINKYFRIVWVLCNHRVPFNPALAQML

SEQ ID NO: 404917 - protein, 458 aa, unidentified
MKASVLSLSRSKQEPKQNTTKMKPTYDDDMMKKTEAEGDFAALIGLDWGSQEHALCLHDCTTGRCETSTLEHTPEAIAQWAAALQTRFPDGKIALCLEQARGPLISALMAYPFLVLYPVNPATTARYRQAFKTSRAKSDPSDAQVCLELLLHHRDKLMQWQPDEPQTRELARLLEHRRGAVDLRTLLTNMLRDALKSYYPQALALAGQDLFAPLASQFLLKWPSLQELQKARKETVRKFYYAHNCRRLDVINKRLEGIAQMTPLSHDAALLEPAKVHVTMLARQLLQLSTALKDYDSRIERLFARHADAFIWKSFPGAGPTLAPRLCCAFGSERSRYQSAAAIQQYSGIAPVTERSGKNQHWVHRRWGRPHFVHQSFFEYANQSALQCAWAKLFLQEQMAKGKTHPSAVRALAFKWQRIMFVCWRDRVAYDETTYLNSLKRRGSPLAHKLELILAKAA

SEQ ID NO: 404918 - protein, 339 aa, unidentified
MSEHTTFVGLDVHKETIAVACAEHGTGEPMYWGQISNRPETLIGTVRKLQERHGTLLVGYEAGPCGYALYRQLQTLGIACVVVAPSLIPTKPGDRVKTDRRDALKLARLLRSGDLTPAWIPDEQHEGLRDVTRAREDAVEDLQRARQRLSKLLLRLDLRPPSGIKPWTKRYREWLHHVKIGTAAQDTVLEEYRLAISQAEDRVARLEAAMREVAAESPRASLIAALQAMRGVQALTAITVVAELGDLTRFRSPRQLMSYAGLVPREDSSGRRQQRGRITKTGNAHLRRVGVESAWHYRHAPHVGKALKRRQQGLPETIVQIAYRAGTAAPPLWAVAQDG

SEQ ID NO: 404919 - protein, 429 aa, unidentified
MCEKEEIMNKTDYLYIGMDIHKEIHTAVLMTYMEEYVGEIEISNNLKGFQRLTAYVEKCQTKKDLKHLTPLYGLEDVTHYGRNLAIYLLDRDYTVKEVNSALSYMERTSYPSVKKNDMWDSQCICAVLMRRYETLPDADPKDYYWVMKQLVHRRNALVRTKSALLQQFHEQIQYDYPSYKQFFHEVECNTSIAFFEHYPSGQALEGITVEELAEFLRIPSHNACSTKRAEKILELVETDAVKAHDYQFGRDFIIQSMMRNIRFILEELERIDKLQKKLVKEVGYHLETLPGVSTVTACALIGQIGDISRFKSADKLANYAGVALLCFSSGGKGKNVQNKNQGNRELYSVLYLLAMQQVHVNTKGQARNPVLRAYFESKVSAGKTKIQALLCIMRRLVNIIYSMMKNNTVYRMPELPATEVTDEKEQMIS

SEQ ID NO: 404920 - protein, 343 aa, unidentified
MDHFAGLDVSVKETSVCIVDDTGRIVREVKVASEPEALLQVLRNPAYRFKRIGLEAGPLSQWLFSALAEAGLPVICVETRQMQAVLKAQINKTDRNDARGIAQMMRVGLYRPVHVKTLRSQKLRMLLTHRKLLQSKAIAIENDLRGTLRNFGLKVGMIGTVKFEARIKELVENFPDLAVLVEPLLIVRQVLREQFGILHRRLLAIVRDDEVCRRLMTTPGVGPVVALTYRATVDVPARFRNSKAVGAVFGLTPSKYQSGEIDRSGRISRCGDEMMRMMLYEAAQVMLLRSAKWSWLKAWAMKIARHRGMKKAIVALARRLAVIMHRIWVDGTEFRWTREVAVA

SEQ ID NO: 404921 - protein, 348 aa, unidentified
MLADELDFVIGVDTHRDEHALALVACPSGARVQERLIGADERGYAAALAFAVERAAGRRAWAIEGTGSYGKGLARYLTQRDERVHEVERPKRQGGRARAKSDRLDALRAARSLIAAEKPALPRAAGLRESLRVLLQVRTSAVAARRVALNQLRALLVTCPEPLRAELRSLTRARLLRRCRELEPERTDDPELRSTLQALRLLAARVESLTAETRELEQELRAEAEQIAPALLAERGIGPIGAAQALVSWSHKGRFRSEAAFARLAGAPPIPASSGKTVRHRLDRGGDRKLNNVLHQIVITRRKHDPRTIAYIERRRREGKSEREAIRSLKRYLARHLFRLLETTTTPT

SEQ ID NO: 404922 - protein, 348 aa, unidentified
MNALHYIGFDVHKKSISFCVKTAAGEIVEEGSLLAQRGALREWAAARPQPWRGALEATLFSSWIYDTLKPYGEQLEMAHPAKMKAISAGKKKSDTLDARTIADLVRCNLLPACYVAPPRIRELRRLLRYRSLVVSEAVRMKNKMAGLLMETGALYVKEKLHRKKYFASLLEDLEEVPESVIDLLRLSRGALEMFESTQKQLVRELLADPELAQRVERLMTIPAVGEITALTWALEVGDPQRFRSSSDAMSYCGLTAALKSSAGKQQRGPISKQRNRWLQTTLIEAAKLAPRWNPQLAALHARELERGHRNRATLAVARKLVAYLLAVDKSRQPFQVRAPSEAPTQKAA

SEQ ID NO: 404923 - protein, 337 aa, unidentified
MAKSGAMRLVGVDVSAQWVDVSRSAADEAVVTRQCPNTTRGQRALARWLTQGGRRARVVLEATGRYSLDVALRLQRTRGIEVMVINPRVSKDFAGACGQRALTDRTAAERLREFATRMPFQPWTPPSAAALALQALMRRVAALIAMRVQERNRLHALKATAALPAVLRADVRQHIRILTRQITRLEHEARALVEPAAALRAGYQHLRSIKGIGQRSALLILGEVAVLPAALSVRQWVAQAGLDPRPVRSGSSVHPPVRISKRGNVYLRRALFMPALVAVRRNPPVQRFASTLAAKGKAPLQVLVAVMRKLLHAIYGMLKTDTDFDGEKFRRSVPTAA

SEQ ID NO: 404924 - protein, 344 aa, unidentified
MPSYSLTPAGFPGPNPNSRLGRRARIGKKGSAMDGTINVGIDVSKHWLDVVVGAGAASQRFDNTDAGHDTLIKAIGTRTIERIVLEATGGLERPIVVALAAAGLPVVVVNPRHIRNFARATGRLAKTDAIDAEVLTQFAQAVAPAVRPIASAEHHAFKELVARRRQLVMMHTAESNRLKQAHDNVVRRSIRAVLKVIKRQINDTERKLDDVIERSPIWQVRKDLLTSVPGVGDQTARTLIAELPELGNCSRQQIAALVGVAPINRDSGMMRGRRTTWGGRTNVRSALYMATLVATRHNPVIRDHYQHLQEAGKRKKLALVACMRKLLTILNAMLRNGEPWREIT

SEQ ID NO: 404925 - protein, 354 aa, unidentified
MSQTLNTAIVVIGIDIGKNSFHVVGHDMRGAIVLRQKWSRGQVEAGLANIPPCLIGMEACVGAHHLSRKLASLGHDARLMPAKYVRPYSKGQKNDFNDAEAIAEAVQRPTMKFVATKTAEQLDLQALHRVRERLVSQRTGIINQIRAFMLERGIAVRQGIGFLRTELPTILATRTDALSPRMLRVIEELAGDWRRLDQRIDGLSGEIEALARQDQACSRLMTVPGIGPIISSAMVAAIGTGDVFSKGRDFGAWLGLVPKQISTGDRTILGKISRRGNRYLRVLFVQAAWVVLVRIKNWERYGLKSWIEAAKRRLHHNVLAIALANKLARIAWAVLAKGRAFELTRTDDAGARPA

SEQ ID NO: 404926 - protein, 332 aa, unidentified
MQILYERCAGLDVHKRSVVACALFPENGQPRKERQTFSTMTPDLVRLRDWLKDHDCSCVAMESTGVFWKPIYNLLEEHFQVLVVNAQHIKTVPGRKTDVKDAEWIADLLQHGLLRPSFIPPVWQRSLRDLTRSRATLTQERTRVIARLQKGLEDANIKLASVVSDVMGTSAQHMLHAFPGIKRRIAEILLAEIGPDMSRFPSAAHLASWAGMCPGNRESAGKRLSGKTRKGSQWLRTALVEAAHAASHCKECYLSDQYHHIAFRRGKKRAAVALGHTLLIIIYHVITDEKGYVELGGDYLDQLDRQGKEKRLIHQLEKLGLQVSVTPIAPVA

SEQ ID NO: 404927 - protein, 426 aa, unidentified
MKYSQNSKIMQITENTLVIGVDVANEVHYARVFDYRGIEFGRPVKFSNNYSGFSVFAEWVRQLKKEHQKEHVMVGMEPTGHYWFAFAKHLKDHRIKIVLVNPFHVKRSKELDDNNPTKNDRKDPKTIAMLVKDGRYMEPYIPEGIYSELRNAMDTRWRLVKGLNSIRNRVKRWISIYFPEFNQVFGDWEGKAALMVLKEFPTPARVLELGIGGIVTTWRKEISRAVGVKRAKRLVEAAKATVGMRQGLRAAENELKCLLEEYGVLMRQYERTMVLIEELTFQVPGVEEMLKIKGVGLITAAGFIAEVGDITRFEHPRQVQKLGGLSLKENSSGKHKGKATISKRGRKRLRAILFQGIMPLVARNEEFRELHRYYTTMPQNPLKKKQSLILLCCKLIRIFFALITKKTAYDPQKMMKDIKRSALQAA

SEQ ID NO: 404928 - protein, 369 aa, unidentified
MADRITYVGLDVHKEGIVVAVAAGDLRGEVREYGRIANTATALDRLLHKLGGAGVSLRFCYEAGPCGYGIQRRLTALGHECVVVAPSLIPRRAGDRIKTDRRDAASLAKLHRAGELTAVWVPDARHEAMRDLVRARLDAVHSLRRVRQQLSGFLLRQGRHYGRPAWTKLHRRWLAGLKFEHAVHHIVLEDYIAAVEAAETRRNRLTTQIEAMLPDWTLAPVVAALQTMRGMALVNAATLIAELGDLSRFTNPRQLMAYLGLVPSEHSSGASVKRGGITKAGNGAARRLLIEAAWSYRFPARISRELLLRQEGQSKPIRDIAWKGQVRLCTRYRKLARTGKPANVVTTAIARELAGFIWAIARQVTVTPG

SEQ ID NO: 404929 - protein, 404 aa, unidentified
MSVQVAPVTSSTIVVAVDVGKTSAMLSVTDSARKRVFGPVEFAMTRSDLVTTVHRVSAVVPPSAPVKVGIEAAGHYHRPVLDYRWPAGWEVLEFNPAHVAEQRRVAGRRQVKTDAIDLEAITELVLAGRGRLITDREVIIGELAAWATHRSRRVATRTATKNQLLGQLDRAFPGLTLALPDVLGTKIGRLVAAEFADPARLSALGVSRLIRFAAARDIQLRRPVAERLVTAAADALPTRDGVVARRVLATDLVLLADLDTQIEDAERELAALLPVSPYATLTSVPGWGAVRVSNYAAALGDPDRWPGPRQIYRASGLSPMQYESAGKRRDGKISREGSVALRRALIDLGMGLWLSEPAAKAYAAELKSRGKHGGIIACALAHRATRIAYALVRHHTTYDRARWT

SEQ ID NO: 404930 - protein, 405 aa, unidentified
MKHVIAFDVSMGKSYMVIYNGLKKCIYEAEIKHTKPEFEKLRARIDELIEGYEDQPYIVFESTGVYSQQLERFMRDNYYSYCLLNPLEAKKQCDALRIHKTDKSDAHQLALTHFSVSRRETNGTDTLFQQLKSLSRFYSELDDELSVTRSRMHKVIQLTFPELEKLFTIKSDLFLNIVQLFPHPDFVQGLSKTIIKNKIRANTNKNISGAMAEKKAIALIEASQQSYPAVSSSDVLCEQLRSYARRYQELLQQKEQCINDMVQLAEKRSEYKVILSFPGIGPNTAVRLIAEIGDIHRFENNKQLNAYAGIDIRRFQSGKTYFKDKINKRGNKHLRKLLFLIIQNMIKQRRYGRNHIVEYYDKLKTQPYNKCHKVASIACVNKLLKNIFFLISHNMNYDYGLASKS

SEQ ID NO: 404931 - protein, 338 aa, unidentified
MVVIGIDPHKGSHTAVAIDEDEHKLDEVLVRADKRQLERLLAWAEAFEKRSWAVESANGLGALLSQQLVGAGEEVFDVPPTLSSRVRVLGTGKSQKNDPNDALSVAVAALRSSRLRLVVADDHVAVLRLLWNRHKNLTSLHTQAVCRLHALLAVIVPGGMRRRLSADQASAVLAGIRPRTTAEGARKSQARDLVGDVRRLDTQMKASKRTIAEAVAAVPTTLGELSGVGPIATAIILAHSGDIRRFPDADAYASYNATAPIEASSGPRKRHRLNPRGNRQLNHAMHIIAFSQLSHASPGRDYFERKIAEGKTQKEAVRALKRQISNAVYRQMMRDAQR

SEQ ID NO: 404932 - protein, 429 aa, unidentified
MKIIYPRVCGIDVHKKFIVAVICISESVEPIYLKKRFSTFHNDLIRFREWLIQNDCQNVCMESTGKYYIPVYNVLESHISNIVVANPKWVRAVKGEKDDDKDAKWIADLFKFGIVRSSFIPQKDFRILRELTRYRYKLVNMRSSEKNRFQNALTSGNCKLDMVFTDVFGKSASNIIDLILSDNPYTDEDILSKVHKKCKASPDMILDSVNGTDLTPVQKARIKLVNDHIKQLSSNIQKLDKLIDLMIEPYEDYISFLCQIPGVSRNSAIIILSEIGIDMNQFTTSRRITSWAGLTPSSNQSAGKKKSVRISRAGVYLKPCLVEVAHAAVKDKSHPYYANKFNKISKRRGQKRAYIAIARKILVAAYHMLLTGEIWNPADLSEVETPVEQRIKYVKNNLKSDIKQLLDIGLTVEELTLMIQQNANIIATQ

SEQ ID NO: 404933 - protein, 314 aa, unidentified
METMYYIGLDVHKKTISYCVKDGSGRIYAEGSLPATRLHLDIWMKTLPKPWTAAMEATIFTAWIYDHLKPHAAAVKVAHPLMLRAIAVAKKKNDRIDASKIANCLRCDFLPECYMASTEIRERRRTLRYRNLLVRQTVQMKNKIAVLLMEAGVSYNKQKLHKVGYFRELLATNQDINEGLKPLLRLCREMVVRLGKTESALVRSLERDSLLVERVERLMTIPAVGPITALTWALEVGDVQRFSSIKKAISYCGLCGAEKSSANITLRTPLSKQRNKHLQTILIEAAKMAPRNSPELELAHWHIHRKQHVIGAVG

SEQ ID NO: 404934 - protein, 392 aa, unidentified
MATSIFQENFPAVAGLQFAADTAAFIIGLDLHAKTTAICVVDPHIPEKPIFQRKRLSNTELLTVLNRFAGKKVIACEAAFGWHVLQDALAEVAAVTFIPLDARKTSAWIKSSGIKNDAIDAQVLCHACIHGGIRSLAVYAQSKTAREGSKLARYREHLVRCRSAIKNHIRSFERDYGANPFTGEIPEKSSLASFIDLDFKKALLESNERIAHIETLMKAMSKSDPIISLLQTIPGIGPITAFALRHKIDVIHRFKDASHLSSYLGFGVRERQSGDTLVKGKIAKTGDPLLRKLLIQGAQVIRFSRSDIVSLYFPSLGQAALMKNRKHANKVVVALARKNLTLVYHLWKRQMPFNLEIYKARRQEALTVGATISATPMCLSSSAAELDPTLVR

SEQ ID NO: 404935 - protein, 332 aa, unidentified
MNYELFVGIDISKLTIDVVSFTKKSLEKPIHHVFKNSYDGFAQMLEWLSLYDVAMDRVLFCCEHTGIYICPLACFMDANGLPIWIENGLHIKRSIGLRRGKSDKADALAIASYAFSNQHKVRHYRFPSATTSKLRHMLAHREQLVRHQTSLKCTCSELKGFDRENAEYCISDSQEILAIYAERIKRIDAELAAVIGGDQELNAQFNLVQSVHGIGKQTAFFILIHTEAFAAFTDHRKFASYCGIAPFPYSSGTSVRGRNRVSSLANKKLKALLTMCALNTIKKDNEFKRYYDRKKAEGKNSMCVLNVIKNKLLSRAFAAVKRGTPYLAQLAA

SEQ ID NO: 404936 - protein, 387 aa, unidentified
MTQPERPAPRCTAPDYDTTIIGALEMSEKKWVLAVQLPGVKRHTRHVSGASGEELATLIERLKARCAASGHPIARVISTHEAGREGFWLARFLTRRGVEVHVMQPSSLPVDRRARRAKTDVIDVEMLLRTLMAWLRDEPRVCSMVPIPDEADEEARRAHREREDLVRERRSILNKIDAILATLGVKGYRGLRSDRREQLALLRQPDGDPVPQAAQIRIERLLDRLELTLRQIKEVEAARDAVLKKPAPADEAERMIRSLVDMRAIGPELATLLVREAFSRPISNRRALGSYAGLAGTPFSSGGSEREQGIGKDGNRRVRAAMVELAWLWLRWQPDSTLSAWFRERVGKAGGRIKKIMIVALARKLLVALWRYAKDGVIPEGAKMKTV

SEQ ID NO: 404937 - protein, 369 aa, unidentified
MEKDTTYVGLDDSKRKIVAGILRPGDAQPELREIANDPRQIRRLFERLTREGPVAACYEAGVSGYDLYRQISALGVACAVMAPALTPRRPGQRIKTDRRDAAKLVRLFRAGELTAIHVPAEAEEAVRDLVRCRDDIRRDVLRWRHRVLKLLARHGRAYLAGKNWSQAHWRWVREQRFDLPPLQRAFEATLFALEQALARQAELDKEIEALAATAPYREPVGGLRCFRGIDTLSAMILLAEVIDFQRFRRPRELMAYLGLVPSEYSSGETQRRGALTKAGNSHARRVLIEAAWHYRHRPTLGRALANRSQGQPDEIVSHAWRAQQRLHRRYRHLVGHGKRTPVAVAAIARELVGFIWAALTRHESRRQAA

SEQ ID NO: 404938 - protein, 360 aa, unidentified
MGSSVSWIYDVSPVEPEQSPGPVMSRARIYKEGNPTVQPNSNAKCWAGIDVSKDWVDVAVLVEEQKVEQIRCVRSLVELEQLAQKLLPYGPQGVVLEATGGLEGSVITALVAAGLKVMRMNPKRVRDFARAQGLLAKTDQLDAHILALFGARMQPPLRAWPEAERQQLAAWIARQQQLTLQRAAERTRLHQATEPQLSKSVERVIAFLGKELARLEKQMGKWMAQSEIWTEQESLLRTAPGVGPKTARLLLAQLPELGHINRREIASLVGLAPLACDSGHWRGKRRIHGGRGAVRAILYLASWSAVRPPGSLREFYRRLVAAGKPRQVALIAVARKLLLALNEMMRLNQPWRSPKESIPA

SEQ ID NO: 404939 - protein, 348 aa, unidentified
MNHVAIDLGGRESQICVRGADGTILEEKRHATRSLETLMKRWPPSRVIVETSAEAFRVADAAKACGHEVRVVASSLVKSLGVGARGIKTDQRDARTLSEVSCRIDLPSVHIPTPASRELKSVCGAREELVEVRTKLVNNIHGWLRGRLWRIQSGVPVSFPERVRTHASSLSMELPPHVARNLEVIDLVNEQIRASDAQLREIVKADATCRNLMTIPGVGPVTAARFRAAIDDVSRFQSAHAVQSYLGLAPGENSSSERQRRTGLTKAGPAAVRRMLIQGAWAAFRTRPNEPMVQWARTIAERRGKYIAIVALARKLAGIMFALWRDGTTYRPARSAAAKISTGSVADM

SEQ ID NO: 404940 - protein, 373 aa, unidentified
MPRYSTAFGMDVHLRSTTVCALDAETGEAVARRFRGNPWGEVAEWMSGFPGPSLAAYESGYLGFAPQRELSALGVDCVVAAVSKVPRSAADLSSKNDRNDAARMAKAILSHDVTPVWVPSPEIEGLRDLAAAHDAATARLAAAKQRLLAFLARRGYVYGGTTPAGNPRKYWTYGFLRWLDGIRPADDGGIRALAALRNEVEAADETREAVLAEYRAAVAAGPLSAEVEALQSIKGCGFVLAAAFASEVGDFSRFRSGRQVTAYFGLAPKQRSSADSVRLGGISGAGNALVRRLAVEGSWRYAQAGHQPKLMPKGSGVPLEIRMHGRKGSERLLRRREEMLERGMPQAKANAATAAELVRWLWALGMMCREAGE

SEQ ID NO: 404941 - protein, 363 aa, unidentified
MIIIGVDYHPSFQQIAFLDQETGEYGERRLNHSDGEAEKFYRELKQRGVSVRVGLEATGYSRWFERLLAELGFEVWIGDAAEIERQRVRKQKTDREDARLLLKLLRENRFPRIWVPSAENRDLRQLLWHRHRLVQMRTRIMNQLQAVAMNEGKRWKKKLFSAQGRALLEKLSLAPWASRRRKELLELLDQLDPKVAELTAAVEQEAKKRPEVLRLMTHPGVGPLTGLAYVLVIGTPERFPCGKQIGSYVGLIPSEASSAGHQRLGHISKQGNALLRYLLGEASQAAVRKDVYWRRRYMHLAMRRQKSIAKVAMARKLAVRLYWMWRNGWDYSQLVEFGSHAGKLGTGHGVNSSVAHMIGHPAP

SEQ ID NO: 404942 - protein, 524 aa, unidentified
MSYHVRRIRRESPKSKPRSIKTLQKPNGVISPRVQKVGGEHFAIVCVDPAKHRSAWMMADYFGNVLIEPQVLQHLGAGFKLAVEQIHQVQQKHDIQDLIVVVERTGNYYLPAKRAFAGAGFETRIVNPFATKQYRMPANPGNKTDETDLFAQHRAAVAGFGLCEFELESPYRELQLRARHRRNLVQQAAALACQIREHLHLGMPGYANLFDRLFESPTPLAIAAACDSPAKLVELGALGLSRHLRKKKIPHRSPSIEKVLAWAALAINDPIKDGPMHHAIWTDLHELYQHSHQQIATLERQLVGDLVQTPYVRLLAIPGINVVSAADLAAEMGPITRYANANSITSRSGLYPSRHQSDQTDNDRGPLIRHANRRLRCVLMRIADNLACHCNYYRAQADLDDRRGIDKRASRVKIAKRFSRLALACVAGDEPMRHPCFQQPDSILEKLRRFHQDHETPVDRLLADLNATVGQLPYNTRSHEAKIVAGVLQERARRRRGASAIGDLLPAVLARLNVAEENKCGDRS

SEQ ID NO: 404943 - protein, 344 aa, unidentified
MPSIAGGFDIHRKQLTSDYLDTVSGEVTRGQITPAGRGHLRAWLARLENPQDAAFAAEACTGWRYVAEELQRAGVQAHLAEPAGTAAARGRKKRAKTDRADARLLRDLLAEGRLPECWIPPEHILECRALLECYHDLRAEHTGWVQRIHATLFHQGAPAFHGLGLADGPGQLTALAREHLSPAGQAQIGTCLRMLAAAGAELTAVRHRLLAAAAHLRGAKVLTQSLHGTGPVTGLALTCWLGGAGRFSSARKAVRFAGLDITVYSTGGKRSAGHLSRQGPPVLRWCAYEAGKTHAHTTAPDHPCYAAVKDRAGGKRAALAEARKIVRQACHILTELGDDAFTIM

SEQ ID NO: 404944 - protein, 345 aa, unidentified
MEKTKYFIGLDISADDFSASCITTPDNIIFSAQKFQNNLDGFSEFFAFLLSREIKPTETNVCMESTGVYCEGIAYFLYSKGFNVSIEAPHKVKQKIKDTPRKNDFIDSLAIAEYSYRYLDKLPIWKPQMEILQQLKTLLSTREHLVTQKTASENALKTLKRKYIKTPLALAIYEENIKKFNEQIKQIDKEIKALIKKDDNFKMKMDLAMSVPGIGLLLAANLFVLTNGFTEHLNYKEISSYLGICPYEQISGRSLHKKPRSKRYGPSRLRKLLYLAALSVATYNLNFRKYYLRKVEEGKSKRLVLNNIENKLLKIIFAVIKSGTKYIENYRSVNPIYLKKCLTMS

SEQ ID NO: 404945 - protein, 382 aa, unidentified
MNRILKIGMDVHSTSYTLCAMEPVLGGEDRIFANIQVTSDYRNVIQFIDKLKEKLGSSDSYSIECGYEAGCLGYSLYHQLTKAGVKCTILAPTTMLTQQGKRVKTDKRDAVMIAQCLSYGGYHAVHVPADKDVSVKEYLRMRDDHKVALKKIKQQINAFCLRQGYFYAGNKWTIKHLNWLKKLVLSDLYRETLNEYLTSYEEQTAKIERFDKRIEELAEDSDYQENVKKLGCLLGIKTHTALSLIVETGDFKRFRKGNTYAAFLGLAPGESSSGEKINRTGITKAGNSHLRMLLIEAARGMCRGRIGYKSKVLRSRQDGNPTEVIAYADRGNTRMRSKYYRMIRHGKKDNVAVAAVARELACFIWGLMTNNITFKEEGTKAA

SEQ ID NO: 404946 - protein, 324 aa, unidentified
MTDAVLGIDVSKNTFDTNLGAGIKARSQSFANSPDGWHHLIAWLGEHKIGQVHACLEATGRHGLGIALALHEAGHVVSIVNPAQIRDFARTKLGRNKTDQVDAVHIREYAELFKPRPWTPPSPAMRRLCELQTIRAGTVAGLTEWKNRRGSGMADDLALSLVETTIQHFTSQLKAVDQAIAETIDNDLELSAKRDLLVSINGVGEALAGIVLAELPGPDILGCSAAVAAYAGLNPQQHQSGISVNRPVRISKIGNAVLRTALYMPALSAMRYNPAVVALVDRLKAQGRLKGKQIVIAAMRKLLVLCFGVLKTGKEFDPAMAMGK

SEQ ID NO: 404947 - protein, 354 aa, unidentified
MSNTSTATVATMGIDIGKNSFHVVGLDERGAIVLRQKWSRAQVEVRLANMPACLIGMEACVGAHHLSRKLRALGHDARLMPAKYVRPYSKGQKNDFRDAEAIAEAVQRPTMKFVATKTAEQLDLQALHRVRARLVSQRTGIINQIRAFMLERGIAVRQGLRFLRAELPGILASRTEVLSPRMVSVIEGLAEDWRRFDTRIEELSAEIEAVARKDAGCERLMSVPGIGPIISSATVAAIGTGDVFAKGRDFAAWLGLVPRQISTGDRTILGKISKRGNCYLRALFVQAAWVVLIKPQSWERHGLKSWIEARKKRLHHNVLAIALANKLARIAWAVLAKGRGFEMTRIGDAVVRPV

SEQ ID NO: 404948 - protein, 370 aa, unidentified
MKKKILYVGLDVHQNTIDVALATGRSNGKVRSYGKIDSSLDALNKLIEKLQAKAVELRFVYEAGPCGYQIYRHLHSKNIECAVVAPSMIPKRSGDRIKTDRRDAINLVRLFRAGELTSIYVPTVEDEAIRDLVRCRDDMRRFQHKARQRLLAFLLRHGHHYSGKRFWTKGYYNWLATIKFSHPADQVAFQEYVDMVDECSNRQKRITEQIIAHVEQWQRYPLVKAYQALRGVSFVVAVTVVSEIGDMNRFHNPKQLMAYLGLIPSEHSSGKSIRRGSITKTGNGHVRRVLVQAAWTYRMPARISTVLLKRQQDLPKSIRAISWKAQTRLCSRYRKLISRGKSKQAAVTAIARELGAFIWAIDRQIQEATV

SEQ ID NO: 404949 - protein, 355 aa, unidentified
MTSAQYIGMDMHKESISIAVRNAAGKIVMECVIETKASTILQFIDGLRGDVQVTFEEGTWAAWLYDLLKPHVTKVVVCDPRRNALLQEGNQNDRVDARKLAELLHNNQLRSVYHGDHGLRTLKELVRSYLTITQDLSRVMTRVKAIYRSWAIPCTGKQVYAPRHRGEWLAKINEPGVRRRAEFYYQQLDALRCLRQEVRRDLLAESKKHPAWKRLCGIPSIGPIRAAVLLGILQTPHRFRTKRQLWTYGGVGIQTSSSADHHVVKGQLERKKKHVEIRGLNRNYNHDLKNIFKGAAIVAATKPGPFAEFYAELVAKGMRPEMARLTLARKIATIVLIVWKRGVCFDAQHLKPQTA

SEQ ID NO: 404950 - protein, 321 aa, unidentified
MAKRTTICAGIDTGKRKLDVALDGNSLQLQVENTAEGHKVLLEWLRRHKVKRIGIEASGGYEQPVVAELRRKRFVVVVFQPAQVRAYAKFHLQRAKNDKIDAALIAACTAAVKKIHPAPDPRLQPFAEHLTMIEQIGEDIKLYKNRLETCRDPRIQKVWREEIARLAKRERAELKALVAAIREHRDLAQRLDLIYSVGGAGLPTAVAILVRMPEIGQLSREQVAALAGLAPYDDDSGEQVGARHIHGGRKRLRRALYAAALPASFRWNPQLIALYTRLKAAGKEHKRCLIACARKLLIFVNTVVARGTPWQDEPLPTAATG

SEQ ID NO: 404951 - protein, 344 aa, unidentified
MNIMHYIGFDIHKKVISFCEKKMDGTIVDQGTIRATRASLSKWAEERTAEWSGAMEATLFTGWIYDHLLPHSLDLRVAHPAMLKAITAAKKKNDAADSEMIVDLLRCNLLPECYMAPEEHRNLRRILRYRNFLVREAAKMKIKTSGLLMEVGAEYSKKRLHGTRYFQELLGNLDYVPESVLQLLQMSRTSMESFDKMQKSLIRALRADPQISHRVELLMSIPGVGEVTALTWVLEIGEVDRFDRISQAVSYCGLCSAQKQSAGKNYRGPISKQRNKHLQTVLIEAAKLAPRWNLQLAEVHERESAKGNRNRATLAVARKLVAYLLAVDKNQKQFVPKEVLLKVA

SEQ ID NO: 404952 - protein, 424 aa, unidentified
MAYRIAGIDVHKRMLAVVVADVEVEGEYEFERQLFAATPQQLRSLAEWLLEREVEEAVMESTAQYWKPVWAALEQYWKPPCRKKDGAGRMSGALHLAQARSNRGRRGRKRDFPDAERLVKRLVAQELNLSFVPDAEQRLWRTVTRRKYQLTRNRARLQNQLESLLEEAHIKLSSLVSDLLGVSARRMLQALADGETDPATLAAMANKQLRATSEQLCDALGACTELNPVYRRLLKMALEELRFIEQHIGQLDQEMATLLCQHQDAVQRLAEVPGLGVGSALQIIAEVGATAASFPSEKHLSSWVGACPGDEESAGVSQSHRSPKGNHQMRRILNQCANAAVKVKGSIFQILYRRLVPRLGHNQTIGAIAHRICRLIWIILHRGVGYVEHGPAVQESSKRARTSRMIRQLRNLGYRVELLAQNPA

SEQ ID NO: 404953 - protein, 340 aa, unidentified
MSAAFIGLDLAKSVFQVHGVDVDGKVVVTKRLRRGAVLAFFANLAPCVVGMEACAGSHFWAREITRLGHTVRLMAPQYVKAYVKRQKNDRADAEAICEAVQRPSMRFVAVKSEEQQGTLAIHRVRETLVGQKTQLINALRAHLAEFGVVAPQGAGKVSQLTAVVADLEDTRVPSLARSALQGLVDQLRDTERRVEELDVRLAEQAKADKVCQRLTTIPGIGPITATALTATIGDATVFESGRHLAAWLVPRQNSSGGRERLGGISKAGDGYLRRLLVHGARAVMRWHGKTSPWLAGLLKRRPFNVAVVALANKLARIAWAVMARGEDYRKPEAAAEPAQG

SEQ ID NO: 404954 - protein, 410 aa, unidentified
MIEAIVERCAGIDVGKKFVLVCVMTGAAKDEPHTKIKKFGTIVSELERLAAWLVDEGCTHAVMESTGSYWKPVFNLLEAHVRVILANAADVQNRRGHKTDPNDSRWLAHLLRHGMIRPSFIPPLPIRELRDLTRRRRQLIGENSRERNRIQKVLEDANVKLGDVLSDVFCVSGRLMLQALLEGNLSPAQIAELAKKKARVKIPQIAAAVTGHRLTDHQRFLIRHALRHLQFLDEEVEALNQEIRRRMEDRALGEAFLLLQSIPGIKEESAASILAEVGADMQQFPTAAQLSSWAGLCPANHESAGVKKSVRTNRGNVWLKTTLTQSAWAATNRKGSRLQSRYHALRARCGNKRAIVALGHTLLKTIYTVLSSGTPYREAPIGEETERQEQRARYHLRCLRKLGYPTLAAE

SEQ ID NO: 404955 - protein, 345 aa, unidentified
MQQEIVSRQEPRHYVGIDLHRRRSVIVRMDEEGQVLSIDQVLNDPVQLSAAVAKAGPGPEVALESTYAWYWAADLLQANGAHVHLVHPLGLHWDSRRVKNDIRDSTELANRLRRGDLPESYIAPPEQRELRELVRYRAKLTALRTSVKAQVHAVMAKEGILPALDDMFGPGGQALLDKMPFEGAYAMRVDSLRKLLEIYSGELVVVEAELASRLSGHPGYYAIQAICGVGKIIAAIFVAEIGDVSRFPSARHLCSWAGLTPSHKESDTKVQRGHLTKQGNHLVRWAAVEAVAHYHGGEPITPTYTRVARRRGKMIGRIAAARKLLTLVYYGLRDGEIRCLAERAG

SEQ ID NO: 404956 - protein, 455 aa, unidentified
MKQRRISSHLDQVNLFAAGIDIGSQSHYVAVPEELDSEPVREFSCFTDDLNRMADWLVEIGIQTVAMESTGVYWIPAFDILEERGLVVLLVNARHVKNVPGRKSDVQDCQWLQQLHTYGLLEGAFRPPEATVALRAYTRQREMLVQRASDHIRHMQKALRQMNLLLDNVVSDINGMTGMKIIRAILAGERDPAVLAQFRDNRCKHDDKTIAASLEGHYREEHLFALKQSVELYDVYQQQIANCDETIQAQLDRMESRGDKDDLPSTKKRKTKSSPDFDLRGELYRMTGVDLTRIDGLNETSVLKVLSETGVDITPWPTEKHFASWLGLSPGNKITGGKILTSKTKPSANRAAAAFRVAAYGLFNSKSALGAYYRRQRARLGSPKAITATAHKLARTFYSMLKNGTEYVDQGQDYYETQYRDRVTKNLKKRAASLGFDLVPNKEDENMPDTVLSTA

SEQ ID NO: 404957 - protein, 420 aa, unidentified
MVSSGEEDAVERLIERCAGLDVHKASVTATVRVPGDQGGRRTETRTFQATTAGLVLLGDWLASFGVTVVGMESTGVYWKPVYYLLEDNFECWLLNAQHLKNVPGRKTDVADSVWICQLVEHGLVRPSFVPPKPIRELRDLTRYRKALLAERTREAQRLHKVLEDAGIKLASVASDPLGVSGRAMLEALVQGTHDPQVLAELARGRLRAKLLALREALEGRFGAHHGLLVGEMLARIDQMDETISRLSAEVARVAAPFSPLLALLMTIPGVSRRTAEVILAEIGPDMSRFPTAAHLASWAGVCPGNNESAGKHGSGRTRKGSKWLRVALVEAAHAAARTKNSYLAAQYARLRGRRGPKKAALAVAHSILVIAWHLLSRGEPYTDLGADYFVKRQAHQAYRDRLVRQLERMGHKVTLEPTAA

SEQ ID NO: 404958 - protein, 359 aa, unidentified
MQTQSNKIDFTGQHIYVGLDVHLKSWKVTIMTEKLPFKTFSQDPKPDLLYHYLARNFPNGIYHTAYEAGFCGYWIHNKFTALGIKSIVVNPADIPTTDKEKVQKADKRDSQKIAKALRSGDLKGIHVLSLKTLEDRCLIRTRAIIVQDLTRNKNRIKSFLHFHGIEMPENFKQLNHHWSRRFMAWLKSIEMTEPSAKKSLDLYIAEAEHLRSTILEATRGIRELSEKEPYANQVGLLRGIPGIGILTAMIILTELETINRFGSFDKLCSFIGLIPTTHSSGDKENVGAITHRGNSFLRGALVESAWMAARMDLALNKSYHDYCKRMEPNKAIIRIARKLLNRIRFVLNNNQPYVCSVVK

SEQ ID NO: 404959 - protein, 341 aa, unidentified
MSNASTYIGVDLHKKTCFITIMNQAGKIKKQTEISTDTDRVAKFFSQHREAQVAVESTMNWIPFYENLESLGCSMVLSNPLQTKAIAAARIKNDKVDSKVLADLLRTNLLPTAYIQSREIRDLKELVRQRVNYVEWRTRLKNKIHSVLFKNNLKHDFSNLYGKAGRKWLKQLKVRDIYRQELDRYLKTLDLLDAQIEEMSEEIMATAKADYDCKLLMTIPGISYFTALTIKSEIGDISRFPTARKLCAYAGLIPSTYASADKIRFGRITKRGSKWLRKSLIDAVTSGSKHPSRLCYFYRRLKKNKGTGKAKVATARKLATIIFALLTDKQPFRDFTPVKQR

SEQ ID NO: 404960 - protein, 366 aa, unidentified
MKKISTVAIEGIQVFKQNQLTIGLDLGDRTSYYCILNEAGEVILEQELPTTPKGIEKVFSRIPRSRIALETGTHSPWVSRQLTQLGHEVIVAHARNVRLIGESSRKDDRLDARTLARLARIDPALLGPVRHRSAKAQIHLTVIRARAALVSTRTALVNAARGLTKSYGARLPKCGTERMNREITKELKPELREALNPLLREIESLNERIAEYDTRIEQIATEAYPEVARLKQVKGVGPLIALTYVLTLDDPHRFRRSRDVGCFVGLRPGRRNSGMSEPQLHISKEGDRYLRTLLVQGAHYILGPFGQDSDLRRWGLKLSERGGRNAKKRAVVAVARKLAVLLHKLWVSQEIYEPLRNHRQAVARVA

SEQ ID NO: 404961 - protein, 408 aa, unidentified
MALYVGDDWAEDHHDVHLMDETGERLAARRLPEGVEGITALHELVAGHASGPHEVVVGIETDRGPWVMALVAAGYRVYAINPRSASRYRDRHHVGGAKSDAGDAKLLADLVRTDRHNHREVAGDSDEAAAVRILARAHQQLVWDRTRQTNRLRNALREYFPGALRAFPSLTHGDAVGVLATAPGPREAARLSTSQIRSALRRGGRKRNVEERAAELREAFRAEQLEVPATVSQAFAATTRATVGQIAEINRQIAELEDELAASFEEHPDAAIYLSMPGLGPVLGARVLGEFGDDPERYESAKSRRNYAGTSPLTVASGRKRTVKARFIRNRRLSDAASQWALCSLSASPGCRDFYDRRRAAGDLHYQALRALANRLVGYLHGCLRSHAPYDEALAWGHRSSLEDLAAA

SEQ ID NO: 404962 - protein, 384 aa, unidentified
MDQATPSTASANTLHCALELSKKSWLLAIQFPDREQPSLYPIAGGDAEKLMAKLTQARDRWAKTSGALPMITLCYEVGYDAFWLARCLKARGVECLVIDPGSLQVSRRGRRVKTDRVDVKTLLRTLIAWCRGERHVWSLVRIPSIDEEDLRRSHRERSRLVRERTAHINRIKGLLFAQGIRDINVKSRYKTLAVDELVTGDGHRLPPRLAGEIAREIRRLATVQEQIAEIERERDAAPTTCEATERKRDLLSQLKSIGPAISAFLSREVYYRQFANQRQVGSFLGLTPSPYDSGEEERCQGISRAGSGHARAVMIETAWLWIKHQPKSALSRWFVERTAGQSKRVRKIMIVAVARKLAIALWRYVELGLVPQGAILNPRMKARS

SEQ ID NO: 404963 - protein, 348 aa, unidentified
MTLVGCDLHSRKQQVAALDTTTGEVLEQELAHDGDAVERFYRALRPPVTIGIETTGYTQWFHALMHRLGHTVLVGEAGRIRAMVIRKTKTDRRDARHLLDLLKHDRFPTVWMPDPDTRDLRALVAHRVRLVRMRTMVKNGLQAIALNQRLALRSALWTQRGVAQLRGLALPPHTTRRRDDSLELLAWINVRIDQLDAQLAAVVDADPRARRLLTHPGVGPLTALTTVLVLGPVTRFPDGKHVVSYVGLAPAINASADKHHLGKITKQGNALLRWVLGQAAPQAARADDELRRRYFAVLQRRGRPKAKVALARKLLVRLYVMLRDQIDYEEFRRRGRAGQASRAPVTVT

SEQ ID NO: 404964 - protein, 339 aa, unidentified
MKYIPVGVDIAKHLIQVHFINEHTGEVVDKQLRSKDFLTFFSNREPSLIGMEACGGSQHWARELKKLGHKVRLLQARFVKAFVMGNKNDVMDARAIWMAVQQPCKEIAVKTEEQQSVLVLHRSRNQLVKFRTTQINAIHGTLLEFGETVHKGRTAMSREFPAVLERMKAKLPPYLITALEDQYNRLSELDMQIDALEKQLNSVAKQNETCKRLMEIPGIGPLIATAAVATMGETSAFKSGREFAAYIGLVPKQTGSGGKVRLLGISKRGDKYLRTLFIHGARAASLLAKEPGPWITELKKRRPTGVAIVAMANKLARTLWAIAAHNRKYDKNHVSIKPV

SEQ ID NO: 404965 - protein, 342 aa, unidentified
MQITTIGLDIAKNVFQIHGIDAAEKIVVRKQLRRSQVLEFFKALPPCLVGMEACATAHYWARELTKLGHKVRLMPAKDVKAYVKRNKNDAADAEAICEAVRRPTMRFVQVKSAEQQSQLMLHRTRDLLMRQRTQVINALRAHMAELGMTAAQGNAGLRELLAIIAGSADERLPVEAHASLIVLAAELQAMRTLIASIEKRIIAHHRSDEASKRLRSIPGIGLVGATAIVATITDPKAFRSGRDMAAWIGLVPRQDSTGGKQKLGPISKQGDRYLRRILVVGAHAVLKLARQKPEKYPWLTQLLARKPFKVVAVALANKMARIAWALLVKGGPYRARALVAAA

SEQ ID NO: 404966 - protein, 418 aa, unidentified
MLSIKHFVCCGMDVHKKFVVATIALTDYRGVTSYVKKRFATFNSDLNSLKKWLLSFNCTEICLESTGKYWIPIFNILEDSCHVVVANPKYVRAIKGQKTDDKDSAWIADLFKFDIVPSSYIPCKEIRMLRELFRYRQKLIGHRSSEKNRLQNALTVSNIALASVLSDTFGKSATAIVDYILTCEVFDPEYCKSLLLKKAKDKANDVVTSIIGYELRRDQSVKIKVCRKHFDEINECVSTLEETISDLAKPYHKFIELATTIPGITEQSATFIIAEIGVDMAVFKSSKRLCSWAGLAPENNESAGKKKSVHVSRAGVYLKPLLVQCANAAIKSKNPYFRYKYDRIKKRRGHKRAIIAIARMVLTCIYHMFQKQEVFNPADTDYSAIPEEMYRKFQEQYDRNAIKRLEKRGYMITPPAMA

SEQ ID NO: 404967 - protein, 343 aa, unidentified
MKLSRVGIDLAKNVYQLHGVDRHGKTVWKRRLKRHQWLKALLDKTEPGCEIGMEACASAHHWGRELQSLGYTVKLMPPQFVKPYVKSNKSDAKDAEAICEAMSRPNMRFVTVKTVEQQDIQATHRIRSELITQRTAKANQIRGLVAEYGLVAPKHMSSLRAAIPCWLEDAENGLTGDFRSLLHAVWNDLLGLDDRVCEMDKLIKRLAENHEDCVRLQQLRGYGPMIATALIATVGDARQYRTSRQMAAAIGITPKQHSSGDRDRLLGISKRGDVYLRTLMIHGARSVVASAKHKDDRLSRWVTGIATKRHPNVAAVALANKTARMAWAMLRNKTDYDPDFAIR

SEQ ID NO: 404968 - protein, 493 aa, unidentified
MIGYSIGIDLSINGAHDCTVLDATGQLVQRFTFDSSSAGLQQLEQRIRAIDPSHGAPVVVMEPTGLAWFLPCLYLYAQLPDVRVVRIKTSKVAALRRYLKQDAKSDRLDSLTLAKMPLVDPEKLYAVDFPSAALQGLDRMTRQRARLVESLIGRKNRLQALLRGYLPGLMAAAGKPWEPVFRALLTVSLNPFTLAGAGRNITELREALQDKFARKALPENLLPQLRTACEHLTRLYRPIIEAGLLTEAFFDDVCDEVARELRLMDAEEQEVKDLETAIARRYQEVAPQDHLGTMPGLGAVTAPTMLAAVGTPQRFQNQAAFRGWTGIVPHASESADSQAKGLPMTKAGPKRVKLALYQAAQFARLWDPQLAKIYYDQMVHKGKPHHKAMGAVMSHLASRIHAVLTEQRDYVLRDMDGREITAREARIIVQTQYQVPAEIRAERRTSRRRKRDVSTGLHRGSAKRSSQRSSPSSQQHSTRSQAMDQTGAVVISR

SEQ ID NO: 404969 - protein, 358 aa, unidentified
MMYVGVDVHKRVCRAAMVNDEGELVDEFSFMNSKGGIEDFMMKIEAFKDRMLVVVESTANLWMRLYDSLDEQGIKVVLSNPSKTRLIAEARVKTDKVNARILAQLLRADMLPLCFVPTRMQRDRRQFIRHRVHLVKMGTEVKNRIHALLDKHGVRCPYKTLFSKKGLEWLKGLKLGFTDDAVLRSDLALLQALNEQIGFMEAKIAAVAVNDEGVRLLMTMPGLGYFAASLLVAEICDISRFSSDKRLVAWAGLAPGVHQSGDKTVQGRITRQGNKLVRWVVVQSAQVARLHDERFREFYERYAKRRGDKKAVVAVAHEMLRIVWFMLKRNEAYRGERRGLSWRKFKGLERVALGGFQV

SEQ ID NO: 404970 - protein, 455 aa, unidentified
MKHEPEEIPDAEHELVIERVAAVDVAKASGKVCVRVPGKAGRRVSRVWDVAATTAAVTELAEDLVELGVERVTVESTSDYWRIWYYLLEAAGLEVQLVNARDVKNVPGRAKTDKLDAVWLAKLTEKGLLRPSFVPPTEIRRLRDYTRLRADLTHDRSRQVQRLEKLLEDALVKLSTVATDIMGVSGRAMIEALIAGQRDAKVLAGLARGRMKTKRAALIEALSGRFDDHHAELARMLLDQIDALTAQIDTLTARIEQLLAAMPEAQPVDPRRDGPTSGHPVGVTADTLAECARLTTVERLDEIAGIGEHNAQVIIAEIGLDMSRFPTPAHLVSWAKLCPRTIQSGPVTRGGRTGKGNPYLKGALGDAAAAAAKTNTFLGQRYRRIVKRRGKLKALVAVARSILVIVWNLLNDPTARFHDLGPDYHTNRIATERRMRNHIAQLTAMGYRVTLEPAA

SEQ ID NO: 404971 - protein, 410 aa, unidentified
MELLHRRCCGLDVHKETVVACLRLVSDGKVTTEVRTFRTTTADLLRLSEWLAANDCTHVAMEATGVYWKPVWHILDDGEFELVLANAAHVKNVPGRKTDVNDAMWLAELLAHGLIRASFVPDTQTQEMRNLLRTRKQLVREQSSHVLRVQKTLEDANIKLDSVLSDLMGKSGRAMIEALITGETNPAKLASLADRRVKASPEEFREALRGRVTKHHRFLLRLHLNQIDALDAATVTVDAQVEANLGPFRTAVDLIISIPGIKNLGAHVIVSEIGIDMSRFPSDAHLISWAGICPRNDESAGKRRSNRLRKGAPWLKTTLVQCAWAAVKKKNSYLQAQFYRIKARRGPKKAIMAVAASILTAIYHMLKDGTTYQDLGCNHFDRRSTDQQKNRLVKRLAELGYAVEITPIAA

SEQ ID NO: 404972 - protein, 464 aa, unidentified
MPLRLGIDIACRAAHQVSLADEQGRFIWTGRRFRTTPQDLARLWAMLPEGTEPAELLVIMEPTRNAWVPLAAWFRRRGAEVVLVPPERSSDLRRYYAKHTKSDRLDSQLLARLPMLHPDGLYAEQGLGPGDALKRAAKLHSTLTHRRSQSLARLDALLEILGPGWHDAIGADLANRTPLKFLAAGYADPHVVKRLGRARLARFCYRHSRGAWGEPQADALLCAARQTLELWADGELDYPELAEDIAIEARLALQLTEELKDLDERTTLLLKQADPTSILTSAPGVATITAAAILGRLGDPNRFTSLAGARAFTGLVPILDSSGLTGRHGGPTKRGDAVLRQALFMAAGQARRIDPTLAAKYHRLMTEAGKHHNSALCHIATTLLTRIIACWRAGQPYQLRDIDGSPVTIEQARKIIDERYAIPKDLRTRRRTTARTGTDRRNKESLSAPSTGPSNNHATTPDAA

SEQ ID NO: 404973 - protein, 338 aa, unidentified
MKITTIGLDIAKSVFHAVGVDKAGKLIKKKMLRRKDLLPFVAQIEPCLIVMEACSGANYWAREFELLGHSVKLIAPQFVVPFRQGNKNDYNDALAIAEAAQRPNMRFVKPKSVEQQDVQLLHRMRERLTKQSTALINQVRGMLAEYGIVIAKSKSAFKVQFPEILTNETNALTTKGRTIFYQLYEEFTDIERRLKDCDTQVLTETKNNVICQRLETIPGIGPVTATAFYAAAGEGKDFSNGRHFSAWCGLVPKQHSSGGKDNLLGISKRGNAYLRTLFIHGARAVLQHSCHKQDKFSCWAIQLAERRGFNRACVAVANKLARMAWVIAAREEEYRLPV

SEQ ID NO: 404974 - protein, 418 aa, unidentified
MKVVYPICCGVDVHKTFLVATIITSQGITPHYSKKRFSTFNNSILQFKQWLINNDCFDVCMESTGKYWVPIFNLLEDTIRITVANPKWVKAVKGNKDDTKDSKWIGDLFRLGLVPGSYIPAKPIRILREYTRYRSKLVSCKSSEKNRFQNAFTVCNVALDAVVSDMFGKSASSITDYLISSDSFDPEYCSSLLQRSLKKKAASVIESIEGYQMAQEQKERIVMVRSHLEFVQQSIAKLDEKLDKMVARYESAITLLCTIPGVDRASAITIISEIGTDMSQFANSKRLCCWAGLTPGNNESAGKKKSVRITRAGVYLKPALVQVAHAAVKSNISPYYRVKYERISKRRGKKRAIIAIARMILTAIYHMFVTGEEFNPSDLYKVDMPKEMVAKQKEKAIKQAANLLISLGLIKASDISAA

SEQ ID NO: 404975 - protein, 355 aa, unidentified
MNDAKYIGMDVHQATISVAVRDSRGNLGMEAILETKADTILEFIHGLRGSLWVTFEEGTWAAWLHDLLLPQVTRVVACDPRKNALLKVGNHNDRMDARKLSELLYLNKLSPVYHGEQGIRTLKELARSYITITRDLTRVMSRLKAIYRSWGIPCAGQQVYAPRYRAEWLAKISEAGVRRRAELYYQQFDALAALRQGTRRELLAEARKHPAMRLLRQIPSIGPIRAALLIALIQTPNRFRTKRQLWAYCGLALRTYTSGEYRFVAGQLKRSKKVLAVRGLNINHNHDLKNIFKSAATRAASTVGPCQDFYQACVARGVKPHLARLTLARKIAAITLLVWKKGVRFDAEHLKQQAA

SEQ ID NO: 404976 - protein, 353 aa, unidentified
MPIVAEQYTFVIGVDTHAATHSFALINATNGGIIDQAVFPTSPAGLDRACTWITRGIDEKAALVVIEGAGSFGAGLATRVTNIGLPIAESAAMPAEARRGVGKTDALDAVRIARSVLAVDITRLRTPRADGQRVALRVLTVAREEMVAERTRAINALTALLRTVDLGIDARKPLPHSQFKTIAAWRERKEDSVLATCRQEAVRLAKRIVALDGELVDNRRSLDSLVEDVAPELCKLPGVGSVVAACVLTAWSHPGRVRSEAAFAALAGTCPVPASSGNTVRHRLNRGGDRRLNRALTTVVIVRMRTHAPTRAYVARRRAEGRTTKEIMRSLKRYITRQLYRTLAAAHPVPETP

SEQ ID NO: 404977 - protein, 434 aa, unidentified
MGHRFRTDPDELDTLWARLPKDAERIEVVMEPTRNAWVALAAWFRRHGATVVMVPPEQSADLRDYYNKHTKTDRLDSKVLARLPLLHPEGLHREDSLGPGDELKRAVKIRSGLVHRRTACMARLDALLEILGPAWIAALGSDMTLTALRFLAPYANPVQVKRLGKARLAAFFRRSSRQAWADERADAVIDAAATTLRLWGADGGELDFDALAADIAAEARLALTLTDEINGFDKRIGALYDKADPAGIVRSVPGAGRVCAPQILGRLGDPTRFANLAAVRSFAGLVPAADSSGQADGHRGPTKAGDCCLREALFIAADHARKVDPTLAVRYQRLMLAGKHHDSAVCTLAAVLLTRIAACLRAGTHYLLRDTDGRVITEAQGRAIVAERYAVPPEVRAARRKVTPHRHPRRNERNERAKTGVATRSKASPVPQPA

SEQ ID NO: 404978 - protein, 423 aa, unidentified
MSPKKENNSTESVVHPICCGLDVHKNTVAACLLRSGENGREYPEQKEFGTFTDDLIMLREWLLAHDCPVVAIESTGVYWQAVHNVLEGYHKVVLVNPKHIKNVPGRKTDMSDSKWLAALLRHGLVKGSFIPAKQQRQWRDLTRLRKSYLQAVGDFKRTVHALFHSANIKIDSVASQLFGATGRNLMRLLCTSKSNLSLTEVESCLCGSLVEKAQELYRSVQGFFREHHRGQLIILLQTIDGLEKQIAKLDRKIREAMRDHQELLKRMKEVPGISDIAAPAILSETGETLADFSTAAAFASWCGLCPGNNESAGKRRSGRIRVTRNHLKTLMVEVAWAAVKKRGSYYKDKFYRLKGRLGPKKAIVAIAHRILKAIYHIIKDGVPFKDLGENFIIEQNRDAKLKYLKKQAKLLGHELIPIPKQLS

SEQ ID NO: 404979 - protein, 401 aa, unidentified
MAPTAGVDWAAEAHEVCISEEGRVAERFSASHDEHGLAALAAKLVRLGVCRVAIERPDGILVERLLAAGLEVLAIHPNQVKAARARYAVAGGKSDRFDAYVLAELARTDAHRFRALVPDSDETKALKALTRAREDLVGVRVELANQLRAQLEAFWPGALIFAEVDSPISLAFLARYPSPVEAKALGAGRMAAFLKRQGYSGRTEPAELVARMKAAPKGTAGTAEREARRAVVLGLVSALGPIVAEIAALEARIREQLAAHPDAAIFRPLFRDRRTVISPATLIAELGDCRERYPADAAMAADAGMSPVALESGKLRVATFRRACDKRLRSAVATLAESTRHWHPWARKVYADAIARGQDHPHAIRTLGRAWIRVLWRCWQDRVPYDPALHGNLRRLEAAGG

SEQ ID NO: 404980 - protein, 358 aa, unidentified
MNKRTRMSGLDKVFDAMDCRGAFVGLDVHKKTIHAALWLDGRVAAGWVMPAETTKVAAMLRPHRDRIARVVYEAGPTGYGLARALRQVGVVVEVVAPGRSPRPATQRTKADRLDAEQLAQYAAKGLLVAVAVPTETEEADRQLMRLREQLVNKRRRVKQQIKSFLLQHGVGEPHGLARWSRAAVAALRELALGSRLRLCLDVLLEQLEQLVAHVGRIEGALRELAATARHAEAAAIARTHPGVGPVVAMSYLVEVYRSGRFDTPRQVASYIGLAPRVRQSGQMRRDGPIVRTGRASVRALLVEAAWRWRMHDPAARRVFARLVANTGNAKKAIVALARRLAINLWAMLTRREPYRAAA

SEQ ID NO: 404981 - protein, 341 aa, unidentified
MKPEMSVLGIDIAKRLFHAIGMDERGTIVFRKRLSRHDLIPFIAKLPPVLIGMEACGGAHYWARRFREYGHEVKLMAPQFVKPYVKSNKNDSRDAEAIAEAVTRPTMRFVPIKDVAQQDIQALHRVRERLMGARTALVNEVHGLLHEYGIVIPKGVAKFRQAVVSKLESAKDKLSALSQEMFWKLVEEFAALEKQLAYYQEKLEALATTHPECQRLMTIPGIGPLTATALVAAVSDASAFKNGRQFAAWLGLVPRQHSTGGKERLLGISKRGDSYLRKLLVHGARATIRWVGRKTDRRSQWMRQLIERRGKNRTAVAVANKNARIVWALLTSHQAYDLAKG

SEQ ID NO: 404982 - protein, 366 aa, unidentified
MKKNSTVATNRNEIFNEPKLTIGLDLGDRSSHYCILDEAGKVIPEHNLPTTPKGIQQVFSRIPRSRIALETGAHSPWVSRQLSAMGHEVIVAHARNVRLIGESSRKDDQLDARTLARLARIDHGLLGPVRHRSAKAQIHLTVIRARAALVSTRTALVNAARGLTKSYGERLKKCGTEQMNREICKGLSQELRDALDPLLGEIESLNERIAEYDRRIEQIAKEVHPEVALLKQVKGVGTLIALTYVLTLDDPHRFRRSRDAGCFLGLRPGRRNSGQSEPQLHISKEGDRYLRTLMVQGAHYILGPFGQDSDLRRWGLKLAERGGKNAKKRAVIAVARKLAVLLHKLWVSGEVYEPLWNNHQVVSAVA

SEQ ID NO: 404983 - protein, 317 aa, unidentified
MAQNDLVVVGIDVAKDKVDACIRSLSLRQTSPGTVQGQRKLIAWLCKHRVSKAVMEASGGYERGWAKALRGAGIEVRIVDPKRVRSFAKSAGRLAKNDAIDAEMIAWFAETFCEAPGQTYDAAREELQKLVNARQGLLEIQTKIQNRDEHVAPAPVQKMHARLLKRVTTELARLEAAIAATIKATPHFAERAEIIESVPGLAGTTAANLIVGMPELGQVSNKIAPALLGAAPYDDDSGRRRGERHIKGGRRKVRNAFFMPCLGAATQHNAVLKSFYQRLLAKGKEKKVALIACMRKLIVILNTMLARGEKWDATRYA

SEQ ID NO: 404984 - protein, 402 aa, unidentified
MKTYILRRAKAVEPQKSLPPARPKPVVREASQGPALFVGLDVHNDSIAVSLAPSDASEVRRYGIIGGEHDDMLKLAHKLQAAHPDLRLKFCYEAGPRGFALCRCLRAHGRDCILVCPSKIPRKPGERVKTDRRDADDLARLYRAGELTGIYVPEPEDEAMRDLLRARFQVGRQQHRARQQLKMYLLRHNLRYGGQTSWTPAHLRYLAKLKMPYPVQQIVFQEMLEVISEATARLERYDVEIERAVPGWRWEPAVRALMSLRGMALLHAATLVAELGDFNRFEHPGQLMGYLGLVPSEHTTGKDRQQGGITKMGNAPARRALVEAAWQYRVPARLSPHLKKRQEGLPKAITDIAWEAQRRLHHRYTHLTRVGRKKSQVAVTAVARELTGFVWAIARQVPPVTP

SEQ ID NO: 404985 - protein, 343 aa, unidentified
MDHFAGLDVSVKETSVCIVDDTGRIAREVKVASEPDSLLQVLTNPAYHFKRIGLEAGPLSQWLFSTLAEAGLPMICVETRHMRAALKAQVNKTDRNDARGIAQMMRAGLYRPVHVKTLRSQKLRMLLTHRKLLQSKAIAIENDLRATLRNFGLKVGMVGTVKFETRIKELVENLPELAVLVEPLLIVRRVLREQIGILHRRLLAVVRDDDVCRRLMTVPGVGPVVALTYRATVDVPARFRNSKAVGAVFGLTPSRYQSGESDRTGGISRCGDEMMRAILYEAAQILLVRSTKWSWLKAWAMKIVRHRGLKKAIVALARRLAVIMHRIWVDGTEFRWTREVAAT

SEQ ID NO: 404986 - protein, 426 aa, unidentified
MRYFGLDVHKAFIQVCAIDDAGQKLQEFRIAATAEGIGAFSSRLGEEDEVVLEATFHSWAIWALLAPHAGRAVVANPLQVKAIAHARVKTDKVDAHMLAQLLRTRFIPEVEMPDAATWALRELVSHRRFLGRQRVALRNRVASLVNGRLYHCPWESLFGAAGRKWLAQQEFSEEERLILTSTLRLHDQVEMELKDLDQKLRGCASQMLPAKLLITIPGVNVAVAVGFVSAIGDVKRFESPKKLASYFGLVPRVSQSADRCYHGHITKAGRSQGRWLAIEAAQSLSVSDSPLAATYHRVRRKKGHNVAVTALARKLVVLTWHLLTGSQPYHYAPVARTRHKLRRVTTAARPAARGQVPGTLEAVYAEACLPLPGPRSEGERRAAASNRRVVTAAKKRSPSRATAPGSNRHVSTIGDAGTKSSTRVSP

SEQ ID NO: 404987 - protein, 342 aa, unidentified
MDKINTIGLDLAKSVFQVHCLGENGEVVLRRQLRRAEVLKFFSKLPPCLIGMEACASSHYWAREIAALGHRVRLIAPTRVKAYVKWGKKNDATDAAAIAEAVTRPSMQFVPIKTVEQQAVLMLHRARKLLVEQRTRLRNAIRAHMAEMGIIAAQGEAGFTTILTSVDDEDGLLPPMARQALAALAGQWRTAGEQIAALDRQIVEWHKSNDDSRRVASIPQIGAITASTLVATIGDATRFDSGRQFAAWLGLVPRQNSSGGKDRLGGITKTGDRYVRQLLVIAATGMLRRIRKDETLSPWFAQLLKRKPPKQAAVALANKLARIAWAILAKGGLYKSPAIEVA

SEQ ID NO: 404988 - protein, 361 aa, unidentified
MSNSTTWIGMDVHKERIHVIAVNEAGHTEARWETPNTMKGKGRLATRLAGLGKTRCVYEAGPCGYDLRRFLDEKGIPCDVIAPSLIPTRAGDRVKTDRRDAEKLARMHRMGELTAIHVPTPAQEALRDLVRAREDANEDLVRARHRLQKFLLRQGRRFEGKSWTRDHWRWIRVLTFEDNNAETVLAEYLLAVDQQLERVARLDARIEEEAQKPQIAPAVGRLKTLRGVRTLTAMTILSELIDMNRFASPRELMSFIGLVPSEYSSGGKQRRGSLTRAGNAHVRRILVEAAWHYRHPPHRTGETIRKRREGQSPEVIETARKAEVRLYRKFTRMVMRGKRTTVAAVAVARELAGFVWAIGRV

SEQ ID NO: 404989 - protein, 331 aa, unidentified
MKRKFIIGIDVSKETLDVFILVSSFYLQVANSHKGFPVLLENCINQCACTLDELFFCFEDTGRYSRQLSSFLSEAGISFAMVSALEIKRSLGLKRGKNDRVDAKAIAHYAWQHKDDLRPTKVNSALEGELRQLLTLRNKLIRHRTAYKNNLHDLKDVLYDGETDCIRQVHQHMIIELNEQIKIVDQRIENLISSSELWQNNYQLIQSVRGVGPVLAKYFIIYTQNFTRLNNPKSFACYAGIAPFEYSSGTSVKGRTRVHPFANKQLKSLLNTAAMAAIQLKGEYKTYFQRRTEEGKNKMSTLNIIRNKLVTRVYAVVKRQTPYVDLTTFAA

SEQ ID NO: 404990 - protein, 427 aa, unidentified
MNYTQNKKIEQVTESTLVIGTDIGSEFNYVRAFDWRGIELTKKVFSFSNTKQGYINFLDWVHQVLSRTNKKEIIVGCEPTGHYWFTFAKYVKEQGMKLVFVNPFHVHQSKEMDDNSPKKTDMKDPKTIAKLVVEGRYSLPYVPEGVYADLRTAVSSRDRILKEINAATNRIKRWLKIYFPEYLEVYKVFDSISGILVLERAPMPRDVISLGTEGINKIWREAKVRRVGMKRAQTLVVAAHNSVGINGGSCAKLELQLLLEDYQSKKNQLEKITQVIEEETLQIDYVEQLLSIKGVGLITVAGFLAEVGDIRRFNSPKQVQKLAGLELKENSSGKHKGQTTISKRGRKKLRRLLFQVVLPMIRSNREFREIYDYYTTRIKNPLKGRQAMVAVSCKLIRVFYAVLTKGIHYDAEKLRNDIIRPQELKVA

SEQ ID NO: 404991 - protein, 402 aa, unidentified
MNAVGIDVSKSKSVVAIMRPFGEIVSTPFEIKHTASDIHSLIELINSVEGESRIVMEHTGRYYEVLAHQLLEANLFVSAINPKLIKDFDNDSLRKVKSDKADAVKIARYALDKWQNLKQYNVMNELRNQLKTMNRQFGFYMKHKTAMKNNLIGILDQTYPGVNTYFDSPARSDGSQKWVDFASTYWHVDCVRKMSLNAFIDHYQNWCKRKKYNFSQSKAEEIYGKAKELVPVLPKDAITKLIIKQAVDQLNSASTTVESLRTLMNETASKLPEYPVIMAMKGVGTSLGPQLMAEIGDVSRFTHKSAITAFAGVDPGVNESGTYEQKSVPTSKRGSADLRKTLFQVMDVLIKTHPQDDPVYQFLDKKRAQGKPYYVYMTAGANKFLRIYYGRVKEYLASLPES

SEQ ID NO: 404992 - protein, 390 aa, unidentified
MSFDHHSKEPTVILTNLGAIFVSLELSRSTWLITSMSPGGGEKMSKHSVSAGDIGALLACFSELKQKALSRTRKSFSITVIQEAGLDGFWIHRVLEREGHESYVVDPASIATSRRRRRAKTDRIDGEALVRALLAYKRGEPRVCAMVRAPSPESEDSRRLSRERKTLTVERVQHVNRIKGLLFSQGVSGYEPLRRNRRQRLDELKTGDGRPLPPHLKAQISRELDRLELLIEQVKIVETERDALFAPAVKTGQLPAPQAMLADLKGIGAEFVAVLWSEGLCRSFTNRKQLGAYAGLAPTPWQSGSVAHEQGVSKAGNPRLRTTMIQLAWLWLRHQPQSALALWFKERVSHNGGRLKKTTIVALARKLLVALWKYVTAGIVIEGAVMKSTA

SEQ ID NO: 404993 - protein, 350 aa, unidentified
MTTMTETARRITGGVDTHRDVHVVAALDERGGLLDTNEFPATVEGYHDLLVWLGWFGPIDKVGVEGTGTYGAGLARHLLDHDVEVVEVDRPNRQRRRRAGKSDTTDAISAARAALSGEASTTAKTRDGNVEKLRVLRVARRSIRQDRIRALNQLRSLVVTAPDELRVELSDLTSIGVSQAVAKFRVADPTTTLGAIKYAMRSLGRRAEALRWEGKEIDKIMRTIIEDTAPVLIDQGGIGVDAAGALLVAAGDNPQRLHSEAAFVRLCGAAPLEASSGMVTRHRLSRAGNREANAALYRIIINRMANDERTRTYVTRRRAEGKSSLEIIRALKRYVAREVYPLLGNNHLTT

SEQ ID NO: 404994 - protein, 380 aa, unidentified
MGKIIRIGMDTSKSVFVLHGVNSAEQPVLRRQLRRQQVVAFFGKLEPTRVGIEACGAAHHWARELGALGHEVVLLPPQYVKPYVKRGKNDAADAEAICEAMSRPTMRFVPVKTPEQQAALMLAGTRDALIRRRTQLTNMIRGYAAEFGLTAAKGLAKIEALLARIAADAALPELARELFAAHAREYAQLQEQIDTIEARLMTWHRHNELSQRLVEIPSVGPIGGSLLAMKVPDPKMFRSGRDFAAWIGLTPKDHSTAGKTRLGVITRAGDEMLRSVLVAGATALIQQVKRGKGHPWPWLVELIKRKPPKLVAVALANKTARVAWKLMVSGERYNPTQARAVRAAREGRCASLLEGSATRPSLARNPRPGTANLAAASRHA

SEQ ID NO: 404995 - protein, 429 aa, unidentified
MEEVEDAELVVERIAALDLGKAGLEACVRVPSPNRPARRMQELRGYGTTTAQLLEMVAWLRQWGVQRVVMESTSTYWKGVYYLLEAEEFECWLVNAREVKNVPGRAKTDRADAVWLAKVAERGMCRPSLVHPPEIRRLRDLTRYRRALVQDRTREQQRIEKLLEDAQIKISSVLSELHGVTARAMMDALIAGQRDPRALAQLAKGRARNKTAQLEEALRGFFTDHHAVILQMMLDNTDRISAQIADLDARIEEAIGPFSGQAARLVEVPGIDTVAAAELIAELGVDMTRFPSDAHLASWAKFCPQTHRSAGKSKSKGRGRGNPWLAGTLGRIAFANSRADTFLGARYRRLARRRGKQKAIVATGNSVLTVIHHLLSDPEATFCDLGPEYYESRINKHRRAHDLATQLQALTGQHIVIRDGKAVITEAAA

SEQ ID NO: 404996 - protein, 462 aa, unidentified
MKEDTRVSSFSKHKNKLGYIDPTVAGIDIGSALIHVAIPDGHGEAVVIEFGSTTPQLHIIVNTLKSAGTTTAVMEATGVYWIPLYEILEESGIKPVLVDAKSVKNVPGRKSDVQDCQWIQTLYSNGLLRAAFRPPKDRIKLRSYVRHRQNIIKTRQYTLLHMEKAMQLMNIKLSSALSDIGGISGMDIMRAIANGERDPAKLANLRNKSCKKSQQEFEDALTGNFQEEHVFALQQALEHYDFANKQLEECDKRILAELEAFPDITNVPRPKRDKDKKHDGKYSAARKPKKNTLSFDAAEILWRKSGKDLTALPGIDSATALLIFAELGGAIVNAWRSAKEFASWLKLCPGNNISGGKSRKSKRQPCTNPIAQALRMSALSAKKSSSALGAHIRRVSGRTDKLKGIKAGAHKLAHMVYHMCKEGWEYHEKGEEAYEKAYKKRSFKNLEKRAKEFGYTLVPRAA

SEQ ID NO: 404997 - protein, 346 aa, unidentified
MTIYCGVDFHARQQTICYCETADGDVRLQELRHDRDDIRGFYSQFTGEVVVGLEASGYSTWFVELLEGLGHHVLVGDAAEVRRRARRRQKNDRRDAELILDLLCKAEFPQIHRPPFESREVLRLLRYRHKLVQVRTRAKNSLQALAYGAGAARRAQLLSRKGRERLLRLPMSEAMARQRQEWLSLVDEFSARIKSLDAWLDERAKHDERVLRVQTHPGIGLLTSLALVHALEPVSRFAGGRKVAAYVGLDPMEYSSGEKQRFGSISKGGSRLLRYLLVEAAQTAVRRDEELKGFYLRLLRRRGAQKAKVAAARKLLIRGYIILRDGIDYAEFLRRGVEARPARLAT

SEQ ID NO: 404998 - protein, 418 aa, unidentified
MEPNRFRHYIGIDWATEAHRICLLDHNGQLCAKVSIPHSGAGLDQLLEWLASHGVEPAFAAVAIETPRGALVETLVERHYAVFAINPKQLAHFRDRYTSAGAKDDDRDAWVAASALRTDEKAFQRVTIDAPELIQLRELYRTVDELREEVQRLTSRLREQLNRYYPQMLALYPSADQPVLWDFLELAPLPATAHQLTLPQVEAVLRKRRIRRFTAGQVLEQIRAIPLTLANGAAAAASEHALVLVAQLRVIYELRKQTLKRLASIVKKMRQTTAGTGAPSDAAIIASLPGAGILTTAALLSESSRAVAQRDAPALRAYAGVAPVTQQSGKSLKVSMRYACNNRLRNALYHFAMGSLRDPVARRHYDRLRGEGHSHARALRGVADRWVTVLMAMLRSGTPYDATLRKAWQAADAAGATA

SEQ ID NO: 404999 - protein, 361 aa, unidentified
MRIIGCDLHARQQTLAMLDRETGEVVNLTLMHEGNQVREFYSQLPRPVLVGIEATGSMHWFLNLMEELGIECRVGHPATIRAAAPRRQKTDRLDADLILKLVAENRFPAIWLPTKEVLDLRALVLHRHQWVRIRTRIQNALQAIALANGLRRGPSLWSCDGQAKIAFLPLRPHASYRRSMLQEMYRKMEEEIENLTQRVTEQAGNRFGARLLMTHPGVGPITALATEVFLGDPRRFVDGKALASYVGLVPREYSSGEHQRLGGVTKQGSPLLRFLWGEAGAHAVRHDPELKRFYRRKLVQKGLGKARVAVARKLGIRLWIMLRDEIDYEEFCRRGQKQQSGAACAGMPETAYGAKSHRAID

SEQ ID NO: 405000 - protein, 378 aa, unidentified
MDRATNSTAPADRLLCAVELSKNSWLLGIQFPDRQKASVYPLKGGDSEGLMAKLFAACDRWTKVSGKKPSIILCYEAGYDAFWLARFLKARGIECLVVDSGSMQVNRRSRRAKTDRIDLAKLLRALIAWCGGEQHVWSVVRTPTVDEEDLRRSHRERNRLITERTAHVNRIKGLLFAQGIRGINVKARYKTLRIDKLVTGEGRSLPPRLAREIKREIDRLELVQQQIAAIEEERDESPTTCKETEKKRAQLLLLKGIGPTGSAVMAREVYYRQFSNRRQIAGFLGLATSPYDSGQVERSQGISRAGSGPVRATMIQIAWLWIKHQPKSEISRWFVQRTADQSGRIKRIMIVAVARKLAIALWRYLEQGLVPQGAALTR

SEQ ID NO: 405001 - protein, 424 aa, unidentified
MPEGRDEQIVREFRSFTTDLNRLADWLEECGIDTVAMESTSVYWIPLYEILEERGFEVILVNARDFKSVPGRKTDVLDCQWLQELHMYGLLRGSFRPDAEIAAVRAYVRHRDMLIKNASRHVQHMQKALSQMNIQLHNVISDVTGATGMRIIRSIIHGNHNPEVLAEARDFRCRASRETIVESLVGNYRPEHVFALRQAVELYDFYQQQMYAVDQELEKLLQELEETSPEREEIGPARTTRRKGNEPNFDIRTRLHALSGTDLTQIPAIGPYSALKIISEIGTDMTRWPTADNFTSWATLAPRNKITGGRLISSRTRSSANRLAEVLRMAAMSIGKTDTYLGAFYRRKAARIGKAKAITATARKLAVIIYHMIARGVPFQDPGLQTHDEQHRKRVLKNLKRRAKSLGFQVIPDPPLNDMGEAVT

SEQ ID NO: 405002 - protein, 481 aa, unidentified
MRQMAAERNAQSEKAQTVRFSKKLEISNPYCAGLDLHKETIWACTGPFKDGIAPEVVTFPTHTEGLQKLVKHLKERHITSVAMESTGVYWLMPYLTLLDANLDPCLVNPGDIKNIKGRPKSDRADSVWICRLHSYGFLRASFIPPPTILNLRNLCSTRDKLIVQAGSAVQRMNNELVKMNIRLDNVVSDINGKSGVLVTEAIIRGERSPEALYDLLATRIQNKGKSKIIPYLTGRCDEFSIFNLETWHILHKSIEQNIERINEKIYQILQSLPKKASAADLPPAKKNYSESYLDFPYPLRPLFYEIFGVDLTQLPGVGAELLLSLVSTVGTDLSPWQDASHFVSWLALAPVNRESAGYRKSGKTKRTGNPLANAFKMSAMAARRTTTYLGQTARRLSNRITPKKAKVAIARKLAEIVYNIIRHGMPVYVKTLEEYESRRKKREIQHFVKSLNKFSSGDGFIPEVIEEIQRHNAKFTSTVAI

SEQ ID NO: 405003 - protein, 428 aa, unidentified
MSYRIAGIDVHKKMLAVVVSDVEIESEYQFERRMFSSNPEQLRSLAAWLVEQKAEEIVMESTAQYWKPVWETLERYWKPLCEKREGTRRRSGTLHLAQALSNRGRRGRKRDFVDAERLVKRLVARELTLSFVPDAEQRLWRTVTRKKYQLRRDVVRLHNQLEALLEEAHIKLSSLVSDLLGVSARRMLKALADGETNPAALAALAHERLRATPEQLCDALGACRELKPVYRRLLKMALEQLQLLEQQIGQLDQELATLLHPHQDAVQRLAEVPGFAVDSAQQIVAEVGPTAATFPSEKCLSSWVGACPGEEESAGVNYSHRSPKGNRHMRRLLNQAANAAIKVKGSIFEVVYRRCVPRLGHNQTIGVIAHRQCRLIWLILHQGTRYEERGPAVTMRSRYQRTWRMIRQLRQLGYRIESPSPQPGQAHA

SEQ ID NO: 405004 - protein, 384 aa, unidentified
MQSLSIDRPAACDDIAILYVALELSKSSWLVAVNAPGSNKISKHPVTGGDLAGLLALIERTRTAAEARLGRPVRAVSCYEAGYDGFWLHRALTEAGIENRVLDPASIPVDRRRRRAKTDTIDVIGLMRVLMALLRGESQVCAVVHPPSVEEEDERHICRERSQLIKERVQHTNRIKALLMTHGVRGFDPCRPNWRAKLDGLRRHDGQSLPPHLQKRLERECVRLHLLLEQIAGIESLQRRRAAAAAPQESGGHVQLLARLRGIGVTSAASLYCEALYRDFRNARQVGGYLGLAPSPWKSGSLDRDQGIAKSGNPRARTLSIEIAWLWVRHQPGSALSRWFWARVGDAKGRPRRIAIVAMARKLMVALWRYVSAGVVPEGAVFKA

SEQ ID NO: 405005 - protein, 352 aa, unidentified
MPGLPHTKAKRTIDPEAEALLAAIAAYRARAAATGRSIERVIAVYEAGWSGFWLARWLMRHGVEVYVVQPSSVPVDRRIRRAKSDGIDSELLLRTLLAWLRGEPRVCSMVPVPDEADEDARRCVRERSELISERIGLTNRIGAILATLGVSDYNPLLRNRGRRLAELRTALGEPLPANAHAKLKRLLARLELVLTQIAELERERDAVVETEASDGASKMIQQLTALRGIGVQSATVLVREAFVRRFANGKALGSYAGLASSPYSSGGIDREQGIGKAGNRRVRTVMVELAWLWTRYQPGAAQVCWFRERVASTGRRVRKIMVVALARKLLIALWRFVIDGVLPEGAVLKPAA

SEQ ID NO: 405006 - protein, 330 aa, unidentified
MNTTTPVLLALDIGARKHAFACERDGKRTVGSIANDPQQLRTFLKDRMPRNGTLQVLMEATGIYYLDVALIADELGAQVSVINPRAAHNFAKAMQQRSKTDALDAVMLLDFLKRMPFTPWQAPAQPLMELRHYGRYLVQLTEESTAARNRLHALSSTSSSPAFLRADLKRFITSLEKRITRIRAQAMVLIKADSWLKERMDALLTIVGVAEVSAIALLSELAVLPPSLTGRACVSHAGLDPRLHESGTSVHKPARISRHGNKYLRRALFHPAMAAAQHDTMAAAFRQRLLDKGKKKMQAVVAIMRKLLTAAWAMIRQPSAYEPQKLYASA

SEQ ID NO: 405007 - protein, 337 aa, unidentified
MVYGAIDLHMRYSQIRIIDAAGAVLRDQRVPTTRERLTAAFAGFGAMRILLETGTESEWVAQAVAAAGHEVVVADPNFAPMYGERRRKVKTDRRDVAALAEANRRGWFRATHRVSAAQRAVRQVLRTRRLLVQQRSSTIALLRAVLRQEGYRLGGGSTERVGARLAALDLPAALTATLAPLCRMLTMLTTEIAALNTQTQALATADPVTRRLQTTPGVGPVVALTFRAVVDDVARFGHAGQVSAALGLVPREDSSAERRQRGHITKAGPRELRSLLVQAAWSCWRSGHSGALRAWTDQLAARRGKRIAVVALARRLSRILYALWRDGATFEARTGAA

SEQ ID NO: 405008 - protein, 349 aa, unidentified
MGEVSTIGLDIAKNLFQIHGVDADGTVVIRKRIGRARVLEFFADLPPCRVGMEACATAHQWARELRKLGHDTRLMPPTYVKAYVKRGKNDAADAAAICEAVTRPSMRFVPIKDVEQQSVLMLHRARDLLIRQRTQLINALRAHLAELGLVAAKGREGLHQLVAVVTECGNERLPGNARFACQAIVTQLHAVQIEISGLDKRITQTHRANADSKRLDTIPGFGVILSTAVAATMADPKAFRTGRDFAAWIGLVPRQNSTGGKQRLGSISKQGDRYLRRLLVVGATSVINSARARPYKYPWVIELLGRRPTKVVAVALANKMARIAWAVLAKGKPYRAPTCSSNAVALAPA

SEQ ID NO: 405009 - protein, 345 aa, unidentified
MKITTVGIDLAKNVFQLHAVDERGKAVLRKQLRRDQITPFFANLAPCLIGMEACASAHHWGRVLQRLGHTVRLMAPQFVKPYVKTNKNDVADAEAICEAVSRPNMRFVPIKSVEQQAILSVHRVRQGFVKARTAQANQIRGLLGEFGLIIPQGISHIAERVPALLEDASNELPAALRQLIERLTAHLKELDRQVKEFERQIIAWHRSSELSRKLEKIPGIGPLAASALVASIADANSFDNGRQVSAWLGLVPRQCSSGGKSTLLGMSKRGDAYLRTLLIHGARSAILAAQRKSKNTNLWLTNLLNRRHPNIAAVALANKNVRTVWAMLAHDREFKANYASSAIAA

SEQ ID NO: 405010 - protein, 416 aa, unidentified
MNAVGIDVSSRKSTVAVLRPLGEVVCLPFDVTHDIAGLASLAEKLKAIDGETRVVMEHTGRYYEAVAKALHEAGFFVCAVNPLLIKEYGANSLRRVKTDKADAIKIARYALDNWADLRDFTPMDAIRYDLKTLNRQFQLASKQRRASANNLIALLEQSFPGIRKCFDSPVRSDGTQKWVDFAHSFWHVDCVRKQPFPAFCERYRKWCKRHAYLFKLSNAEEVYALAKRAVVLTPKSKVVKVLVQEAANQLSSISRSVEVYRAEMDRLAAMLPEYPVVMAMYGVGKSYGPQLMAEIGDVRRFERKQALVAFAGIDPMPNQSGDKNVRSNKSSKRGSPYLRKTLFNVIRTYLQCAPQDEPVFQFLNRKRAEGKPFYVYMLAAANKFLRRYYAKLRDYFASLDTLQPVAPIPTILKATL

SEQ ID NO: 405011 - protein, 344 aa, unidentified
MEHFAGLDVSVKDTSVCIVDDTGKIVREVKMASEPEALLAVLSNPVYHFKRIGLEAGPLSQWLFCALAEAALPVICVETRHMRAVLQAQINKTDRNDARGIAQMMRVGLYRRVHVKTLRSQKLRMLLTHRKLLQSKAIAIENDLRGTLRNFGLKVGMVGKVKFEARIKELVENLPDLAALVEPLLIVRRVLREQIVILHRRLLAIVRDDEVCRRLMTVPGVGPVVSLTYRATVDVPARFRKSKSVGAVFGLTCSKYQSGEIDRSGRISRCGDEMMRVMLYEAAQSMLRSKKWSWLKAWAMQIARRRGMKKAIVALARRLAVIMHRIWVDGTEFRWTREQAAAAT

SEQ ID NO: 405012 - protein, 394 aa, unidentified
MIFIYFLPRARPGGGWLLDDMGCQAGGEAASLTTMITDDKTETNKSYETIKLGIDAHAKWYYVARQLDGATPQPVQKMTFEALLRFVAKQQALAGEVHTCYEAGAFGYHLHRKLEALGVSNLVVQPQDWDERGKGVKTDRIDALALCQRLDRYVRGNRKAFSVVRVPSEEEERERAFSRQRQQLVRERQRLQAMGRSLLAMQGIHVRGKWWKGQTWAAICREAPAWVVERLEVFMKLIEPVEVEERKLTEGIQKVGRKSRIPKGVGPLSFEVLRREVGDWSRFNNRREVSSYTGLCPREHSSGGKRRGGSVNKSGNPRVRAMLVEMVWRMMRWQPGYHALRKWMAVLGDASRSAAVRKKAIVAVARQLAVDLWRLFTGQTTAEKLGLIYLPEAS

SEQ ID NO: 405013 - protein, 385 aa, unidentified
MKPNSQMTLDRYFRQCVGLDISKDKFTACLYMYDMAGDTGCCTASIDFTNDRKGFNQMVKWSRKEAQKGFPLAYLMEPTGSYYEPLAYHLHKIGQTVYVVLPNKARSFCEYEGIKTKTDAMDARCLALLGCKNRKLRPWSPPLPVYRELRQLTRLRADLVKMQTQVLNHIEAIDHMESVASEVEKSYGKLLETIRKQLEKNGKDIEEKLAQDKELEARVKRIATAKGIRVGTVTCIVAETQGFHLITNRKQLTSFAGLDVKARQSGKDDPQHHITKKGNAHIRAALYMPALSAAHCNPQMKKAYSRICDRHPDVKMIGVTAIMRRMLLLVYTLWKSGEEYDETRDKTHTPRKMEMTPEYGPGDCLDLNKESAGKNATGEEDIAPF

SEQ ID NO: 405014 - protein, 358 aa, unidentified
MRMVVYVGIDVHKKYCQAALMNDNGKLERELRFDNTTKGAEGLVNLAKSIDPEIKAVLEPSANFWIRIYDQLEDESVEVKLSNPLRTKAIAEARIKTDRIDAKTLATLLRGDLVAESYVPNHKNRERRAIIRHKASLMHMRVEIKNRIHALLDKHELTHSYSDLFGKEGLEWLRNIQLPTIDHQILQSNIQILETITTEIDNADIQIAKDAVNENQAKLLMSMPGVDYYAAMILLSEIGDVKRFPTPDKLASWVGLTPQVHQSGETNWTGHITRKGSKRARWILGQCAQSARQHDPRMRNFYERIERKHGSSKAIVAVAHKMVTIMHVMLTRNEPYRGQNIQLTEKKHKRLNNIANSA

SEQ ID NO: 405015 - protein, 339 aa, unidentified
MQLYTGIDLHSNNSYFAIIDDTGKRIFHQKLFNDPVAINQALAPYEGTIAGIVVESTYNWYWLVDALMTAGYHVHLANPSAIQKYSGLKHADDKHDAFWLAELLRLNILPEGYIYPKEERPLRDLLRKRGHLVNLRTSLLISLKNIISRNCGQTLKANDVKKIREDLVAPLLAGNEDLALAGQVSKEAIDFLTKKIRKIETFIETKVKLQEPYEYLLGLPGVGKILALTIKLESGPIARFPQVGNYASYCRKVCAKWSSNGKAKSGGNKKNGNKYLAWAFSEAAELARRFDPQSRAYYNRKLQKTNFMVAHGALSHKLARAAYHIMRDNVPFMPEKLFG

SEQ ID NO: 405016 - protein, 410 aa, unidentified
MEVLYPHCAGLDVHKQTVVVCARHMVNGTVTREVRTFRTTTKDLLALSEWLAGQGCTHVAMEATGVYWKPVWHILSDGDFTLVLANAGHVKNVPGRKTDVNDATWLADLMAHGLIRGSFVPDIQTQELRGLLRTRKQFVRERSSHVQRLQKTLEDANIKLDGVISDIVGLSGRRMIEALIAGESDPEALAALAHRQIKASPAALREALRGRVTNHHRFLLRLHVQHIDALDAALNAIDREVDIHVESFREAVLLLTTIPGVSDLSAQVIRAEIGGDMSRFPTVGHLISWAGLCPRNDESAGKRRSNRMRKGAPWLKTTLIQCAWAAARKNGSYLQAQFHRLRARRGAKKAIGALAASILTAAYHMLKDGTLYHDLGPDHFDRRAKTVQTRRLLTRLQRLGYAVQITPLAA

SEQ ID NO: 405017 - protein, 366 aa, unidentified
MKKISTVVAKQSENFSEQKLTIGLDLGDRSSSYCVLNEAGEVLLEQRLGTTPKAMKEVFGGMPRSRIALETGMHSPWVSRVLSELGHEVIVAHARNVRLIGESRRKDDRLDARTLARLARIDPQLLAPVKHRSAQAQSHLMVIRARAGLVRARTSLINTARGLTKSYGERLRGCNPRNMNGEKAQGLSPELQAALEPLLAAIESLSERIYEYNQQIETIARESYPQAARLKQVKGVGTLIALTYLLTLEDAQRFRKSRDVGCYVGLQPGRRNSGQSEPQLHISKEGDPYLRTLLVQGAHHILGPFGADSDLRRWGLKLAERGGKNGKKRAVIATARKLAVLLHRLWVSGEAYEPLRNSNRAMLAAA

SEQ ID NO: 405018 - protein, 345 aa, unidentified
MQVTTIGLDIAKRVFQVHGVDEAGKAVLRRKLQRAEVLTFFRDLSSCLVGIEACGTAHHWAREIRALGHEVRLMPASYVKAYVKRGKTDAADAEAICEAVTRPTMRFVPVKTPEQQAVLMLHRTRDLLVRQRTMLVNALRGHMAELGIIAPQGISRVADLVAVLLGKDETTMPALARQALRGLAEELETLGERIEALEAAILAWHKENEASRRLATIPGIGPITASAIVASITDPTQFRSGRHLAAWIGLVPKQNSSGGKERQGGISKQGDRTLRRLLVLGATAVIRHARTRSDAEAGWLKRLLERRPAKLAAVAQANKTARIVWALLVRGGSYRAPATAQAVTA

SEQ ID NO: 405019 - protein, 523 aa, unidentified
MATRFKSRARRSRRYLTIVKPSGSLHPRVQKVGPEHFGIVAVDCAKARSKWMLADFYGRILIPPTVVEHNKQGFDSAIAEIRRAMESHSLGDMLVAIERTGIYHLPVKRAFSSQSFDTRIVHPLTTKQYRLPADPGNKTDDTDLFAIHRATTNGFGLIELPLDEIHGPLRLLARYRRSLVRKNASLRNQIIALLDVILPGYTGIFNDVFNNQAALSIARSVQSASKVRALGSEGLAQILKELKVRYQRRTLKKILDWANGIDSTTEYSEMYHTILVHLDDERCGRLQQIAKLEQEMASFLVRTAYVVLLSIPGISIVTAAEFAGEMGPITNYANDQAITGRAGIYPSRYQSDKVDRCDGPLVRRANRKLRGVIMMIADNLLSCNRFFQALKVPWVAAGMEQQAMCVRVAKRFCRIAYQMVAGGQVFRHPSCQKRDAILRKLSIFHSEHGSSMAQVMTDLQAATDHIPKSEHAPEAKSLYEELQPSNNRQQCGPRRLGEILPVILAKLGVNPVDLSMKGENDLT

SEQ ID NO: 405020 - protein, 430 aa, unidentified
MHNKNYISVGIDVGSAFSFMTILAPDETVILKPFKITHNNKDSLERAVSEIKKAEELYSLESRIFLESTGIYHFPLFCYLVDCGFNASIINPIITHSTKNGNIRKVKNDKIDSKGIAKLGLSKDIPVSQFPAKLVLELRSLTRKYYDLTDERSAHINKLKGDLHTVFPQYLDVFCDVTGKTSTMILRQYGTPDKILRGHKKTMIEKISKASRKGLAKASERYEKLCAAANAAKTFGCQIDSIYFNIFLTLDLVKKLDSALDSILNRIRQLITFNKNEKFIQQIKLLNTIPGVGFLTAVTIMCEIGDFSAFRNPKQLFAYFGLDPEVNESGKFVGTQLHMSKRGSRIARRAIFAVALASIRTKRNGEGINPYLRKYYELKSGQKPKMVAIGAVMHKVCNIVFAVLRDEKAFELRSPEEHCKQYQRPALAAA

SEQ ID NO: 405021 - protein, 349 aa, unidentified
MIESKLTVIKYFIGIDVSKATFNYCLRYAGGPVLNGKVANNVESIKEFILTLKEIPGFKLGYTVFGMEVTGVYGLILIDTLTKMKAKVVVEPSMRIKNSLGIIRGKNDKLDAARIARYLIKNLQELKLWVPHRKIIDELSSLSTLRERMVKVGVIITTPLNEDINFVNPAISLTNINLCNPSIIQIEQLIRNIDIKIKALYTNDDHCNRLMKIMLSVMGIGEVTALQILIHTNEFKTITTARTFASYCGVAPFEHDSGTSVKKRARVSPLANKRIKSLLHNGVRTCIGHDPSIKAYYRRRVDVDKKNKMSVMNAIKFKLICRVFACVRVDRFYEKGYVSLKPVNNKIAN

SEQ ID NO: 405022 - protein, 376 aa, unidentified
MSNVRFIGLDVHAETIAVAVAEPNGEVRSLGVIPNRLESIRKLARKLGPIEHLRVCYEAGPTGYVVYWQLAALGVRCEVVAPTLVPVKPGDRVKTDRRDALKLARSYRAGDLTAVWVPDAAHEALRDLVRAREAAKKDQLRARHRLSKFLLRQGRRPPTTVKAWTQAYLAWVKSAVHFEHAAQEATLLDYVHEIDHVAARLTRLERAIDDAVQTAPVQTRAVIEALQALRGVALVTAVTIVSEVGDFTRFARPRQLMGYSGAVASEDSSGTRTSRGAITKTGNAHLRRVLIEAAWCYRHRPSIGATLRKRHAAVDEDVKAMAWKAQHRLHARFRALTTHGKPPQLAVTAVGRELLGFIWAIGTTVHTKQRDSMIAA

SEQ ID NO: 405023 - protein, 348 aa, unidentified
MSIIGCDLHSRYQVIAMVETDTGERVTRRLEHENGEARTFYASLPKPSLIGMEATGYTQWFERLVAELGHELWVGDLAEIRARAVRRQKTDTRDAEYLLDLLLTKRFPRVWVPTPEERDVRQLLKHRNKLVRMQTSVRNQLHFLAMSQGVCRKQKLWSARGRAELEGLSLGPWASQRRKELLQLLDGLGPRIEELDGAVKTEAERRPEAVELMKHKGVGPVTALAFVLTWGPVERFRHSRQVVSYLGLNPRENSSGGRQRLGAISKQGNSMLRWLLVEAAQSAARFDPELRRQYQRLKFRRGGQIAKVAIARQLAVRLYWRLRSPEAPPVRMPGSPSSGVVPSTGSRE

SEQ ID NO: 405024 - protein, 447 aa, unidentified
MQKKSVKMEVINPNAAGIDIGSRSHFVAVGQADDDVREFGVYNEDLKSIADWLKEKGVETVAMESTGTYWQSLFTVLQSEGFQVILCNGKFTKNIKGKKSDVQDCQWIQKLHTLGLLSGSFLPDEATEQLRTYCRHRSNLLEQAADTARKMQKYLRLLNLRLDVVVNDICGLTGLKIIHAICNGETNPETLAALRNGNCKKSEEEMAKAMQTNGRNDYLFTLKHEHQMYQNLQSKITECDAEIEKMLNEQINEDENKKQHYIEKKVHKRINKNTPKNMDINLLSYQYFEGVDLLAIEGVSYSTVLTLMSEVGTGIHKFETAKQFASWLRLSPNNKISGGKVLSNKIPKGSNRLKIALRNAANAIGNLKNTALSNFFARISHRKGRVSAISATARKLAVIIWNMVVKGTPYVPLTEYQFVDQKRKKITAMKRLISKFDITTNDLNLQL

SEQ ID NO: 405025 - protein, 411 aa, unidentified
MNQITSVGIDVSKGFSMVAIRQPGGVIVEPPFRVNHTSRELNALVQRLHILPGEIRIVMEHTSCYWRPIGLTLVNAGFFVSIVNAMLIHDFHDNSIRRVKTDRADALKIANYALTFWAELKPYSPEDELRQLLKMQCRLYERTLSTSVTLRNGLISLLDQTFPEINRMFHPLVKQSNSHVKWVDFVKTYWHKEKIATMTESRFMDSYRRWCKREHYQYYTSHARRIYGLAKETVASMPRSESTRQLICQAVDSLNAVYEALHQLRKEMLRLAQQLPEFEAVMSLPGAGNITGPKLMGEIGDVRRFTSKRALVAFAGVDAMPYQSGIMDSHSRRMSKRGSPLLRKTLFQMCSICLQLSRVDDPVYLFMDRKRGEGKQFYVYMVAGAAKLLRMYYARAKSAFDADDEENKITA

SEQ ID NO: 405026 - protein, 341 aa, unidentified
MKTQRHIGIDLHRNNFTCCLRLENGRNYLSDWKLEDLPRFIQKLRPSDEIAVEVTGNTRLFRDAVAPYVARVVAVNPNQFRVISQSVKKTDPNDARNLALYLEKDLLPEVRMKDKAQAQLASLTQTRDTLVKLRTSLKNKINNILSAHGINLEREALSSEKKLNEVLAMKFDAMVKIELEVIVEEIRSLNEKIARLEKAIADEGSKLEGHKNLTSIKGIGPLSGSILLSVIGDINDFEDEGKLAAYFGIVPRVSNSNETEHSGRITKRGSKLGRTALVQCALIAQRYSPYLKRYYEKIKARRGTGKAIIALARKLLGIIYRTLKNKWVFEDFPNFVLAEAV

SEQ ID NO: 405027 - protein, 322 aa, unidentified
MSVSVLGIDIAKQKFDVALLVDGKTKHKTCKNSAEGFETLTLWLEKQGVRKVHACLEATGNYGEDLAIYLHGAGHIVSIVNPARIKGFAQSELLRTKTDKMDAALIARFCLAMKPGAWIPPSLEIRSLRALVRRVDSLIDMRSQEKNRVGTAHESVLFLIKEHIAYLDQEIERIRQQIAGLIEQDPNLKGRKELLDSIPALGKATIPHILADLDDLEKFNHVRELVAFIGLAPKETLSGSSMKGKPRLCKIGHARLRKALYMPALVSIQCNSVMIAFYNRLKDKGKNGKVIVCAIMRKLVHVIFGVLKSGKKYDPNFQPISA

SEQ ID NO: 405028 - protein, 472 aa, unidentified
MARAACRSGGSSSRKGRSSRARSAQFEQLNLNAAGIDVGADAHWVAVPKDRDEQPVRCFGAFTADLYALAEWLRQCQIETVVMESTGVYWIALFEVLEERGFDVKLVDAHYARQVPGRKTDVKDCQWLQELHTYGLLRGAFRPEDEVCVLRSYLRQRSMLVAMASRTVQHMQKALEQMNLKLTEVVSDITGKTGMTIIRAILAGERDPQLLATYRDKRCKHDHATIAKALTGHWRAEHLFALQQAMEQYDFIAQQLRACDGHIEGCLQAFVPDVEIDVPQAPSARTWRSSRSNPLSFEVQAYLNAMTGVDLTQIDGIDSLTALKVISEIGRDMTCWPTSKHCASWLGLCPGNKISGGKRYRIRSKPSANRAATALRLAAQGLANSHSALGAYYRRMRGRLGAPKAITATAHKLARLVYSMLRYGTAYVDEGQQAYEQKYRDRVLTNLQRKAKAFGYQLVHVADIDGEVASTL

SEQ ID NO: 405029 - protein, 413 aa, unidentified
MRNLLEVCCGIDVHKEILVACILKGGIEEEPEPIIKEFSTLLSGLDEFKSWLIEHNCHDVAMESTGVYWFPIYNVLESIFYEDGHMNIIVANPHHMKNVPGKKTDIKDSHWIATLLRAGLLAPSYIPPKEIRELRDWTRYRDVLIKELVGHKNRIEKHLQQCGFKLSTILSDIFGMSGYELIRKLCEKGKLTALEVEGCLHGTLRAKSGEVQQAVAGRLSAHDRLFLTNLVKVMEHCRKEIEEAECHITVYAQQYEPTLQLLETIPALQRRASTIIVSELGDDFSMFPTAGHLCKWAGLCPGDNESAKKKKTMRIIKGNPRIKSVMVQCAWAATRCKNFFLRDWFYRLRARRGTKKALIAVARKLLAMVWYILTTGENYEETRYEQTKKNQEDRRKQRLKTEAAKLGFKLVPA

SEQ ID NO: 405030 - protein, 490 aa, unidentified
MSKGSSGMTRGDRRRNARRERLRGLVPRDGAVIGIDLADEKQAIAVIDHDVRVLARKTVRVKAFRLGEALDWAAGQARAKRFRSVTVACEPTGPRWLQVQRLCAERGLPVVCAQPLVSHLARRQQDYTSHKTDEADCVMIARLAAELHCCIPEALDEVWADLRHLRRRITLITSGTASVLRVRDFLSVAWPVAAEACAQPFGSVTWLAAMQVVTSRCGGQPEELADLGVEAFTALVRSAVPGWGGKRVCGPVCRAVFAALSSTEGVVRAHRRGLLRRIAAELGDLQRARAQQRETEAAMGGCLAGLGLARLGEIPGLTAAGAAAILAETGDPNRYDTSSSLVKHAGLSPSENASGAFDGEARISRRGRPGLRLTVWRAVWPMLIHNPVMAAKYAALTQAAGRACHLSCRSGPAPPRQGPRRVRRRAAALDLLPGGPRHLLGPRRGGRPQRRPGCRQLPAGGCLTSAYPRDTCRPPVPWTNPPDEGRASPP

SEQ ID NO: 405031 - protein, 421 aa, unidentified
MRAFGLDVHRDFCEVAIAEGGAIRSAGRVATRVGSLELFAQSLVAGDVVALEATSGADRIVSLLQANGIRVIVANTRKLRSITEAKAKTDRLDARTLARLLVSGLLDEVWAPDERTRSLRRLTNRRERLVRARTRAKNEAHGVLARNLCERPPVTDAFGKAGRRWLARLDLPVDERLTLDGCLRQVDFLDAEIAALDSEIARAALAWPEVLRLMTVPGVNVQTAATFMAAIGDIRRFPSPRKLVSYLGLDPRVRQSGSTPARHGRISKAGASEPRHMLGEVAWKVMLTPGPLRAFFERVRARRGPQVAATATARKLTVLLWHLLTREEDYAFARPAMTRNKVRRLELLAGAPAQKGRKGIAGGKSKAVFEAERELSRQAEAAYRRLVSDWRSSGPPKAGAGATPGRASSRPSKGKATRQTP

SEQ ID NO: 405032 - protein, 426 aa, unidentified
MTNAHSIPDNAVLVAIDIAKARNDVLVEIPGHKRRRRLVVLNTRAEHDRFVDLLRSFDRPVIAAFEATGNYHRAIAWRLLDAGFETRLISSMALARTREAIHNGWDKNDPKDAQVILHMLRTGLSQYYQDPLAAGISDIQELSKTHEMVSKAKTETLHRILTHYLPLYFPEIERFRQNSRSDWFFAFLEQFPTPSSIVALNKEDFIAAAWDVVGRKVSKARLLADIYETARESIALPVPINSRAVAMFRMVLAEIRSLIRQRDAIEAEAEALLTGARDYDALKQVPGIGPINALTILAEAGDLRRFGHHRQFLKFCGLDLSTHQSGVFRGQTKLSKFGNARLRRTLWMAAQVAIRQKENSFREKYERYIAKDRSNADLKRKALTAVTAKMARVVHAVIKSGNQYRPFFEEAAPSGRTPLCKGRGGA

SEQ ID NO: 405033 - protein, 392 aa, unidentified
MKICVGIDAAKTTHWAVAVDDGGRIVLDRAVENDPEGLDDFVSALRALEGEVTVGLDVVGSFARFLEAVLLAEGFALVHTPGIAVNRAGQGFSGGERKSDPRDARTIAELVRTRDLRPILPDGDTVTAIRLKVGRRRDLTQDQTRRLARLRGLLCGIFPGLERALDVTCKGPLVLLTRYVTPAEIRRAGETRLRAHLRKTQHLHGIDALVDRALKAARTQKISVPGEEPTAELIRDLAAEALDAKTKIARIDRDLEGLLADHPDGALIRSLPGMGAVLTAEFIACVGTIRRFASADALASAAGLAPVQRQSGKRAGWRRAYGGDKALKRVFYQSAFCAVSTKDQLSRAFYDRKRREGKHHTQALIALARRRVTVIWTMLQRREAFDPDKKAA

SEQ ID NO: 405034 - protein, 344 aa, unidentified
MQNMYYIGLDVHKRTISYCVKDGSGTIHAEGTIPATRFDLDRWMKALPQPWTAAMEATVFTGWIYDHLQPHAAALKVAHPLMLRAIAAAKKKNDRIDASKICDCLRCDFLPECYMASTAIRERRRTLRYRNLLVRQMVQMKNKISGLLMEAGVSYNKQRLHRAGYFRELLATNSGIDEGLCSLLRLCRETVVRLQTTESALVLSLERDSLLMDRVERLMTIPAVGPITALTWALEVGDAQRFSSIKKAISYCGLCGAEKSSANTVQRTPLSKQRNKHLQTTLIEAAKMAPRYSPNLAMLYDKEKQKGNANRATLAVARKLVAYLMAIDRGQRNFQAVETNCIAA

SEQ ID NO: 405035 - protein, 480 aa, unidentified
MKDQQLVGRPRKTGKRKRLSPALLERIEPNAAGIDCGASSHYVAVPSDRDPQPVRQFRTFTADLRRLADWLVKCGIKTVAMESTGVYWIPIYEILEERGLQVVLVNARHLRNVRGRKSDVTDCEWLRDLHSVGLLHPSFRPAAEIVELRAYVRHRHKLVEAAATAIQRMQKAMTQMNLQLHHVLSDLTGLTGLAIVRDILAGVRDPQALAAHRDRRCHASKGEIAAALTGNYRAEQLFVLRQNFEAYEFNLRQIAQCDAAIEALLATLAARCQPPASALPAARPRKKPSKNEPRLQLRSPLHRITGGADLSQIDGIGPYGALQLIAEIGTDMSRWATAKHFTSWLTLAPNNKISGGRLLSSKTQPSANRAAAILRRAAMSLSRSASALGAYYRRLAYRVGKAKAITATARKLALLVYRVLHGDITYHDPGAAAYQQHNRTRVVRNLRQRAQQLGFALMNIQTGEVLGQTPSKRVAPSPVS

SEQ ID NO: 405036 - protein, 390 aa, unidentified
MQVKADRPEAPSAIRSDLGAIFVSLELSRSIWLITSLSPGAGEKMSKHSVPAGDIGALLARFSEMKQKAFARTGKSFPIIVIQEAGLDGFWIHRVLQKEGIESHVVDPASIATSRRRRRPKTDRIDGEALLRALLAYKRGEPRVCAMVKAPTPEEEDRRRLCRERKVLTTERVQHVNRIKGLLFCQGVSGYEPLRRNRRQRLDELKTGDGRLLPDHLKAQISRELDRLELLLEQIKAVEAERNALFAVAKAAAPTAAPVAMLLDLKGIGPEFAAVLWMEAFFRSFANRKQIAAYAGLAPTPWQSGSIDREQGVSKAGNPRLRTTLIQLAWLWLRHQPQSALAIWFKERVMCNGGRFKKTTIVALARKLLVALWKYVTAGVVIEGAVMKTV

SEQ ID NO: 405037 - protein, 329 aa, unidentified
MKRNWFIGIDISKKTLDVVIYDQEKKNASKHFKVNNELKGFKEMIKTLKAEGVVLKEAFICLEYCGVYGLELGLFLEGKIDFCFCSPLHIKRSLGLTRGKNDKLDAYKIAWFSYLFRDELSPSKMPTETMLKLKSLMGERYRVVKASATEKQVLRELSRQLDSKSIRRIKHRLKILAADIKAIENEVKELIQSSPALKKNYELLISITGIALVNATMMILCTNNFEGIINARAFACYCGVAPFEYSSGTSIRGRTKVSNLANKRMKADLTNAARSAIVHDPEMRIYYKRKRAEGKEYGTVINAVKFKIITRAFAVIKRGTPFVKLRQAG

SEQ ID NO: 405038 - protein, 468 aa, unidentified
MSTKVKKVNGKMTKVSQLPSQFEHVNIDAAGIDIGAQKHYVAVPKGRDPQGQDVRHFETFTADLYALADWLKQCHIDTVAMESTGIYWIPLYEILEQNGFEVRLVNPRSIKHAPGRKSDVVDCQWIQQLHTYGLLTSAFRPDEQISVLRAYHRQRTMLIQHASSHIQHMQKALEQMNLKLTNVISDITGATGMKIIRSILSGERDPEKLSEHRDPRCKKSAKEISQSLQGNWRDEHLFALEQAVALYDFYQMQIAACDKQLQAQLCRFEDRSNAGELPPPAGKSNGSGKTLAFDAREHLYRMAGVDLTQIVGLNTPTVLTILAEVGLDMSRWPTSKHFASWLGLCPGSKISGGKNFSSKSKPSANRAAHAFRMAAYSLHRSQSATGDFLRRKKAQLGMPKAITATAHKIARIFYEMLKTRTEYKDLGVDYYQNRYKERMLHNLKRKAKEFGLILVNSNNNQLVMMKSE

SEQ ID NO: 405039 - protein, 411 aa, unidentified
MDLVYARCAGLDVHKATVVGCVRGPGPRRGDRQTETRTFATTRRGLEELTVWLTGHGVTHVAMESTGVYWRPVYAVLEGAVELLLVNARHVKMVPGRKTDVRDCEWLAQLLECGLLRASFVPPAAVRDLRDLTRYRKVLIRERGHHVNRVEKTLELANIKLGCVVTDLMGKTGRAILEALIAGRDDPDQLAALAQGLVKKKRAALREAVAGRMTPHYAFLLQQLLSVIDALDAHIVTFDARIEEAMAPFAEAVALAQTMPGVAARASQAILAETGVDMSRFPTPDQFASWARLCPGNNESAGKRRPTTTGKGATWLRATLQEAAWAAVRTKKSYYRALYHRLKARGDSKRAIVAVQHAMLVALWHMLRHRVPHQDLGVDYFERRNTARIRRHHVRRLEQLGYQVLLVEPAA

SEQ ID NO: 405040 - protein, 454 aa, unidentified
MCLEDRPVLESNAAGIDIGAREIFVAVPPGRDAHPVRVCATFTEDLQQMADWLVTCGITTVAMESTGVYWIALYDILESRNMKVCLVNARHMKNVPGRRTDWHECQWLQYLHSVGLLRGAFRPEAEVTAVRTIMRHRNELVQMSSQHVLHMHKALTQMNLQIHHVIDDITGLTGLTIVDAILAGQRNAVELAKLRNWRIKADEETIRKSLVGNWRDEHLFTLRQSRELYRTYQQQIVKCDQEIERLIGGFEPRADPEEKPLPVDRKRYRGDKKRAKKNGRPETKFNLRTEAYKIFGVDVTQIPGLETMALPLFGEVGRDMSKWPTADHFASWQGLCPDNDISGGRVLWKGTRRVQNRAGQMFRLAAHSLHHSLTPMGDYLRRMKVRLGPAAATTATAHKIAVIFYTMVKNQVEYDETIWATRDAKRQQRIEARLKRQAQQLGYQLVPLEKKPAA

SEQ ID NO: 405041 - protein, 391 aa, unidentified
MIFIGIDAAKDKHDCFIANSDGEVLCDVFTISNTLDGFNDLLSKIKSFSKDLSKTKVGLEATGHYSYNLLGFLLDTGLPTYVLNPLHTNLYRKSLSLRKTKTDKVDARTIASMLMSCQSLKPYTRALYHNEELKSLTRYRFDKVSERAKLKTSVSRLITILFPELEKLVSVVHCISIYALLSEFPSAKHIANANLTRLTNLLYSASKGHYNRDTAIRLREAARNSIGSVMPAKSLELKHTIKLIGELDNEISEIEAAIKQIVDSLGTTILTIPGIGYATAASILAEVGDFSNFETPDKILAFAGMSPSTYQSGQLSNCYAHMEKRGSKYLRFALYNATKYVCKWDSNFTAYLAKKRSEGKHYNVAISHAAKKLVRLIFALEKSRLPYMPVA

SEQ ID NO: 405042 - protein, 404 aa, unidentified
MEVLVDRGAGIDVHKESVTVCVMTTEGRKAVKTLLRFSTFHRGLVELREWLRRMRVTHAAMEATGEYWKPVYEVLEGAVELIVANAHHVKNVPGRKTDPEDASWLARLLRHGLLRASFVPPKPIRDLRDLTRLRRKTIEMSARVENRAQKVLEAAGVKLGSVMTDVFGKTGQAILNELAENHTDAVALVELAKGSLKKKKDQIALALEGSFTSHDALLLKQQLTLRDELEQRRTFLESQISVLVEPYEAIIDRLDAMPGINRNAGIEVLGEIGPDMSPWPDHDHFAAWAGLCPGNHESAGKRKNVATRKGNPFLKSILVQAATSAVKTKGSYYSAKFVRLCKRRGYKRAIVAIAHSMLIAIYHIIRDNCPYRELSAESFNKRSAESRAKSLINQLNQLGYSIQL

SEQ ID NO: 405043 - protein, 406 aa, unidentified
MNMNAVGIDVSKRKSTVAILRPGGKVVVKPFDVPHLSTNFQSLEKLIRELDGETRIVMECTGHYYELVARELSQAGFFVSAVNPQIIRNFQGLDNPLRKVKTDKADSVKIARYTLDSWANLKQYSLMDELRSQLKTMNRQFDFYMKHKTAMKNNLIGLIDQTYPGANTYFDSPAREDGSQKWVDFIDTYWHVDCVRKMSLSAFTDHYQKWCSRRKYNFSKSKAEEIYGKAKELIPVLPKDSFTKRIIKQAIEQLNTASQTIEQLRSLMNETASRLPEYPVIMAMKGVGPSLGPQLMAEIGDVTRFTHKGAITAFAGVDPGVNDSGDYSQKSVHASKHGSPVLRKTLFQIMDILIKTKPDDAVYRFMDKKRSEGKPYYVYMTAGANKFLRIHYGRVKEYLSSLPESE

SEQ ID NO: 405044 - protein, 324 aa, unidentified
MQNVHVIGIDVCKKTFDMCAIFDGKIKSNSFDNNDKGFEKLISWIKDVGLVNPHICMESTGSYSESVAVFLHNCGYRVSIINPLQIKSFRLSRMIRQKTDKSDCEVIARFCLQNCPDLWTPKSRENRELHEVNARIDALKRELNRLRNYLEKEILNKIVANSINEEMHFLHKMIEKLEQEALNIIHHSTKLTRQFSILTGIKGVGTKTAMTVLADMPDVSLFKNAKQYAAFAGVTPSHFQSGTSVKGKSHISKLGSKKVRKALYMAAIVVKNHNNGFQPFVNRLVSKGKRPKVIIVAIMRKLLHIFFGVLKNNQSFDQKMAFST

SEQ ID NO: 405045 - protein, 286 aa, unidentified
MTASLSSDNSFIGIDVGSRSFEAAWHRGGCAQYANRPDAIAAFLARLRAEPPTQRIAIEPTGGYEKLLVIELRRAGLPVEIVHTSRFQAYRQLIGVRAKSDGSDARLLAAYAAAPDEIRRQSHRVVLPEDGDREELAALGVRRDQLNRMLHAESCRLANVRSTFVRHSISRHLEALRKEVREIGIAMKAIVRQRQDLSRQKRLLQTVVGIGEVTAVMCLARAPELGRISNKAAAALIGVAPFVHESGGLSAPARIFGGRADVRRVFYMAAVAASQHNPVLAAFYDS

SEQ ID NO: 405046 - protein, 348 aa, unidentified
MAHFVGLDVSIKETSVCVVDAAGKVILEQKVPTEPADIIALLSSLGATYGRIGIEAGPLSQWLVNALTAVDLPVICVETRHMKALLTAQQINKTDRNDARGIAQMMRVGLFKPVHVKTLVAQEQRMLLTSRKLLQRKLLDLESDLRGTLRNFGLKVGVVSGSRYEARVRELVAGFPRLAAIAEPLLNVRRVMRQQLAVLHKMLLDTVRGDPVCRRLMTAPGVGAVVALTYRATVDQPQRFVHSRAVGAHIGLTPKRYQSGEIDYDGRVSKCGDALLRTMLYEAAQVLLTQSRKWSWLKAWGVRVAQRRGMRRAIVAVARRLAVVLHRMWVDGSEFRWNKASAAVPTAA

SEQ ID NO: 405047 - protein, 412 aa, unidentified
MDVYCGIDWAEDHHDVALAGRDGQLLARRRISDDAAGLAALLDLLAEHGDSPDDPVPVAIETPRGLLVACLRATGRPVYPVNPMAVARYRDRHSVSGRKSDHGDSVVLAHVLRTDMDMHRPLPADSELAQAIAVLARAQQDAVWDRTTAHNRLRSHLREYYPAFLAAFASLKGGIMRPEARAFLAAAPTQADAARLTLAQLRALLSRAGRRRGIDTEAARLLGAFRTEQMRQLPLVEQAMGRQALALLGQLDAACAAAADLEHAVTESFNLHPDAGIITSFPGLGALTGARVLAEIGDDRSRFQDAKGLKAYAGAAPITRASGKTRSVTCRKIKNNRLAAAGYSWAFSALTASPGARAHYDRRKDAGDRHAAAQRNLFGRLLGCLHHCLTTGCEYDETTAFPAAPEKLPRAA

SEQ ID NO: 405048 - protein, 430 aa, unidentified
MTTHTYSTSPRAIIASHNQKISQNKAVQPLIVDLSDQSVIKELNGKRPLGLDLASKKYRLCYQDDFGRMINEELRKNELRKMLRETPGKYHLCIEGCSGASYWECFARENGHKVKVVPGYVTRKLGWNQPKDDFNDAYNLYNALFNPLVPSCQTRTEDELAISALISQKEALLKSLNEQVNKTRSFLIETGEYDYVVRGCDSAVQAIELYISNHIHAASEHKRSIRCLEGFKRMILSLTREIDEINETLSEYGQTNKQVKLLLTIPGVGIETAVPIAIGAMNIERFESARQFQAYWGYHPTHGGSGGEIEMGKMSSNGDRALKRTLYESALSLNHQGRYKDEPRSEWIYTKVTQNKAAFKKGMIVIGAKILRTAYGVLKTGKPYNPAIDNSLGRIKTKIHKRSNPKYKEQNINAVLQNKYEQELTLAALG

SEQ ID NO: 405049 - protein, 347 aa, unidentified
MTEAYDGRQVVGIDLHRRRSVIVRMTEDGRKLETVRITNSPAALRAVIAKAGKNPKVVIEATYGWYWAVDALEAAGAEVHLAHPLGVRAFSYRRVKNDERDAADLADLLRMGRLPEAWIAPPEIRELRELTRYRHKLVKGRTSVKDQVHGVLAKLGIPVTHPDIFGVHGQAWLDELKLPQPYAGKVASLRQLAGGLTAEITLLEQVLSDLLAGHEGYAAIQQLPGIGPVLAAVIVAEIGGIRRFPGPGQLCSRAGLTPRHYESDTKVIRGHVTKQGSRVLRWAVVEAIQRQPAGTRPRQVRDGIIARRGKEAKNIAKVAAARELLTLVFYGMRDGHVRRALQRGQAA

SEQ ID NO: 405050 - protein, 420 aa, unidentified
MRNAGIHANSLLEVRRMYNAVGIDVSKGKSTVAVLQPGGTVIRKPFDVSHTSQNLNELADYLSSLDGTTKIVMECTGRYHEPMVKALSEAGLFVSIVNPHLIKNFGNNSLRKVKSDPADARKIARYTLDNWTELRQYSGMDNTRTQLKTLNSQFSFFMKQKVAAKANLIALLDNTYPGVNKLFDSPTREDGSEKWVDYAYSFWHADCVRKIGLKAFTERYKSFCKKHHYIFQQDKPEKLFNASKELVAVFPKEKTYKLLIQQSIQQLNLASEHVERLRRKMNELASTLPEYSTVMGIYGVGKTYGPQLIAEIGDVSRFTHREALTAFAGVDPGVDESGQHKSKSNRASKVGSARLRKTLFQIMTTLLQNAPEADPVYRFLDKKQSQGKPYYVYMTAGANKFLRIYYGKVKECLRNLEQTE

SEQ ID NO: 405051 - protein, 391 aa, unidentified
MEIMVETCCGIDVHQKTIVCCILDGPLDTNRPKKYERTFGTRTHELRQALDWLNNHEVTDVFMESTGQYWLPVFNIFSEAPFHITLANPQHIKNVPGRKTDTKDAEWIAQLGRCGLIQASYIPDFKVMELRLLTRRRQSYMQKRTQAKNELHNVLQRSNIKLTGYLSDIFSKTGQALLRLFIDGEVVSIERIEACRHGRVKASAQDLLTAMDGKLSRINRRLLEDSFEEYHFYSRKIKQIEEDIERHILEYFPEEYALLMEIPGVKQQSAAVILGEIGPNVEAFLTVGHLASWAGVSPGSNESAGKKKSSRTTQGNKYLKTALYASGGMAGRSKDPAFSSLYYRISARGSKMKAVVACGHKLLRVIYKVLSERVHYNKEKALGSRQLKCTL

SEQ ID NO: 405052 - protein, 346 aa, unidentified
MTIVGGLDVHRQQITFDYVDDDGLVHWGQIRPATRKTLRGWLAEHCPDGDGEFALEGCTGWRYVSEELAAAGLGVHLGDPAEIAGLRGRKKRAKTDRADARLLRTLLVEGRFPESWIPPAHVVEVRTLGRLYCTLMDERRAWQQRIHAQVFHQGCPPIRALLTRAGREALAGAELSAAGRQYVDTALRRIDELSAEIDPLRTQLIGLARRQPGCRALQRHYGVGWLCAVIIWAEIGDARRFASSDQLVRFAGLDVTVYSSDSKRAPGHLSRQGSPELRWAAFEAAKSAARRGSPDHGYYHKLAAKKDGNNGKNPTLAVERKILRRCYHTLRELGDSALAQPQEVAA

SEQ ID NO: 405053 - protein, 430 aa, unidentified
MENIDEQELHVERVAALDLGKAALEACVRVPHESRPGRRMQEVRGYPTTTSALLAMADWFGCWGVTRVVMESTSDYWKGAYYLLEAEGFECWLVNAREVKNVPGRPKTDNHDAVWLTKVAERGMCRPSLVHPKPIRQLRDLTRYRRALIRDRSRQMQRVEKLLEDAQVKLSSVISDIFGASGREMLEALISGQRDPKALAQMARGRMRAKTMRLTEALSGFFTDHHAGILRLMLDDIDRLSRQIATLDATIETAIAPFAHQVTQLDEITAVGLTSAQELIAEIGPDMSRFPSAAHLVSWAKFCPQVHESAGKTKNKGRGRGNPWLAATLGNIAAGAARTDSFLGARYRRIARRRGKQKAIVATGNTVLTIAYHLLADPDARFHDLGADHYASRINKERRARNLAAQLQAATGQTIRIRNGKAVIIDPEAA

SEQ ID NO: 405054 - protein, 330 aa, unidentified
MKQEKLYCGIDISNETIDVCIQQPDGSFVAETLSNSGLGFRKLMRLTKGHAYHYVMEYTGVYHMALSIYLEKKRCLYSILNPLQVKRYIQMQLERSKSDKKDAKHICCYGIERNPEMYQMPEQAYFDCRSLNHSIETLTQKLTSFTNKIHSLKKQNLSNKTVLKSYERIVKMLKKELKHLEAELSVQLKEWQPKLVDLVSSVIGIGKRATAYLIIGTQGFKHTESYQQLISFTGLSPKEYTSGSSVRGKVRINKMGKSKLRNTLYMCALGAMRTNPFCKQLYERLVAKGKNKKVAIIAVCNKLLKLVFGVIQSNTKFDKNYLKPTADLLS

SEQ ID NO: 405055 - protein, 332 aa, unidentified
MQLLAIDLGKQSFHIHGITDEGEVISRKVTRSKLENAVQEVSPEAIAMEACASAHHWGRRFEAMGFPVRLIHPRFVMPFVKGAKNDAVDAEAIHEAALRPTMRFVPVKTTEQQDLQMLHRTRDRLITQRTGLINHIRGLLGEYGVVIPVGAVRFRKDIRAAVAEAKLSTLAKQNFTALIAEFEASDKRVAEIDRKLIAICKTDDRCKRLATLPGVGPVIATALIAAVDDGRHFSSGRALAAWIGLVPRQYTTGGKPRLGGIGKRGNQYLRRQLIHGARSVLIRIAGRSDRRAKWAQGLLARAGHNKTLVAIANKTARIAWAVLRSGETYKAA

SEQ ID NO: 405056 - protein, 340 aa, unidentified
MKLYGAIDLHSTNNVTAVIDEQDRVVYQKRLPNDLALILKELSVYQSELEGIVVESTYNWYWLVDGLMEQWYKLHLANTAAIQQYEGLKYTDDHSDARWLAHLLRLGVLPEGYIYPRADRPVRDLLRKRSQLVRQRTTNLLSIQNLLTRNTGSSLSTRRVKGLDVQQVDELLPNPDLALAVKANLSVMCSADEQVQLLEQSVTQRVKLRPQFSFLKTVPGIGEILALTIMLETGDIRRFASVGNFASYCRCVGSQKISNGKKKGKGNTKNGNKYLAWAFVEAAHFAIRYNSKIKSFDQKKKAKTKGVVAIKAVAHKLCRACHYIMRDRVPFNITKAFDQN

SEQ ID NO: 405057 - protein, 339 aa, unidentified
MQLYAGLDLHSTNTYIGILDQEFNRVFKKRVANNLELILQTLKPFGSELKGIVVESTFNWYWLIDGLMDNGYQCLHLANPSAIKQYEGLKHADDQHDAFFLAHLLILGILPQGYIYPKKDRPVRDLARKRMFLVQHKTAHILSLQSLIARCCAKKISSNEMRHLTLDDLQHLLEEEHLVLSAQANLDNIRFLTQQIKQIEKTINKKIKLNKAFQNLLTVPGIGNILAMTIMLEVGDISRFAKVGNFASYCRCVAAKRLSDGKSKGHGNRKNGNRYLSWAFVEAAHLTRRHCQQFRRYYNRKVAQANTSLATKALSNKLARICYYIMRDNVPFREEPLSQ

SEQ ID NO: 405058 - protein, 389 aa, unidentified
MIYVGIDVAKDKHDCCILGSEADKLFPVFTIPNNKAGFDELYEKMFSVTDDKTKIKVGLEATGHYSLNLLGSLIDKGLPTCVINPLHTNLYRKGLSLRKTKTDKVDARSIAMMLMTNKTLKPYSDISYHNEELKSLTRYRFDKVQERAKLKSSVARLVNILFPELEKLVPSLHMASVYSLLSKLPGASYITECHLTHLKNLLETASKGHYGRDMAITLRNTARDSIGSVIPAKSMELKHTIHLIEVMTEEIDEIEDSIKSIMDTCNSPIMTIPGISYRMGAMILAEIGDFTRFNYADQILAFAGLSPSTYQSGQLDSSYSHMEKRGSRYLRYALFNAAKFVCKWDENFGAYLSKKIGEGKHYNVAIGHATKKLVRTIYRMELTGEAYRR

SEQ ID NO: 405059 - protein, 402 aa, unidentified
MNCVGIDVSKGKSTIAVMRPFGEVVVSPFEVCHTASELSELARLLKSLDGETRVVMESTGNYHAPVAWLLHDAGLYVSVVNAMLVHDYGNNSLRRAKTDKKDAVKLANYGLDHWLILPRYVPEEDTRLMLKTCYRQYQQYSKVQTMLKNNLISLLDTAFPDANRLFTSPPRADGSEKWVDFVAAFWHCECVCGLSEKAFTAKYQKWCKKHGYNFSKDKALDIYASSCGHFGVMPKTDTAKLLVEQAVSQLRATSAALAALKQEMQSLAASLPEYPVVMEMFGVGPTLGPQLMAEIGDVRRFHSKKALVAFAGIDAPPYQSGQMDVRSRSISKRGSASLRRTLFLVMGVILQHAPMNEPVYQFMNKKRSEGKPYRVYMIASANKFLRIYYASVKAYLDSLEHD

SEQ ID NO: 405060 - protein, 354 aa, unidentified
MKLYVGLDVGLEETSLCVVDSEGQTVREVKVSTEPAAIRSAVEGYADRLDRVGVEASSLGIWLYRELQPAGVPIIVVEARHMRVSLSTMRNKTDRNDARGIAQMMRLGWYRAVHVKNIDMQKMRSLLANRKLLKRKLIDIENHIRGTLRAYGLLIGPVGRGGYESRVRELLEHSDPIFSVMIESMLDVRRAIFEGYDRLHRMLLQVVQHDLVCRRLMTVPGVGPVAALSFKVGVDDPRRFARSRTVGAHFGLAPRRHQSGTSIDYEGRISKQGDVAVREALCEAAASLLLRVRKWSALRAWGLRIAKRSSMLCAITAVARKLASILHRMWVSETDFHVGFGAKVTQRLRLKPAR

SEQ ID NO: 405061 - protein, 410 aa, unidentified
MDAIVERCAGLDVHQATVVACLNVGAADARPTKEVRTFGATLPDLEDLRDWLTANGCALVAMESTGVYWKPVHAVLEDHFEMVVGNAHHIKNVPGRKTDVKDCDWISDLARHGLIAKSFVPPRPIRELRDLTRYRCKLVQATSAERNRLLKLLESANIKLSSVASDVFGVSGWAMLQALVEGKQSPAEMAQLARRRLRRKLPELQRALTGRLEEHHRFLLGVQMRRIEAMEADVAELDRRLREKLAPYSREMRLLRQIPGVDWVIAATIIAEIGVDMSAFHSAEHLASWATMCPGSYESAGKQRGGRTRKGNVNLKTALVMAANAAGKPKGTYLADKYRRLKARRGAMRAAVAIGHKILVTAYRMMVTGSDYKELGEGYLDQLNTHRTAGNLVRRLRQMGYDVQIAPKAA

SEQ ID NO: 405062 - protein, 352 aa, unidentified
MTQASTYRIGFDVAKGVFQVHGVKNEVGEPVAIKRRLKRGAVEGFFAKLPASLIGMEACGSAQHWARLAQSYGHEVRLMPPAYVKAYVKRNKTDAHDAAAICEAVARPSMRFVAVKSEADQATLMLHRMRASFVAKRTAAANQLRAAFAEFGLVAPVGACGFKELLTLMESGAESFTRLPQTLRLVLRELALQWKNCEAAVRRMDVAIAAGVKTSERARRLMRVPGIGPVGASAIDALLPDAQLFRSGRDFAAWVGLTPREDSSGKTVKRGPITKKGDGYLRRLLVLGATAHLARVRRGQAKGASAWVIKMAAHPKRKLAAVALANKTARIAWAMLARNQDYRAPAAVLQAA

SEQ ID NO: 405063 - protein, 344 aa, unidentified
MPTIQIGVDLAKSVFEVAVSEAPGVVTARRRLSRAAFPRFLAAQPPAEVLLEACGSAHHWGREAHRCGHQVKLLHPADVARYRDGNKTDRADAKALLEASRNHALTPVPVKSVEQQAVLALHRIRQGYLRTRTARINALRGHLRELGHTIPVGARRVALEARAALADETIPPFLHAVLVALLEEIHTLEQHAESVRTTLTTLVEHMPDAKRLMTIPGIGVLTATAMVASVGDIRRFRSGRRFASWLGLTPREHSSGASRRLGSITRKGNSYLRMLLIHGARSALRAGVVTNQPDDLRTWATEISRRHCHNVAAVALANKLARICWRTWRDGRDFERREAQVTNC

SEQ ID NO: 405064 - protein, 351 aa, unidentified
MDILGAFDVHRKQITFDYIEVDSGELHRGKIQPANRQSLREWLEHFSEQFPEHEAAIAVEATTGWRYVIEELQRAGVEPHLAEPAETKSLQGRKKRAKTDRLDAGHLRDLMVIDRLPESWIPPHHVQEIRTLMRLRHSLIEERTTHKQRIHAQLFHNGYPQQSNLDSIEGRAGLESMELPGAARKVVDLSLAMIDHINEELEPIEVQLRAYARSQAGCQALMEHYYGVGELTSVALLSELGDTRRFSSSKKAVRYAGLDVTVRSSDDRRAAGKLSRQGPPALRWAAFEVAKRAWRKNSPDHEYYLHNKERIGANRATLSIARKLIRRAHHTLRELGEEAMGEPEFPNSSSA

SEQ ID NO: 405065 - protein, 410 aa, unidentified
MGLYCGIDWATQHHDVAVIDDDGRVIARGRVSNDAAGFAALLTLLAEAGDSAAHPIPVGIETDRGLWVGALRETGRVIYPINPLTASRYRARYAVSGAKSDATDAVLLANIIRTDPDAHRPLPADTELAQAIRVLARAQQDAVWARQQVGNQIRDLLKDFYPAALAAFDQLPEGGLARADARTILAAAPTPAQAAALTPARLRRLLVKAGRRRHLDRDVERLREIFTDTYLHQPPVVENAMGIQLSALLRQFDAAATAADELAEAAIAHFERHPDAAIITSFPGLGMLAGARVLAEIGDDRSRFADARGLKAFAGSAPITRASGKKTVVLHRHIKNRRLAAVGPIWALSSLRASPGARRHYDTRRAAGDWNHQAQRHLFNKFLGQLHHCLQTGQHYDEHRAFPPPLLLAA

SEQ ID NO: 405066 - protein, 354 aa, unidentified
MSNKSNATIATMGIDIGKNSFHVVGLDQRGAIVLRQKWSRGQVEARLANMPPCLIGMEACVGAHHLSRKLQSLGHEARLMPARYVRAYLKGQKNDFRDGEAIAEAVQRPTMKFVATKTAEQLDLQALHRVRARLVGQRTGIVNQIRAFLLDRGVAVRKGPRFLRTELPRILATRCDVLSPRMVHVIEELAGDWHRLDERIKSVSSEIEALADQDPACERLMTVPGIGPIISSATVAAIGNGAAFSKGRDFGAWLGLVPRQISTGDRTILGKISKQGNRYLRVLFVQAARVVLLRPNSWERYGLKSWIEAAKKRLHHNVLAIALANKLARIAWAVLNKERKFECVRTSAMAPRSA

SEQ ID NO: 405067 - protein, 373 aa, unidentified
MEHNITIVGLDVHKNSIEIVTAETAGNQEVRHYGKIGGDMISLDKAIRKLRSVRSNGAELRFVYEAGPCGYEIYRHLTKQGFQCVVVAPSLIPKKSGARIKNDRRDAENLARLERAGELTKVYVPREEDEAMRDLTRAREDAVKAQRTARQLSGAFLLRHGHRYPGRQSWTPVHMRWLSDVTMPHPAQQITLQEYIHAITEGTGRVTRLTDQIQKLLPEWHMAPVVKALQALRGVAPVVATTSVAEIGDMNRFERPKQLMTYLGLIPSEHSSGESIKRGSITKTGNGHVRRALVEAAQAYSFPARVSRHLLKRQEGLPQSVREIAWKAQVRLCGRFRRMMARGKQRNKVVTAIARELAGFMWAIAREVQIQGA

SEQ ID NO: 405068 - protein, 328 aa, unidentified
MIQLGIDVGKSKIDLCLRPDGPEGRKKTKILTNGPDAAVSVLEWLAKQKVAPADVQVVMESTGTYHEHLAYGLYERAVRVVIANPARVRAFAQGMGILTKNDTVDADVLARYGAMRQPDVWPPPSPAIRELKALLSRRDALVHDVGREQSRLEKLLSTRCSLLVEASVRKMLQVLNNELQAVQALIDNHIDNHPELKRDMEYLTSIKGIGSAVGSTMLVVLRGNHFISAEQAASWVGVVPKEKRSGSSVRGRTRLSKNGPPEVRAKLFMAAIVAVKHNPLLKQFYNRLLAAGKAKMSALGGVMRKLVHICYGVVMKQQKYDENYATAA

SEQ ID NO: 405069 - protein, 377 aa, unidentified
MKRIIRIGMDVHSTNYTLCAMEPIIGEDDRIFATVDVTPDYKNILMFIENLKMKLGVDNQYDIQCGYEAGCLGYSLYNQLTSANVKCVILAPTTMLTPQGTRIKTDARDARMIAQCLSYGGYHAVYVLTEDDDSVKEYIRMRDDHKTALKKIKQQISALCLRYGHHYTQSKWTVAHWKWLKQLELSALYREVLNEYMASYEEQTAKIERFDQRIEELASQEQYAEKVKKLGCFLGIQTHTALSLIVETGDFARFAKGSIYAAYLGLAPGEDSSGTKTNRTGLSKAGNSHLRQLLIESAGGICKGAIGHKSKALKARQNGNTAEVIAYADKANTRLRSRYYKLIRHGKARNVAVAAIARELACFVWGMMTENISKKTV

SEQ ID NO: 405070 - protein, 328 aa, unidentified
MQNLLLYPTDRVDQLTIGVDVSKKVLDISAAPGLPRSIQNTTTACRNLARRLRKISPRVVAVEATGGYERVLVQALWDQNVPVAVLQPNRVRAYARSSGQLAKTDLLDAGSITNFARSMPLRLAQRPSPEEERLRVLRDRREQIVQDRVREIGRLEAMQDTSMQREIKRQIKHLKKIEVDLDARIKELINGVEALRLKSEVLRQARGIGPVIVSTLLCRLPELGHVNRQSIAALGGLAPYANESGQRRGQRSIFAGRAEVRRALYLAAMSAIRHEGPLRDRYRAMVGKGKVKKVALIAIARKILVGLNVRMAEHLQSIEGEESESILT

SEQ ID NO: 405071 - protein, 419 aa, unidentified
MAFKIFRFNCCGMDVHKTWIFACIGITDANGRTEYKEKRFSSFSRGLRDLAAWLTSYNCTDVCMESTGKYWIPVFNVLEKTCNVVLAHPKYTKPQKGNKTDRKDAKWICDLFMCDMIKPSFIPPANIRHLRDLVRYRFKLTNMLTGEKNRAQNCLTVSNLKLDDVFSDVFGKSSRSITEHILAHPGETFDVSPFVDRRCKTSIEDIQAAVDGAVSPEQAIKLRQCLDHIDELEKHKEEIEREIVRVSDPYLDTLELIRTVPGLYKNPFTAIQILSEIGGDMSVFPTDQHLVSWAGCCPRNDQSNFKIKSTRISRAGSYLKPVLVQVANALIKSKKHPEITERYRRIKSHRGHKKAIIAICRMLLTAIWHILTDLKPYTDEGYLAPRPVKGKKVLTTSQALNLLKLRGYVIKDDLPATAS

SEQ ID NO: 405072 - protein, 479 aa, unidentified
MGHRIVDQVHFKSPFQVVLYFKAIKMKKQEQKSAALSEPKIKRFSQGLPVNNPYACGIDVGDTMHDVAIGKDEGHEVRKYAAFTEDLQNLVAWLKNEGITSVAMESTGIYWLNLYLMLEEAGIETFLVNAKHVKNVTGRKRDDTDAIWLQKLHSCGLLQKCFQPEASIRTLRTYVRQRKKLVTLSSDSVRRMQKALELMNIKLHTVISDILGRTGMAMVAAIINGERNADELLKLKDARIKASEEDIRKSLQGIWSEEYLFTLNQAYNGYGFYQAQIKECEEKIKEQLLAQAAKVQAGDISNLEIERKKKLKKNEFAFNAQVLMKAVVGVDLCQIESMSEISVVELISEIGLDMKQWQGHKRFGAWLNLAPNTKQTGGKIISSKMQKKKNQAGLTLRMAASNMSKSKSPMGDYARKMRARIGKKGAVVAAAHKLSRIIYTMIKDQVEYAPVTLLENQQKLNEQRIKYLEKQLLQLRSAS

SEQ ID NO: 405073 - protein, 344 aa, unidentified
MDLGERNSWYCVLDEAGQIQLEQRVRTTAKALGEVFGAMPRSRITLEIGTHSPWISRLLSELGHEVIVANARKVRLIGESRKKDDRLDARTLARLARIDPELLCPVKHRSAKAQADLTVIRARAGLVRARTALVNTVRGLAKSYGERLRGCNVRNMNPEKAEGLSPELQAALQPLLAALESLSERIVEYNERIEKLAQQSYPQVALLKQIKGVGTLIALTFLLTLEDPHRFHKSRDVGCYLGLQPGRRNSGQSEPQMHISKEGDPYLRTRLVQGAQHILGPFGVDCDLRRWGLKLAERGGRNGKKRAIVATARKLAVLLHHLWVSGEVYEPLHNSSQTTVAAAA

SEQ ID NO: 405074 - protein, 341 aa, unidentified
MNSSMTIGIDLAKSIFFVVALSPSGKQLQRKKLRRAQVLSYLANQPQCVVALEACSGAHYWAREILALGHEVKLLPPQHIKAYLRRQKNDYNDAEAIAEAAQHGRIRPVAPKTVEQVLNQNLHRIRKALVADQTRLINRTRALLAEHGVVIPEGKARFGSTVAALLEEGENSLPWRLRQLLDRQYQQYRLWEEELAWYTQEIESQAKQDEVCQNLISIPGFGPISSSAFRSWMGNGQQFKCGRDAAAALGLVPRQHSTGGKSILGRITKSGDKYLRALLIHGARSAIRYAHKHNDRLRQWVLSLVERRGYNKATVALANKMARIGWAVITRSERYQAAPCT

SEQ ID NO: 405075 - protein, 407 aa, unidentified
MIFVGVDWAEAHHDVHVMDEDAKRLGGGRLPEGVEGIARFHEMVGAHAEDPSEVVIGIETDRGLFVAALVAAGYVVFAVNPMSTSRYRDRHSSSGAKSDPGDAKVLADMVRTDRHNHREVAGDSKEVEVVKVLARAHQSMVWSRGRQTNALRSTLREFYPAALVAFDELASGDATEVLKIAPTPSLGAGLLLSKIASALRRGGRQRRIDDRAQEIQQALRAPQLQGSAVVANAMGASVKASVSVISTMTTEIANLAEALEAGFEQHPAAKVVRSLPGLGTILGARVLGEFGDDPDRYATAKSRKNYAGTSPITRASGTKRVVLARYARNMRLADAIYLWAFASLTASPGARAFYDAHRKAGDTHHAALRALGNRLVGILHGCLANGSFYDEHTGWAHRFENDRIEAA

SEQ ID NO: 405076 - protein, 467 aa, unidentified
MTLIITEKVEGQKMPRRKQRRKQFAVTDLPEHLQHVNLNAAGIDIGSDRHVVAVPAGRDEVSVREFAAFTADLHALADWLTNCGITSVAMESTGVYWIPLFELLEQRGFEVKLVDARQVKNVSGRKSDVLDCQWLQQLHTYGLLTAAFRPPDQVCVLRGYMRQREMLVQASSMHIQHMQKALQQMNLLLHNVVSDITGVTGMKIINAIIAGERDPKVLARHRDQRCHSSAATIAKSLLGNYREEHLFALSQAVSLYETYQAKIAECEAAIARYLGSQPNRTDEEPPPGDKSVRNRDRLRGGLDVRGQLYRMTGVDLFNLPGLGADTLLTLAGEVGFDMTPWRSEKHFTSWLALCPGTRKSNGKVLSRKTKRSANRAAAAFRIGAASLSRSKTALGAFYRRIRIRVGPAEAVTATARKLAVLYYSLLKHGSAYVEIGQTVYEQKYQQRRLHSIQKQALAMGYQLIPAS

SEQ ID NO: 405077 - protein, 338 aa, unidentified
MKLYGGIDLHSNNSVVALSDEGDHVVYRQRLANDAEIIVAALAPYSEAVVGLVVESTYNWYWLVDALVEAGYRVHLANTAAIVQYSGLKYSDDDSDAAWLAKLLRLELLPEGYIYPKELRAVRDLLRRRSRLVQQHTANLLAVQNLLARNLGRSLNANAIRRLTPEKVPELLPDTNLALAVQTTLLAMRGQLAAIDLLELEACAQVRGQPKYQHLLTTSGIGQVLGLTILLETGPIERFARVGNYASYSRCVGSERLSNGKRKGRGNTKSGNKYLAWAYLEAANFAVRYNPTIKRYYQRKRVRTNGVVAIKAVAHKLARACYYMLREGTDFDVNRAFA

SEQ ID NO: 405078 - protein, 331 aa, unidentified
MNYVGLDVHKAYCQAAILDEQGELVAEKKIQTDERGFKQLAKAIEKGSSIVMEASCSFYTPYEYFAGRGYDVKVAHPKNVKAIASSKVKTDKIDARILADLLRADLIPESYVPDRGIRQLRELLTHRQGLVKMRTEAKNRIHSILTKRGIRHKFSDLFGKGGRAWLKSLELDMSGKLEVSQSMQAIRLLDAQIVMTESEIYAYEKSFPEARLLQTMPGIGRLISMIMLAEIADINRFPDAKRLASYAGLTPSVHQSGDVDFHGRITKQGNKMLRTAMIQAAQRAMHKDTKIRRFYLHIRKRHGENKAKVAVARKMLCWSFIMLKRGEPFAA

SEQ ID NO: 405079 - protein, 326 aa, unidentified
MLQGWATKEDMMTHPPVFVGIDVSKAQLDLALRPEGRFAAPNTEAGIAHVLTHLQALSPTLIVMEATGGLELPLTGALAAAGMPVVVVNPRQVRDFAKATGKLAKTDALDAQVLAHFAEVLRPEPRPLPDEQTQVLAALLTRRRQLVEMLTAEKNRLASARLPIRKNLRAHITWLERALHQADADLADAIRESPVWREKDEWLRSVPGVGPVLTTTLLANLPELGMLTPKQIAALVGVAPLNRDSGTLRGRRTVWGGRAQVRMALYMGAIVAARFNPVIRNFYQRLCAAGKAKKVALVACMRKLLVILNAMLRHRAPWQPHEAQHA

SEQ ID NO: 405080 - protein, 337 aa, unidentified
MEYFAGLDVSMAETQICVVAESGAVIHKAKVPSTPADIAAELAQLPTCRRIVFETGRMAPMLYHGLRQLGLPVICVESRQAYQALKLLATHKTDHNDARGLAHLARTGFFRPVHVKSLRAHAVRSLILARKKLVGQRVTLENQIRGLAVVFGVRLPRALSSDFIRQALQASDGIPGLSAAMQGLVAARAAVLAAIIAIDADIRRMVRASDACRRLMSIPGVGQLTALAFTAAVDDPDRFRRSRDIGAYLGLVPRRHQSGEIDYSGSISKCGDRRLRTLLYEAANVMLTRYKGPLKLKDWAVAIARRSTMRKARIALARRLAIIMHAMLRHGTEFKPA

SEQ ID NO: 405081 - protein, 406 aa, unidentified
MLFVGDDWAEDHHDVELQDQGGARLTRARLSEGVAGIARLHELIAKHLAEDVGPEQVAIAIETDRGSWAQALTAAGYTVYAINPRQVARYREWHGTSGAKSDAADAHTLADMVRTDRHQLRAVAGDSEHAQAIKVVARAHQTLIWDRHRHMLRLRTALREFFPAALEAFEDLTAADALELLAKAPDPASAARLSRAQIAGALKRARRREIDDKTSRLQAALRAEQLRQPDAVAAAYAAMVGSLVRVIATMNTEIKTLEERVKACFERHRDAEIYRSQPGMGQILASRVLGEFGDDNDRYASAKARKNYAGTSPITKQSGKKKVVLARFVRNDRLADALHQQAFCALSASPGARAYYDELRSRGRGHHAALRQLSNRLVGILHGCLKTNTTYHEATAWSHHAETLAA

SEQ ID NO: 405082 - protein, 341 aa, unidentified
MANVQVVGLDIAKSVFQLHGLDEAGTIVLQKRLTRARLLPFFEKLPPCLVGIEACATSHYWAREIAKFGHEVRLMPAQYVKPYVKRQKNDMADAEAIAEAVTRPTMRFVAPKAPEEQSAMMLHKVRLMLNRQLVMLTNAIRAHMAEFGIVAPVGRRGVDRLLEVIEDGADARIPAAARQCLEMLVAQLKLVKQQILENDRQVLGLARSTELGRRLMEIPGIGPLVASALVACVPDPSVFRCGRNMAAWMGLVPRQNSSGGKERLGSITKAGNRYLRQMLFAGAMAVIRRAMQSTRRTWLVRLLDRRKPKVAAIALANKNARIAWAMMMHGERYREPMAIAA

SEQ ID NO: 405083 - protein, 408 aa, unidentified
MDVLYQRCAGLDVHKDTVVACARIMTRGEVARTVRSFATTTSGLLVLADWLSEHGCTHVAMEATGVYWKPVWHVLEESFALILANAAHVKNVPGRKTDVNDATWLGELLAHGLIRASFVPERPTQELRALLRTRKQLVREQVSHVQRVHKTLEDANIKLASVLSDIVGMSGRAMLRALIAGETDPVVLAGLAHRRVKAGRQELVEALRGDVRPHHRFLLALHLRQIDGLDEAIMAVDRQIDEQLAPFRRAVELLTSIPGVSALSACSIVAEIGTDMARFADAGHLVSWAGMCPRNDESAGKRRSTRLRRGNPWLKTVLVQCAWAASRAKLTYLQAQFHRLRARRGAKKAICAVAASILTAVYHMLRDGTLYRDLGPDHLRPASPDHLARKLVRTLNNLGFHVELTAAA

SEQ ID NO: 405084 - protein, 320 aa, unidentified
MKVLIGVDPHKVSLAVAVVDEATDELLERASFPQDRTGLRRLERWARRFPERRWAVENAGGLGRHLAMRLAAADESVVDVPPKLSARVRVLSSGNARKTDGLDALATALAASRNGRLAAVDPEAASEVFAPALREARRPGGRAPAGAKPPPRAPAGPPPRRCGQNALCRQGTARILRSIRPKGGSARLRRRLASEVLRDVRTLDRKIADLSERIEAEVEASGTTLTEIFGIGPILAARIVGTVGNVARFPTKGHFASYSGTAPVEASSGEVVRHRLSLAGNRKLNYALHMVAVCQARSDARGGGYYRKKIARKASRARRR

SEQ ID NO: 405085 - protein, 353 aa, unidentified
MWPRNDWRAAMEYYVGLDVSLKQTSICVVDQTGAVVREGVVDSDPEAISVYVRSKALNAVRIGLETGPTSTWLWTELKRLGLPVICIDARHAKAVLKMQINKSDRNDAIGIARIMQTGWFKEVHVKDIDSHSVRALLASRALLVKIKRDLENHVRGLLKNLGLVIGRAKFNVFAVRAEELIEGRPELVVAIRPLLEARSAVEQQVSELDRKVMKLVRRDAQVRRFMTVPGVGPITALAFKATIDDPARFARSRSVGAYVGLTSRRHASGEVDWTGRISKCGDAMLRSYLFEAAGVLLTRVPKWSAVKAWGVKLAKRNGLRKAKVAVARKLAVILHRMWIDGTEFNWSKKEIAA

SEQ ID NO: 405086 - protein, 437 aa, unidentified
MKTLPVLDDRATGIDVGSEKLHVSIAGDTPRVFGTMTQDVSTLIDWLRDQGVRSVAMEATGVYWLYLYGALEAAGITVLVVNGRQVRNLPGRKTDMADCQWLATLHAHGLLHSGFVPPAEIRQLQDYLRLRQDHITLAASHVQHMQKALERMNVKFHAVISDLTGVSGLKVIDAILAGRRDPADLLTLCDAQIRKHKGDRVKESLRGMWKDEHLFALRQALQSWQHYQSQISECDRAIEQVLRALSGPPRDDDPASPAKPGGTHTPKIDGLHRMLLQLCGGNDPTQLPGLADYSLLLVIGEVGTDLSRWPTAKHFTAWTGLAPGSHQSGKRRSQQSRHRNRTGQLFCTMARSLANSVDKALGGFYHRLKARRGGLIANKALARKLAALFWQTMVKGSDYVEHGLRYYQTRTAQSEQRVLRKLAQKHGLDLVPAKTMG

SEQ ID NO: 405087 - protein, 375 aa, unidentified
MKAKVRFLGLDVHAATIAVAVAEPDGSVRSLGTIANRAESIRTLVKKLGPVEQLRACYEAGPTGYVLYWQLAELGVACEVIAPTLVPTKAGDRVKTDRRDAEKLARSYRSDDLTAVWVPDEGSEALRDLVRAREAAKQDQLRARHRLSKFLLRTGRRPALGMKSWTAPYLAWVRQVQFAQPAQQATLLDYLHEVDHQGERVKRLEQAITEAVKLASPQVQEVVKGLQALRGIAEISAVTIVSELGQISRFESAPQLMAYSGAVPSEDSSGERKRRGGITKTGNAHLRRIVVEAAWSYRHRPATGPRLRKRQEGVPEPIKEIAWKAQHRLHKRFLRLSAAGKEQRKIVTAVGRELLGFIWAIAVKAEMSGKQQMTA

SEQ ID NO: 405088 - protein, 402 aa, unidentified
MMIIGVDYHPSFQTIAFLMEETGECGEQELNHSDGQAEKFYRELQQRGICVRVGMEATGYSRWFERLLAELGFELWIGDPAEIQAKRVKKLKYDRYDARLLRRLMLENNFPRIWVPDPENRDLRQLLWHRHRLVQMRTRIMNQLQALAMNEGYRWKKKLFSEQGRAQLEKLALAPWASRRRQELLELLDRMNPTIEELTAAVEREARKRPEVLRLMTHPGVGPLTALAYVLIIGTPERFHCGKQIGNYVGMIPKENSSAGKQRLGHISKQGNSLLRFLLVEAAQSAARVHPAWRRRYVHLAMRRHRSIAKVAMGRRLAVRLYWMWRMSGNGRPILETMRQEIAEASPVSCSSKPSKQSTVRPPVSQRVRLFLGWGIGDHLGVHNQPLWSGANEIKRVTGNQR

SEQ ID NO: 405089 - protein, 343 aa, unidentified
MQAVTTIGLDIAKSVFQVHGVDAAGQVLIRRQLKRRVVLGFFQKLPVCLVGIEACASSHYWSRELQALGHSVRLMPPAYVKPYVKRQKNDMADAEAICEAVARANMRFVPTKTPEQQSCLMLHRTRHLFIRQQTAVINSIRAHLAEFGIVAPVGRKGVTELLHIVADPSDKRVPEVARACLAALGNQLLSLKEQIVEFDRMIMVWHRSNETSKRLHYIPGVGPMLATALVASVADPRTFRSGRNFSAWIGLVPKQHSSGGKDRLGSISKQGDRYLRSLFVAGALAVIRYAKIHGTKHRPWLTALLTRRPTKVAAIALANKLARMAWAMMARGERYRQPVALAA

SEQ ID NO: 405090 - protein, 461 aa, unidentified
MKNKYSNPKNKKVKKIALQENWEKINPNACGIDVGARELWVCVPSDRDPESVRCFGTKTPDLQEMAQWLKACRIQTVAMEATGVYWIASFQLLEREGFKVVLVNPRQAKNVTGKKSDVMDCQWIQKLHTFGLLGASFRPADPYCVARTYMRLRDDLVAGSTMQIQLMQKALHQMNIQLSHVLSDITGCSGQAIIEAIMAGERDPIALAELASRRVKSTKAEIAKALIGDWRPEHLYCLAQAHQMYLRYQLDISQCNAKLADELEKLPNKVDPKLQPMPPKMDRKKEIDEKLRLGLYCKFGVDVTAIEGIGPTAGLTLLTEVGADLSAFASEKRFCSWLGLCPDNRISGGKVLSSRTRRVVNRMADVLRMSATTLKSSQSALGAFYRRMVAKLGPAEGITAVAHKLARLLYSLIKHGHEYIRTGMEQYEKKNADRKMKVLRKMAESLGVELLEPQRVTTGVS

SEQ ID NO: 405091 - protein, 391 aa, unidentified
MNKAGEILGRYPKVYNSRKGFEFFKQAVTKAKSQYGFKRVLVGMEPSGHYWRKIAFFGKEEGFEVRFVRTTAVKSQRELDESSSAKSDIRDAVTIANIVREGKYIDTVIEDGILRQLRTLARVRERIQRYNTGSKHALRAVLDDYFPELKQIFWSMQAKGLWAVLDHSPFPEEVLKTGVDKLAELIAKSSRRQGKAKEKANKVYRAAKESIGLKAIGIGDRYRVKMYLEEVKHSEAQLKDVELQMKGLLKKVPCAEYILSIRGIGHLSTAVFLGELGNPDNFSRYKQIIKYAGYDPIEHDSGINIGRKRVSKKGRWLLRKFLYFMGLRVIHQNRYFRKYYRRKLRSVNRYGAPLKKKEALCAVIIKLIKVIFALLRDKRLFEAKAPSLAMA

SEQ ID NO: 405092 - protein, 310 aa, unidentified
MDMIVQNYVGCDISKQWLDFFDEANGRFRRIDNQADAIAAYVAGLHPGRDFVVMEATGVHDRLLRHALAKAGIAFSRHNPAHTHHYAKSTRRRAKTDRLDARMLSDYGRRYQPEAEPAPRQEGERLQSLARHRDQLVEMRARLKTLLGEAFDDSVVADLEDMIAGFDTRIEALESLIAKTIREAEDTARDYTLMISVPGVSKVGALSLLAHLPELGQRSPKSIAALAGLAPFDNKSGKLNRRSQIQGGRSRVRRALYMAALTAIRVCDRFKAFYTDLAARSGSKKLAIIAVARKLLVVLNAIIRDKTAFA

SEQ ID NO: 405093 - protein, 354 aa, unidentified
MSQKLNTVIAVVGIDIGKNSFHIVGHDERGAIVLRQKWSRGQVEARFANMPPCLIGMEACVGAHHLNRKLKALGHDARLMPAQYVRPYSKGQKNDFRDAEAIAEAVQRPTMKFVATKTADQLDLQALHRVRARLVSQRTGIINQIRAFLLERGIAVRQGLRFLRAELPRILATPPEVLSPRMVRVVEDLAGDWRRLDERIEGLSGEIEAIARQDASCERLMSVPGIGPIISSAMVAAIGSGEAFSKGRDFAAWLGLVPKQISTGDRTILGKISKRGNRYLRVLFVQAAWVVLIKPKIWERHGLKPWIEAAKKRLHHNVLAIALANKLARIAWNVLAHGRAFEVRKVDDVSVQPV

SEQ ID NO: 405094 - protein, 320 aa, unidentified
MSDRLAFGIDADSKTLVVAHHGTKGSARITNSASAITKWVSALPARSRIGVEATNRYHELVVQAAQKAGHAVFVLNPRDIKHYAKGVACRGKTDSGDAQVIARYIAKEADNLHEHVARSPAQEQLHVLLQQRDSLVRSKAKLNLSLGAGASESAIFGRIFGGLKEAIAMLDQQIQQLCRSGEQRDLYRRIMTIPGIGPTVAAFITHHITRWPLTSSDAWIACSGLDPRPNEPGARIGRRRLSKRGNASLRQILYMAAMGLTRSKGGKALYTAIRERGHSSTASFNILARKLARIAWGVFKSGRDFDPAMLKVGQACFQQA

SEQ ID NO: 405095 - protein, 346 aa, unidentified
MTVKCIAGIDLHSNNLFCAIVDLNGKRVFEKRLPCDLASVLQALKPFQKRLEKIVVESTYNWYWLVDGLQDHGYTVVLANPAAMQQYNGLKHADDKSDGFFLAEMARLNILPTGHICDRAVRPVRDLLRRRMGLVHKRTSLMLSLKSLHTRMTGRDLSTGRIKALEPQDGEKLFEHPADQLITRLDLQLVEQLGRSIQEIETRILAEVKRMPNYQVLQTMPGVGKILGLTITLETVDPRRFASPGDYASYCRCVDSRRLSNGKKKGENNSKCGNKYLAWAFVEAAQLARRHDLACRKFHDRKSAQVNGMVATKALACKLAKAAWHMMSNNTHYDGGRMFPNVKMNK

SEQ ID NO: 405096 - protein, 431 aa, unidentified
MPSKKYNTITVSVVHGICCGLDVHKKTVTACLLWSDASGSEQCEVMEFETFTDDLFRLKEWLIERECPVVAMESTGPYWTPIHNILEGFFQVILVNARHMRNVPGRKTDLSDSRWLAGLLRHGLLKAAFIPPKYQRQWRDLTRMRNKYQQAVGHFKRRVHQLFQQANIKIDSVLSDLFGLTGRNLMKLLTSKDTTPSLGEVEQCLRGSLKSKRTEVYRSIQGFFEEHHRDMLALLLETIEKLESQVKELDHRIVQAIRTHQGKIDKLDEIPGISDVSAPAVLAEIGPSLEAFPNADALSSWCGLCPGNNQSGGKRFSGKSRVRKNRLKTIMIEIAWPAIKKRGSYYRAKYYALKARLGPKKAIVAVAHRILKAIYHVIKYDTPFQDLGEAYLLEKNKDAKIRYLTRQAALLGFQLVPGPQAQVKPELPIFP

SEQ ID NO: 405097 - protein, 427 aa, unidentified
MNFNVNRQLEQLTPETLIVGVDIAKNKHVARVVDDRGKELAKPIAFANSQEGFQQLLFWMKSTQIQQAKEQVILGMEPTGHYWLNLAHFMKSRGIQVVIVNPMHVKRTKELDDNSPTKNDVKDAHVIARLIQGARYSVPHFPEGIHAELRVLMNLRDRVNQEFLRVQGRITNWLDRYFPEFVTVFKDWQGKAAMLSLQHFPLPVDVQCLGAERIVAVWKLEVKRAVGLGRAEKLVRAAQETVGLTIGSEMARFEIQMLLEQHHLYQEQLEQVGQKVEDLLHQIPGTKEMQSIPGVGLLTVAGFLAEVGDLQRYQHPDQIRKLAGLNLKEYSSGKHKGKTQITKRGRPRLRALLFRCVMPLVVKNSEFKAFHRHFTTRSRNPLSKKQSMVALCCKLIRLLFVLGNTQTSYDPAKLQRALQRSTLQIVA

SEQ ID NO: 405098 - protein, 400 aa, unidentified
MGDIVEVAWVGIDAGKVSHHATLVDADGTIVWSRQVRNDQAAVEQLIAKAAATATTVRWAVDLTSAGAALLLALLIAAGQRVVYVPGTVVNRMSDTFAGEAKTDARDSYVIAETARLRRDLTELITPNELVAELALLAAHRADLMADWVRGVNRLRVFPALERSFDYTTRSALILVSRYSTPDAIRDADADQLAAYLRSEEAHRPSIPGMVAKAHAAAAAQTVRLPGEAATAALITRQARKLLDLDREIKDLDKQITERFRAHPQARIIESMPGMGPILGAEFIAITAGDLAAFGTAARLATYAGLAPVPDDSGKRKGVRHRPRRYHRRLRHVFYMAAFSSLKTDGPSREFYARKRSERQRHTRAMIALARRLVDVLWALLRDNRTWQPQPPTPLPATAA

SEQ ID NO: 405099 - protein, 324 aa, unidentified
MLPTLGIDISKDSFHVELSVNDKLRHRRFSNRPAGFAELSVWLTKHKIARVHACLEATGPYSEALALYLHEHGHTVSVVNPARIKAFGQSELLRNKDDRPDAALIRRFCETQRPSAWTPPTPQLRELQSLTRQLDNLLETRQQQVNRLEASNAKSVVKSLRKLIAHLDAELQRTEQQIAEHMDRHPDLKQQCQLLLSIPGIGQRTAAKLLAEIEGLNKYESARQVAAYAGLTPKNNRSGTLRGRTRLSKTGNARVRKALFLPAIVAQQYNPIVRAFCQRLAQRGKTKMQIVGAAMRKLIHIAYGVLKTNQRFDPNHELLLKPVS

SEQ ID NO: 405100 - protein, 348 aa, unidentified
MNQLNVAYTGLDLHATHSEFGVIDGHGQQQQRHALATDPKLMKDWLASLSADHIFLAVEEGPLTQWISWQLNGLVDELVVCDPKENFWISRSAKKTDRIDAVKLARLLRMGELRTVWHPEQKNDRALFAATAAHYITMRREQVRLKHQIKSRFRRWGVMDVSGETVYSRQGRAGYLEQLTDGCIRTQIEALFTLLDHTIDAQSDAKEQMFRLGRGYEEIAEFQKIPGVGPILAHLFSGIVQTPHRFDRVQQLWRWGGLGITDRSSNGRALGYQKLDPNGRSEIKDISYRAWKAGATQAKTTNEVKRFYETSLTNSSSQTNARLNTQRKILKVLWTIWRKQVCYNPDLF

SEQ ID NO: 405101 - protein, 450 aa, unidentified
MMREPQEIDDEEHEQILQRVAAVDVAKASGVVCTRVPHPSAQGRRRTRVQTVDATTNAVLELAGYLAAEQVEKVTLEATGDYWRIWFYLLEAAGLDVQLVNARDVKAAPGRPKTGKLDAVWLAKLTERGMLRPSFVPPAEIRRLRDYTRLRADLTRERTRYFQRLEKLLEDSLIKVSSVASTLSTVSARAMIEALIAGERDPRVLAGLARGRMRVKHAALVEALTGAFDDHHAELARMLLDQIDALSAQVGRLTARAGEQVATISAAWGADAGGATGPGAGLGEGATALPALDRLDEIPGISRDTAQAIIAEIGLDMTRFPTPGHPVSWAKLSPRTVQSGATNRAGKTGKGNPYLTAILGEAAAAAARTDTFLGERYRRIVRRRGKLRALVAVARTILVIIWHLLTSRTARFCELGASYYASRIDKDKKARGHIRQLEALGFTVTLAPAA

SEQ ID NO: 405102 - protein, 374 aa, unidentified
MAEFSKYVGLDVHKEKINVAVADKGRGQPRYWGEIQNRPEAVNRLLARLSVGGKRVRVCYEAGPCGYELYRRIVAAGHDCAVVAPALIPRKPGERIKTNRRDSLSLARLDRAGELAPVWVPNAEQEAMRDLSRAREDMKILDKQLRQRLNGFLLRHGRIYSGRGRWTQAHWRWLETQRFDSPYQQITLEEYSQAVQAAQARTAGLERQLHEASASWSLGAAARAAMALRGVDRTAAITLLAELDDLSRFQNPRELMGYVGLVPSEHSTGDRRRQGALTKAGNAHARRILVECAWAYRFPARQTARLQRRAEQTPAAVQAIAWHAQKRLCGRFRRLQARGLSAPKTVTAIARELCGFLWAVVYEVQRPGTFSAPA

SEQ ID NO: 405103 - protein, 345 aa, unidentified
MHIASIGIDLGKTTFHLVALGERSKILLRKKFSRTQLLAYTAKLPLSLIGLEACAGSHFLGTVLRDQGHQVRLIPAQFVKPYRKSNKNDFLDAEAIAEAVTKQNMRFAQLKTQEQLDWQAMHRVRDRLVQRRTALINEIRGFLLERGITFAAQPIHLRKNLPGLIEDAEQNLSPRLRWLLNRMWQEWKQIEIDIEAITDEIEHISNDDARCRQLRQIPGFGPLVSTATVAAIGNGAAFRRGRDFAAWVGVVPRQHSTGGKQKLYGISKRGNVYLRRMLIHGARSVLFRVKYDTGGFGQWVRRLAQRAPSNKVVVAIANKLARIAWAVLSSGRDYRHQPMPQRAAA

SEQ ID NO: 405104 - protein, 341 aa, unidentified
MNIKRIGIDLAKQVFQVHGVDGQEKAVLRQKLARAKMLTYFQKLPPCLIGMEACSSAHYWGRELQKMGHTVKLMAPQFVKPYVKSNKNDANDAEAICEAVARPTMRFVAIKTIEQQDIQAVHRIRSELVQQRTAKVNQIRGLLGEYGLVVGQRIDVLRKALPLILEDAENGLTVDFRTLLEGLQQDLITLDQRVDEMDKKIKLLASSNEDAKRLQQIPGIGPITATVLISAIGDGKQFKRGRDLAAWLGLTPRQHSSGGKDRLLGISKRGDAYLRTLLIHGARAVLKVVGNKEDPRSRWIQNLCGRRNKNIAAVALANKNARIVWALLTKKTDFLPEGKPA

SEQ ID NO: 405105 - protein, 321 aa, unidentified
MSWIGIDIAKRSFTAAQRCSQHLTIETFPMTVAGWRSFCQWAPEDGFQVCLEATGPYWLRLAHWLEQAAVPCSVANPRNVRRFAQASEQLSKTDPIDAEILLRFAETFQPSQISPTTGPSRALRAVSRRILQLQMELDRDRDRLEKAQADPATPEVVLNSHAVLHNELRRLIDDLEHQAKRLIREHSDLRPAYQLLLSIPSIGEKTARTLLAEYGPRLLSASPKQMTRFAGLDVVLYESGTSVRRKPRISKHGNWRLRRALYLAALSAIRFNPTLAPFYQRKLQQGLQPKQALVAVMRKLLHLVHGVLKHQNPYDPEYKLT

SEQ ID NO: 405106 - protein, 348 aa, unidentified
MTIVSEKYAHVIGVDTHARTHTYAIVSTTTGARAGCEAFPVTSAGMKRAIAWIRRGTSGQVLASVEGTSSYGASLTRALTAEGITVVEAKPPRKAVRAGVGKTDEIDATAAATGVLGTDVDRLLHPRTDGARAALSVLLASRRRVEKQSTANRNALNALVRQIDLGLDTRWAVTDKQVAEIRAWRPRTTDSVEQQIAREEAIDLARDITAAAARVKLIKAHLAELDEQLAPGLQAQPGLGPVTVGIILAAYSHSGRVRNEAAFASLAGVSPLQASSGNTTRHRLNRHGDRQLNMALDVIIKTRMRFDETTKKYVERRTAQGLSYREIKRVLKRYLARDLFRQLQQLFS

SEQ ID NO: 405107 - protein, 398 aa, unidentified
MFYAGIDIAKHKHEASVIDQEGKALLDSISFSNTKEGCEKLLLLFEKFEIAVNDVIIGMEATGHYWLSVYAFFTELGYDVKVINPIQSEAFRKMYIRQTKNDSKDSYIIAQIMRFGQYSSTTLSEENIVALRQLSRYRLALVDSCGDCKRRVIALLDQVFPEYDKLFSDTFGVTSTEILLKYPTPEDMLTVSTRKLTTLLSKASKGRFGEEKAKQLKAIARGSFGVSFAKDAFAFQIKQLVEQLVFLENQIEELEEQISVLLHQINAVITTISGIGDTLGAIIISEIGDIHRFDSPSKLVAFAGLDVKVNQSGEFTGTKNKISKRGSPYLRRAIWLAASRAAFCDPVLSEYYQSLKSRGKHHLTAVGGVARKLCNIIFVILRDNRPYEPFPPNAKPPS

SEQ ID NO: 405108 - protein, 493 aa, unidentified
MKIVFPTCCGVDVHKSFLVATIIKTPQDSLQPSYQKKRFSTFNSDLNHFANWLHENNCLDVCMESTGKYWVPVYNILEKRGIRVIIANPKWVKAVKGNKDDTKDSKWIGDLFRIGLVKSSFIPNKEIRILRELTRYRYKLISMKSSEKNRFQNAFTVCNVALDSVVSDMFGKSATAITDYLTSDVEFDAQHCISLLQRSLKKKAPAVLEAVEGHEIAPEQKTRIGIVRDHLHYIDKLVERVDDCVEGMVQKYEGAITLLRTIPGVDRSSAITILSEIGIDMAQFGSSKRLCCWAGLTPGNNESAGKKKSVRISRAGVYLKPALVQAAHAAVKDKSSTYYAVKYERISKRRGKKRAIIAIARMILTAVFCMLSTGEVWNPVDLYKVDMPEHLKEKQLAKAVKQAVHFLETYNISRFQDGIHTVPTNIKGTVAYGNTRYLYSSHHKLVLIGKQCTQISGSSNVVQHYTAVFHRIRRFGIVYYLNITCRQFVITTL

SEQ ID NO: 405109 - protein, 412 aa, unidentified
MRRVIGMDIHRTFAEVVIWEQGQLRRAGRVDMTRTTLEGFGKSLQASDEVVVEATGNTMSVVRVLSPFVARVVIANPLQVRAIAHAHVKTDKIDAGVLASLHAAGFLPEVWTPPAETEHLRRLVARRNQVVRHRTRIKNEVHSILHAHLVPRCPHADLFGRLGRAWLKRQILPADEIAAIDRHFRELDRLAEDLELLDREIAQSGLEDPSIKRLLTIAGVNVTVAAGLVAAIGDIKRFSSPQKLVSYIGLNPRVRQSGLGFAQHGRISKSGRSHARSMLVEAAWAAAKAPGPLHAFFVRIRAKRGHQIAAVAVARKLAVLCWHLLTKEADYLWARPALVAKKTRDMELASGQPMKKGGKPGSAYAYNVKTLRNQEKTIAENAEHAYEHLVGAWQTRRPKNAVRGRLKTTRHE

SEQ ID NO: 405110 - protein, 370 aa, unidentified
MELSRKVWLITSLSPGAGEKMSKHSVPADDVAALLMRFSELKHKAEARTGKTFPIVTIQEAGLDGFWLHRVLQSEGVESHVVDPASIATSRRRRRAKTDRLDGEALLRALMAFKRGEPRVCAMVKPPTPEEEDRRRLSRERKTLIAERVQHVNRIKGLLFAQGVSDYDPLARDRRQRLVELKTGDGRPLLPHLKTQIVRELDRIELLLGQIKAAEAERDAMLAASKAEAQQVGSPPPAGKMLLDFKGIGPEFASVLWHEALYRRFDNRRQVASYAGLAPTPWQSGSVDHEQGVSKAGNPRLRTALVELAWLWLRNQPDSALSLWFKQRVAANNGRRKKATIVALARKLLVALWKYVTFGVVIEGAVMKQA

SEQ ID NO: 405111 - protein, 403 aa, unidentified
MSSAVSYLFRRMKGSTALVIIGVDPHKRTHTASVVETGTDKVLATLQIDASLAGYRRLLKWASGFEQRRWAVENARGLGRHLAQWLVAREEVVDDVPSTATARVRELSRGGRRKNDVIDAAAAASVAALRGDANPVVADDLTTVLALLDERRDNMVTQRTRLINQLHALLRDLLPGGAPTALTAVDASRLLTGVRPAGPIEAARKHLARDLVAEIRDTDQRLKTLTAQIADTLDAHGTRLRDVAGIGPVIAGRLLGRTRRAGRFRSASAFASYAGVAPIEVASGDHTRHRLPRGGDRQLNLALHIVALTQVRMRESTGRAYYATKVAAGKSHNEAMRCLKRRLADRVWRLMLSDERRLAAGPGGHSGATLTSSAAGSTPTTSSSDKSLPGPASGNSTTGRPAA

SEQ ID NO: 405112 - protein, 338 aa, unidentified
MAVVTIGIDLAKSVFAVHGVGASGLPELLRPEVRRHKLKELIGALPPCLIGMEACSGAHHWAREFEKMGHTVRVMAAKFVEPYRMTGKRGKNDANDASAICEAVTRPSMRFVPIKSIEQQAEQFVHRARQGYIQERTALINRIRGLLSELGIVLPLKADTVRKQAREVLEDLPGWCNTVIGDLLSHLSKLDERVAQYDTHIGQIAHQNERARQLMKLSGIGPTTASAIVAAVGNGHDFNSSRQFSAWLGLTPGQHSSGGKARLGRITKAGDSYIRSLLILGARSVLLRAKNKTDPVSRWALQLKERRGYWRAIVAIAAKNARMCWAALKLGEDFKVPT

SEQ ID NO: 405113 - protein, 421 aa, unidentified
MKRIRDRVAGLDVHKDSVVACAQVRQGPEVTVHKARFGTTTAQVAELAEWLADLGVTTVAMEATGVYWKPIYYGLEGLFEELWLCNAQHVKNVPGRKTDMADAEWLADVAAHGMVRPSVVPEPAMREVRELTRYRKSLVDERVREVQRLEKELQDAGIKLSSVASRLMTKSGRAMVEALIRGERDPKVLANLAQGKMRGKIPHLEQALVGRFSAYHAVIARQVLAHVDFLDASVAELDQAVRERMGPFEGQVSLLVEMVGWGRGTAEVFLAETGGDMARFPSAQHLASWCRICPANNESAGKHKAMSKKPGKTWLGRALIEAAKAAARTNGTYFAAQYRQVARRRGPNKAAVAVANSMVVTAWHILTTGEHYHDLGPDFFRAHLDPMRAAQRKLADLRNIGWAVTTNPDGTITVAPPELAA

SEQ ID NO: 405114 - protein, 497 aa, unidentified
MPNKSTIYSRCNPQWLQLFETAGHPAKVLCVALDYAKAQHTALICNGVGDLLRPSFAIDNTAQGATQLLREVRACAKSRKVRGEHVFFGGEDYPSYAENFLRHLRQEKFLVVRVNAWEAKQPRDNFQASSDSLDLLGIARCCLHRRGQSVRDLPQAYPNLRLATRDRDKLVRMRTAVSHRIHTYVDRLFPGFLSVGKSPLEPFSKASLDLMEDRFSPAQLRRRPRQALTEWLGRRGITQPRDTADQLKQLAQHVLEPAPEQTVLLQQTLAQRVGLYRNLEQCMARIDREVAYWLARTPGAWLTSIPGFGITLAAGWTAELGPPSQWYSVRQLCSYSGVVPKSKQTGGPDKEPIIGAVQARGNKRLKNVVLQAVEKVIQHGPEELRRTAQELEARGAHTEFALAKRWVRLAKYLAVTGTVYRPKTLMDPQTPKARLADHYQTVWEKLLPKWRDKADRREVFAPQHPLGQWRQMVQELYALELRLPHPRAAQNSRALAP

SEQ ID NO: 405115 - protein, 358 aa, unidentified
MNGDRPTTAEEKVVGGVDTHKDTHVAAVLGSTGALLGTSEFPATLAGHTDLLRWMGSFGDVSSVGVEGTGNYGAGLTRFLLAEGMRAVEVVRPDRRARRLRGKSDTLDAENAARAVLAGERTSAPKHRDGAVESLRALRVARTSATKARRAALQLLRNTIVSAPDRLRESVSGLTRTVLIRTCAAWRPNRDAAHEPTTATRIALRSLARRILVLQEEIKDLDELIAGLVARINPRLTEVPCVGVETAAQLLITAGENRERMKSEAAFAMLCGVAPLPASSGKTRRYRLNRGGDRAANCALHMAAISRLRVDPRTRAYAARRAAEGLSKKEILRCLKRYLARELYKLLRPLPPDAPHMA

SEQ ID NO: 405116 - protein, 356 aa, unidentified
MTNQATQYLALDVHQATIVATLRSADGSVRMRATVPTEARAVVNLVRGAGPHVRVALEEGTQAQWLHDVIAPVADEVVVCSTRGRSEIENKNDRIDADRLSELLRIGAVKPIFHSALDTLSLKELVRNYLTLVEDATKTKLRIKSMFRARGIRTPGRQVFIPERREEWLDQLPSPGARLHAEHLLTALDTLTALRRRAKAAMVAEAQKRNAWKILRSIPVLGPVRISCLMAIVVTPHRFRTKRQLWPYCGLAVVTRSSGEREFADGVLRRRRKHAPATRGLNRNYNRTMKNVFKGAAAAALIKAGPLKDFYELCIERGVRPELAKLTLARKIAAVTLRLWKKGELWDPKKMTMQTT

SEQ ID NO: 405117 - protein, 363 aa, unidentified
MNHYAGIDVSLEYANICVRDGNGEIVREGKVLSEPAALIGWFGGLGLSLTRIGLEAGPLSQWLYAAMQQAGLAVELLETRHVRNAFKIMPVKTDRKDARGIAELMRMGWFRPVHCKSMEAQETRALLTARKLVQKAMLEVEASLRGILRGFGLKVGKTTPVRFEARIRELVEGHPSLVEIAHALLVVRGGLRREFNGFERRLRALARCDTRARLLMSTPGVGAIVALTFASAIDDPARFKSSKIVGAHLGLTPSKYQSGETDRSGRISKIGDSSVRTVLYEAAHVILSKPLKGATALKSWGMRLAKRAGTSKAKVALARTRSSCIGCWPMARRLRPNRRERSAVLAAVKDAARRRWRWPSGHP

SEQ ID NO: 405118 - protein, 366 aa, unidentified
MKKSSTRKPSMKSQGIKSKPERTVGLDLGDRTCYYCLLDSEAELVEEGRIQTSEASLRKQFGNEARLRIALEVGTHSPWIAPLLESMGHEVIVANARKVRAISSNENKNDREDALLLGRLAAADPKLLHPLQHRSIQSQQDLGLIRARAAVVRARTLLVNCLRGLVKSSGYRLPSCSTEALPEQARQHLPADLKPACLPLAEQIGKLNQTIAEMDRKVVQLGNTYPEIGVLRTVPGVGPLVAACYVLTLDHPSRIRDSRQAGAYLGLRPRQEQSGDSNPERGIAKNGNTYLRSLLVQAAHYTLGRFGPDSALRRWGLKLAGTSKRNKKRAVVAVARKLAVLLHRLWRSGQTFVPFPHPLTAAVAAA

SEQ ID NO: 405119 - protein, 343 aa, unidentified
MQTVTTIGLDIAKSVFQVHGVDAAGQVVMRRQLKRRQVLAFFQRLPACLVGIEACASSHHWARELQLVGHTVRLMPPAYVKPYVKRHKNDATDAEAICEAVARANMRFVTIKTPEQQGCLILHRTRHLLIRQQTSVINAIRAHLAEFGIVAAVGRNGVEQLLGVVADANDKRLPEVARACLATLGVQLRVLKAQILEFDRMINAWHRSNETSRRLDKAPGIGPVLATALVATVADPKTFRSGRNFSAWIGLVPQQHSSGGKDRLGHISKQGDRYLRNLFVAGALAVIRYAKIHGTQHRPWLAALLARRPTKVAAIALANKIARMAWAMMVKGEHYKEPVALAR

SEQ ID NO: 405120 - protein, 430 aa, unidentified
MTKPQLTPTQGILVAIDIGKTRNEVLIEIPGQARRRRLTVLNTRADYDRLIDLLSGLGQPVTCAFEATGNYHRPLAWRLLQAGFTVRLISSLALARTREALHNGWDKNDPKDAQVALHMLRIGASQHYHDPLAAGLNDIQEVSKTHEAISKAKTEVLHRILTHHLPLYFPEIGRFRHNSRSDWFFAFLDRFPTPGSITALSKEAFIAAAWGVVGRKVAKERLLGDIYETARASIGLPIPIDAPAVRLFRLVIAEVRSLIEQRNALEAMAIELLHESPDYKLLCRIPGVGPITALTILAEAGDLRRFGHHRQFLKFCGLDLATHQSGAFRGQTKLSKYGNARLRRALWLAGQVAIRQKENSFRDKFERYIARDRHKADLRRKALTAITAKMARVVHAIIKSGADYRPFVEGPVPGGRTSLSMGREGATATL

SEQ ID NO: 405121 - protein, 438 aa, unidentified
MSNKVIFNLDELFISVGIDVGADFSWMSIALPNQQFVGKPYKILHNSIDSLTTAVSKIKEAEELYSLESRIFLESTGIYHYPLFCYLRDKGFNCSVINPIITKNSTNINIRKVHNDRFDSKKAALVGLKPDLKVSLMPSDLALNCRNLCREYYDLMDNRSAYVNKLQGELRMAFPQYLGIFSKVTINTSLTLLETYTSPSAFLKADKQEIIDIIKSTARFGLTYAQNKYNAIIQAATDANQFGYIIDSNIKRIRLYISFIRKYDEEINSILESLHELVDANEDSDFVKQIHLIETFKGAGFLSAVSIMGEIGDFSAFSKPKQLFAYFGLDPAVKQSGKFEGTKVQMSKRGSAIARRVIHTLTLQSISISRNREAKNPVLREYYLKKCDSKPKLVAMGAVSHKVCNMIFAILRDNKPFKIIAPQEHIKQYNAAKCDIAA

SEQ ID NO: 405122 - protein, 401 aa, unidentified
MVSDFRKGRYNLMKIYVGIDIAKLNHFAAAISSDGEIIIEPFKFTNDADGFQLLVSKLESFDKNSLIIGLESTAHYGDNLVRYLVTELYQVCVLNPIKTCQMRKNNVRKTKTDKVDTYVIAKTLMIQDNLRFVSFFDLDMMDLKALGRFRQKTIKQRTRLKIQLTTYVDQVFPEIQYFFKSGLHQHAVYALLKEAPSPKEIASMHMTHLANLLKVNSHGHFTKEQAKELRVLAQKSVGANDSAISIQITQTIQQIELLDSQLEKIEAEMTDIMKFNDSVIMTIPGIGYINGGMILGEIGDIHRFSNPNKLLAFAGLDPSVYQSGNFQAKTTRMSKRGSRVLRYALVNAAWNVVRNNATFKAYYDAKRAEGRSHYNALGHCAGKLVRVIWKMLTDEVEFNLE

SEQ ID NO: 405123 - protein, 343 aa, unidentified
MKNHHTFNDSVILGVDTHLDIHVGAVLSYDGKLLGTKVIQTNQASYEELFDWVISFGSVERAGIEGTGTYGARLTRFLIKKGLDVLEINRPDRSKRRLEGKSDPLDAENAARTDLSGSAKAVPKLQSGACEALRIISVARRSAVKAKTQAINQLRALLVSAPQNIRDMLWKSKPHECVTACMSFESAEKSPLLLALCCTLRSLAKRWQALAEELTQLDELLDNLTQEYAGSLRRQFGVGPQTAAILLAVAGDNPERLKNEAALASLCGVNPLPASSGKTIRHRLNRGGSREANNALWTIALVRMRSDPRTKVYEQCRTGEGLSTKEILRCLKRYIVRELYPLI

SEQ ID NO: 405124 - protein, 343 aa, unidentified
MYYIGLDVHKKTISYCVKDAAGHVHHEGKIGATRLDLDNWIKTLPQPRMIAMEATIFTGWIYDHLLPHAEKVKVAHPLMLRAIAAAKKKNDRIDAGKIADCLRCDFLPECHMASTEIRDRRRTLRYRGLVLRQTVQMKNRVSGLLMESGVTYDKQRLHKMGYFTELFSTNEEISDSIRPLLRLGREHILRGQRLDRALTSSLERDPLLSERLRRLRTIPGVGPITALTWALEIGDFTRFQSVKEAISYCGLCSAEKSSADKVMRMPISKQRNKHIQHVLVEAAKMAPRYSHELALVRDKEMQRGNRNRATLAVARKLVAYMLAVDRRKQDFVPAEALAGKAVA

SEQ ID NO: 405125 - protein, 356 aa, unidentified
MSKTNPVKIIIGVDTHKNIHVAVAINGIGAHLGMLTIPVSPKGYQNLETWARAFGSIHAFGIEGTGSYGAGLARFLQAKGHTVVEVNRPNRQLRHQNGKSDPLDAESAARAVLGGQANARPKSADSSVEMIRHLKVARDTAVKSRTQAMVTLKTIIINAPAALRQALDRIIGKMALIRHLAALRPGPIVSVTASAKGALRAIARRWLTLDAEIRAHDADLEALTASCAPAMLEAHGISTGTAAEMLILVGDNPERIRSEAAFAKLCGACPIPASSGKTNRHRLNRGGNRQANAALYRVVIVRMRNHQPTLDYVKKRKADGKGKMEIIRCLKRFVAREIFGYLCGARRSLPSISKAT

SEQ ID NO: 405126 - protein, 323 aa, unidentified
MGMDVSKKTLDCHLFVQQKSLPTVSNDGKGFKVIKGWLKKELKSLDGLLVVMEYTGIYTYRIERFLEQQQIRFVKRPALDIKRSLGMIRGKSDAIDARFISKYGWMRKEELQPMSVLSDTQLELQQLMGHRDKLVADQASYQSKLKEMISQMGEKVNEKLVSSMKLVMGVLKQEIKETEKAIKELVTSDESLQTNYELACSVTGIGFATAVHLLIATENFTRFSDVRKLICYCGVAPFEHSSGTSIRGKVRVSHLANKKLKSLLTMAAISAIQHDPELKAKYEQKLKEGKAKMCVINIIRAKLIERVFAVIKKQKPYEIRLAA

SEQ ID NO: 405127 - protein, 322 aa, unidentified
MTSSKLATRVIGIDVAKDKLDVSDPHGKIKKEIQNSNACIVKQLISKIDQPDKTFVVCEATGGYERPLVKAVQDAGIAICVANPFQVRQFGKGIGVLEKTDPIDAALLQRFGEVVDLQPTPPKSPEHQHHEALVRRREQLMNMINQEQNRRAQADNKPIIKLIDETLKLLKKQQNSIDTEIKSFLEMEAETNVAVAIIQSVPGVGVVTTSTLLSDLPELGTLNRGEIAKLAGVAPIANQSGTRDRKRCIFGGRSHVRRVLYMAALTATRFNPVIKKFYVRLVAAGKEKKVALVACMRKLLTILNCMVCNRESWREEMVVTGT

SEQ ID NO: 405128 - protein, 409 aa, unidentified
MLKIVYPNCCGIDVHKTFVVAVIAITNNQGITEYHRKRFSTFTNGLTQLRDWLEYYSCFDVCMESTGKYWIPVFNILEEQTNVCLAHPKYVKAIRGKKTDKKDAQWIADLFKHDLVASSFIPPLKIRQLRDLFRYRMKLTQLQVGEKNRYQNCLTWSNLQIASVVSDIFGKSAQAIIKSILDNPQDKPNIEQLVHKRMKNKVQDLEIAMEGALTPEQAEKIRVIKAHYDALAICKEDLEQMIRELGQDYQHQVKLIQTVPGFKEDLSALRIISEIGCDMTVFDSAAKLCSWAGLVPANNESAGKKFSTRISKGGKYLKPFLVQVANAVVKSDKHPELRNKYLKLKKRRGHRKAISAICRRLLVSVYQVLRKQEDYNPVLQGLTEIRNPDKTMSVQDAVRFAQQHGFNVA

SEQ ID NO: 405129 - protein, 370 aa, unidentified
MTEVKSEQTSVLGNRPWIGMDVDKERFAAALYADPRPGTPDLRSMPTKDFTRDAEGVAACMEWAGKTLAKSRPGSPAPRVCMEATGRYSIQLAREILRQRPEWEPAIANPRFVKKHGESMGQRCKSDKADARVCACYGAERQPRPYQAPQPAFEQLQELARERRAIVEQRAALKNRMADTPASKIARRTREQLMKQYDKLVEKLDAAIARTFEEIPQLCADAQAVTQIPGVAEVVSSVTISELGDLRNYRRSRSVAAAVGANPRVIESGNHKGKTRMSKQGNSRVRAILYCAAMACLRTRNDHCLKRFYNRLVERGKTHMQALGALMRKIIVLMRALVISGQPFDPDYDLKKHLSTASPEKELQPVDNLA

SEQ ID NO: 405130 - protein, 357 aa, unidentified
MKKTHYKKAYLGFDVSGKTIEIFGRTAESDEGVSIQITNSKVAIKKFIEALPCPEKTVIAMETGTDSPWMSDYLSSFGCEVIVAHARDLALIWGSPAKCDRRDAEMLARLACFDQKLLHPVKHQDIEKRDDLCVIKARDTLVRVKITLISTVRNLMRSHGTDVSTLTPENFSQLAPKLLPDELRPALEGLLIQICYIRQEIKKYDRIIAKLCNKYPETKKIRQIKGVGPITALAFLLVIGDSQRFSSAERLAAYLGLVPKRDQSGEVDRQLGITKQGNTFVRRYLIQGANYILGHFGEDCDLKRYGERIAARGGKIAKKKATVAVARKLSGLIYMLWKNDVVYDPNYKQNQRQAKTV

SEQ ID NO: 405131 - protein, 345 aa, unidentified
MYRTRVGVDLAKEVIQVCAFRNKKMQSNIEMTTDDFLVWLIKSKPATVIFEACSTSNYWKQKAIEAGHDARLISAKLVATVRQNQKTDKNDALAIVQAASLPDVTFIGGKTVEQQQLQSIKRLRELAVKQQGASHKQLVSLLLELNIRISNRKGGIISAIEGVLEDATNGLSVECRAAIHTAKEQLSVLIKSVHRYDDCLKNSVAAHPDCKKLMKLEGVGTTNAINLYLALGCAEIGTFSKGRDASACIGVTPIQYSSGGTVKLGSIGKYTKNSLLRSQLICGAMATIRHVVKREAKTQKEVWLKALIERRGKKCAAVALANKTIRTAFAILTQGTEYKAAPITA

SEQ ID NO: 405132 - protein, 343 aa, unidentified
MSEITAIGLDTAKSVFQVHGIDVDHQPVLRRQLKRRQVLPFFEKLPPCLIGIEACSASHHWSRELTRLGHTVRLIPPRYVKPYVKSQKNDAIDAEAICEAVTRPSMRFVATKSREQQAMLMLHRTRHLLIRQRTATINALRAHLVEFGIAAGIGRNGVEALLKVITDENDDRVPDIARACLMVLGAQLESIKSHIHELDAKIVASHRASELSQRLEEIPGVGPRIATALVASIADPKAFKSGRQMAAWIGLVPKQNSSGGKDKLGGVTKAGDRYLRSMLMIGALSVIKRVKQLGCTKRPWLADLMARRPVKVAAIALANKIIRMVWAMMVSGQRYREPVALAA

SEQ ID NO: 405133 - protein, 423 aa, unidentified
MNYTQRQRIQQITEKTLIIGADIAKFKHVARAEDFRGIEVGKHLIFENTHKGFAALLAWIGRLKQANGKNDVILGMEPTGHYWLPLAQFLREAGIKVVVVNPMHVKKSKELDDNSPTKNDVKDARVIAQLVKEGRYSEPIFLTGKYAELRVAMVQRERLNTNLIQVKNQVHNWLDRYFPEYLTVFKKWEGKASLLSLENFPLPQDVLAKGVTGIVTQWKTQVKRAVGIKRASLLVDTAKTSVGLTYGLTMAREELKMHLDQYAMYMRQIESIEASVNTILAQIPGAKEMMSIKGIGWITVAGFLAEVGDLAKFKHSQQIVKLTGINLKENTSGKHKGRTEITKRGRPRLRALLFRAALVLVAKNPEFKQLHQYYTTRKENPLKKKQSIVALCARLIRILFAVGTQRKAYDPKKVLSPQFQLAA

SEQ ID NO: 405134 - protein, 338 aa, unidentified
MKLYGAIDLHSNNNVTVLIDEQDKVVYEKRLANDLGLIAQQLAGYQSSLEGIVIESTYNWYWLVDGLMDKGHQIHLANTAAIQQYEGLKHTDDTSDARWLAHILRLGILPEGYIYPKEERAVRDLLRKRGQLVRQRTANLLSIENLMTRNTGSSMNSNRIKTLQPQQVDELLAEGDRALAVKANVAMVQCANGQIEILERTVRDRVKLRPEFCFLKTVPGIGQTLALTIMLETGDIGRFAGVGNYASYCRCVGSQKLSNGKKKGQGNTKNGNKYLSWAFVEAAHFAIRFSSRIKSFYQRKKAKSHGVVAIKAVAHKLCRACYYIMKNRVAFDVTKAFA

SEQ ID NO: 405135 - protein, 408 aa, unidentified
MKLFVGIDVSSQKLDVCFMDSEDQVLHEAALSNDITGASEIKEIILKLNENVEYDVIKVGMESTSVYSFHPATFLAEDAELKELGIEVIVQNPKAIARFKGLFEEDKTDTIDARRIADFLRLGLHGTTVIKEENYVALQRLTRSRYQLVQQMTECKQHFLENLYYKCNTLTRDVETSVFGATMMDLLTESLSFGEIAEMEVEDLAAILQQKGRGRFGNPDKLAKAISKAIRDSYRLGKVLEGSVDVVLATYAMMIKTIKQQIKELDKAIEALLEVISESQCLLSIPGIGPVFTAGILAEIGQIERFEDQAKLAKYGGLYWKRKQSGSWESERTSLTRTGNHYLRYYLIEAANSVKNREPVYKEYYYKKYNEVPKHKHKRALVLTARKLVRLVDVLLRNHQLYTPERSV

SEQ ID NO: 405136 - protein, 342 aa, unidentified
MLYVGIDVAKNKHDVTALNVPGKTVLKPLTFSNNKAGFELLDLSFRQLNQDCLIALEDTGHYAFNLLNFLHEQGYKVYTYNPLLIKEFAKSLSLRKTKTDKKDAHGIALKLLSDPNREQFQHDNRQVELKILARHIHRLKKKQSDWKVQYTRCLDIIFPELDKIVGKHSEYTYQLLTCYPNPQKRLEAGFDKLIEIKRLTASKIQDILSVAPRSIGTTSPAREFEIIEIIKHYKRLIDKTETCVNDLMAEFNSVITTVTGIGGRLGAVILAEIRNIHAFDNPAQLQAFAGLDSSIYQSGQIDLAGRMIKRGSPHLRWALIQAAKACARFSPAFKAYLKTKLE

SEQ ID NO: 405137 - protein, 355 aa, unidentified
MTRTVYCGVDFHARMQTIAYCDSADGEIQLAQLDHRKDDVREFYSKLTGQMIVGLETGGYSSWFEAMLEELGHTVWIGHANEIRRRANWRQKNDRRDAELILEIMLKGDFPKIHSHSRESVEALRMLRYRARLVKMRTMISNNLQAIAISSGLTERSRMLSRAGQQRLRNARMTPAIKHQSEDLLTLLVPLNERIARVERWLKQQASIDDRVRLLMTHPGVGVLTALGVVHTLEPFNRFSKQRSVVAYVGLEPRERSSGERKRYIGISKAGSRLLRFLLGEAAHVAVRLDPDLKQFYQRVGQRRGKSKATVAVARKLLIRCWIMLRNNIDYAEFRSRGVEARLARHMDRPNVPVE

SEQ ID NO: 405138 - protein, 353 aa, unidentified
MSEKFNSEIAVIGIDIGKNSFHIVGQDRRGSIVLRQKWSRGQVEARLANLPPCLIGMEACTGAHHLSRKLQALGHDARLMPAKYVRPYSKGEKNDYRDAEAIAEAAQRPTMKFVATKSADQLDLQALHRVRERLVGQRTGIINQIRAFLLERSIAVRQGLHFLRAELPGILAKRTDVLSPRMLRVIEDLARDWRRLDERIDALSDEIMMLARQDKGCERLMTVPGIGPIISSAMVAAIGTGDVFSKARDFGAWLGLVPKQISTGDRTILGKISRRGNRYLRALFVQAAWVVLVKVKGWERYGLKSWIEAAKKRLHHNVLAIALANKLARIAWAVLHKGRAFECVTNATASRPA

SEQ ID NO: 405139 - protein, 381 aa, unidentified
MTTAATHNEHENTTEATLFVAFELSEKTWKLGFTTGHGQKPRERTVTARQQERVLDEIAHAKRRMGLPESAAVVSCYEAGREGFWLHRFLQAHGITNQVVDSSSIEVNRRRRRAKSDGLDVRKLLSMLMRYHHGERQVWQVVKVPSVEAEDQRHLHRDLETLKQERASTMTRIEGLLSSQGLRVTSLTKLPEQLDALRLWDGSPLPPGLRRRVLRVYAQYTFLSEQIAEVEAERRAQLQTSSEASIDKVRQLMQLKGIGINGAWLLVMEFFGWRAFKNRREVGALAGFTPTPYQSGESAREQGITKSGNRHVRWMTTELAWSWVRFQPGSALSCWFRERFGGGGKRLRRIGIVAVARKVLIALWRFLETGVLPAGAVLKEG

SEQ ID NO: 405140 - protein, 402 aa, unidentified
MAEGPTRFFGLDIHKQYFVVVGVDAQREVVFGPQRVSNYQLDEWVSRVLTPQDAVALEMTTNTYLFYDTLLPHVHSVIAVHPPNVTLITGAQVKTDKKAALALAQLHAAGMLEGVWIPPHPVRDLRALIARREKMVRLSTMAKNWLHSLLHRNHLALPEKPFSPEQRSWWENLPLSATEQFLVRTDLDTLKFAQEQVEQAEECLKKASAEDERIPLLVQLPGVAMLTAITILAAIGDITRFPDAKKLVGYAGLGTRVHDSGMTHNSGRITKAGRRDLCRAMVNAANHAIEHHLHWKKEFERLEPHLGRSKAVVAIARKLLVAVWHVLSENVVDRFADPANVARSFFAHAYQVGVRNLPERQSAKAFTREQLDRLGIGQDLQEISWGAKRHKLPASKLLPPKK

SEQ ID NO: 405141 - protein, 349 aa, unidentified
MLADELDYVVGVDTHLDEHVLAVVAAPAGAVVAQRSVRASARGYAAALRFARELAGGARVWAVEGTGSYGAGFARYLAGRGETVLEVSRTPRAERRLRGKDDALDAARVARAALASEKLARPRSGERREALRLLLIARRSAVDVRREALGQLRGVIVTAPDQLREELRGLPVGRLLERCSRFRRSSSASADELATRLVLRSLARRIEAATLEAAELERELLGHVRALAPQLLDEPGVGPIVAAQLIVAWSHHGRVRSEAAFARLAGVAPVPASSGHTVRHRLSRGGDRQLNRALHTVVLHRRQHDPTTKAYIERRVAEGKSRRDASRLLKRYLARHLYRLLQNQEPLMT

SEQ ID NO: 405142 - protein, 265 aa, unidentified
MENIALIGIDLGKNSFHIHCQDRRGKAVYRKKFTRSKLIEFLATCPATTIAMEACGGSHFMARKLEELGHFPKLISPQFVRPFVKSNKNDFVDAEAICEAASRPSMRFVQPRTESQQAMRALHRVRESLLQDKVKTTNQMHAFLLEFGISVPRGSAVISRLSTILEDNNLPLYLSQLLLKLQQHYHYLVEQIKELESQLKRKLDEDEVGQRLLSIPCVGTLTASTISTEIGDGKQYASSRDFAAATGLVPRQYSTGGADNIVGHQ

SEQ ID NO: 405143 - protein, 425 aa, unidentified
MRLVYPVCCGVDVHKTFLVATIISTTNNIFPRYRQKRFSTYYSGLLDFKQWLLDNNCKDVCMESTGKYWVPVWNVLEAASINVVIANPKWVSAVKGNKDDKKDSKWIGDLFRMGLVPASYIPIKNIRILREFTRYRSKLVAMRSSEKNRFQNAFTVCNLTLDAVVSDMFGVSAKAIENYLLDTDTVDPNYCVFLLRGSLKKKASDVVEAVKGFNMTAEQKERARIVQGHFDDIDKRIAQIDNVISQLVAHYEGQIALLCTIPGIDRRLAITIISEIGTDMSVFGSSKRLCRWAGLTPGNNESAGKKKSVRISRAGVYLKPALVEAAHAAVKATQKSPYFRTKYERIMKRRGKKRAIIAIARMMLTAIFAMLQSGEVFNPCDLHKFDMPDELRKKQTLSSAKDAVKLLVSLGLVPEGSISLEPLAG

SEQ ID NO: 405144 - protein, 379 aa, unidentified
MLTAPTPSFDLSAALVVAVEISRPTWVIAAHVPGLGHVKVRRRIEARGEALLLAIEQLKRRAATGIDHVIVTYEAGYTGFWLARLVRRHAIEVYVIQPVSVPVDRRRRRAKTDAIDADLLLRTCLAFLRGEPRVCSMVPIPDQKDEDARHLVREREDLIAERIGLTNRIGAILATLGVEEFDPLRRDRRVRVAEVRTALGEPIPENAKARILRLIERLELVLDQIRTVESQRDALAVAASAGAPETMTKRLTGLRGVGVQTATVLVREGFVRHFRSAKALGSYAGLVGSPFASGGSSHEQGITKSGNRRLRTAVVELAWLWLRYQPGSALARWFAERLGQTGGRMRKVLIVALARKLLVALWRLATQGLVPEGSALKPV

SEQ ID NO: 405145 - protein, 346 aa, unidentified
MQNDTLVAVDIAKEVFEVGVSDRPGRVAVRRRLARYEFLEFFAQLPQATVVMEACGSAHYWARRIEELGHVVVLLPPQYVRPYVVRNKTDRTDVNGLLEAFRNEQIRPVPIKTVTQQVLGTLHRLRSGWLADRTRAINSLRGLLRELGFFIPEGRKHVLPDAWEIIHDPTRGLPEALKPSLSSLCQEIVSLSTRIEEIEAQLEALAKQIPAVARLRTVPGIGLLTATALYAFVGDVSRFPSGRHMASFIGLTPREYSSGLRRRLGRISKRGDVYLRMLLIHGARSVLWHAKRMKNRDRLRAWALRLERKLGHNKAAVALANKLARITWAVWKNDRNFEPVPELQAA

SEQ ID NO: 405146 - protein, 308 aa, unidentified
MTTIHTGLDIAKLNLQLHLAGRIHDLPNTPAGHRRLLKLLATQPGVHVVCEATGGYERDVVAALHEAKVTVSVLNPARVRHFARATGQRAKTDNIDAAVLSAYGQALQPKPTAPRTEQEQQLAELIRRRVQVLEILVAQRQQAERLTLPALRRQAQSLVRRLERDMEQIEEQLKVLRTQAVTLDARVQKLEAITGVGTITALGVLAELPELGTLNRRQAAALAGLAPHPRESGQWHGRRSIGGGRAPVRRALYMAALVAAHSNRQLKAFYQRLRAAGKPAKVALTAVMRKLVVLMNHILKNPNFALQN

SEQ ID NO: 405147 - protein, 401 aa, unidentified
MSASIAASRQFSSSAVTFGHKQWDGLLLNLTASQCARLNLYSLKRNFQSREEKESVMKLSRVGVDLAKNVYQLHGVDRHGKAVWKRRLRRSRWLQALIDKVEPGCEIGMEACTGAHHWARELQARGYTVRLIAPQFVKPFVKSNKNDANDAEAICEAMSRPHMRFVTVKTVEQQDIQATHRVREELKAHRNAKANQIRGLIAEYGLVAPKGILSLRRVIPEWLEDAENGLTDNFRYLLHGLWNDLLTLEDRLKELDKKIEKLARRNEVTKRLQQLRGVGPLVATALVATVGDGKQYAKGRQMASALGLTPRQNSSDDKYRLFGISKRGDVYLRTQMIHGARAVVSQARHRDDPLSRWVTDIAKRRHPNVAAVALANKTARMAWAMLRNDTNYESSLAVGRA

SEQ ID NO: 405148 - protein, 339 aa, unidentified
MKNKKYFIGLDVHKKKTTHVVRDKIGNIVLEGETATLYSELYERLEPYLKSSVIGLESCTSYYTLYQNFLKNNYNIKVANTIQLRQLIAKNDSLDAKRLAEMLRLGTFPCSYIPGEKIQHLRSLLQVRHSLVEEKTRCNNRIQAFLDRNGIVMPSQDAFGKKWRQTLLQYIGSGEVSLELRYEYDHFVYLEKKSEHLGQEISGYTMKHWKKEYILLQSITGFGPVLSCYVIANILPISRFSSNRKLRRYAGVVPAFHESGGKKSKGHIPKTSSRKLLRWALIQAANSAGRTNTKLGYYYRKKKKQKNNAGIAHVAVASSMIDIIYKVLTTNKPYNPKSC

SEQ ID NO: 405149 - protein, 386 aa, unidentified
MPQLNDLSRSLVILEQDATLIAVIEMGQSSWLVAGIVPGVERSPLKKLAVDESALLKLLNRWREEAEKAGHRIERIAIAFEAGRDGFWLARWLRARGIEAHVIHASSVAVSREHRRAKTDRLDTELLKRAFLGWLRGERDHCKMVAIPTLAQEDAKRPNRERESLVGEQSRIVNRMKAALARLGIRGFNPKLKKAVERLDGLRTPEGEPIPPNTLAELKHDMERRRLVRSQIRDIEGTRLERLKQAPGDGPHVRVRLVARVIGVGVETADMLVQEVLSRNLRDRRAVARYGGLTGSPDESGKKRREKGLARSGNARVRRGMIQLAWRFLMFQKGSALAHWFYARTKNAPQTRKTMIVALARKLLIALWRLAREGAIPEGIVLRPAL

SEQ ID NO: 405150 - protein, 367 aa, unidentified
MKKNNTSEQSRKGWKGPITIGMDLGDKMSRYCLLNSSGEVVEEGSVATTKKGIGQLFGRMRRCRIAIEVGTHSPWVSRLLKSYGHEVIVANARQVKLISASSRKDDRLDAQTLARLARMDPQLLRPIQHRSKKAQQHLMKIRVRATLVDARTSLVNAARGFTKAVGERLPACDADSMGMEQMADLPAGLQETLKPLLEQVESLTKKIKECDVKIEQIARTEYPETYLLRQVSGVGNLIALTFVLTVEDRQRFQKSRDVGCYVGLRPKRSESGESQPQLRITKEGDSYLRKMLVQGAQYILGWRGPDTDLRRWGLKLAARGGKNAKKRAIVAVARKLAVLLHALWVSGEVYEPLRNSNARQQLKQRAA

SEQ ID NO: 405151 - protein, 340 aa, unidentified
MGEYAGRQFVGIDLHRRRSVIVRMTPGGERIGPTVRIDNDPFELAAQVESWGESPQVVLEATYGWYWAADVLAEAGAVLHLAHPLGVKGFAYRRVKNDERDAADLADLLRMGRLPQAWIAPPQVRGLRESVRHRCKLVALRTGLKLQVHAVLAKQGVKVSVSDLFGIGGQKILDQLALDEPYRARVASLRRLIDAFTVEIDMVAKHTSAQLATHPGFRAVQTLHGVGPVLASIFVAEIGDVTRFAKAEQLCSWAGLTPRHRESDTKVHRGRITKQGNPLLRWAAVEAVQTLRTGPIGATRVRVGERRGANIGKVAAARKLLTLVFYGLRDGHIRCLARPA

SEQ ID NO: 405152 - protein, 460 aa, unidentified
MLFAGCDWSDKWLDVAVVDRSGAVLGETRIVYAESPDPVARYQAFLAPLSRRWRATVTGIEDVNLLFARSLVASGMDVVHVDPTRAARHRVARGIPKTDRADARLLASMTLAGECRPVVTNGSAAEALRVVAHAHRAAVADRAEALHSLRAALMRIWPAAVGTWPAGVGGLRSAQARAVLAAAPGPRAAARLDRASLAAVLTAAGRKRTVLDEAERLRMIFCRPTMLLDPHVEEAESLRIRHLVAALDQAVRRAADLQADLARFYAAHPFHPLVVGVPGIGAVLGAYLLAEIGDRPVERFGNGRSLAAYGGVAPVTWASGQTVRVAFRRASSTFLRSTLHAAAFSMVGHSPGAHAYYTMRRSVGDAHATALRKLGRKFVLCLYRCMASGLPYDDATAFGYDPAASGAPSRPKRVPLDKEQIAQARDMLDTPGATVTATARSFGVSPQTIYRHVLGRPWTR

SEQ ID NO: 405153 - protein, 442 aa, unidentified
MTNLSSSATPTEWAAFVAIDWADQKHCWALTPTASEKVERGELNATPEAVEAWAAELNVRFSGRPIAVCLEQKRGALVFMLAKYAHLVIFPVHPKTAAQYRETFCPSGAKSDPADAGWLLDLLLRHRHQLRELRPDTPQTRLLQHLTEYRRRLVDESTRQKNRLTSCLKIYFPQLLHWFDDIGSPVAGALLERWPTLPELQRAHPGTLRRFFHQQNCRSEERIQERISGIAAAVTAVQDAAVVEAESLRARSLVALLTTLRSQIAVFDERIQEVVKNHPEERLFASFPSAGPVLVPRLIAAFGTQRDRYATATDLQSLSGIAPVTESSGKQEWVHFRWACSHFLRQTFHEYAAHSIVKSAWARAYYESQIAAKKTHHAAVRALAFKWIRIMFRCWKDGKTYDEQAYVAALRKRNSPLAALFKTTSIGWQSSAGFQRLSADPS

SEQ ID NO: 405154 - protein, 402 aa, unidentified
MIDTEGVGVFLGLDVGKSTHHGHGLTPAGKKVFDKPLPNSEPKLRAVFDKLRDKFGTVLVVVDQPASIGALPLTVARDAGCQVAYLPGLAMRRIADLYPGEAKTDAKDAAVIADAARTMPHTLRSLELTDEITAELTVLVGFDQDLAAEATRTSNRMRGLLTQFHPSLERVLGPRLDHQAVTWLLERYGSPAALRKAGRRRLVELIRPKAPRMATRLIDDVFDALDEQTVVVPGTGTLDIVIPSLARSLAAVHEQRRALEAQINELLEAHPLSQVLTSLPGVGVRTAAVLLVTVGDGTSFPTAAHLASYAGLAPATKQSGTSIHGEHAPRGGNRQLKRAMFLSAFAALHDPASRTYYDRCRDRGKTHTQALLRLARHRISVLFAMLRDGTFYESRLPEAVAT

SEQ ID NO: 405155 - protein, 448 aa, unidentified
MEILYERCAGLDVHKKNVKACFACPGEGGKRKKETRTYLTMTQDVLKMRDWLKEQGCTHIVMEATGVHWRCIYNLLENDFELLMANAHHIKTVPGRKTDVKDAEWIADLLSHGLLTASFIPSAPQRELRDLTRYRAKLVEERAREVNRVQKTLEDTNLKLGDVVSDVMGKAFQMILHAVVDGETDPVRLADFAAGRVRASRKTLERALTGKVTAHHRFLLGEHLRQIEHLDKAIGRISKEIAHRLTPPEPPSPPEEEENQPASQKEASPALSPEPTALPDAQNWQQAVETIDQITGISQRIAEGLLAEIGVKMDQFPSAKHLASWVGVCPGNHESAGKRLSGKTRKGNPYARQLLIQAAHAASHSKNTYLATQYRRIAARRGAKKAAVAVGHSILVMIYHLLRDGGAYQDLGGNYFDERDQQVIQKRLVRRLERMGYQVELKQMAQAG

SEQ ID NO: 405156 - protein, 397 aa, unidentified
MYIVGIDIAKRKHEAAVIDGEGAVIIKPFSFTNNCSGYNRLLAMLTKAKLPLDEVSFAMEATGHYWLALFTRLQKEGFRVQVINPVQTNSIRSFYIRQAKTDPRDALLIAEVIRFGHFSESTLHPENIYELRELCRGRHAIVSMQADVKRKVVALLDQVFPEYETAFTNMFGDTSMAILQTCPTPKELSEMPLEELCHLIEVSSHKRFRMAKARELQELARNSFGFAMAGDVFSTMIRLYAKHLDFLKQQVREMDRKIAEIMETLDTPITTITGIGPTLGAYILSEIGDINRFSSAAKLAAYAGIDPTMRQSGEYNGVRNRMSKRGSPYLRHAIWLAASSAVLHDPALKLYFQKKRDEGKPYMASVGHACRKMVSIIYAVMRDNKAYVPCIPSEISA

SEQ ID NO: 405157 - protein, 429 aa, unidentified
MEATAQQQEFQDLKTKLELHKSAGVVGIDVAKSKHFAVMLDPVGQTIQAPFSFDNSQAGFDALMDRVAELSRRHLIGQWVFGFEASGGYEKPLAAFLVEQRQDVVQVNSVAVKRHREMMTGSVDKNDAKDCVSIAYLMRQGYVDYYHLRSIEEENLHGLVLLNEHLKARRTQLKLKVKQNVLKYTFPELETFCKDIGSRQAMELLTLYPTPHDIVKEGKLSFKKAMVPRLRGSRVAYFLDEVYSLAEHSIGLKLDRWTTKALELRTYIAELRVVEQQREAIVKRLSHLLETNADYALLQTIPGIGLEIGSALLAEIGDISRFNSDRQLLSFAGFDLVSYQSGQYQSPARISKRGRPLIRKVAYQAVSVVTMSSKETGLKRKYRQIIARQGNTKETRQKAKVKLCAKLLRIVYAVLSKKEPYRDQAEDLA

SEQ ID NO: 405158 - protein, 337 aa, unidentified
MNSSVMGLDIAKNIFHLYTFVEGKPVKKKLKRAELLAFFANYPVSLIGIEACGSAHHWARELIKLGHDVVLLNARYVKSFVVGNKNDFNDAAAIFDAVTRPNKRVVTIKNIEQQDVQLIHKIRQGLVVKRTALVNQIRGLLSERGIIIPKSIHKVREQLPLILEDAENDLTVLSREVFAEQYEKLTVLDEEIKTQDRRISRLCNSHALSRRFLAVPGIGPMTASIAASDIGEGKGYQSSRDYAASLGVVPRQHSSGDRQVYLGISKRGNRYIRTLLIHGARAVLKNCSHKEDKLSLWLQALIERRGFNRAAVALANKNARILWAMAAQDKEYDALLV

SEQ ID NO: 405159 - protein, 412 aa, unidentified
MADIVACIGLDWADGRHSVHLQPSDGRIEHFELEQKPAVLHEWVAQLQQRFAGGNIAVALEQRKGAVIHALLMYDCFVLYPINPKALARYREAFTTSGAKHDPRDSELLLDLVVRHRDKLRAWVPDTVESRTLQALCEQRRKLVNQRVALTNRITSLLKQYFPQALDWVGDVASVQACDFLVQWPTLATVQQTRPSTVRRFYQDHNCRKKAVIDARLAAIASARPLTTDAAVIEPLSLSVQAYATQLRTLIGAIDKFDARIAAVFAEHADHDIFGSFPGAGDVCAPRLAAAFGTDRSRWDSAAELQAHSGIAPVTERSGKTLFVHHRLACPKFVKQTFHEFADQSIRFSRWARAYYDQQRARGNDHHAALRALAYKWIRILFRCWKERRPYDEDIYIDALRRRGSPLAKNFA

SEQ ID NO: 405160 - protein, 343 aa, unidentified
MQMITTIGLDIAKSVFQVHGVDAAGEVVIRRQLKRRYVLAFFQKLSPCLVGIEACASSHYWSRELQALGHTVRLMPPAYVKPYVKRQKNDMADAEAICEAVTRANMRFVPTKTPEQQSCLMLHRTRHLFIRQQTAVINSIRAHLAEFGIIAPVGRKGVTELLHVVADPSDKRVPEVARACLAALGTQLLRLKQQILEFDRMIMAWHRSNQTSKRLHYIPGVGPILATALVASVADPRTFRSGRNFSAWIGLVPKQHSSGGKDRLGSISKQGDRYLRSLFVAGALAVIRYAKIHGTKHRPWLTALLGRRPTKVAAIALANKIARMAWAMMAKGERYKQPVALAA

SEQ ID NO: 405161 - protein, 337 aa, unidentified
MNYCGIDVASKSSDISIINGQGKQLRRREIDTEASDIGKTLTGFGELKVIIEAHPLAEAVAGIVEELGHTPVIIDARAAKNLMDAMKKTDRRDAQTLAEIGRCGWYVEVHRKSAAARQMRSILQARQALLKSHKALASSIRGLLRSHGIRLGKVSKGQFVAQVKKVTEQEVPGLLAALSGMLDAWVVTGERAEQIKKAMVKECKQDEISGYLESAPGVGPLISTAYRATIDDPHRFKRGEEVGDYLGLAPRVYQSGEVEYRGRITKQGDALLRSLLVEGAHVLPTKGRDCALKRWGLSLEKRKGSAKAKVAVARKLAVLLWRLWKEEKMFDAFPQSV

SEQ ID NO: 405162 - protein, 338 aa, unidentified
MKTHIGVDLHQRFCYLTAVDANGKLYKQEQVINEGAALRAWLRELPKPRQVVVEACGFWPAFQRAVAAEAERIVMVHPLRVKAIASARLKNDRVDSKMLAHLSRTDLLPEAWMADEQTQQARKLTRLRIALGRQRAAAKNQTQAVLHQEGFLSPVTDVFGKGGRIWLAKLELSVAGRMVVDTWLQVVNHLDELIAQQTRALEQMAEQDARARWLQTVPGIGAYSAMVILAEVGNITRFDNKRALASYAGLTPSLRESAGKRKRGGIGHHGSGTLRWIMLQVAQVAAKHSPSARAWIATLRKKKPAQVAKIALARKLLTAVWAMLRHGVCFEESVFAGS

SEQ ID NO: 405163 - protein, 355 aa, unidentified
MNSEKYIGLDVHQATISVAVMDTRGKVVMESILETKASTILEFFAGLRGTLSVTFEEGTWAAWLYDLLKPHVAKVVVCNPRKNALLKDGNKSDRIDARKLAELLRLDNLKPVYHGETGVRMLRELARSYLTIVKDLTRVMNRLKALYRSWAIPCAGRDVYYTRHRTEWLGKIREAGVRRRAEQLYQQLDMLQHLRQQARRELLAESRKHPITAKLRKIPSLGPIRSALAVALIQTPHRFRTKRQLWAYSGLALETRTSGEHRYVRGQLRRSKKQVSIRGLNKDHNHDLKGLFKAAATRASVQPGPFQDFYQRSLAKGIKPTMVRLTLARKIAAITLTLWKKGENFDAEKLKSQAA

SEQ ID NO: 405164 - protein, 314 aa, unidentified
MAEAELYVGIDVSKKWLDVAIQPTDRTWRVLNDADGITNLSQQLKAIGPQRIVVEATGGYEARLVKELCTANLPLSHVNPLRVRRYAEGMNWFAKTDKIDAKVLANFGEKANPRLTILPGDVEKHLAALLKRRKQVLDMLTAERNRLENVDPDIREYIESIITSLKEQLAELDREIDQLTKNTPEIKHKKALLISTPGVGKITAATLIATLPELGVCNRKQIAALVGTAPFNNDSGNKRGRRKTKGGRADVRCILYMATLTATWCNPVIKAHYKNLIEAGKLPKVAIVACMRMLLVILNAMMRTQTTWKTAPAS

SEQ ID NO: 405165 - protein, 395 aa, unidentified
MFIVGIDIAKRSHEAIIIAEDGQVVRKAFSFRNNCTGYNLLLEQVRKLTLVKSQIVFAMESTAHYWLALYARLLKDGYAVMVLNPIQSHSLRELYIRKAKTDARDSLIIADLVRFGRCKASNVPQDKILALRELCRSRAYLVDMAADLKRKLIALLDRIFPEYESLFDSVFSKASIAVLRKYSTPQKVKNAHLGKLTDLLMESSNGHFGEWKAHQLKEAACSSFGIDDSDGVYSMLLGMFLEQILSLTAQADSLEKQISVFFQEFNNPLTSIPGVGTVLAATILSEIGDVTRFSSADKLLAYAGLDPSVKQSGEFKSNQNRMSKRGSPYLRRAIWLASTVAVHRDPMFQTYYEKKISEGLHYMNVIGHVSRKMTTVIFAVLRDGQPYQPILQSAG

SEQ ID NO: 405166 - protein, 417 aa, unidentified
MSDNVRFYADVDWATEAHQVCLIDAGGKVIDERAFAHGGVGLAEMCGWLETTSGAEPSAIVVAIETPHGPVVEILLERRFQVDAVNPKQLDRFRDRHTVAGAKDDRRDAYVLADSLRTDRHCFRRLRVEDPIVIELREWSRMAEDLQQERNRLANRVREQLWRYYPQALELGDDPAADWFLDLWAVAPTPAKAARLRESRAASLLKANRIRRIDAAEVVRILRQKPLVVASGTVEAATAHIAAVAARLKLVNQQIKQAHRSLDELCARLTESREQDAPGQRPEQRDVTILRSLPGVGRIVLATLLGEAAEPLRKRDYHALRSLSGVAPVTRRSGKRCIVLMRQACQLRLRAAVYHWARVAIQHDARSRARYAELRKRGHSHGRALRSVADRLLAVACAMLRTQTPFNPHRAAVADAA

SEQ ID NO: 405167 - protein, 368 aa, unidentified
MNEVITYVGMDAHKKDLFIAMLIGREKTPVTWQLANEPGAVRRLIRKLEREAPGRVEMCYEAGPCGYALQRQLTTARVSCQVIAPALIPRKPGERIKTNRRDARKLAELLRAGLLTDVRPPTPDEEAVRDLCRARDDVREDVQRCRHRLGKLLLRRGLHSSGRNWTRAHRRWIDSLEWAHPAERVVVDDYRLAIDQQEARLVELDARLTEIAQTEPYREPVAWLRCFRGIDTLTAILILAELHDVRRFPSAPELMAYLGLVPGEDSTGEKQRRGRITRTGNALVRRLLVETAWHYQHRPGVGVALARRRKGQPSRVIAIADKAQQRLCRRFRKLAAEHKPAPKIAVAIARELAGFLWAALQPASGSAS

SEQ ID NO: 405168 - protein, 400 aa, unidentified
MHLTANISVPQKNFIAIDLHSDNAVICVRRNALNKAGELVGKNIWCGRVSIRDGLDSFVKALLPYCQDFDHVAVVESTYNWYCLADVFEERGWLLRIADPSTVSQANLKASDDRTDAQYLAERLRVGSLKHYLPLSYSSRALRDLCRYRMAMVQDCASLKIKLINLYRNQLSKNLRVADLLDRCRNHMQSNYRFDPDILEEFKDPNIRLRVAFEVSRIAMLEEMIEECNAEIQKQCKDQELVKLCKTIPGCGPVLSAVICTEIGTMQRFKSAGDFVSYCRLCSTSKLSNGKSKGLGNAKNGNAYLSWAFTEVAQYASRNPVIREILQRLLRKYGALRVKTIRTLAAKIARVTFYVLKNKQPFNAAKCFGIELTKSIKKKLTHKTLREDAAVVLPTVAGQA

SEQ ID NO: 405169 - protein, 347 aa, unidentified
MKFYTQQHRYYCGIDLHARTMYLCVLNQQGEILLHRNMPCSPDFFLKAIAPYREDMAVAVECIFTWYWLADLCAQENIVFVLGHALYMKAIHGGKAKNDKIDAHKIAALLRGGMLPMAYVYPALMRSTRDLLRRRMHLMHKRSELLTHIQNTNSQYCLPQFGKKIAYKKNRQGVAEHFADSSVRKSIEMDLSLIDHYDKLLTEVELYITQNAKIHDVNAFNRLRSVHGIGKILALVILYEIHEIDRFPTVQDFVSYARLVKCSKESAGKRHGSSGAKIGNVHLKGAFSEASVLFLRANPAGQRYADKLTSKHGKAKALSILAHKLGRAVYYMLKRDKAFDMNKFLNS

SEQ ID NO: 405170 - protein, 393 aa, unidentified
MFYIGIDIAKHKHEASIIDSDGKLLCESISFSNTQKGCEKLLALMQKFTVTADNCIIGMEATGHYWLSVYSYLIELGYNLNVINPIQSDSFRKMYIRQTKNDSKDSFVIAQIMRFGQFSSTSLSSENIMALRQLSRYRMFLVDECSDYKRKVICLLDQIFPEYNKLFSDTFGVTSSELLHKYPTPEDMLSVSTTKLTNFISKCSNGRFGREKALQIKNAAASSFGVKFATDAFAFQIRQMLEQINFIETQLDELEVQITTMLFEENQVITTIPGIGNILGAIIISEIGDISRFDSASKLVAFAGLDVSVKQSGEFVATQNKISKRGSPYLRRAIWTAASRAAFCDPVLSDYYQSLRARGKHHLTAVGAVARKLCNIIFAVLRDNKPYQPMPKN

SEQ ID NO: 405171 - protein, 360 aa, unidentified
MKIQRTSVGLDVHARSVVGCALDGDTGEVFERRLTPDRGEIAAWLNDLPGPVAVTYEAGPSGFGLARALNGAGIACVVAAPSKLIRPAGDRVKTDARDAAHLARLLHLGQVTEVTIPSIEQEAARDLVRAREDVRGDLMTARHRLSKLLLRQGIIYCGGRAWIREHQRWLRGQRFDNAALQLAYDTAFDAMLATVDRRERLDTAIAEMAADSQFTPVVGRLGCLRGVSTLTAFGLAAEIGDWSRLTGRSIGAYLGLVPSEYSSGATRTQGGVTKTGNGHARRLLVEAAWHHRAPYRPGAVMRRRWDAASPAARARGQAGNRRLHERWLRFDHRKKRSVVANAAIARELAGWCWSLAMLEA

SEQ ID NO: 405172 - protein, 314 aa, unidentified
MSPANVYVGIDVAKDWLDVAQRPGGEAWRVSSDETGVAALVERLKGVRPTLVVLEATGGLQIPAVAALAAAGLRTVVVNPRQVRQFAGATGRLAKTDAIDAQVLAQFGEAVRPEVRPLPDAATQELSALVNRRRQLIEMLTAEKNRLRLATKKVRPNIEAHICWLEGELLDLEGGLGDVIRSSPVWREQDNLLRSVPGVGPVLSSVLLADLPELGKLGRKEVAALVGVAPLNRDSGLFRGRRQVWGGRSHVRTALYMAALVATRHNPVIKSFYQRLLSGGKPKKVALTACMRKLLTILNAMMRHQAPWEMCSAS

SEQ ID NO: 405173 - protein, 370 aa, unidentified
MSPSSTRFVGMDVHKDSIAVAYVAQDHGAEVIYLGTIGTRQCDIDQLSRKMPSKATHLVFVYEAGPCGSWLYRYLSNKGYDCWVVAPSLIPKKAGDRVKTDRRDAVPRARLARSGDLTPVYVPKVEDEAIRDLTRAREDTLGDLKDAKCRLKAVLLRHDIGYTGRANWSPAHRRWLSEVVCHTPAQPIVFHAYVRAVTEHTARLQRLEQELQEHVKAWRLHPVVEALQALRGIPFTVAVTTVAELGDLTRFENPRELMKFLGLIPSEYSTGERRRQGAMTKAGNTHARRALVEGAWAYRYPAKVSRHLQLRLETPPKAIQDISWKAQVRLCKRYRKLIARGQHANQVVVAMARELVGFMWAIAKEVPVIP

SEQ ID NO: 405174 - protein, 381 aa, unidentified
MRFYTQQHPFYCGIDLHARTRYLCILSQDGEVRLHRHMTASPDALLKAIAPYRDDRVIAVACSFTWSWLADLWAQEGLPFVLGHALSMKAIHGGKTKNDTLDSQKIAVLLRGGLLPQAYVYPAAMRAPRDLLRRRTPLMRQRAELLAHIHTTHRQYHLPEMGKKIAYKATRDGGAERFPEPAVPKSLAVDLALIGHDDQRLRDVERSSLTTAQQPHAQTLSLRRTVPGIGEILSLVLLYEIHDITRFPRVQDFLSYCRLVKCTKESAGKRYGTSGTKIGNAHRKWACSEAAGLCLRAHPAGPKYLTPREKQHGAGTALTLLGQQLGRTGSDMLQRHTACDRGQFLNGSGSGADAPNASLDNHGLSLRVVLGKACVAASLNA

SEQ ID NO: 405175 - protein, 312 aa, unidentified
MDASIVGIDVSKDRLDVAVRPSGESFVIARTGAGIEDLAERLQKIAPRIVAIEATGGFETVVAAGLASAELPVIVVNPAQVRAFAQALGKRAKTDPIDAAVIAHFAEATKAVPRPLPDEMTRLLADLIARRRQIVEMMAAEGQRARRVTDQRLKKSIVRLRKALEKELAELDGEIDDHVRGSPVWVEKEDLLASVPGVGPVVARTLIAELPELGSPHRRKVAALVGLAPWTRQSGKWRGKSFIGGGRKTVRNALFMAAMVAARHNQVLKRFRDKMVAAGKPKRLALIAVARKLLTILNAIVRDRRRWQPETA

SEQ ID NO: 405176 - protein, 329 aa, unidentified
MSEVVVGLDVHLKNTQVTVMKLNGEIVKKERIRTCKSELSKCLEDVPKGSKVALESVGFCWPWIDFLDELDFEPLLANPMRVKLRAEDVKNDKVDSKTLADLTRMNWLPTCYVPSSEMRWLRSLLRHRAFRTKLCTGVKNRTKSEFRKRAIDLDVNLGTLKGRKLASDLGVFEVSQNLELLEVMDRQTKEIEGMLFKEYGHVKPVELLMTIPGIGFLSAVTLYAEICDIKRFSSAEKLAHYAGLVPTVRQSGEHSFAGKETRGDAWMKSILIEVAWAHVRYCPDGHLAEVFKDACKRKGDSRDAIKIVARKLVNVVWAVWTNEKEFMVK

SEQ ID NO: 405177 - protein, 324 aa, unidentified
MQLYNNFVGVDIGKFSFVVAIHGQKQVKEYDNDPHGIKSFIKDYKKYLSQGLCILETTGGYETRLILTLCEAGYSVHRANTRKVKHFIRSLGNSAKTDKLDSKALALYGYERAARLELFTPQSKQALALYELVQRRQDLKRLLVAEKNRLKAPRANLVQESCRVMIDTINQQVQLITEKINAFIEQEPGLKAKKEILKSIPGISDITANGLLVLLPELGTLSRRQIASLAGVAPMANDSGTFKGYRATGYGRSDIKPILFMSAMAARNSNSSLKSFYNRLISAGKKKMVALTALMRKIIVIANARLKPLLTFKLNVEQTLVNYV

SEQ ID NO: 405178 - protein, 341 aa, unidentified
MSIATLGIDLGKTCMHVVGLDASGTPVHRKKLTRTALIRFLSNLTPCRVAMESCAGSHDIARKADAMGHDAVLLPAQFVRPYTKGQKNDNSDAEAIAEAATRPTMPTVSIKDATQQEIQFLHRTRQGWIKQRTETANRVRAMLLEFGITVPQRILNLRRALPGILEDAENDLPDGVRQLVADHWQQLQALDDRIADITQRIERIPVRDSRAARLMSIPGIGPMIATAMVAAVGDGTQFTQGRGLSAWLGLVPQQFTTGGKPRLLGISKRGNRYLRTLLIHGARAVLQQAHRGDDALRRWIQQVNSRVHRNKAAVALANKLARVAWAVLTRGETFRASAAAA

SEQ ID NO: 405179 - protein, 417 aa, unidentified
MTDGKKASPCRYVALDIHKHYSVIAAVNREGEIVLDPVRVEHEDLEARLNKQLLPSDQVVIESTTNAWHIYDLLEPLVARVLVANPIRVKQIACAKVKTDIRDTLILARLLAANLVPTVWVPPVEVRNLRYLLSQRRRLVGMHTQTVNRMGSVAHRHHLNHPRGKRFIEKNTEWQQDDELSDTEKFQLELDMATGEHLDGQAKKIAEKIASLSHQDPWAESVAYLMQLPGFGVITGMTVLAAIGDITRFESSGKLSSYSGLTAGVEQSGTKNRGKGITKEGRKELRWAMVEVAQRAVKSDPYWKSRFQALERRMHRNQAIVAIAHQMLELVWHVLTHKQAYRHFSEERIAYKYLTWGWQLNEEARGGLTRQQFARYYLMRLDIGHDLKRIALNPKYPRKLASEAEVLALKPELNRTK

SEQ ID NO: 405180 - protein, 344 aa, unidentified
MDKSITVIGLDLAKSIFQVHGINAEGEVVVRRKLSRSRVLAYFNQLEPCLVGMEACATAHYWGRELSALGHDVKLMPPQFVKPYLKSQKNDMRDAEAICEAVTRPTMRFVPIKTPDQQALLALHGVRDHWVRLSTRLINTLRGYLAEFGIVAARGRMGVEAILDTLADDQDDRIPDLARECLMPLANELRHVKRQILEMDRKILKAHRANSICQRLDTIPGVGPVIATRVVAEVPDPKIFKSGRAFSAWVGLVPKQNSSGGRERMGQITKKGNPELRRLLVAGAISMIIRAKRSDFTRHPWLSRLLERKPTMVVAIAMANKIGRMIWALMVKGEKFDPAKLMPA

SEQ ID NO: 405181 - protein, 352 aa, unidentified
MRTSQKTAGIITTIGIDLGKNTFHLVGFDQRGVIILQQKVSRAQLERRLANIPRCLIGMEACSGSHHIGRQLAALGHDVRLIPAQYVKPFLKGHKNDYRDAEAIAEAVQRPTMHFVAIKTPEQMDLLALHRVRSRLVSQRTGVTNQIRGLLIERGITVRQGVAPLRKALPDILSSQTGPLSPRMVSLIVDLVQDWRRLDERIAAVSAEIEALAQQDDSCQRLMTVPGIGPIVSSAVVAAIGNGAGFQQGRDFGAWLGLVPKQESTGDRTILGKISKRGNKYLRTLFVQAAHVVLERRPRAAMRGLWPWIEQASKRLHRNMLAIALANKLARIAWAVLARGRAYQPRIAANAA

SEQ ID NO: 405182 - protein, 347 aa, unidentified
MRFYTKQHQYYCGIDLHTKKMFICILDAAGQIRVHQNIKTDQETFLNIISPFREDLVVAAECMFTWYWIADLCAEKNIPFVLGHALYMKAIHGGKAKNDKIDSHKIATLLRGGMLPQAYVYPARMRATRDLLRRRNHFMRKRAELYAHIQNTRSQYNLPDFLGRIAKPQNREGIVERFNDPSVQKSIAVNLEMIQAYDHILTQLEHDIITSAKEHDLRSYALLQTIPGVGRILALIILYEIETIERFPQVQDFVSYCRLIKSIKESNGKKYGSSGKKIGNAHLKWVFSEAAVLFLKGNEPAKRYLERLSRKHCKAKALSILAHKLGRAVYFMLKNKEAFNQKKFLGL

SEQ ID NO: 405183 - protein, 349 aa, unidentified
MEYYAGLDVSEEATSVCIVDGRGRFVTEAKVATTPVALAATLRGFVPGLVLAGLEAGALTPWLARELAAAGLPVVVIETRRMKAYARASAVKTDRRDAQMIARALRAGLFAAVHVKDEAAHRWRLRLSARAALLGQARCLQVKIRGDLKPFGIRLGKVGSGGFAARVRARLAGRDDLLALVLPLLDTRTALLAQMRIYDRAIRREASADPLCRRLMTVPGVGPITAFAFRAAVDRPERFARSADVPALFGLVPRISQSGEMAHTGSISKAGDSMMRSLLFEAATVLLTRTRKSFALKRWGLKLAKRRGMNRARVAVARRLCIILHRMWVDGTDFRLQETPKRTASPRAA

SEQ ID NO: 405184 - protein, 322 aa, unidentified
MKTKRVCVGIDVSKKELSTALWPEQRVWTCPQEPAALARLADELRRLRPRLVVLEATGGLELEILDLLVKRGVPVHRCEPSRPRHYAKALGIYAKTDRVDALLLARFAASGELKPQTFASDQIRELEALVTRRRQIVKMITMEKNHLAAGRDRAGMASVRVVLRMLIGQRRQLEAKIVAALERAPELKAKAELLRTAPGVGAVTAAALLGGIPELGKLNRWQAGALTGTAPMKNRSGQWIGRERIFGGRMDVRSTLFMSALVATRHDPWMKAIYTRHLTHGLAKKQALTACMRQLVIRLNVMLRNGQAWRPEPLRQTAPAAA

SEQ ID NO: 405185 - protein, 310 aa, unidentified
MDTIYVGIDVSKDRLDVHVWPSREAFAVSRDGEGLEQLIERLQRLSPRLIAIEATGGFETIAAAAIAGAALPLAIVNPAQVRHFAQAVGKRAKTDPIDAEVIARFAEAVKPEPRALPDEQARLLAELVARRRQIIEMIVAERQREKRAENVRVRKSLARTIKTLEQELPQIDNDIDTLVRGSPAWREKEDLLVSFPGVSNTLARTFLAELPELGRLSRREIASLAGLAPYTRQSGRWKGKSMIGGGRAPLRTALYMAALSAIRCNRTLKVFYQRLLSAGKPKMVGLIAVARKILTILNAMVRDKKEWQIA

SEQ ID NO: 405186 - protein, 366 aa, unidentified
METIYIGVDFHARQQTICYLKTETGELVFHELKHQDKQQVRAFYAQFVGQVIVGLEASGYSPWFERMLEELGCQVWLGHATEIRRRARWRQKNDRRDAELILDLMLHNEFPRLHRPAVQSREVLRMLRYRQKLIKMRTMSKNSLQAIALQAGLAKGSRLFTKAGQQELGTAEMSPVLHWQREHWLQLMEPLNQQLLETMVWFKSQSKDDDSITRLRTHPGIGLLTSLCIVHTLQPVSRFRNTRKVAAYAGFDPIERSSAERKCFLGISKAGSRLLRYLLVEAAQTAVRKDEDLKRFYQRLADRRGRPKAKVAAARKLLIRAYIMMRDEIDYAEFRHRAVAARLARRSQGPANVPEVLIGQPASPEQ

SEQ ID NO: 405187 - protein, 315 aa, unidentified
MSKTTFVGIDVSKARLDVAVVPSGESFSVPNDDAGIERLVARVRELDPALVLLEATGGLERRALARLVTAGLRAMAVNPRNVRDYGRALGKLAKTDRLDAVILARFAEAVRPEWRPMADEQTHQLQEHLTRRRQLVEMITAEKNRLLSVEDHGIRQQIKATIGWLEKQLNINEYDLDQAIKETPVWREKANLLKSVPGVGRVTVSTMLALLPELGMLTRKQIAALVGVAPFNRDSGTLRGRRAVWGGRATVRSVLYMAALVGTRFNPALRAMYLRLLAAGKRKKVAVVACARKLLTILNAILRTRTAWRSVEVTP

SEQ ID NO: 405188 - protein, 344 aa, unidentified
MDHFGGLDVSVKETSVCIVDDTGRIVKEVKVASEPEALLKVLGNPTYRFKRIGLEAGPLSQWLFSALAEAELPVICVETRHMQAVLKAQINKTDRNDARGIAQMIRVGLYRPVHVKTLRSQKLRMLLTHRKLLQSKAIAIENDLRGTLRNFGLKVGMVGKVRFEARIQELVENLPDLAVLVEPLLIVRLALREQIVILHRRLLAIVREDEVCRRLMTTPGVGPVVALTYRATVDVPARFRKSKSVGAVFGLTCSRYQSGEVDWSGKISRCGDEMMRTMLYEAAQSMMHSKKWSWLKAWAMQIARRRGMKKAIVALARRLAVIMHRIWVDGTEFRWTREQVAAAA

SEQ ID NO: 405189 - protein, 430 aa, unidentified
MKSNTQNKKIEAITEKTLVIGIDVGSETYYARAFDYRGIEYSKKPFKFSNTEAGFVTFKEWILDLKEKHEKDKVVPGMEPTGHYWFNLGKYLQDNEMKPVLVNPHHVKKSKELDDNNPTKNDRKDPKVIAGLVREGRYMIPYLPDGVYADLRTASNIRFQLQSELTRIQNRISRWFNIYFPEYKTVYGKPDAKSGMLILKEAPLPEDILTLGIDGVDQIWRDAKMRAVGKARAKTLIEAAEHSVGSKEGAVSARMEIRMLLEDYESRNMRLQEVMVLIEELVKQIPMAEKLLEIKGVGIKTVSGFLAEVGDISRFNSPKELQKLAGLALVENSSGKHKGETTISRRGRKRLRYLLFEVAMSLVAKNPEFRELHNYYTTRRLNPLKKMQSLMAIAAKLIRVFFAMLTKGVDYDPKKMVSDIKRPAVYLQAA

SEQ ID NO: 405190 - protein, 340 aa, unidentified
MDVFVGIDVSLENSAVCAVDEHGKLLKETKVASDPGALNACIRSLPGVVEAIGIEAGPLSQWLHKSLTDLGLPVVLMETRQVKAALKAAPVKTDRRDAAGLARLLQMGWFRPVHCKSLSAQELRVLLGARRSVQDAAINIEMSIRGMLRNFGLRLGRIGKVSFQDRVRELTEGNKLIQLSIEPMLRARAALRSELVRLERMARDITREDPVCRLLMTMPGIGSVVALTVRSSIDDPGRFRRSKDVGPAIGLTPRRYQSGETDIVGGITKAGDLDMRTALYQAATVVIHRSKKQTWLRAWAERVVRRRGAKRAAVALARRMGIILHRMWVDNTEFQAARQA

SEQ ID NO: 405191 - protein, 424 aa, unidentified
MDTKDQNSWEQHRYYMGLDWAKQEHAIAVVDGDGRIMMETTIEHTAEGWHRLREKLADLAGPDLSLVAATIETNRGPVVERLLELGCTVYPINPNAAQCYRSRKAPSGSKTDRLDALSFADALRTDGHGWRPLNPEEPKTQELRLLCRDEMSLIEQRTTLVNQLQQALHEYYPAALEAFDDWTSPSSWAFVERFPTPQALKKAGKRHWEKFLHTHRLYRPETYQKRLEIFAGATEFCGSHAVTNAKSMLAVSLAKQLRLLEQQLKAYREHIDKLFQEHPDYTIFDSLPGIGEKLGPRLLSECGEDRDRFEDHEALQCYAGTAPVSFQSGQINRVRFRYACNKNLRNAVHLWANLSRKKCAWAQIYYHQKRLEGKSHACALRCLGQRWLKILWKMWQTKMPYDEQMHTRNQIKHGSWVLALTASK

SEQ ID NO: 405192 - protein, 382 aa, unidentified
MPRYIGLDLHRDYIHGCEFQPEGPRGGQERHFRFPNTPQAWTAFCGQLDRDTQVAFEVTGSAFEVHDSLSPRAGKVLVANPLELRRLGSGRHTDRADAARLAKLLALDAVPTVWVPPQPVRQVRRLLACRERLDSYRRALENQARATLRRHHIRVPPRANVQEWVKMADTARLPAGERAILLATLQAAQALKARMEDLTAQITQRVADVPEVRLLLTLTGVGLLTAAAIWARLGDPHRFSGPKQVARYAGLDPSVDQSGQRDRRGRITRHGDGLLRRMLIEAAWSAARHDTGSLGEFYRRKVKQLGARRALVALARKLLIVAWRMLQTGEPYRACKPALVHRKEQTLRRLLGQPPVWQAIHLHKAVRLPVQDPPVPTQVEGE

SEQ ID NO: 405193 - protein, 387 aa, unidentified
MSEMFNPHAPATAYDHNTTIVAVLELSGKNWLFGAVAPGLSRRTRRSLEARNVEAVVRALEQAKGESAKARFEVARIVVGFESGRDGFWIARALQQRGIEVYVMHAASIAVERRGKRAKTDRLDVDLLLTTLIGWLRGEPGRCTMAPIPSEEEEDLREAGRRRETLVHARLKVENQIASLLIRHGIEGFKPRLKNAETRLCELRTFDGRSLPANTMNSLRLLLAQHRLLSAQLKEIEEARQRVVNVAKPDRLQRMIQALAHVVGVGVETATVLVHEVFSRSFKDRRALGAFVGLTGTPYNSGSSKTEQGISKNGNARVRRMLSQLAWRWLGHQPESALAQWFNARLGGAKGRMKKVLIVALMRKLVIALWRLAETGEVPIGARLAAR

SEQ ID NO: 405194 - protein, 315 aa, unidentified
MIQTNTTTAGIDTSKAKLDIAVHGRTERWQVANALPGWRALAANLAEAGVARVGIEATGGYERGVVEHLRAAGFTVLMLQPLQVKAFGRVHLRRAKNDALDAVLIAACAAALDPPKIAPDPRLSELADYLTFLEQIEEDIRRFKTRLEHIDEPALRRLVNSDIARLKVRKAAQIRDIAKRLRSHDDLAKRLKLVLSIPGIGERTALAIVIRMPELGRVSREEAAALAGLAPFDADSGQYRGQRKIAGGRSRLRRSLFAAALPAAFRWNKALVALYTRLIAKGKVHNAALIACARKLLIYANTVVQRGTPWTEKAA

SEQ ID NO: 405195 - protein, 316 aa, unidentified
MTDTLYVGIDVAKDSFDVASDPAGLKLSLPNDPKGRQKLLDVLQNHSVALIVMEATGGYERGLVADLLHADLNVVIANPRQVRDFARGIGQLAKTDTIDAQVLAQFARIVQPKPRQKPSEQAKNLAELVTRRRQLSNLLTAESNRLPMARHAKVRKSLQKVIRTLEQQIIDLDKLIRDNIQSDDGLRRKDEILQSFKGVGPGTSAMLLSHLPELGRLNRQEIAALAGLAPWDRKSGKWAGKSRIWGGRKEVRSLLYMAALSAIRSNEIIRKFYQRLESQGKAFKIAITACMRKILVILNTLVRNNCLWSPQPEKNA

SEQ ID NO: 405196 - protein, 333 aa, unidentified
MSKFSNFLGIDVSKEYFDAVIILDSNKTNTIHNQFSNDIKGLKELVKWLKSFDSTNQNTLVCLEHTGMYGKVIIQYLLSKEFNLWVEMSLKIIRSIGVQRGKNDKIDAERIAYYALKNQDEVQIYQAPRKVIDQIKKLISLREHLITTKATLVRNSNELKGFEPELSKLHKKHSKATIKGIETDLKNIEKALDNLIKSDEKLSNIFEKTTSVTGVGKVTALFLICYTNEFKMYETPRQLACYCGVVPFEHTSGKSVRAKPRVHFMANKKLKKQLHMCAISSIRAEGELKDYYERKVAEGKNKMLVINNVRNKLIHRICACVKNDKLYEKRNVA

SEQ ID NO: 405197 - protein, 371 aa, unidentified
MGKYIMVGCDLHDASMLLKAAVDRQESQKLCFDNDPEGRPRMIAELKRRKKAAKADRIYFAYEASGLGFTLYDELTEAGITCFVLAPSRMERSVKQRRNKTDDKDAERLLKELRGHLLGGNELPAIWVPDPQTRDDRLVVRARLDVGQKRTGVKTQIRSLLKLHAVPRSRRTPGGRTKAYRAWLQSLSDSEQALPWGARIALKTLLAQLAALDQELARLDEAVRSMAEFPRYAEAVRELTKLTGVGILMAMVFLTEMGDLSRFPNREAIGAYLGLAPSADESGEQEDHKGHITGHGSGRVRYMLCQITWVRKRLDPATKERYERIAARNPKHKKIATVAMMRQLAVLLWHIGLEAQRRAGVFPPRATATAA

SEQ ID NO: 405198 - protein, 386 aa, unidentified
MQASTASTPITEHHSTIFVAIELSQKTWLVTLHSPDKDKISRHKLEGGDHAGLLALIDRVRDRAARTLGAVPAVASCYEAGYDGFWLHRLLLAAGITNYVFDPSSIAVDQRARRVKTDRIDGERMLRTLMAYLRGEPRVVRIVQVPTPEQEDARRCTRERDRLTKEQTAHTNRIKALLRLHGFAVGNPRRRDWLTGLAEQRDWQGQAVPPRILTEIEHEHARLMVVRKQLDAIERAPATADSTPAAAEMTRRGEQLQRLKSLGPAFATSLTQEAFYKDFRNRREVGSYFGLAPSPWQSGGTDRDQGISKAGNPRARCSAIELSWLWLRHQPDSELSQWFRRRTLKASKRTKRISIVALARKLMVALWRYLTTGLVPAGAVLKPAAA

SEQ ID NO: 405199 - protein, 476 aa, unidentified
MAQQRKARSALVPIPMLSQETLYIGVDIGKFRHVAGFLSRTLLARHGRFEGCPTFAFEQSREGFRSLVERIRELVPLEQVMVLFEHTGHYHRLLEQYLLELDITVYRVHVQERPKGMLKTDKRDALRLANMLYTQLELGAQVEDKMQLVRRAVAPTGAAAQLRGLIRHRYELSHHGTQLKNKLTAICDEIFPEFTQVFHDPNRPTALSFREQFPPPTALATASLSALQALRVRNFPSDAQLLKLQQLARETIGTKEVDRQKGLLLEQTLLLKELRLVQEHLALLQTEICAIVTNCREGQILLSIPPIGHVQAATIMATIGNIANFEKASELKSYFGWAPRRHQTGVTFDRTKLTRTGVRPVKQMLFLMAACATTMDCEWARLYQRLLPRLASYDERIKDYRGKLKVIGRIAGQMAAMIFALLKTDQELLSQVPAGQEAPPPMLYDPAIHRRHQEGHYRSLKPGTQPRKIIQLPKHT

SEQ ID NO: 405200 - protein, 341 aa, unidentified
MTHYVGLDVSMEETSVCILDAAGSMVWEGRVASEPAAIVRLLHRRAPRAERVGLETGPTSTWLWHELRAAGVAAICIDARHAQAALSMRLNKTDRNDAAGLAQLMRMGWYREVQVKQLVAHGDGALLASRALLVRQRCELENQIRGLMKNFGLRVQRTKGKAFEQSVRSLAARSAILKEVVPPLLTAWSALRLQIAVLSRRAHDRAKSSAVCRRLMTMPGVGPLTSLAFSATIDDPARFKHSASVGAYVGLTPRRYASGEIDRMGRISRCGDALMRSYLYEAANIMLVRSRGTNPLKSWAAKLAKRAGHKKARVALARKMAVVLHRMWRDGTDFGAHQQTA

SEQ ID NO: 405201 - protein, 417 aa, unidentified
MEYARLSLPAAPPGGVTAGIDWASADHAVCVVDAAGKVMARFVVEHTAAGLAELIRRLRAAGACEAAIERGDGPVVDALLDAGVTVVVISPGQVKNLRSRYGSAGNKDDRFDSFVLADTLRTDRARLRSLEPDSPATLTLRAAVRARRDLVAHRVAVCNQLRAHLQAAFPGAVGLFRDLDSPISLAFPARFGCQDRADWLSPRRLAAWLKSQGYPGRKDPAALHARLTAAPRGATGDDGAARAGITGALLAVLTALATQIKALDAQIAEQLALHADGHIFTSLPRAGTVRAARLLAETGDCRARFPTPESMICAAGVAPSTRQSGKHKTVTFRWAADKQFRDAVCDFAGDSRHASPWAARLYDDAIARGKDHPHAVRILARAWLYIIWHCWQDGLAYDPARHKALQRILAEEKSKAA

SEQ ID NO: 405202 - protein, 430 aa, unidentified
MKTKSNDASLTKWAALIGFDWGHGSHAVALQADSAATETLTLEHSAEQLHQWLDQLEKRFGGKPVAVAIEASKGAAVYALLERPWITIYPIHPATSARQRSAFRPSGAKDDTPDALVLLSLLQLHRDRLRPLPLEDEPTRTLARLVEARRKAVDRRTLLSNQLQSTLKDYFPQALELMGDSLAAPLALDFLGKWPRLTDVQAAKNTTIKNFYHRHNVRRPELIESRIQRIRSARLLTRDNAVTEVAVRVVLLLVAELRILQEHIVAFEAAIAEAFAAHPEKNLFRELPGAGASLAPRLLVAFGTLRERFADASAMQRYFGVAPVTEKSGGRVWVHWRWNAPAFVRQTLVEWTGQTVVYCPWAKAYYEQQRAKRVGHWAILRALAFKWLRILWRCWQQSKAYDQEKYLRQLEQRRSPIAVMAHQFAKQMAH

SEQ ID NO: 405203 - protein, 400 aa, unidentified
MTVVFGIDVSKDTSAIAENVDRVLVWQSKINNNWFGFQELLKRLQEYSEPQIVFEATGVYSKRLSRFLEENGYRYTMLNPLAAKKQLDGLRTRKTDKNDAVNLADTQFIFERRLTYYQKPVYRDLMDLSRFYEQINSDLVTEKNRLHKSLQMTFPELEGILDKPSGKLYWHIVATMPHPDLLNNMTVEELATQLKESGAHISVTRATIIAKKLFTLGQASFPGSVVEAPDVDETRYHSEQVARLDTKKNEIIAKMVKLAKPLPEFEVLMSIPGFAEKTVVRLIGELGDIRRFGSSNKLNAFVGIDLRHYESGNFIATDHISKRGDHIARAILFRAIANIVSAGRYQPSRVNDYYREHKKKLPKVNGKAVGTKKVTVAAMGRLLRTIYHLVTNNEMFKYDV

SEQ ID NO: 405204 - protein, 301 aa, unidentified
MLQRSFAMTVAGFDALRTGMSKQGVERVHACLEAPGAYGAALALSLHEAGHVVVVSLVNPARIAAYAKSRLTRTKTDQADAALIAHVCYTQHPLAWTPPLAEVRELQARVRRVEMLQEMAQQEVNRLQSGLHSPLVRASMEATLTFLRQEIATMQRLVQEQVEQSADLRHKQHLLCSIPEVGRWTAARVLAESDQVRTSVSARQLAAYAGLTPRERTSGTSVHHQPRLAKTGNSRLRRALYLPAIVAMRHNPAVRALAERLRVRSKRPMVIVGAAMRKLLHLIYGVLMADKPFNATRAMPA

SEQ ID NO: 405205 - protein, 664 aa, unidentified
MSRSCQNRRRAAARTATNQDAGGAVHAAAMPTEGPVPSTTDPKTSRSRAAPGDTPAATPVAIGVGIDTSRYGHHAIFLDADLQPAAPELKFVESAQGYQQLQSRLAALRQKHGPVHFHFRLDVAGSYADNLLAFLHGLPEPRTISCGDPQRNKNYRAAIFGHKKSDATEANATARYALTEKPKPMPVVAPAVQQLCQIASRLESQARHCTRVVNQLHNLLGRTFPELALLVKDLSAGWVLTLLDRYPTAAKLAAARPSSLEKIPYLPHEHIARLLAQARTSIASLTGPVTEELVRELVGQLQDAHVRHQALEKLLVAAYRQLPEPNHLDSIIGFGEVTAAILTAKMVTTGRFVEPAKLTGYFGIYPVEASSGIDRDGQSRLPLRMVMSRRGNDLVRRYLWMAALSAAQHNPAVRPLYQRVRAKHPDQPGIAIGHAMRKLLHLALAVWQTGKPFDPEHYPWDQAAHLPGSQQPATAEPVAPSPTHEHTGPHAQAAGHKNPVTTPVRSVVTAACVPTSVTEAASAGNDSARSVASEHPEATACDMPMSQDAQAEATALAWIDFAHLKTQLPLQRVLEHLNLLTDLRGRSRQRKGPCPVHAASGKSRTFSVNLDKNLFQCFDPHCGSKGDVIDLWAALHKLSLRDAAADLIQTFNLEPASRTEKRHG

SEQ ID NO: 405206 - protein, 431 aa, unidentified
MRSADVGERQAGRESGVVRMVFIGDDWAEDHHDVEIEDESGRRLARARLPEGLEGIGRLHALIAAHAPQGWSELGGQEMAARVIVGIETDRGPWVAALRAAGYQVYAINPMSAARYRERHSTSGAKSDVGDAHVLAEVVRLDREHHRPIAGDSDLADAIKLVARAHQTAIWDRTRQVLRLRSLLREYFPAALEAFDDLAAKDALLLLGRAPSPARAAKLTRGQVVSALRAAHRHQVQAKTDALLAALRAPGLRQPQGVETAYAAVVASQVRLITTLNEQIGQLQEVVAEHFGRHPAADIYLSQPGIGTILAARVLGEFGDDAKRFGDARARKNYSGQSPITRASGRKSVVLARYATNRRLSDALHQQALSALTASPGARIYYDSLRARNIGHHAALRQLANRLVGILHGCLKTGTKYDEHTAWHHQITAAA

SEQ ID NO: 405207 - protein, 424 aa, unidentified
MKVTFQTCCGVDVHKSFLVATIIKTSSGIEPSYQKRRFSTFNNSILEFKKWLLENECLYVCMESTGKYWIPVFNILEDEINVTIANPKWVKAVKGNKDDTKDSKWIGDLFRLGLVRGSYIPCKKIRILREFTRYRYKLVSCRSSEKNRYQNALTVCNVALDSVVSDIFGKSSTSIIDYLLEQSGTSIDHEVIASKLLKRLKAKEDAVIESIEGYQMTDSQKYRMHLVRAHMDYITAAINDVDSEIESLIASDPDYENAVELLCTIPGVKYDSAITIISEIGIDMSQFCSSKRLCCWAGLTPGSNESAGKKKSVRITRAGVYLKPALVQCAHAAVKSDKFPYYKKKYESLVKRRGKKRAIIAIARMILTAIYQMLSTGEEWNPSTLYKIDMPVALVEKQKAKAIRQAKKLLQREGTLPPDKPLAS

SEQ ID NO: 405208 - protein, 411 aa, unidentified
MQVVYMRCAGLDVHKKTVSACVSVCDAGAGKRQQTRTFGTCTGDLLELADWLREQGVTQVAMEATGVYWRPVWAVLEGQFEQMLVNPQHIKAVPGRKTDTKDCEWIADLLQHGLLKGSFVPPTPIQDLRDLTRYRVELRQSQNRVANRIQKLLEQANVKLASVAPNALGVSGLRMLEAIIAGEANAAQLAQMARGKLKSKIPQLEQALEGRVRNHHRFLLAEYLDEWKSLGERIRRIEAEIDQRIRPFESAVALWQTIPGVDRVTACNLVAEIGVDMNQFPNAQHLASWAALCPGNHESAGKRMSGHTRDGNKWLRRSLCQAAWAVTRQKNCYLSAQFHRLAARRGVKRAVMAVAHTMLVIGYHMLKTGQTYHELGAAYLEQINKDQLQRYFVKRLQRLGLNVTVTPAIAA

SEQ ID NO: 405209 - protein, 318 aa, unidentified
MTQPLIFVGIDVSKAQLDVALRPTGRFVVSNDDSGIAELLERLKASSPTLIVLEATGEMELPLTGALAAVGLPVVVVNPRQIQDFAKATGQLVKTDALDAHVLAHFADVVRPEPRPLPDAQTQELAALVTRRRQLIEMLTAEKNRLTSARVVVREQLRAHISWLEQALGQADTDLADAIRQSPLWREKEELLRSVPGIGPVLTTTLLANLPELGTLTHKQIAALAGVAPLNRDSGMLRGKRTVWGGRAQVRAALYMAAIVAARFNPIIRAFYQRLCGAGKAKKVALVACMRKLLTIVNAMLKHRTSWRHGTDPARAGA

SEQ ID NO: 405210 - protein, 370 aa, unidentified
MLDTTTFVGLDVHARSIKAVSLDVMTGEVRCATFGYDAGAVAGWVRSVDPKAKCVYESGVTGFDLQKRLSGLGVDCVVGAVSKMIKPSADRRRKNDRNDAEFLARMLSVGNVVEVWVPDDECEAARDLTRALEDARDDLSRSKQRLSKFLLRHGLAFDERTPTGRRKGNWTRAHWSWIESIRFAEGADNDVLAYYVDAVGRAAEEKARLEGLVEAEARKPRWRRRVDSLRCLKGVDTASAADLVFEAGEFSRFRNARSFAAWVGLTPSEHSGGESDRRGAITKAGNKHLRKALVEAAWHYLTCSGRPKDLARGQAPDRVARRHAAKGVRRLVERREALLARGVHNNKANVATARELACWVWAVGLMAEEA

SEQ ID NO: 405211 - protein, 386 aa, unidentified
MKKQYARIAGAGVDVHLRFSSVTFRDSHQKIVRRERLDHTDRQQLRHRLAQWPKGLPVVVESSFGWPWLTDLMREAGLNVCLANCLKVEKMRRLRAEAKSNRKDADLLSHLLFEHSRWWKVWPPPPAVRQVREWTRHRSQLVKLQTGTKNRIHAILHRHGIFHDFSDLFGTRGRAFLEQLCVHGDQRLSAGGHWALCADLRVLRQVRAELASILRELRCQLKDHPVVRLLQTIPGVGLILAYVLYAEIGRIDRFGSTKALASYALLAPRASDSGEADPTRAPIGRRLGTRGNRTLKWAMLTAARGAVCRGGRWRQIYDRYTNGGKVNRNRGYIKVGRILIGVVRAVWRSGQAYRPDGQAEQAGGNGPAKQTSRSGTGEPSPAMVGA

SEQ ID NO: 405212 - protein, 307 aa, unidentified
MHAKFSNDNKGFRQLVKWIKKHTDCQIEELLICFETTGMYSLQLASFLSQINIDFVMENPIQIKRSMGLVRGKDDYVDSQRIAEYAYKRKENLKHTKLPSEELIKVQNLLAIRERMVRQKAGYQTSLGEYKRVLVQQQQKDLFLLLNNMISALKKQILKADKTLIEIIQSNKKLMNTYTLLTSIKGIGVILAANILVTTICFTKFNDSRKYACYCGTAPFKYSSGTSIKGRTKVSQMANKKMKALFNLAALSAIRHDPELKLYFDKRKANGANGMSTINIIRNKIIHRVFAVIKRGTPYVVMAKYAA

SEQ ID NO: 405213 - protein, 312 aa, unidentified
MTQNQEITYIGVDVAKLTLEVAGASGKSLALSNDSLGYKKLVAWLSKLAAPVRIICEATGGYEKNMIEALMDDGFEVCRVNPRRVRYFALCLGRIAKTDPLDASMLAEYGQMARPRIIERPQPVNERLRALFDRRQQLVEQRTAETNRLQTADDILRPLVHKMIGFLEKQITTLEQLIDEHIHSDPILKTKIDRMEQVKGVGRVTSTVLLAHLPELGSLERGQAAALAGVAPFNRDSGPIQAKRSIAGGRCQVRKILYMAATSAAKHNHILKAFYNQLIARGKKPKVAIVAVMRKLIILLNHILKNPTFPLA

SEQ ID NO: 405214 - protein, 341 aa, unidentified
MKRAKTIIGIDVGSESVSTAVMHSVEQKEKQEQQFSNNNEGFEELHHWLRENKVKPDQSVVVMEATGVYGESLCYYLCSRRYSVAVEPPLKVKRAFQQSAHKNDTVDARQIAEYGHRFYDELQYWSPPDVVLEQVRELLSAREQFTTQKIANNNALKSLQWKIITSVTAMEAYEQAIERLKQNIDAIDKEIKRLTKEDDSFHNMITRLTSTPGIGMLLAANLIVITQGFTRTKSSKELASFAGVSPIEHISGTSVYRKARSRQFGPHRLRKLLYLSAMSVATHNAEFRKYYLRKVAEGKPKRLVLNNVANKLLKIVCALVKTEREYIPNYRSVNPSLLTLS

SEQ ID NO: 405215 - protein, 423 aa, unidentified
MMKLKYPICCGLDVHKNVIVATIVITNRDGVSEYRQKSFSTINSDIQKFHNWLIENNCYHVCMESTGKYWIPIFNYLEKDIEVCLTHPKYVKAIKGKKTDKKDSKWIADLYKFDLVRCSFIPPKDFRQLRELARYRFKLVCMKSSEKNRIQNCMTVSNVGIASVLSDPFGKTATEIMSYLLVHTADSIDEKAVRKLIKKGAKAKSDEIIEAIRGCNIETDQAKKLELALGHLEYLDGMITQTEVELYVRIKPYYEFVEFVSTMPGMTELSSTIVLAETGVDMNIFDDAKHLCSWCGLSPSNNESAGKKKSVRIAKAGAYLKPMMVQCALAAIKNKKQPYFAIKYGRIKKRRGHKKAIIAIARMMMVCIYHMVSEKKPFTPADYEELMKPQNHVERVVLNENNVFAYLESLGYDSSKLVKRNDN

SEQ ID NO: 405216 - protein, 459 aa, unidentified
MKVPKSRGATGGADISVVHPHAAGIDIGAQFHVVAVGPGRDPEPVRSFRSFTKELHDLANWLKQAGVTTVAMESTGVYWIPVFEILEAHGFEVVLVNARDAKNVPGRKTDVNDAQWLQKLHSYGLLRASFRPRQDVATLRSYLRQRERLLEYAAAHIQHMQKALMQMNLQLHHVVQDVTGVTGMKIIRAIVAGERNAEELARHRDARCKASAETIRDALIGNYQAEHVFELTQAVALYDFYQTQVAQCDERIELALKQLQANVEPVTAPLPAARHRTKQPNSFGFDVRAALYGMLGVDLTQIHGLGPYVALKLVAECGNDMSRWPTAKHFTSWLCLAPGNKISGGKILSSKTRRSSSSVAAALRLAAVTIGRTDTALGGFYRRLSARIGKAKAVTATARKIAVLFYNTLRYGMEYVDPGAAYYEERYRQRVLNNLTRRAESLGYTLQVKTATPRAEGVS

SEQ ID NO: 405217 - protein, 378 aa, unidentified
MVSSVDDHGTVLQRPTAFGEDAQGYQHLLTLLGPSADTLVVMEATGHYWQNLFAALAAEGFAVALINPLRTRRFAQEDLVRTKTDAIDTLGLARFGQQKRPAATLLPDLASRDLRELVRLRTRFLQDFGDRTRQLHRAVDLTFPEFTRYVAQLDTPRATALLHAFPTAAALRAASERQVAAIRGGERTVGRALASALKAAARSSVGRHDTAVYARQVRFFCEDLDLLRRRLADLERDIERLLAEHEVGRLLTTIEGIGPQTAAKLVAELGDPATFRSAAALAAYVGAIPALRQSGKQTWDRAGLSRIGHAKLRAALWMPTLVAVRRNPWLRAYYQRLRARGKLPKVALMAAMRKLLGAIYAVAKHRRPFVPVIPTPAP

SEQ ID NO: 405218 - protein, 317 aa, unidentified
MAQKSRLVGIDVAKGKIDAAIRAGAEAAFANSVEGHRELLAWLQEHGVGKAVMEASGGYERKWMGLLRQAGIEVVIVEPKRVRHFAKSAGRPAKNDAIDARMIAWFGEVFDDLESQAGDVEREELDHLVTTRLAVMQLRDQVDNWTEHERPKAVQKIHQALLKTIQAQLDTLQQLIAGRIARTERFARRAEIIRSMPGVGEASTAGVIAFLPELGRVDRQVAAALLGVAPFDDDSGTRRGERHIQGGRRKLRTLLFMPILAAATRHNPVLKAYYQRLIARGKKAKVALTACMRKMIGILNTMLARGEKWDPTKHAIA

SEQ ID NO: 405219 - protein, 436 aa, unidentified
MRGCRCSMIMGFTKPIEHFNLQRKKVITMNTLYVGIDVSSKSNVVYLMLPNGDKHSNFSVANSHEGSTLLVKKIYSALTSHSLDTVLIGLEATSVYGDNLVYFLREDATLAPFNRKIHVLNPKQVKKFHDTYNDLPKNDYVDSFVIADCLRFGRINKEVYMGDYRYKALQNLTRARFFAVQNLVKEKQRFMNVLFKKYSTMTQEKVFSDTFSTTALAVYEEFESAEALANMDLQELTDFIMEKGKNRFPAPDSVAKAIQKAARSSYRLPKTVNDSVNQVLSISITSMKALESQIKEFDKAIKALMELLPNVLISIPGIGPVLSAGIMAEIGDINRFANHAQLAKYAGLAWSQHQSGDFEAQTTKLIKSGNRFLKYYLCEAAFSLVRCDKKYSDFYHLKYKEVNRCQHKRALALTARKFVRLVFRLLKDNRLYCPAK

SEQ ID NO: 405220 - protein, 337 aa, unidentified
MKRYLGVDLHRTQLTVCTRLENGRTYVRQWPMRELKLFAAQLRQDDEIAVEATGNTRLFYEAVVKHVARVVVVNPSQFKIISQSVKKTDRNDAEVLALYLSKGLLPEVRMKDQEHRSLAHLAQTRDLLVKQRSALKGKINNLLSAEGINLKRETLSSKKALERVLSLPLSPILAIEVRVLVSQIRSLTASIAELERLIEEEGPKLAGHKNLISIKGIGSVGATVLLSAIGKIEDFADAGKLAAYFGLVPRVQNSNETERSGRITKQGNKLVRTALVQCSLVAKRYSPYLQKFYQRIQRRRGGGKANIALARKFLGVIYYTLKNNWVFEDFPNFVLAS

SEQ ID NO: 405221 - protein, 419 aa, unidentified
MTANYQVAAGLDVHKKFIQTTILWLNGTKIQQQFPRTFDGLLGLKGLILEHKCDVVACESTSDYWVCIYDMLFDRVPVIVGNAHDIKVLAHKKTDKIDSEMIALLALKGMITPSRIMPRHHRDFRKMVRLRHFLVRKRTDIKNRIHSILDGELFHLSWLFTDIFGVSGQRILQGILEGASIEDILKSLPTRVRKQKEEELRKLLAQTVSPGALMQLGHCLRVVKQLDEEIDLITDEARAYALQTYPGEYRILKTVPGVGDISAITLLAEIGNFKDFLSGDKLAAWIGIVPKVYQSANHTVKCSITKRGSRLARWILVQIAHAAARARKNVLRDWYEAKKAVIGAGKAIIALARKITTIIWHLIVNDEEYVDKYSEPESPKPQKMHTIRIPASPDYTLEEVLTLLADALTFLKKRDPDPT

SEQ ID NO: 405222 - protein, 352 aa, unidentified
MIVIGADTHKRSHTLVAVSEATGRALGDVTVAATRRSFGQLLRWARGVGAERVWALEDCRHVSGSLERFLIERGERVLRIPTHVAANARRSARQRGKSDAIDALNVARAALQEGLGTFPVAHLDGPELDLRLLVDHRERLIRHRVELNSTLLWHLHDLWPELRLPGGALFSRKWSTRISRRLARAEQTMRVRIARDELRRLRELTLAVRRLEREITELVTRIAPQLLDQPGFGPLIAAKLVGEIAGAQRFATPAKLARAAGVAPIPASSGNTTRQRLDQGGNRQINAALHRVIITRARCHQPTRDYIIRRHSEGKSTREAIRCLKRYLTRHVWRLLQPPHAVTGTAPHQSIS

SEQ ID NO: 405223 - protein, 340 aa, unidentified
MSLYGGIDLHANNSVIVIINEHDEVIYRKRLPNALPTILEQLAPYHTEMQGLVVESTYNWYWLVDGLMEADYRVHLANPAAIQQYSGLKYTDDHSDAHWLAHLLRLAVLPEGYIYPKAERAVRDLLRKRAHLVRQHTANVLSVQNTMARNTGGRFSVKRIQELTKQELTTLLTEETQVLAVPSSLVVLDCLQQQIKTLEKTVHKRLQHTPSYEQLLTVQGSGTILAQTITLETGAISRFPTVGNSASYCRCVDSTKISNGKRKGTGNVKNGHPYFAWASMEVAQFAMRFQPEAQRFYQRKLAQSRNNTVLARKAVAHKLSRACYYMMRDLVPFEATKACG

SEQ ID NO: 405224 - protein, 347 aa, unidentified
MNFYTHQHKHYCGIDLHTKAMYVCILDQGGTILVHKNLPTTPEAFLRVIAPYREDVVVGVECMFTWYWLADLCAKEGIAFVLGHALYMKAIHGGKAKNDKIDAHKIAVLLRGGMLPQAYVYPAEMRATRDLLRRRCHLVRKRAELLAHIQNTNSQYNLPELGKKLAYKANREGVEDHFPDPSVRKTIEVDVSLIDHYDKLLGEVELYITRSAKAQDVQTFSRLQSVPGIGQILALVILYEIQDIARFPRVQDFVSYCRLVKCAKESNGKRLGTSGKKIGNVHLRWAFAEAAVLFLRQSQPGKEYFAKLEHKHGKAKALTVLAHKLGRAVYYMLTREQAFDLQRFVTA

SEQ ID NO: 405225 - protein, 425 aa, unidentified
MNYKQNEKINQVKESTLVVGIDIGSTTQYARAFDWRGIELGKVLPFSNSREGFESLKAWMQHLQDKYRKSDVIVGIEPTGHYWFDLGAYLEDEGILLVMVNPYAVKQTKELDDNSQSKNDRKDPKVIAKLVTEGRYSAPYTPDGVYADLRIMVANRKRLIREMTQIKNRFARWFAIYFPEYTDVFGDYEAQSSMLLLKKVCTPEAIVELGAEKINQIWRDAKLRAVGMKRATTLCETAKRSIGLKKGSSAARYEMKLLLEDYEYKKAQLDAVMEEIEKLCRKIPESEQMLAIKGIGVITVAGFLAEVGDVRRFESPRQIQKLAGLSLRENSSGKHKGQTTISKRGRSKLRAVLFNAAIPLIAKNPEFKSLHEYYTTRANNPLKKKQSVIAISCKLIRVFYAILANGVTYDSQKLLSDIHRQPQVA

SEQ ID NO: 405226 - protein, 345 aa, unidentified
MSQIKRIGLDTSKAVFTLHCVDESGKAVLRTNLRRAQMATFFKNLAPAEIALEACGSSHHWARELAALGHEVRLIPPQYVKPFVKRAKNDRNDAEAICEAAGRPGMRFVPVKTATQQAEGMVLKVRETLVNQRTQLVNALRGHAAEFGIIAAKGISQITPLLEAIEAATTIPSEAREMLTLLGQEIDHLDTRLEEIEVKLTAAHKANALSQRLATIPGVGRIIALTLAIEVDPMAFESGRHLAAWIGLTPKEHSTAGKQRMGGISRAGNERLRRLLVTGATAVIRFATRPGNKHASEWLLNLLKHKPRKLVAVALANKIARIAWAMMRSGEAYRRSTGIAATVAP

SEQ ID NO: 405227 - protein, 371 aa, unidentified
MLHSDYTIGCDAHKHFSLFVVLGGSGDLVQRTRVGHVPGAIGAFLSQFAEGTPVALETVGNWYWIVDEIEEAGCIPLLAHAAKAKVMMGNVHKTDKLDAQGLATLLYLGKLPSVWIPPAEVRDERELPRTRMTFAKHRTMVKNRIHSTLAKYALSLDTASDIFAPKWRPELEATLQQLPDETGRCVLQQLQILDALTDHIKQLEGRILFRIQTTPTIQLVQTVPGPAKVLAILIDREVGSIDRFSAAKHFTSYCGLVPKLSASAGRAHYGRMVKQCNTYLKWAFIEAANVIVAHRDHPNWRRKYVVHLYESTRRRKGHSVAVGATARYLAESTYWVLKKSEPYREPPHWAPAGKRSPVSLSQEQARAQHGS

SEQ ID NO: 405228 - protein, 370 aa, unidentified
MKEPITSYVGLDIHKDSIAIAIAKAGRDAPQFIGTTVAQLAQVRKVLTRQRCTPDKTLVVYEAGPCGYGWARYLNTNGWRCEVISPAHVVRSAAGKAIKTDRRDALLLARESRAGNLTPIAVPDERDEAIRDLSRAREDAIAARLRARQQLKAMMLRHGRTYSSNAWTLAHERSLATVRFEHPAQQIAFDEYRQSVEDAHERCERLTQALREQCAGWRMGRVVEALMCLRGFDFIAAVTIIAELGDLNRFSHPRALMSYLGLVPSEHSSGNSRRQGAITRTGNRHARRILVESAWTYRYGAHVGREHQIRQQGQPKAIRDIAWKAQLRLTHRYRKLSLGRKMKATKVCVAVARELCGFIWDLARHVPVHQ

SEQ ID NO: 405229 - protein, 391 aa, unidentified
MIYAGIDVAKDKHDCFITNSDGEVLFKAFTIPNNRDGFEELYQKIESVTDDLTKVKVGLEATGHYSYNILGYLLDKGLTTFVINPLHTSLYRKSLSLRKTKTDKVDSHTIATMLMSDVNLKSYSDTSYHNEQLKSLTRYRFDKVKERAKLKQSISRLVTILFPELEKLIPTLHMASIYALLFELSSASDIASVHLTRLTNLLSTSSRGRYGRETAMLFKETARTSIGSNMPAKSLELKHTIRLIRELDSEINEIESEIKSIMDEINSPILSIPGINYRMGAMIIAEIGDFSRFNSPDKILAYAGLSPSTYQSGQLESSYSHMEKRGSRYLRYALFNAAKFVCHWDPTFAAYLAKKRSEGKHYSVAVSHAVKKLVRVIYQLEKTRQPYIKAT

SEQ ID NO: 405230 - protein, 329 aa, unidentified
MLDVETGELVERRLEHESGEARAFYAGLAGPVRVGIEATGHTRWFERMLGELGQELWIGDAAQIRASVVRKQKTDARDAAHLLDLLLSDRFPRIWRPSLEERDLRQLGWHRQKLVWMRIAVGNQLHALAMGEGVCRKKKLFTKKGRVELEGLKLGPWASYRRQELLTMLDQLDASMKELDQAVAEQAEQNRSAMLLMTHPGVGPVTSLAFVLTLGPVERFERSKQVVSYLGLNPREHSSGGRQRLGAISKQGNPMMRSLLVEAGHSAARLDSELRQDYQRLKLRRGSGVAKVAIARKLAVRMYWMLRGPASYAQLVRMQGSPWATLVKE

SEQ ID NO: 405231 - protein, 377 aa, unidentified
MKSIVYVGIDVHKDSYTLVCLKPQLEGEDQIFGTLRIRSDYHQVLQYLEKMQKKLGGDVEFICAYEAGCIGYSLYHQLTGKGVKCFILAPTSLLKSKSIKIKTDKRDAINIAQSLAYSTGKHVHMPTAEDEMVQQYIRMRGDHQKILKSIKQQILALCLRSGNTYSGLTNWTKAHLEWLYNLKLDWLLRETLDEYLATYESLSDKMDAFERRIKDLAASDSYRENVEKLSCFIGIRTYSALAILVETGDFERFPTAEKYAAYLGLVPGERTSDDNRNLTGITKSGNSHLRRILIESSQALCRGKVGHKSKALKARQKGNSTQTIAYADRGNERLRRKYYQMMRKGKKRNVSVTAVARELACFIWGMMTENTEVEKAA

SEQ ID NO: 405232 - protein, 366 aa, unidentified
MAITHVALDDSKRVIVAGILRAEATQPELREIPNDPRQVRRLFERLLHDGPVRACYEAGVSGYDLYRQLTGLGVECAVIAPALTPRKPGERVKTDRRDAAKLVRLFRAGELTEIHVPTEAEESVRDLTRCRDDIRADIVRWRHRVLKFLARHGRVYQTGKNWSQAHWTWIRAQRFEDIALERTLEASLDALEQAMRRRTDLDRVIEALAGDAPYRDAVNALRCFRGINTLSAMILVAEIVDFQRFRRPRALMAYLGLVPSEYSSGERHRRGALTKAGNSHARRVLVEAAWHYRHRPGLGNRLARHTADQPPTVVAEAWRAQQRLHRRYRHLVGHGKRPTVAVAAVARELVGFVWAAMIQAVARRAA

SEQ ID NO: 405233 - protein, 323 aa, unidentified
MNKYSETFGIDISKDVFDCYGSTQGHLQFKNTESGFKKFQKLLSKDSLVVMEATGYYHYRFAQFLYHQGFVVSVVNPLSIKRFIQMKLAKVKTDKSDAKAICNYGLSQEVPLYNALTEVQSECLQLFRWMDSLLKKRTATKNKIHGEKVLGIPSKYVYHSLNRTLKHLDRELQGIDKKLLSLVKQDQQKQLTLLKSIPGIGVKTALFLIVITDGFKKFETASQLCSYAGITPTIRASGSSVRGRSRISKVGNRKLRNLLFLCAFSAYKHNKGCRELYERIVNKGKSKKLAMLAVSNKLLKQAFAIAKSGIPYDETFVSALMAK

SEQ ID NO: 405234 - protein, 331 aa, unidentified
MSEGTKIYVGADVSKDELVIAHPSAGQWVKSKVANTLLDIEAWVKGLGNEDKHFILEATGSYSHRLVHVLGRLGHKFSVVNPGQSRAMAQVLAKTNKNDEQDAHTLSLLGSSLKLRPHKMPDETQKKRTEAFSALTSLQKQEKQLLNQLHAFEYRVEPSAVATKALNNVLESVQQAIAELEKELAPRVNEEKERHLVQLIRSIKGVGEKTANTLVALFGDLSIFSSAKAFVKFLGLSPSEYSSGSSVRGKRTITKRGNSKIRTLLFNCARSAMQHNALCKELYQRLIKNGKNGKVALTAVMHKIARLIFGVVHSDTPFDPKFAQKKQKVVN

SEQ ID NO: 405235 - protein, 415 aa, unidentified
MKVVFPTCCGVDVHKTFLVATIITTPADSLQPNYQKKRFSTFNSDLNRFADWLLEHNCLDVCMESTGKYWVPVFNVLEKRGIRVVIANPKWVKAVKGNKDDTEDSKWIGDLFRIGLVKSSFSPDLNIRILREFTRYRYKLVSMKSSEKNRFQNAFTVCNVALDSVVSDMFGKSATTITDYLTSDESFDPEHCVSLLQRSLKKKAEQVLESIEGFSIASEQKACIKIIREHYDFLEKMIAKVDTCVSEMVEKYEGGINLLCTIPGIDRRSAITIISEIGTDMSQFGSSKRLCCWASLTPGNNESAGKKKSVRISRASAYLKPALVQVAHAAVKDNDHPYYKLKYERIAKRRGKKRAIIAIARMILTAVYSMFCTGEVWNPVDLYKVDMPEHLKEQQLAKAIKQATRFLEKQELSVA

SEQ ID NO: 405236 - protein, 338 aa, unidentified
MKITTIGLDIAKLVFHAVAVNKAGKLVRKKMLKRKEVLGFFAKLEPCLVAIEACGGAHYWNREITALGHQVKLIPPQYVIPYRQGNKNDYNDALAIAEAAQRPNMRFVLAKSIEQQDVQMLHRVRERLTQQTTALVNQVRGMLAEYGIVLAKGKTAFRSQLPDILEDGENALTAKGRAIFHGLYNEFVELENRLKGCEKQVLQENADNPICQRLGTVLGVGPVTATAFYAAVGEGKAFHNGRHFSAWCGLVPRQHSSGGKDNLLGISKRGNAYLRTLFIHGARSILRHCEHKTDKLSLWVKALVERRGFNRACVAVANKLARIAWVIAAKEETYRPAT

SEQ ID NO: 405237 - protein, 333 aa, unidentified
MDGVSIVGLDLAKRVFQAHGACSNGHVIFRKKLSRSQLVAFLARQPRCIVAMEACASAHFWGRAIRDLGHEVRLIPPIYVKPFVKRQKNDAADAEAIAEAAVRPNMRFVEVKSQRQQAGAMVFRTRDLLVRQRTQLKHGVVAPQGVTNVRILEAAIEEAETSLDLLIIETARLYLTQIASLSEQIVTLEKVLQQEAGKAATTARLLTVPGIGHVTAMAIEAFAPPMETFRRGRDFAAWLGLVPIQRSTGGKQVLGRTSKMGQRDIRRLLITGAMTIVRWASRKAPPEGSWLSRMLERKPRMLVAIALANKMARSVWAMLTKDEDYRNPVAVAA

SEQ ID NO: 405238 - protein, 360 aa, unidentified
MKTRLSNKQKWFNKINLTSDDELYVGIDVHKKSYHLAFWLNDAPAIDFVMPSDNKKVAQILQKFRNALMLIVYEAGPTGYCLARALKNTGLAVCVVAPSKTPRQSAPDSKTDRLDAKKLAEFAAKGLLKPIAIPTKQQEADRQLTRLRQQIVEKLKRIKIQIKSFLLQHGIEQPKGLVSWSLPAIQRLKRLQLSKHLRFCLDMMIEQLLFVTTQLKDAEKTIKEAFNKGPLATKTKILITHPGVGPVIANQFCTEIFNPKRFKDKTELAKYVGLAPSVRQSGQTLRDGPILKTGRPQLRSNLIQGAWAWVAKDPHARKTFYKLVHNTGHKNKAITAIARKLAIHLWKMASENKPYCPQQD

SEQ ID NO: 405239 - protein, 412 aa, unidentified
MQTLIERGCGLDVHQATVVACLLTVRKDGKVQKQMRTFGTTTRELVGLRAWLLSEGCTHVAMESTGVYWKPIYAILEGALEIVVANAQHIKKVPGRKTDVKDAEWIADLLCHGLLRSSFVPPKPIRELRDLMRYRRKLVESQAAERNRLLKVLETANIKLANVATDVFGMSGRLMLRALIAGKATPQEMADLAKGLLRKKIPELQLALEGKLEEHHRFLLELQLQRLEAADKDLAALEQRVQQKLEPYAAQLALLDEIPGVDWTLAAVIIAELGVDMSVFGSVSQLASWAGVCPGNNESAGKRKSSRVPSGNVYLKSGLVEAANAAARAKGTYLRDKFFRLKARRGYKRAAVAIAHKILVAIYHMLSQQVSYNDLGDLYLDKLNKNHLTRNLVHRLERLGYAVTLTLQQEAA

SEQ ID NO: 405240 - protein, 401 aa, unidentified
MTTVKDNGERVKRFRALKATLRTNRQRLLVGLDIAEAEHVAHLRHAHTRVVVPTLTVSNTTRGFTQLWARIAQAQRATGCREVVVGLEPTGTYHEAVAAFLEAQGADVVLLSSSVAYWNRRTQDGTWDKHDRKDAANCADLLEQGKILFYSQPTGPLAELRRLVKVLRRARSELAACKARWRTTLRPALAPMGEPLPNRLRVELPALLQAWEPAAPGRPAAAKGRLPLGLATACADLGAQVDAVQARITAIEQALTPLAERLPAYALLRTIPGVGPTVAAILLAEIGDVAWFTQFSQLRKLAGLDIIRVQSGKWAGQWRISKCGRSLLRWACYHAAMGLARTAAGRARLAALKAKRAGDRYAGFKAITELAAKQLRVVWGVWRSGRPYDPRRTGGLQRQPR

SEQ ID NO: 405241 - protein, 387 aa, unidentified
MAKQNDLSRCLVTLEQDATVIAVIEMGQSSWLVAGIVPGLERSPLKKLSPDQDALLQILHRWRKEAVRAGRAIKRIVVAYEAGRDGFWLARWLRAREIEAHVIHPSSVPVSREHRRAKTDRLDTELLKRAFLGWLRGEPKHCSMASIPSLADEDAKRPGRERQSLVGERTRIINRLKANLARLGIRGFRANLAQASGRLEALRTPEGAAIPTNTMAELHRDMDHLRFVKQQIKEIETTRAKRLAEAPDAQRPAMVRLLARVVGVGIETADMLVQEVFSRNIRDRKALARYAGLTGAPDESGKKRRERGLAKAGNARVRRGMIELAWGHLVHQKASALTAWYRKRTSDARGATRKTMIVALARKLLIALWRLVTTGETPAGLTLRPAA

SEQ ID NO: 405242 - protein, 380 aa, unidentified
MNVTTVGIDLAKSVFAICEGDSRGHAGRSSLLKGGAFLKWLGTLPAGTIVAMEACSSAHSWGRTMQALGLEPRLIAAEFVRPYRKNERVKNDTRDAEAVLTALHAPGMRFVTIKTEEQQQRLAWHRLREGWKAERTALFNRIRGLLTEFGLVVELGATKIRRKLAELESDSAYPQSIQLMAQSVREQVGVLDKRLGECERQIAQQSKSDPAVIRLRSRPGIGPLTADAIIATVGDARQFKNGRQFAASLGITPRQHGSGGKTHLGAITRRGDSYLRSLLVQGARCVLQAALRLHKNKPDTLNRLQLWMVKLNDRAGYHKAAVAIANKHARQVWAMITHGEAYNADAYKDWEVAHATVCPGDRQKACDDDLPTVALAAASV

SEQ ID NO: 405243 - protein, 303 aa, unidentified
MYYIGLDVHKRTISYCVKDAAGHVHQEGKIGSTRRELDAWIKTLPQPRTIAMEATIFTGWIYDQLLPHAETVKVAHPLMLRAIAAAKKKNDKIDAGKIADCLGCDFLPECHMVSTEIRDRRRTLRYRNLVLKQMVQRKNRVSGLLMETGVSYNKQRLHKLGYFTELISSNDEVSESIRPLLKLSRETIMRSQIGDVSRLQSIKQAISYCGLCSAERSSADKLVRMPISKQRNKHIQQTLVEAAKLAPRYSHELALVYERERQRGNKNRATLAVARKMVAYMLAVERRKQDFVPAEQLGGTAAA

SEQ ID NO: 405244 - protein, 400 aa, unidentified
MLSIGIDVSKGKSTVCGMKPGGEIVYAPFEVQHTREGMSELVSLLRSSGEEVRAVLESTGSYHCPVVAALLENGIFVSVVNSLRMKRFCSQSIRKVKTDRIDAMQIALYGLAYWQELQPTRLPEDTYRELQLLARQYYQMTSMLIKAKVDFNALCDQVLPGMQELMNDHAGRHKLSDFVLRYRHTTHILEMGETRFRKDYCKWAEKKGYRNCERMAAHIFATAQNGIPVLPNAPSTQIVITEAIRVLHTVEASRDAILTQMQALAKTLPEYSLVREMPCIGDTLAPRLIAEIGDVRRFHSKRALIAYAGIDAPPYQSGKFRANNRHISKRGNRYLRKTGYEVMQSYVMHKPANDPIFTFIEKKRSEGKCGKLAMVAGLNKFLRVYYGKVTELYRSLPAIE

SEQ ID NO: 405245 - protein, 416 aa, unidentified
MQKHSNLPVKSEQRSKQTKSRVPVQRDTKELMAELLGKLMEKQDPKAISASAGKEQKQGRLRPNLDRLTVGVDLGDKWSAYCILGLEGETLIEGQLQTAPLGVAEFFQSLPAARVVLEVGTHSAWVRELISGCGHEVLVANPRLMEGSKRRKRKNDRIDANKLARLGRMDPQSLYPIQHRSPEVRQDLVMLRARDALVAVRTELINSTRGLVKSVGARLPQCASPSFSKKVKESLPVEIREALLPLVELVAALSDSIQGYDEKIEKLGSEKYGHTALLRQVKGVGPITALAYVLTLENPNRFAKSRDVGPYLGLVPNQEDSGDIQPQLGISKAGDTMLRRLLVGSAQYILGPFGPDTDLRRYGLRLCERGGKNAKKRAAVAVARKLAVLLHHLWVSGEVYEPLRQGLSATLTQATA

SEQ ID NO: 405246 - protein, 341 aa, unidentified
METTRHIGVDLHRNCFTACIRRENGRNYVTEWKLEQLPKFVAKLRPSDEVAVEVTGNTRLFHDAVAPHVKRVVAVNASQFKVITHSVKKTDPNDARNLALYLAKDLLPEVRMKDKTRAQIASLTQTRDTMVKLRTALKNKINNIFSAHGINLSKESLASEKGLKAVLETRFDALVDLELKILVDQIRSLNKSIAELEETIRRESQKLEGHKNLTSIKGIGGLSAGILLSIIGDIRDFADEGKLAAYFGIVPRIHHSNETEHSGRITKRGTKLGRTTLVQCALIAQRFSPYLKQYYERKKSRGTGKAIIALARKFLGIIYRTLKNRWIFEDFPNFVLAEKTA

SEQ ID NO: 405247 - protein, 408 aa, unidentified
MPNRVAGIDVHKKVLMVVVMDSATPEVKPERRRFSTMPTELHHLSTWLRERGVEEAVMESTAQYWRSVWMELEPYMSLHLAQAFSNKAPRGRKHDFKDAERLARRFMAKELIMSFVPDGEQRIWRNLTRMKLQLIRDRVRLHGQIECLLEEMRIKLSVVVTDLFGTSGLRILNALAQDETDPKNLALLGDERLKCSEEQLVEAVTGRSHPVHRQMLGLQLERLRHMNEQIATLNTMIAQAMKPYQDGVIRLAEVPGFGIDSAQQVIAEVGATADKFSSAAEFTSWVGTCPGKEESAEENRSSRCAKGNKYMRRILNQVAHAAVRSKGTHFQAVFRRLLPRLGYLSAVWAVAHRLCRLVWKILHEGVRYVEQGTAYEPKLLIHRARYLAQQLRKFGYDLRVTPATPASA

SEQ ID NO: 405248 - protein, 473 aa, unidentified
MARKKGKDPAGIGGLELTGEPIEVSDEPAEVIARPAAIDVAKGSGMVCTRVPHESRPRRRVQRVWQVSARYAEIAALMAELAKLGIQRLVLESTSDYWRIWYYLAEAAGLEVWLVNARDAKHLPGRPKTDKLDCVWLCKLNERGMLRRSFVPPEAVRDLRALTRLRSRLAQDQARHQSRIEKILEDALLKISSVISDLMGASGRRFLAALVAGERAPDKLAALGDRRLKASPAQLEQALAGRFRDIHALEIGMLLELIDDITAKMARLDAEITSRLARIPGLAPACTGCGEIGGGHAPSCPRPGAPVLSVIERLDELTGIGIDAAQVIVAELGTDKTTFPTPGHAAAWAKLASRTIQSGSTSKDGRTGKGNPYLRAVLGRAAMTAAKTDTYLGERYRRIARRRGKQKAIVAVSRTICEIAWMIITDPSVRFSELGPDYYARLDAGRQTRNKIRELERLNPGMKVTLTPAATAA

SEQ ID NO: 405249 - protein, 420 aa, unidentified
MSNSNISKRLAQVQPGTLHAGVDLALEENLVIVIDDYARKRTGFKFPQDADGYRYFLKKLEELRVKVGAGQVVVAMEPTNFFWKLLANHLEQEQWPYHLVNPYTVKKHREGDQLDRSKDDPRDGFMIAELDRTGKYTETRLQHGPYEELRQYATLYYQLNKSLRREKTILWGLVGQVFPELRQAFKQLNGITVKALLCTCPAAVSVRALSEADFLGQVQAAFAGTRIHLAKLRQAYRLASTSIGLEEGLRANQLAIQIHLDQLEMLEKKRLQVIAALKACLQEVEVAAYLLSIQGLSSLSVALLLAEIGDPAYYQNGAQLVKLAGIQPVPNISGRKQRSRTPMSHLGRARLRTVLYFACLRLVRVDLRFNQRYQELQTRAKNPLTKMQALGVLMNKLLHIVWALIQHKTFYNPAEVVLTA

SEQ ID NO: 405250 - protein, 480 aa, unidentified
MKEIQRRCCGIDVHKNSVTVCVLAPVGQRHIESKKRKFRTFTRDLKQLRAWLKNCQVTEIAMESTGQYWRPLWNLLEGEFAKVILVNPQHIKGLNGYKTDPKDAQWIADLLESGKLKGSWVPPRPIRELRDLTRQRVHVLEDLNRAKNRIEQLCQTGNIKVSSVATDLFGVSGRKMLKAIVEGKHDAGWMADYAKGQLRRKRGELELALEGTFTSQQRWLLEKELRQVEWLEGQVETLEEQIEREIVAFEEPIRRLLTIPGIERRTAWTIVAEVGVDMGPFSDAKHLASWAGLCPGNRESGGKRMSGRTRKANRYVKRAMCQAAWAASHTKNSYLSAFYRRMAIRKGAQKAIMALAHHMIVVIHQVLSRQEEYVEFGGDYYDQRNKPRTVARLVMRLSRLGYQVDLKPVESTPPAQAGAPDEAPADRSGEATAPLETGAKPKRKRGRPCKCAERGIICYHQTSVPVNLLIPQPASAGEFS

SEQ ID NO: 405251 - protein, 409 aa, unidentified
MRIIGLDIHRAFAEAVAWDEGKLKRLGRVEMRRPLLEAFAKKLSKEDVVVVEATGNAASVAAVIAPHVKKVVIANPKQVRVIAHAKIKTDTIDASVLAQLYASGFLPEVWIPDEPTQALRRQVTRRNQIVRQRSRLKNIIQSIPHSHLIPSCPHADLCGASGRAWLFHQVLPEDERLAVERHLREFDRLGEDLKVIERDLARSALRDEGVKRLMTIPGVDMVVALAIVAAIGDVGRFEQSQKLVSYLGLNPSVRQSGPGPAYHGRITKQGRGHARGMLVEAAWAAARAPGPLRAFFLRVRARRGQHVAAVATARKLAVLIRHLLSKGESYVWARPALHARKLRDLELKAGYKAERGQRGAAHAYNIKSHRDQERRWVEQAETAYARFVAGWNPRGPKQARTGAATEGRR

SEQ ID NO: 405252 - protein, 360 aa, unidentified
MSFNGTSVGLDVHALSVVAHAVDEESGLVERARLCPDHGEVLRWLDPVRGPLRVAYEAGPTGFGLARALAEARIECVVAAPSKLIRPAGDRVKTDVSDAAHLTRLLRLGEITPVTVPEADVEAVRDLVRAREDARADLMRVRHRLSKLLLRQGRVYSGGQAWTGLHETWLRQQRFTDAHTAAAFDHHFDAVLSATAARDRLDEQIVGVAASPRWADTVDRLGCLRGISALTGLALAVEIGDWSRFTGASIGAYVGLVPTEYSSGASRVLGSITKAGNAHVRRLLIEAAWHHRACYRNPGPTMRARWAKVDPALKARGHAGNRRLHQQWCRFLERKKHPAVANVAIARQLAGWCWSLATLD

SEQ ID NO: 405253 - protein, 453 aa, unidentified
MQGEQGSTKTPAQTTDLLVVEPDAAGIDIASRVHYVAVPPDRDPQPIRQFGCYTADLIEMAEWLKRCGIKSVAMESTGVYWVPVYDVLQQHGLDVHLVDARQVKNVSGKKSDVQDCEWLRRLHSYGLLSSAFRPKPEIVILRGYWRHRKTLVEQCARLIQLMHKALEQMNVQLHKAVTDVTGQTGMAIIRAIVAGERQPAELARFRHQGCKLGVEEFVAALSGNFKPEHVFALEQSLLAFDSFQDQLGQCDLKIQAYMAQLPTRAEPPKPRPLAKRRKNQPHFDLRSEQIRISGVDLCAIPGIDALTAQTAFSEVGLDVERFPSEKHFASWLCLSPNNRKTGGRIRSSRTRRSAHRLATALRVAAQSAGRSHTSLGAFYRRLRARLGPAKANTATARKLACLIYRMLKYGQPFVEQGQEAYETAHRQHTIRSLGRRARHLGLNLINPSTGELL

SEQ ID NO: 405254 - protein, 364 aa, unidentified
MNATSALLVVGVDLAKSVFQLAVADGSWRVVESHRLSRTQFERWFANRAVGLVVMEACGSAHHWARWLNGLGIEVQLLPAAYIRAYVKRNKTDAADACALLEAARCAEIVPVRVKSIEQQALQGLHRTRSLWMSTRTSRINALRGFCREFGIVISQGSRLGVEQIGRVLADPRSAVPALIRGTMTLLVEEIRLLEVRIAQLERELTALARQSPACTTLLSIPGVGLLTATAMVAATSGTVGHFRDARHFASWFGLTPKEHSSGGTRHLGRISKRGDRYLRMLLTHGARSVLRAATVAVRAGKTVDGLRQWALGVQHRANHNKATCALANKLARICYATLRDGEPYGQSHRLTKKIERTAFALPT

SEQ ID NO: 405255 - protein, 357 aa, unidentified
MLTIGLDVHQRFFAVCILDVNGKRVKEFQVRGRWPKLIEQLEQLAKPFAVCYEASCGYGHLYDQLKRIARRVLVAHPGQLRLIFRSKKKNDRVDARKLATLLYFDQVPTVHVPRVEVRSWRSFIEFRRRLVDKRTRVKNSLRALLRGHGIAAPNGQRLWTKKGRAWLAEVELPTRQTVVQRDLLLDELEHLSRQIGRVERELNTRAASEPGVQLLRTIPGVGPRTAEAVMAYIDDATRFSRSKQVGSYFGLVPSQDQTFPNNRLGHITREGPATVRKLLVEAAWQGIRRSARIQARYAQVCGDDPQRKKIALVATAHWLVRVMHTMLLSGESWRPEPETPTCETEAERVAEGRREVA

SEQ ID NO: 405256 - protein, 412 aa, unidentified
MWPAKPETPAEPPNGSSGEWAQTQRLLELGSQEWKLELMHVAVGQPTQEAYATPMNSVGLDVHKTRCVACIKTHEGRILEEFAFQNTPHGHEELITHLKAYPEVQVAIESTGNLWIPIYNRLEDEQIHTILTNPMKTRLIAEAKIKTDKLDARILADLLRANLLSASYVPPPEIREQRSIIRERARLTRLRTIIKNRTHTLLDKHSIKTPYTDISGKHSIEWLSKLELPPGDRILLDINLEQLNSLNKSIDKLTETIALSAITNPEVKLLMGFTGIDYYSAMLLINEIGPIARFASPKKLVSYAGLAPSTHQSGNHTTHGHITKEGNSHIRWILVEAAQHASRHDARLNQFYLRVMKRRGHNRAIVAVARKMLVTIYHVLNHHREYRGLRPELYTNKIRRLERITTSSLQTA

SEQ ID NO: 405257 - protein, 396 aa, unidentified
MDPEGDTLETLKVENNLHGASHLRDRIVAAADKLPASEIHIGLEATSVYSWHPAMYLHEDASLQERKTKVFTINPKLINKFREAYADMDKTDRIDAWIIAERLRFGRLTTTIVMQEQYIALQRLTRMRYHLVHNLTREKQYFLQNLFYKCNAFRSEVDSSVFGHAIMEMLSEKFSLDEIADMEVADLADYLKEKGKNRFPDPEHVARCIQKAARASYRLSKVVEDSIDLVLGTSIQAIRSIQSQLKELDKAIERILAGIPGAQCLRSIPGIDRVYAAGILAEIGDIERFSDQAAVAKYAGLTWRKHQSGGFEAENTKRIRSGNRFLRYYLVEAANSVKNRDPEFGEYYRKKYNEVPKHQHKRALVLTARKLVRLVDVLLRNGQLYTPGRKVTTAKD

SEQ ID NO: 405258 - protein, 356 aa, unidentified
MMNGSSCSNRKMEESEMDIKRLSVDLAKDVFQLYGVDDKRCAILKKRLKSRTKFAEYITKLKPCEIIMEACGTANYWARKFNELGHTVKLISPQYVKPYVQRNKNDFRDSVAIMEASFWPATPYVSPKTVEQQDIQSLLRIRSNYMGMRTSVSNQVRGLLKEYGIFINKGYANLRNALPNIIDRDNENNLSPMMKELVEGQYTMLLVYGEKIDGLDIKIEEIAKSNETCKRLDAIEGVGPITALAMVAVVGDGKSFKNGRHFSAYLGLVPKQHSSGQCERLLGISKRGNRYLRELFVHGGRAVARTCDKKTDTRSSWVNRIKKQKGVNKAAVAVANKNARIAIAMILSGESYRKAA

SEQ ID NO: 405259 - protein, 389 aa, unidentified
MKRVCGLDVHKDNAFVCILGENGEKIEFKTGVLTVELDSFRDRLVELGVGEVAMESTAVYWMPIWRILESDFKLYLVNPLSIKQLPGRKSDVKDAEWIATCLQKGLIRGSFVPPLAVQQLRQYNRRLFDLNKQAVYVQNKMDAALQRCNIRISNYVSNVDTKGYREVVELLSEGTTDPELLTGKIHRRTINKHGRDTIKAALTGVVTDVDSDLLRQYREELDLLRRHKQECLSKMREMCEELYPDELKRIEEIPGISAQSATQIIAEIGADMKMFLTARTLVAWAGLKPRNDGSNGKIKSRRITHGNKYLRKLLIECAWAASRTKDCFFSSFSYRMVTVRKKGRLKVQVAIARKLLVVIWNLLAKGVQYSDRLAQADDTKDESSDTPQG

SEQ ID NO: 405260 - protein, 411 aa, unidentified
MNPVVGLDVAKGESQVQAFLDKKQPYKKSFKVAHTLEGLASLLDFIREVENVSGGRPPIVLESTGHYHTPVVQYFEDRGYLLIIVNPLISYRAKSSSLRKVKTDVIDARHLCELYYKEDLEPYKQRGIQLLNLRNLTRQHENITGLFVQTKLQFQAILDQMFPEYRGVFGDLHSYVSLLTLQTFPTSQKILDTGEETVAKKIKELCKSRSQKWADSQAEKLMAAAAQNPFQKNLYHSLTLSLDMYINMLLEYKKHLSKLEDEIDALAKGIEECKIIQSIPGIGEKIAATIISEIGEIDRFNHPKKLVAFAGIDPSVFESGTFKGTLNRITKRGSSRLRHALYMAVKCAIRDCRKKKTTDEIIPRNKRLREFYDKKREEGKPFKVAVIACANKFLHWIYALLKSKSTFQDLA

SEQ ID NO: 405261 - protein, 424 aa, unidentified
MVADYKIYFLRGHHMNAVGIDVSKGKSKVAIIRQFGEVVAKPFDIEHFPDQLADLAEYIHSLDGESRVVIEYTGKYSDPIANFLCEAGIFVCMVNAKLIHDYGGDTIRRVKTDKVDALKIAGYCLDKWAKLSRYEPVSEERKLLKTYNRQLSEYTKIKSMLKNNLISLLDQTFPGINELFSSPAREKDGHEKWIDFVLKFPHCNNVSTLSRQSFAIKYEKWCRKNGYNFCPHKADQIYSVALNCLPTLPDNDFSQTLIIQTVNQLNSLCETIATVKAEMSKIASALPEYDTVLAMHGVGKTLAPQLIAEIGDIRRYPKRSSLARFAGIEPPENQSGTYNQHSRRISKQGSPHLRKTLFQVMSCVLQNSNPGEPTFQFIDRKRAEGKPYKVYMIAGANKFLRIYYARVSECLDALKAYQSMVVSA

SEQ ID NO: 405262 - protein, 350 aa, unidentified
MKIIGCDIHTRYQQIAMLDDATGELTERRLEHEGGQAEAFYRGLAGAVRVGLEATGPIQWFQRLLAELGHELWIGDSARIRASEVRQQKTDQRDAALILDLLLTKRFPRIWVAAPGERDLRQLLWHRHKLVQMRTMVSNQLHALAMGQGLCRKAKLFTKKGRAELSSLTLGPWASRRRQELLTLLDQLTPSIAELDRAVLEQAQHREDTIRLMTHPGIGPVNALAFVLTIGPIARFRRSKQIVSYLGLNPSERSSGGKQRLGAISKQGNSLVRWLLIEAAQHASRFDEALRQDYQRLKFRRGSAVAKVAIARKLAVRMYWMLRREADYAQLVRMQGSPRGTLVSLPAPFC

SEQ ID NO: 405263 - protein, 370 aa, unidentified
MKEPITSYIGLDIHKESIAMAIADADRAAPRFVGTINPVPAELCKAMRRVCTKETTLVVYEAGPCGYGWVRYLRKQGWRCDVIAPSRITRKPSEKRLKTDRRDALLLARESRSGNLTSIAVPDERDEAVRDLTRARDDAVAARHRVRLQIQAMMLRHGRQYQGKKAWTEAHDRTLSMVRFEHPAQEISFNEYRQAAKEANERVERITQELRVQCESWRMNPLVKALMCLKGIEFVSAATFVAEIGDLSRFAHPRSLMAYLGLVPSEFSSGKSRHLGEITKNGNKQARRILVEAAWNNRHKAQVSRILEVRHEGQPKTIRDISWKAQLRLSKRWRSLSMGRKLHQNKVCVAIARELCGFIWDLARHVKISH

SEQ ID NO: 405264 - protein, 314 aa, unidentified
MNAPIFVGIDVSQAQLDIAVRPGTRFAAANDEQGIVTVVEQIRTLAPTLIVLEATGGLEVPLTGALATVGLPVVVVNPRHVRDFAKATGKLAKTDALDAQILAKFAEVIRPATRPLPDEQTQALAALLTRRRQLVEMLTAEKNRLSTAPKPIRKSVRAHITWLERELMHTDTDLAQTIRESPVWREKDELLRSVPGVGPVLTTTLLANLPELGTLTGKQIAALVGVAPLNRDSGTLRGKRTVWGGRAQVRTTLYMAAIVAARFNPVIRAFYQRLRAAGKAKKVALTACMRKLLTILNAMLKHRTPWCAEVAQHA

SEQ ID NO: 405265 - protein, 325 aa, unidentified
MIYIGIDVGKNKLDCLWLKDIQSEKVKTKVFKNNQESFDSISQWLIKVTSAQPEQLHITLEATGIYHEGVATHLFNQGFHVYVVNPARPKEFAKALGVTHKTDKADSLLLAKFGYQMNPRRWTPEAPEVRKLKALIRRIESIEKDIQRELNRKEQAEIADNSSVVIESIDKIVSVLLKEKERLTEELDTHIDNHPTLKTNRRLLESIPGVGPVVSRLMLSVLSSNLFEKAGSLSAYLGLIPRIRESGTLKGRSTLSKVGPPNIRAKIYMAAVVAKQHNPDVKALYERLKNNGKTHMQALGAAMRKLVQICFGVFKHQSEYKPQIV

SEQ ID NO: 405266 - protein, 391 aa, unidentified
MFAGIDVASQRHVLARLDAQGMALGQPMPITEDQAGYAKLVELLAPASALVVMEATGHYWKNLFAVLVAAGHEVALVNPLQARRFMEAGLERTKTDAIDAQGLARLGYEKRPAPTRLHDPIAEALRELVRHRDRLRRDFDDRVRQLHRLVDLGFPEFTRYVRTLDSMLATCLLAEYPTAQAFARANPRRLAKLRYDGRHLVGPGLAEQLVAAAKRSIGQHHGPAYTLQARHICQDLDLWRRRLAEIERDIESLLDSHEVGKLLTTIDGIGPQSAARIIAAVGDPARFRSAAAFAAYVGTVPGLSQSGKQIRTRAAIAPIGNARLRMALWMPVLGAVRRNPWLRAFYVRLRAAGKPAKLALIAAMRKLLHAVHSVARNRKPFVAMPKQGRAA

SEQ ID NO: 405267 - protein, 409 aa, unidentified
MDVLFERCCGLDIHKRTVMACLVVPGPTGAPTKEVKSFGTMTDDLVQLADWLLAASCTHVAMESTGVYWKPVWNLLEDQFALLLVNARHVKTVPGRKTDAKDCEWLADLLRHGLLRGSFVPDRGQRELRELTRYRTSLVQERSAEINRLQKTLEGANIKLGDVATDIMGLSSRQMLAALADGETNAAAIAQLAQGRLRDKLPALERALAGSIGAHQRFLLARQLAHIDFLDAAIAEVSVEIAERLRSVADELERLASIPGIGRRTAEVLIAEVGTDMDRFPTGAHLASWAGMCPGNDESAGKRRSGKTRKGSPWLRSALIEAARGAGRSKGTYLAAQYHRLAARRGTKRAAVAVGHTILLIVYRLLSEGDIYRDLRERYFDERDRHAVERRLVARLVGLGYKVSLDPAA

SEQ ID NO: 405268 - protein, 338 aa, unidentified
MNLSRIGLDLAKQVFQVHGVDRHEHVVCRRQLKRAQVRDFFRQLPPCLVAMEACGSAHYWARELRELGHTVRLIAPQFVKPYVKGDKHDAHDAEAICEAASRPSMRYVPVKSAEQQAVQSVHRVRSRLVRARTALCNEVRGLLGEFGLIATRRGRAATMALLETVMATEPASLPAPMGELLRELKDELQTLEARIARLERQIQAHVRGDARIQRLLAVEGIGPISASAVAASAGDARQFRTGRQFAAWLGLVPRQHSTGGQQRLGNISKRGDTYLRTWLIHGARAVVRCCANKTDARSRWLQGLLQRRPANVVAVALANKNARILWALLSRETCYRPG

SEQ ID NO: 405269 - protein, 345 aa, unidentified
MKYYFIGIDVSKEKLDATLIHYESQSDSEQQLAYTTVENNPKGFRSLVSWSKKNAGRGVKTDTMLFCCETTGGYDRALCDWLYDNGLNIWRESALQIKRSMGLRKGKDDKADSEMIAHYALRFRSQATLYKPLDGNMRSLRDLFLYRQSLVADRQAKLVSAKEKRHISSKSKVDNFIYRDAQKGIDILTKSIKKCECRMLEIIKEDEEMYRNYLHLISCKGVGLVTSVMLIIYTDNFKSWNAKKMASYCGIAPFYESSGSSVFHKANTSGYSNRRLKGILTQAARSAITYNPTLRQYYLRMKAQGKPYGVILNNVNNKLVHILFSLVLHDCDFELDHEAKRALRA

SEQ ID NO: 405270 - protein, 432 aa, unidentified
MATEQERQLAAGSTEPAFAAFVAIDWADKVHYFSLRVAGTDKAERGSLENSPEAVELWACGLERRFGGRPVAVALEQRRGAVVAMLGKYSHLHLFPVHPFTLSKYREAWYPSRSKDDVKDADLLLEILVQHRDRLRRIDPDTPSMRLLQFQVENRRKLVDERTALSNRLTDVLKICFPQVLKWFDDVSSALVGDLLEKWPSLEALQKARTSALEKFLREHNCRDEEKNRWRLEEIRHAVSATHDEAVMGSAKAMVPAWVGQIAVLRRAIGALDKEIAQLAKRQEDWAIFQSLPGAGHALAPRLMAAMGTRRERFGSAGELQSFVGIAPVKEASGNSEWIHVRWACPKFQRQTFHEWAACSIPQCDWAKTFYDQLRARGKDHHVAVRALAFKWMRILYRCWVNRTPYKEDVYLASLAKRSLPMRHLASSVQMP

SEQ ID NO: 405271 - protein, 343 aa, unidentified
MKTITTVGVDIAKSVFQVHGVDADGNIVIRRQVKRRYVLAFFQKLPPCLVGIEACASSHYWSRELQALGHTVRLMPPAYVKPYVKRHKNDSTDAEAICEAVTRPNMRFVATKTPEQQSCLTLHRTRHLFIRQQTSVINAIRAHLAEFGIVAPIGRHGVEQLLGVVSDAGDTRLPEVARACLAALGAQLRTLKAQILQFDRMITAWHRSSEASRRLDDIPGVGPVLATALVASVADPKAFRSGRDFSAWIGLVPKQNSSGGKDRLGNISKRGDRYLRSLFTTGALAVIRYAKIHGTRHRPWLTALLARRPTKVTAIALANKIARMAWAMMAKGERYKEPVALAA

SEQ ID NO: 405272 - protein, 310 aa, unidentified
MECFVGIDVSKATLDIASLPDAETWTVTNDDAGLAELLPRLVTLRPTLIVLEATGGFESAAVTALAKLDLPVVVVNPRQVRDFAKAMGRLAKTDALDALTLALFGERVRPAVRPLPDEAAQLLDALLTRRRQLLEMLTAEKNRLGFARGPVKRDITTHIRWLEHRLAEVDGDLAAAIAASPLYRAQDDLLRSVPGVGRVTALTLLGKLPELGHLSRREIAALVGVAPLNHDSGQMRGKRFVWGGRAPVRAVLYMAALVGLKHNPRLRVFYERLCAAGKVFKVAITACMRKLLTILNAIVRHQRRWDPQIA

SEQ ID NO: 405273 - protein, 425 aa, unidentified
MHTKQYSKQMEKRSRIGEHTLVVGMDIGCEFNAACFMDKEGNVLGRFPNIYNSRKGFDYFRTMITKTQRKHRFTDVLIGMEPTGHYWRKIAFFAKEHGYEVRFVRTTAVKHQRELDESSSAKSDIRDAFTIGNIVREGKYIDTVIEESVFRQLRTLAHARERILRYIVGSTHGLQAVLNDYFPELTDLFWSMQAKGLWALLETYPFPEDVRHAGVSAVMALLAKRTRNRNKAQEKARQVIQAAEQSVGLNKIGAADRARLAMYLEEIKRSDGRRKLLEREMKELLKQIPLAEYILSLPGMGEVSCGIFFGKLGNPEYFKNPRQIIKYAGYDPKENDSGSRVGRKIISKKGRWLLRKCLYFMVLRVVHGSSFFKEYYEHKKKGFVRPLAKTEALCAVILKLIRVLFAMMRDRRMFTEEIPGCREAA

SEQ ID NO: 405274 - protein, 416 aa, unidentified
MLRVYRRCCGMDVHKETVVVCVLPPDGEEGEIVRKVFGSFRNELARMRGWFKQLKITHVAMESTGVYWMPVWNVLDGHGFELKLVNPGQVKALQGRKSDQRDAKRIAEFLQDERLDGSFVPPREIRELRQMLRHRQSILEARNEVHNQIRDLLETANFKLSSVATDLMGLTGRNILRALADGLDSPERLSWKARGSLRHKEAKIKEAMKGQASEFFRWMLKSHLEHYDFLTNLIATLERQIEGYMAPYEEHILRLITMTGVDRLVAWNLIAELGVDMSVFPTAAHCASWAGLAPGTHESAGKQKTGRTKRGNRTLRRILTQSAWANTRCKYGYLKAFFLRIRARCGWSKAIVATAHKILVIAYGILKNHQPYQDLGGDYYDRLNPDKTIRRIQNRLAKLGYQATLTLLPAPTMRST

SEQ ID NO: 405275 - protein, 456 aa, unidentified
MGVSGGLRLTAQAARSITASVGLVANVCQPSTLRMVICPEASSAQNRCYGVGGRGLHLRRCKQLTECPMPQPIDLSRSLTVLDPDSTLVAVIEMSQSSWLVAGIVPGIERQPLKKLEPDAEALLALLHRWRDEGVRAGKTIKRLSVAYEAGRDGFWLARWLRTRGVEAHVIHPASVAVSREHRRAKTDRLDTELLKRAFLGWLRGERNHCSMAAVPTLDEEDAKRPNRERESLVGERTRIVNRMKSVLVRLGIRGFKPTLRKSSERLEALRMPEGSPLPPNTLAELRRDMARLRLVREQIKEIEEGRLRILEATSRTQGRHAMVRLLARVIGIGVETADMLVHEILSRTLRDRKAVARYAGLTGSPDESGGRRREKGLARAGNARVRRGMIQLAWRFLQFQKESALANWYRARTTDGRSGTRKTMIVALARKLLIALWRMATMGELPEGVRLHPAG

SEQ ID NO: 405276 - protein, 279 aa, unidentified
MELTSPRIAWTSLLAQVARVGRWRILNLGIATLVKRLAKLQPTLVVLEATGRLESAAVSALAVADIPLAIVNPRHVRDFARSTGKLAKTDKLDAQMLARFADAVRPEPRPLPDETQQRLEALLVRRRQLLGMVTAERNRRRRAPVLTRAEIDEHIAWLQVRVEALEDELNKTIRSSPLWREKVALLRSVPGVGPMLAATIIAQLPELGVLTHKEIAALVGVAPLNRDSGNWRGKRTIWGGRPQVRAALYMSALVATQFNPLIRSFYLRLWPLGSQRSWR

SEQ ID NO: 405277 - protein, 372 aa, unidentified
MKQNIIYVGLDVDDTQYHGSALDKNTGEIITFKCRPTLKGLLNQLDRIQKCFPESAFKLCYEASYIGYTLQRDLVEKGYHCDVVAPTSIPSPRGKQVKTDRIDAAQLVQFYANDLLTLVTIPEPEQEQDRDLIRSRQKLLAQQTELRKHIQALLRRNGRHYKVETQNITHWTLHHYCWLDRTIEASSGSLKVNLELLVRQLKSVNSTLLEYGQQIEALAKTPRYEQLVQALTCYKGIKNLFALTMITEIGDIKRFPHPRQLVSWIGMDIREYSSGGKHNRFGITKHGNRYLRTAFVEANQRGYRTARISKDLKARRKNTDPELINIADRCLRRLNKKGNRLLLAGKHPNKVKVACAREMVGFVWESLNKAAA

SEQ ID NO: 405278 - protein, 354 aa, unidentified
MSQTPNTAIAVIGIDIGKNSFHVVGHDARGAIALRQKWSRGQVEARFANMPPCLIGMEACVGAHHLSRKLASLGHDARLMPAKYVRPYSKGQKNDFNDAETIAEAVQRPTMKFVATKTVEQLDLQALHRVRERLVSQRTGIINQIRAFMLERGIAVRQGIGFLRTELPTILATRTDALSPRMLRVIEELAGDWRRLDQRIEGLTGEIAALAHQDQACSRLMTVPGIGPIISSAMVAAIGTGDVFSKGRDFGAWLGLVPKQISTGDRTILGKISKRGNRYLRVLFVQAAWVVLVKIKDWERYGLKSWIEAAKKRLHHNVLAIALANKLARIAWAVLAKGRAFELTRTDDASVRPA

SEQ ID NO: 405279 - protein, 305 aa, unidentified
MHNWVAIDIAKDELELNDDRRGWISRNESGAIKRLVAGFKKRSDIWVICEASGGYERQLVAALHAASIKVCVVSPNRVRAFARSEGVLAKTDKIDTAMMLKFAQSKNLRPTAPPSKQQVELAALMDRRTQLSDFLAQEKNRVQNSPSAIHSLIKKMIRTIEAQIKAVEKHIKAIVEATETMRERHKLFCSVSGIGEVTSWSLIAYLDELGKLKRSETVALVGLAPFNRDSGKKKGKRYIQGGRAKLRSSLYMAAKTAARHNPVIKPYVQRLLEKNKPYNCVMVAAMRKLIIHLHCLIKNNQLKLA

SEQ ID NO: 405280 - protein, 431 aa, unidentified
MKKQLLSTLFIGIDVSLRAHHAVILDFFGNQLASVSFNNNLSGASLITSEILRTAVSSKATHVVTAMEATSFYSFHLCNYLFQSPELAALNIKVYCLNPKVTSAYQNTFVDMDKTDPNDAYGIADFARTGKITSEPFNGSAFVALQRLTRVRLHLVESLAREKSYILTNIFIKFSELAVLNPRDKEDNPFSNRFGATSVAVLTDYLSPDEIAYAPVEELIDFLCEKGKSRFSDPEAKAKLLQRAARDSYRLDKAQYEPLNAAIAASFNCIKSFEKEIKTIDSAIEKAVKGLSSNGYQCLLSIPGFGPVISAGIIAEIGFIDRFKSEEKLAKFAGLTWRKKQSGRLTSDITYMTKSGNKYLRYYLGEAVMSLIKNHNPEYTAFYHKKRNEATRFQHKRALALTSRKLVRLIYALLRNNQLYISTRGAVEATT

SEQ ID NO: 405281 - protein, 342 aa, unidentified
MDHFAGLDVSVKETSVCIVDDTGRIVREVKVASEPEALLSVLKNPAYHFKRIGLEAGPLSQWLFSALAEAGLPVICVETRHMRAVLKAQINKTDRNDARGMAQMMRAGIYRPVHVKTLRSQKLRMLLTHRKLLQSKAIAIDNDLRGTLRNFGLKVGMVGTVKFEARIRELVENLPDLAALIEPLLIVRRTLREQFCVLHRRLLAIVRDDEVCRRLMTTPGVGPVVSLTYRATVDVPARFRKSKSVGAVFGLTCAKYQSGEVDWSGRISRCGDEMMRVMLYEAAQAMMRSKKWSWLKAWAMQIARRRGMKKAIVALARRLAVIMHRIWVDGTEFRWTREAAVA

SEQ ID NO: 405282 - protein, 375 aa, unidentified
MFTLTVLGPKEAEIRIIGCDLRARQQTLAMLDTTTGEVVKITLKHEGDNVREFYSTLPRPVRVGIEATGSMQWFLNLMEELGIECLVGHPAEIRAAEPRKQKHDRRDADLILKLLTENRFPANWLPSKELQDLRSLLRHRHQWVRMRTRRQNALQSIALANGLRRGPALWSRDGQSRIALLPLAPHTAYRRSELQAMYEKFEAEIEHLNQRVEEQACGRPGARLLMTHPGVGPVTALATEVFLGDPARFADSKALASYVGMIPREYSSGGRQRLGGLSKQGNPLLRFLWGEAGAHAVRRDPELQRFYRRKLVQKGLGKASVAVARKLGIRLWIMLRDQIEYNEFCRRGQKQQKSSDACAGMPETPYGAKSHRPVD

SEQ ID NO: 405283 - protein, 407 aa, unidentified
MEVVYRCCCGIDVHKKVIVACLVNGGEQELREFGTTTSEIKTLANWLTESGCEMIAMESTGVFWKPLYNLFELMDLDAMIVNAAHMKALPGRKTDVKDAEWIADLLRHGLLKASYIPNREQRELREITRYRKSLTEERCREVNRLQKILEGANIKLDSVVKDITGKSARKLLQRIIDDDIPDSDEVSKMVHGRMRPKLEQIVASIEGITTPLQRKLLAQIIDHIDDLNRRIGELDKLVQEYMAEYEAAIEAIDEIPGIARRSAEVILAEIGLDMGRFPSAAHLCSWAGVCPGNYQSVGRRKHGKTTKGNKALKTILTQCAKSAKTVKSSYFFAQYQRISARRGKNRATLAVAHSMLIAIYHILKNKTAFHDLGSDYYDSFNRDRKINSYLKRLKALGWEPDAIPSSA

SEQ ID NO: 405284 - protein, 342 aa, unidentified
MNIPVRIGMDTSKSVFQLHGVDENEVVVVRRQFRRAEMIRYFERLPPVLVAIESCGSSHHWGRLLQSFGHEVKLIPPQYVKAYVKRGKNDAADAEALCEAVTRPSMRFVPVKSKERQAACMLMTVRERLVSVKSQLSNAFRSYAAEFGIVGPAGQQNVAALIKRVLEDESLPEMARDLFRLQADEYAAVQARLAKIEAKLMKWHREDDISRRIATIPGVGPIGSSMLSMKAPPPETFRSGRDFAAWLGLTPKDHSTGGRQRLGGITKAGDSILRSTLIVGATTLLRHIRKGRHKPTPWLASLLGRKPPKLVAVALANKFARIAWRLMISGGVYKQPVAAMPT

SEQ ID NO: 405285 - protein, 328 aa, unidentified
MVRFYKAGSTKMTQTTTLTAGIDTSKDKLDIAIDDGTACWHDKNTAAGWRRVAARLAEAGVRRVGIEPTGGYERGVVKHLRERGFTVLVLQPTQVKAYAKMHLRRAKNDEIDAGLIAGCAAGLKPPAIPPDARLEALAGQLTFVEQIEEDMARLKTRLEHVGDARLRGIIKADIAALKMRRAAEMLRIIKALRAHTDLARRYHLVLSVPGIGERTAIAIIIRLPELGRISREEAAALAGLAPYDADSGKHKGQRHIAGGRARLRRSLYAAALPAAFRWNKALIELYARLIARGKCHKAALVACARKLLIYANTVVQRGTPWVESPAAA

SEQ ID NO: 405286 - protein, 385 aa, unidentified
MPQPDDLSRSLVPLEQDSTLVAVIELSQSSWLVAGTVPGVKRQPLKKLDPDEQALLGLLKRWQDEATRAGRTITRIAVAYEAGRDGFWLARWLCSRGIEVHVIHPTSVAISREHKRAKTDRLDTAMLMRVFLGWLRGERGHCGMVAVPSAEEEDAKRPSRERESLVGERTRIVNRMKGALARLGIRGCKPELRSAPKRLEALRTPEDLPIPPNTLEEFRRDLARLAMLREQIAAIEQARLERLEQAPKTGPHAMVRLLASITGVGVETADMLVQEVLSRGLRDRRAVARYAGLTGSPDESGSKRREKGLAKSGNVRVRCGLIQLAWRFLRFQKESALVQWYHARTAQGARKTTMIVALARKLLIALWRMVTMGEVPHGVVLRSLV

SEQ ID NO: 405287 - protein, 340 aa, unidentified
MSTINILGIDIGKFTFHLVGHDSSGREVYRKKFSRPKLIQFLSTIELTTIAMEACGGCHWLARKCQEFGHKVKLIPPQYVKPYVKTNKNDFIDADAIAEATARPTMRFVSVKTESSQVISVIQRIRSSYVKDRTACMSRIGATLLEFGMSFPKSHAKMKVLFQWLAEHGEPIPPMLLLELRDHHDFYLKLNQLILTQEKKLKEIVDHDERAQLLKTIPGVGNLTASRCISDISNVADFKNGRHLAAWLGLVPRQFSTGGKPTLLGISKRGNKGLRELFIHGARAVLVRPEKAVAVFGNWILELLSRKHFNVVVIALANKLARIAWSVLSTKQAFEVRVQA

SEQ ID NO: 405288 - protein, 325 aa, unidentified
MQTITTIGFDIAKSVFQVHGVDAGGQVVIRRQLKRRYVLAFFQKLSPCLVGIEACASAHHWSRELQALGHTVRLIPPAYVKPYVKRQKNDAADAEAICEAVTRANMRFVPTKTPEQQSGLVLHRARHLFIRQQTAVINAIRAHLAEFGIVAPVGRHGVEELLNVVADPNVRGIKEQILEFDRLIRAWHRSNEMSMRLDEAPGVGPVLATALVAAVADPKSFRSGRNFSAWIGIVPKQHSSGGKNRLGNISKQGDRYLRGLFVAGALSVIRYAKIHGTKHRPWLTALLARRPTKVAAIALANKIARMVWAMMARGERYKEPVALAR

SEQ ID NO: 405289 - protein, 363 aa, unidentified
MSEGVYFAGLDVHARKTAAAAVRVESGEVRKAQLSGSSAAAIEWLQALPGEVRAVYEAGPTGFELARSAEAAGIELMVCAPGAIPRQPGDRIKTDARDALKLARLHAAGQLRAVVVPARELEALRDLVRAREDLRSDLMRARHRISKLLLRQGILWTGPGETWTERHLQWLSEVRFQQPVQEALFGEYLAHHEVLLARRERLDRLIGEQSAQGPWAPLVARLRCLRGIETLTAVGLVTEIGDISAFSHPKQLSSYLGLVPSEHSSGAKRRQGSITKVGSSHARRLLVEAAWNYRRAPSVSLTLKRRQKDQPHAAIETAWRAQIRLHRRWAHLDTACAKKRTTVAVAVARELACFVWEVAQQPD

SEQ ID NO: 405290 - protein, 342 aa, unidentified
MSEKRYIGVDLHRKVFTCCIRLENGRQFLSEWRLEQLPQFVKKLRATDEVAVEVTSNTRLFYEAVAPHVARVVVVDPHQFRVISQSVKKTDPNDARNLALYLAKGLLPEVRMKEKQQAQVASLTQTRDRLVKLRTALKNKVNNLLSARGIALEKEELSGEKGLTRVLAMKVEELTRFELQVLVEQIRSLNHSIAELEKVIEREGKKLKGHGNLTSIKGIGSLGASILLSVIGDIRDFSDEGRLASYFGIVPRVHNSNETEHSGHITKRGSKLGRTALVQCALIAKRYSPYLANYYERIRSRRGTGRAIIALARKLLGIIYRTLKNNWVFEDFPNFVLREATA

SEQ ID NO: 405291 - protein, 390 aa, unidentified
MGVIIGMDPHKRSATIEVVDERGAVLSKARFGTDRLGFRDMLAEARRFADRVWAIEGCNGIGKHIAHRLVHDGEVVFDVPPKLSAQVRVFATGNGRKTDPVDAHSVAMVALRAPNLVRVQVDDDLVVMGMLADRRDELGRTRTQVVNRLHRLLLELFPGGAKQFLSAQQARALIATIKPRDLPGKTRRRLVVELIGELETIDRKIKAIKKELTALVSERGSTLLELTGIGPSSAARLLADVGDIHRFADRDRFASWNGTAPLDASSGAQERHRLSRAGNRRINRALHIMAIVQLRHPTEGRVYYDRRKTGGMPSMMAMRALKRRLSNVIYARMLDDQRRHEISLGASPGGQSGSDSVSSAADSHPGIDSSDKPHPGPATTQPRTRVLAAS

SEQ ID NO: 405292 - protein, 401 aa, unidentified
MECHDVPAERPRPAPGQALSRSLVVVALDQNSTIIAVIELSQSSWLVAGMLPGTERQPRKKLEPSPERLLALLHRWRDEAVRAGRTITRIALAFEAGRDGFWLARWLAARGIGAHVIHASSVAVSREHRRAKTDRLDTELLKRGFLGWLRGERGHCSMARVPTIAEEDAKRPNRERDCLVGERTRIVNRIKSTLARLGIRNFKPTLRKAAERLATVHTPEGMPLPPNTLAELQRDMARLGFVVSQIREIEDARQKRLEQQHATGPHAMVRLLARIVGVGVETADLLVHEVLSRPMRDRRAVARYAGLTGSPDESGARRREQGLARAGNARVRRGMIQLAWRFLMFQKESALALWYRARTADSRIGTRKTMIVALARKLIIALWRFVTAGEPLEGVVLRPAS

SEQ ID NO: 405293 - protein, 342 aa, unidentified
MKDTMIGVDLAKRVFQVHGATMRGEVKFRRKLTREQFRAFMAAQAPAVVVFEACGGASYWAREMAVLGHEVRLIAPQHVRPFVKRQKNDAADAEAIVVAAQRPEMRFVTPKTADQQARAVLFRSRERLVRQRTELVNALRATLYEYGHTIPQGIAHIKQIEAILDAPHSELPALVRDECRDLLAQIAEQTARIDERARKIKTLAAETDAARRLQTMPGVGPMTALAVEAFAPEMAQFRRGRDFAAWLGLVPRQHSSGGKERLGRVSKAGQADIRRLLIIGAMARLTARARRSIPEGSWLAKMLGKKPRMLVAIALANKMARTIWAMLTKEEDYRDPARAAAA

SEQ ID NO: 405294 - protein, 356 aa, unidentified
MKREFEEISYIGKNVYIGIDVHKKSYTVVARVGGEIVKKWTTAASPQALAQQILKYFAGANIYTAYEAGFSAFVLHRELEKNGIQNKVVNAAGIEVASNNRVKTDKRDALKLATLLEANRLKGIRIPSEEEEAHRILSRTRKQLVEDRISVKNKIRMKFHQFGVIAANENSTMTHALVEELLKNAPSNELRIAINAYRRIWKSLDEEIKKIEDELKVQAKEDPNEKTYQSVPGVGPQSARVLSNELGNMSQFKNERELFSYTGLTPSEYSSGEKVAKGHITHQGNNHVRGILIEIAWRVIEKDPALGEFFNSLFPRTGKTKAIVAVARKLIGRIRAAFRKREEYQSGYRCSIPEVA

SEQ ID NO: 405295 - protein, 351 aa, unidentified
MDATTVGVDLAKNVFVACVADCAGRIVERREFNRAGFLTWLGTLPAGTVIGMEACGSAHHWGRTAERLGLAPRLMAAEFVRPYRKRQSVKNDRADAEAILVALLSPGMRFIPVKTEAQQQRLAWHSLRVGWVEERTALLNRIRGLLAEFGLIVDPGPKHLRALLAERERDTASPPALRGLIHSVRDQLDALDARIGECDRQITAQQANDPLAKRARDLPGVGLITADAVTASVGDASMFKNGRQFAAWLGLTPSQSGSGGKTKLGRITRRGDDYLRTLLVQGARSVLAATLRKQRRESPDQLTRLQQWIVALNGRIGYHKTLVAIANKHARQLWAVLAKGESYNPQAWQRA

SEQ ID NO: 405296 - protein, 425 aa, unidentified
MNYTQNQKIEQIAETTLVVGVDIGSRIHYARAFDWRGRELSKVLKFANCRDGFDRFHKWIVELQAAQKKDKAVVGAEPTGHYWFTLRDYLEAASIQLVLVNPYHVRQSKEMDDNSQTKNDRKDPKVIAKLVTEGRYGVPYSPKGAYADLRIMSPIRQRTMEQLISCKNRLNRWFSIYFPEYEQVFGSFEAKSSIILLKKACMPADIVELEAEGVNRIWRDAKLRAVGMKRATTLMNAAKVSIGQRQGSEAARMEMELLLEEYEHHKVQYEKVMEKIQELCSKIPESKQMLAIKGIGLITVAGFLAEVGDVRRFDSPKQIQKLAGLALKENSSGRHKGQTTISKRGRARLRAILFKGVIPLIAKNEEFRSIHAYYIGRPEHPLKKKQSVIAVGCKLIRIFYAILTKKVVYDGQKMLEDIHRPLKAA

SEQ ID NO: 405297 - protein, 337 aa, unidentified
MIVVGVDVHKHSLTAVAVDELGRTVAARSGPVDAEVLEWARRLGADRLWALEDCRHVTRTLERTLLRAGERLVRVPPRLTAPQRRRSRTRGKSDAIDALAIARAALQEPGLEGPREGEETLHELKLLVDHRDDLVDERRRAQQRLRWHLHELDPDLHVPLGALDRTIWLDRLSRKLSRREQTVQLSIARELVGRCRLLTRAILALDRELQQRTQTLAPTLTQLPGCGPVSAAKLLGEIGPIDRFRSDAQLARHAGVAPLDASSGKHQRHRLDRGGNRQLNCALHRIAITQGRIHAPARAYLERKQAEGKTRREAIRCLKRQLARTVYTALKTESALT

SEQ ID NO: 405298 - protein, 341 aa, unidentified
MSKVSTIGLDLAKNVFQVHGADASGAVLVRKKLRRDQVLKFLAAQPTCTVAMEACASSHYWAREIAKLGHEVRLIAPDYVKPFVRRQKNDAADAEAICEAAQRPTMRFVAVKSEEQQAAAVVFRARDLLVRQRTQTINAMRGHLAEFGIVAAKGPFHVAKLVAAIEDDRSGIPEMARPILRLLVEQLRSLDERVALLDRELARRAKEDAEAKRLMTIPGIGPITATALAALAPTAQAFKRGRDFAAWLGLTPLQRSTGGKQKLGETSRMGERTLRRLLIIGASAAVRWAMRKGSTADPWLARMLNRKPPMLVIVALANKTARIAWALIARGGTYRAPAAAK

SEQ ID NO: 405299 - protein, 389 aa, unidentified
MDYYCGIDVSLEQLSVCVVDAKGRIVREAKVPSEPEALIAWFRNLDLPLSRIGLEAGPLSQWLHSGMAEVGFTVELIETRHVRDAFKAMPVKTDKKDARGIAQLMRLGWFRPVHCKSLPAQEVRALLTARKLVQAKLHDVEMSLRGILRGFGLKVGRTTSRTFEPRITELVASHPTLMEIANALLSARAALHKEFLGFERRIRSLAKADERSRLLMSAPGVGVVVALTFSSAIDEPERFKRSRQVGAHFGMTPKRYQSGETDVSGRISKIGDRRVRTVLYEAAHIILTMPVKGGALKSWAVRLAARAGKKKAKVALARKLAVILHRMLVRSATRRSSPRRQRWPRAEQEEVYNSGGSKRQPPGARSRRRDDGSDQAETHTVASQDDHAT

SEQ ID NO: 405300 - protein, 343 aa, unidentified
MQTITTIGLDIAKSVFQVHGVDAGGQVVIRRQLKRRHVLAFFQKLSPCLVGIEACASAHHWSRELQALGHTVRLMPPAYVKPYVKRQKNDATDAEAICEAVTRANMRFVPTKTPEQQSGLVLHRARHLFICQQTSVINAIRAHLAEFGIVAPVGRQGVEELLTVVADSNDKRVPEIARACLLAFGAQLRRLKEQILEFDRMIRAWHRSNEMSMRLDEAPGVGPVLATALVATVADSKSFRSGRNFSAWIGLVPKQHSSGGKNRLGSISKQGDRYLRGLFVAGALAVIRYAKIHGTKHRPWLTALLARRPTKVAAIALANKIARMVWAMMARGERYKEPVALAR

SEQ ID NO: 405301 - protein, 330 aa, unidentified
MKNFFIGIDVSKMTLDVALHSKKGNEKQNHLVIENNPNGFKKMISWIKEKKMMPQEVLICMEHTGVYANALVQFLEKKDITYCRVSALEIKKSLGITRGKADKVDAFRIAQYAYEKRESLTPSKLPPQNIIVLKELLTERKGYVCSITQYKQRKDEIAVHQGKKSMKRKNQTIDFLEKKVKEIEDDILKIIQEDPELMKNFAFVISVIGIGFINAVSFLAYTNNFRDFTNPRAYACYISVAPFPYSSGTSIRKRTSVSKIGRLELKGILTMAARSAIIHDPELRRYFKRKFNGKKGPESNYGQVLNAVKFKLICRVFAVVRKQEKYVVKD

SEQ ID NO: 405302 - protein, 455 aa, unidentified
MRKNIKKAIPVRYHDGLSQLRPNAGGIDIGASDVWVDVGNKDAEPVRKFETFTADLNRMGDWLKSCGIQTVAMESTGVYWIPVSQILESKGIEVYLVNARQAKNVSGRKSDMLDCQWLRILHSYGLLPASFRPAKDIGVLRAYMRHRQMLIEYAAAHVQHMQKALTQMNLQLQHVISDITGWTGMKIIRAIVGGERDRRRLAALRDARTKANEETIAKALEGDYRAEHLFALKQSLELFDTYQKQIASCHEQIEQHLKSLATKADSAELQAARKVKKKRRNQPEFSIREQAFRISGVDLTQIHGIDETAALSLIAEIGVDMNAWKTEKHFSSWLALCPNHKISGGKILRRSTRKSANRAREILQLCAQSLLNSHSALGAYCRRMCGRLGKPKGIVAAAHKLAVLVYRMLKFGHHYTDIGQERYEQQYQQRLLKRLARKAHELGFQLVPSPENQVP

SEQ ID NO: 405303 - protein, 452 aa, unidentified
MPAGKDITMHYQKVLKMPESIPYLSVGFDVGADFTWMSIMLPNGILIGKPFKIIHSDPQSRELAISKIKEAQEMYSLESRCFLESTGIYHIPLLCFLRDKGFDCAVINPIITKNSTNMNVRKLHNDKFDSKKAAKVGLDASLKASIVPDDAIIDLRNLVRDYYYFKDLQSAIVLKLHAELKVSFPAYLNVFSKVTTQTSLKLLEAYPLAADMLAAPKDELVEIIRSTARFGETYALARYDAICTAAKDAAVFGRALPSNALRIRLYIKMYREYQAHLDSILEELHQAVGKLEGTPDYDRISFIQTLHGVGFLSAVVLIAEMGAFDLFSSPKKLYAYFGLDPGVNDSGKFHGDRVHMSKRGSSLARRILHMVAINNLKVDKATKTPVNPVIYDYYTRKCASKKKSVAVGAVMHKICNIIFAMLRDNKPFELITPEEHRERYAAEHPESVNPAA

SEQ ID NO: 405304 - protein, 422 aa, unidentified
MLGIGIDFAEEFHLVALGRPGDGIIDVARVDHTPAALEALVARIAALEPDPAEVRVVLETSHGALVERLLDAGYVVVPVNPDLVARRRGPARKKDDAEDARIACLLALDRHASLRPLIPHGELAAELRAIARDDERAARDERRLLNRLRADLIATFPAALAIAGDDLGAPTILRLLGRWPSAAELRSAERSELVAFARGAHHGWPERFADHVEAALAIEQFVARDYLVRAKAATICLAASQLLLLGAQRRAWERRMGEILLGAPRTGRAREPRAGERGERFPGGEIYLSFPGLGDRLAARVAGEIGDHPEMFTSPNGLQCYAGKAPVTRRSGKSELVVSTRLACNGHLRDAVQQWAFCSLLYSGWAREFYDGQVAKGKHHHAALRALGNRWLEILWHCLTRGMHYDEAIHVANRNRALQRAA

SEQ ID NO: 405305 - protein, 397 aa, unidentified
MEQEKHQYQVKRVIGLDVHPECFSAGAVQTSIYKDADSQILWVHNRVDMNDLENWMRKNTEANDLFILEAGSNSFETAARIKSCDRKALVLESYRAGAIGKSYLKTDKEDAVKLAKIYLSGLAHEVWIPDEKTREYREIFASYKKAVKDNTRVRNRIWGWLNEHGIKNNKNISLLDDKRKEWILSCREWTVTQKEIIAVLLADLEYTNNKRNKLVKIIAAEVSTNKDMLNLLRLFGINKITAFALKAIIGDITRFRNPKKLVAYLGLQPKVKESGNSAYSGSITYFGRKDVRAMLVECAHSILRTGSIDNSFAKWGRSLTFRKKGNVAVIAVARKLVVAVWYLLRGFFTQLTEADETLKIKFTKLAIQIGKEWRNVLGYLTISDFVEDKIKLLQAGA

SEQ ID NO: 405306 - protein, 386 aa, unidentified
MNQIIRIGVDTSKSVFQLHGVDAAEQPVLRKQLRRRDFVRFLAKLPPTRIGLEACGGSHHWGREISALGHQAVLLPAQYAKQYLMRGKNDAADAEAICEAMGRPRVQTRFVPIKTADQQAVQMLIGMRDRVIRTRTQLSNAIRGYAAEFGLVTAKGLDKIEPLLARIAGDPGVPELAKELFAAHGVEFAQLKARLREIDARLTAWRQGNELSKRLMEIPTVGPIGAMRLAIKVTNPKAFRSGRDFAAWIGLTPKDHSTAGKQRLGVITRAGDESLRQNLVLGATAVIKQVRKGCPDASPWLVELVKHKPPKLAAVALANKIARIAWKLMVSGECYNPEAGAVRLVPATGSVAPGSRRQGRCAPPSAVALEASLDHARRWRSGLPSR

SEQ ID NO: 405307 - protein, 339 aa, unidentified
MFVAVNEKGQAGEALRVAHDRQLYREFLARLPPHSPIAVEASGSYSWLVDEMERSGHHPKLCNPLEAKRRMGLTKKTDSLDARGLAILLRNGTLPEVWIPPSELRDQRELLRLRIFLVRLRTRVKNRIHATLSRFNVQVPGADLFGVAARRQLGARLPELPVHSREAIEQGLATLDFLETQIESAEDRLEAIMQVSVEADLLKTLPCVGPILSMVLMLEIGRVDRFPTAAHLASYAGLVPRVHSSGGHTRMGQVCGNVNRNLKWAFVETGNLIVLNQRRFAGTHVVRLYQRIKRTRNHQKAVVAVARHLAEAAWWVLTRQEVYREPPGPRQQALSSTHG

SEQ ID NO: 405308 - protein, 409 aa, unidentified
MDLLCRRCAGLDVHQQCVVACARIQDCAPASYETRTFETTTKGLLELSEWLSAHGCTHVAMEATGVYWKPVWHVLEGSFELILANAQHIKNVPGRKSDVSDAQWIADLAAHGLIRASFVPSFATQQMRDLMRTRKQFVREQVRHTQRIQKTLEDANIKLTTMLSDVMGQSGRKILDAIIAGEADPEKLADLTDYRVRASRSAKVEALRGRVTDHHRLLLKLHLAQVDALDASIAAIDKEVERSLEPFRAKVKLLATMPGVSELVAQTIVSEIGDDMTRFPTTGHLVSWAGLCPQMNESAGKRRSTRIRKGAPWLKTVLVQAAWCAVRKKHSYFKAQYHRIRSRRGSKKAIVAVAASMLTSAHAMLSKNVAFTDLGATWFDLRDQTKTVKRLIHRLAEMGVEVEVKEKVA

SEQ ID NO: 405309 - protein, 419 aa, unidentified
MKNNFLSTLFVGIDVSSKTNVLCALDFQGNKLLNLKALNNQPGAKVILDNILDCLNSNSLKYVVIALESTSFYSTHIANYLSSNEELLFFKPFVYCLNPKTVANYRKSFVDMDKTDPLDAYIIADFARCGRITCKPWRGAQFLALQRLTRHRLHLIECITREKAYMVSNIYLKFSELTVLDKDDKPFSNTYGVTSAAILTESLSLDDIAYSSIDDLVDFIREKGKNRFSDPYKTVKLLQKAARDSYRLDKVLYEPLSVAIASSFNVIKAMEDEIKTVDKAIEKTIKGLNTTEYLSLTSIPGIGPVFASGVLAEIGTITSFDSHDALAKYAGLTWRSKQSGNYSSDDTRMTKTGNKYLRYYLIEAANSVKNRVPEYKEFYYKKYGEVTTHQHKRALALTARKLVRLIFGLLTKSQIYSSD

SEQ ID NO: 405310 - protein, 404 aa, unidentified
MAGERWCVTAGVDTHGDVHVAAAVDSATGRLVGTGSFPTTAAGYGALLSWLRSFGDVERVGVESTGSWGAGLARYLHAAGVAVIEVDRPDRKTRRFEGKSDPVDAVAAARAVLSGRATGMAKTKDGPVEAIRVLQVVYQGAVRDRTRAINQFKALLVTAPERLRAKLRSLPFAAQLTRARRLAAVDDITDTETRLALRELAGRIGFLDAQCGRLRVRIAELAAQASPALVGLTGVGPHVAAQLLAAAGDNPQRLTSEAAFAKLCGVCPIPASSGKTSRHRLNRGGDRRANNALFTMVLVRMRHDPATRAYTARRSAEGKTRKEIIRCLQRYIAREVYQALTNPPDDLPTGAALRALRQHQGHTLTVVANALGTTPIRLSTLERGLVHDTRLARRCHTWLIQQAA

SEQ ID NO: 405311 - protein, 330 aa, unidentified
MKLNHVGIDVSAKTFTTIIDHEGERTEAFDLPNDPKGFKKLIRMITKKGFTAQVVLEATGNYSLDLALALHRAKRIEVMVANPRAVALFAGAYLRRSKTDALDANVIVEFSIRMPFEAWKPPEAHCFNLRAISRRIEALTKSATQEKNRLHAAMTFDEMSEIVRNDIEVNIRHLERRIERLRDQARELIREYPDLERAFLHLTSVKGIAQAAGIQLLAELSILPSDMDVRQWVAHAGIDPMQFQSGTSIDKPSRISRRGNVHLRRALFLPALVAAQHEPHVTAFYQKLLRRGKTKMQANVAVMRKLLHAIYGMLKHDRDFDGEKFYVLGA

SEQ ID NO: 405312 - protein, 363 aa, unidentified
MSEAICFAGLDVHARKTAAAAVQVGSGEIWKAHLPGSSAAAIEWLRSLPGEVRAVYEAGPTGFELARAARAAGVELMVCAPGAIPRQPGDRIKTDTRDALKLARLHAAGQLRPVLVPSPELEALRDLVRAREDLRGDLMSARHRISKLLLRRGLIWAGPGETWSQRHLRWLGTIRFGEPLLEVVFGEYLAHHEVLLARRDRLDGLIVEQSVQGSWAPLVARLRCLRGVDTLSAVGLVAEIGDISAFSHPKQLASYLGLVPSEQSSGSRRRQGSITKAGSTHARRLLVEAAWHYRRRPGVSLTLKHRQRGQPPGAIETAWRAQIRLHRRWAHLDAARAKKRTTVAVAVARELACFVWEIAQQPD

SEQ ID NO: 405313 - protein, 328 aa, unidentified
MTKQRFYVGLDVGQSEVVMAMPGQKPCSFAFTKAGVKSLIQKARGAASDNILHFCMEATGVYSEALAVQLVTIPEVVISIVNPAQITAFAKAQLRRTKTDQVDAQVILAFAQSQHPHPWQPTAKPLRQLRQLVAQRDALQDMLRQCLNRQHTQTYVPDLPVEVKKSQATMVKKLQIEMARIEKAMNTLCQQDPQISVHMQLLCSISGVGIISATHVLAYGHSWLTDRTTRQLTAHAGLAPAQKQSGTSIHGKSHIAKQGNSQLRKALYMPTLVAVYYNPVLKAKYQSLLAKGKPKKVALVACMRKLLIIMHAILTTQKPFNPNLNPLT

SEQ ID NO: 405314 - protein, 330 aa, unidentified
MQHEPVSDRLSQPVAGIDVAKATLEVFIDRSLAGQPPVRLAMANTEQEIQKLLIQLREHRVRLVVMEATGRYHRRLAGVLLCAGVPTKVLNPQRARDFAKSIGKLEKTDRIDAPVLAHYARGVDPTPDAAPDAKQVELADLISRRKALVQQRVAETNRSHEQMPKLAARQSKKMLRLIEQQIEDLDRAIARQIESNDDWHNKSQIIDSIPGIGPDSANQLVAVLPELGKLNRQQIAKLVGVAPLARDSGPFKGQRTIGGGRAGIRTMLYMLAHNAVLYCPRFKQFFKQLRANGKAHKVAMTACMRKLLVTLNQMVKTNTQWKQSVIAEAV

SEQ ID NO: 405315 - protein, 415 aa, unidentified
MSHPLLVGVDVHRQTNTVCLMDASGHVLGSRRTIDNNRPGTAVLVDQVAQKMAQGDFDAIQIAAEATGWYWWHFFQTLARDPTLQQWSLQLYPLNPRLTANFAKTYVDRDHTDVGDAFVIADRLRMGRDLPPPYQLDARYLALRLLTRYRFHVIHTLAREKAYALAILYLKASEYGRLKPFGNLFGAASRAVLQEFASLEAIAAMPFDELAEWLDVRGKRRFADPQDNARTLQQVARDSYALPDALQLPVHQILGWSLQHITFLEGQIKRLDSAISEQLTNIPHTLETIPGIGPVFAAGIVAELGDIARFEFDQAKVAKFAGFKWKKHQSGDFTAEETRLTRTGNRYLRYYFCEAANAVRMHDREYAAYYERKYREVRQHQHKRAIVLTARKLVRLVVRLLTSNQPYQVRRPASR

SEQ ID NO: 405316 - protein, 345 aa, unidentified
MTIVEARAITGGVDTHADVHVAAALDPIGGLLGVQEFPATAGGYARLLGWLGGFGTVALVGIEGTGSYGAGLARHITAVGVRVVEVDRSDRQDRRRQGKSDPLDAVSAARAAQSGRARGAPKGRDGAVEAIRALMVARRSAAGERTRTINQARALILTGPDDLRARFAKHTAAALIAGLASLRPRPGDVAGQATRVALRELGRRAVFPDGQLERLDELIIPLVSARAPGLLALYGIGPHTAALLLIAAGDHPGRLRSEAAWAHLCGAAPISASSGKVTRYRLNSGGDRQANHALWRIAFTRMGSDPATRAYAERRTAEGKSKAEIIRCLKRYVAREVCPYLRPAS

SEQ ID NO: 405317 - protein, 446 aa, unidentified
MKKSSRMSVIHPHAAGVDIGAEFHVVAVPPDADAAPVRTFQRFTGDLHRMSDWLKTCHITTIAMESTGVYWLPAFEIPEAAGFNVILVNARDAKNVPGRKTDVNDAQWLQKLHSFGLLRASFRPEHDISVLRSYLRQRERLTEYRAAHIQHMQKALMQMNVQLHHAVSDITGVTGLSIVRAIVSGERDPSVLIQYRDVRCKKTPEVLQQALTGNWQPEHLFAPEQSVAFFDFYQEKIRECDDQIETSLLQLSTGTEEPEGVLPSARHRTKQPNQLSFDVRPLLWKITGADLTQIHGFGPYLALKFVAECGTDMNRWPDASHFTSWLGLSPGNKISGGKVLSPKTRRSSSRIAAALRLAATTIGRSDTALGAFYRRLSSRIGKAKAVTATARKLAILFYNALKYGQKYVDPGADYYEERYRNRVLDGLKRRAKSLGYSLQQDPELCV

SEQ ID NO: 405318 - protein, 412 aa, unidentified
MKQVLDPVAGLDVHRDNVVAAVRMVGGDGEVTFTKRKFPTTRRGVKELAAFLTEVEAFRVAMEATGVYWKSVYYPLEGLFVQLWLCNAQHVKNVPGRKTDLSDAEWLADVAAHGMVRPSFVPPPEIRELRELTRYRKTQIDARAKEIQRLEKTLQDAGIKITSVASGVWSLSSRRIVEALIAGERNPGVLASLAVGKLRPKKAQLEEALDGWFGAHNAFVCRQVIDHIDFLDDSIAKLSEEIAARLLPFEAAVSLVCSVTGIGEASAQAIIAETGVDMSRFPTAGHLCAWAGVAPASHESAGKKRPAGTRHGSTWLRRVLIEVARAAARTKGSYFTAQYSRIARRRGSNKAAVAVANSMLAVIWYVLTNGCFYEDPGADYFERRHDPAVEAKRLQARIEKLGFDVTISPKAA

SEQ ID NO: 405319 - protein, 309 aa, unidentified
MKEQVVYLGVDVAKAYLDAAMESEKRRLANDGTGHRQLINWIKQIEAQVQVICEPSGGYERMLIQALVGAQVKVSLVQANRVRQFARAAGILAKTDSIDAEVLCAFGEAMRPQTLSASKLAQEQLRELESQRRHLSRLLVMEQNRGARLGDSSVRRLNRSLNKQIQKQIERIDLLINEHIAGSQELSAKAHKLTAISGVGPRTAALLLAQMPELGQLNRREVAALVGVAPFNRDSGKWRGKRTIFGGRRHVRHGLYMAALVAARHNPILRAFYRRLRAAGKPAKLALTATMRKLLIVLNSALKPDPLYA

SEQ ID NO: 405320 - protein, 343 aa, unidentified
MKRPYTVGIDLHKHSFTYVMLDPRGQISRREKVAIHAESVERFLQRLPQKSETTLEATSSWGWLADALQDRGHRVHLAHPLKVKVIAECRAKTDKVDAEALARLTAVGWLPEAYLAPAAVRQYRRLLRHRAALVSQRTQVKNRVRALLAQYPFVEVDLSRAFSQKSRRALRQIQLPQGDQRCLDSLLDTMAALDERIQEAEGWIEEQMPDNAQADRIRQIPGIGLILAHTILSEIGDIQRFKSAKALCSFAGLVPTVRASAEHVFYGRLTKQGSRWLRWALIEAAVHAAGKVPQWKNSAESLRTRKGAKAARVEIARKIAKAIYHMLKENRDFDTQQPGSACR

SEQ ID NO: 405321 - protein, 338 aa, unidentified
MDNCAECGIDVAAKELLAVLRRQGKSEAERRFPNTPSGHKELKRYLTRAAGRVRVCLESTGLYGLDLALYLQADSRLEVMVANPRAVKDFAKALLERSKSDPIDAWVLAEYAARMPFRPWQPPSSAALSLTALARRIHALTETATREKNRLHALSVTDTSLKIIVTELKRSLQWIERSQARLRHEACKIIAADARLQRRFQLLLSLPGVGETSALQLLGELALIPADAEVRQWVAYAGLDPCECSSGSSLRKRPRISKVGNRHLRRALYMPALSAARHDAAFAAYYGGLQERGKCKMVALVAVMRKMLHATFGMFKHDALFDGSRVFGRPTAAIGAAA

SEQ ID NO: 405322 - protein, 329 aa, unidentified
MTNDSELVFVGIDVSKDTLELALDDKGKTHSLSNDELGIESVLKIIKAARSEPGGVGGVVFEATGGFEREAAVALCSAGLPVMVVNPRQARDFAKAMGYLAKTDAIDARVLSHFARVLHQSERREQLLMRLPNAQQALLQALIVRRSQLIQMRVAEDNRRSMSHPTQRKSIDAVRKVLNKQIAGIDLDIDAQLKDHFAPKLALLKNCKGIGPSTQACLMGALPELGALSHEQISKLVGVAPLNCDSGKHQGKRSTWGGRADVRCALYMAALSAVRYNPVIKVFYERMLSKGKPKKVALVACMHKLLIILNAIMKSGEPWNDNHFMAKIA

SEQ ID NO: 405323 - protein, 307 aa, unidentified
MYDNKRESFEVKSDPVEFEKKIKPYLKKFKKSDMLIIMEHTGVYHLKLANYLYENNYQVAVVNPFSIRKFMEAKMTRVKTDKTDSYFIAEYGRTFFDGELYKPKPDVEKEIEVKLKILEDLQQQLTMLKNKRESLSHVPMKRLKENLEYYDELIRKIEKSIKELEKEIKELSKKNFQEEYKLLKSIPGVSDRVIGVVIAMFGGFKRFKSVKEAASYAGLNPSPYESGTSVKKSGSIKKMGNPYARKILYMAALSAIRFNKYCRELYERLVSKGKAKKLALVAVAHKLLRQAYGVLKNRRPFDENFCT

SEQ ID NO: 405324 - protein, 365 aa, unidentified
MTRYVGLDAHSKRCVYVIQDENGQVIGEGSVPTTIEGLQLLRARYELPAGTCVALESGTMAFFVARGLARLGLDPRVVDAHEVRAKALRPNQKSDRRDALELCEGLRRGSYRAIVHVPPEPIERLRETLGRRRHFVRIKTMQVNAVKRLLRAAGLQTLRRHLQADSGWEKLLAAVRVDASLYAFCVTHRAVWRCAHEQILTLEDSLRAQQQPFQHDVDRLQTVPGVGPIVALTVLAVFSDVRRFPTAKHAASYAGLVASTFDSGERVQHGHITRRGSSELRSMLCEAAHHAWRPSNPLNPYFARLCVRRGYKMAVVAVAHRLCRILYAMLRHGTDFDLTQLGVEQGHFERTTVHHYRRKDAMASA

SEQ ID NO: 405325 - protein, 381 aa, unidentified
MEDTTRYFGCDVHKETLVIAIAQPGREQAHAIHRLTNSPESVRRFFARAKRQGDLSVVYEARPCGYALYRQLTRMGIPCQVAAPSLLLAAPGDRVKTDRRDAVRLAEGLRAGQITAVRVPDETDEALRDLSRARGTARQDVTRIRHRISKLLLRLDQRPPTRMTAWTQRYRRWLERVELGHPALAIVLAEGLVQLAEAEARLARLERALTRALAESEHAELVSAYMAMRGIDRVTAAVLVTELGDLTRFATPAQLMAYVGLPPSEHSSGARRRQGRITRTGNSRARHAAVEASWHYRYPPRRSARVAARQVGVPPEIVAIAWKAQHRLHQRYRDLSGRGKPRGVVIVALARELLGFLWAIAWQVRRLAERDQAGDLAATGD

SEQ ID NO: 405326 - protein, 340 aa, unidentified
MSLYGGIDLHANNSVVVLINEQDEVLYRKRLSNELSTILEQLAPYQTTLKGLVVESTYNWYWLVDGLMEAGYRVHLANPAAIQQYDGLKYTDDHSDARWLAHLLRLGVLPEGYIYPKAARAVRDLLRKRAHLVRQHTANVLSVQNILVRNTGTRFSLKRIRELTKQELEGVLPETAHVLAITSSLAVLDCLRHQIKALAKSVHQRLHHTPAYEQLLTVKGIGPILAQTITLETGDIHRFPTVGHYASYCRCVASTKISNGKRKGQGNVKNGNPYLAWAYMEATQFALRFHPSAQRFYQRKLAKSHNNTPLARKTVAHKLARACYYIMRDLVPFDAMKAFG

SEQ ID NO: 405327 - protein, 351 aa, unidentified
MMIIGVDYHPSFQTIAFLIEETGECGEQELNHSDGEAERFYRDLQQRGICVRVGMEATGYSRWFERLLAELGYEVWIGDPAEIKTKRVKKQKTDREDARLLLRLMRENNFPQIWVPGPENRDLRQLLWHRHRLVQMRTRIMNQLQALAMNEGYRWKKKLFSEQGRAQLEKLPLAPWASRRRQELLELLDRMNPTIEELTAAVEREARKRPEVLRLMTHPGVGPLTALAYVLIIGTWERFPCGKQIGNYVGMIPCEGSSAGKQRLGHISKQGSSLLRFLLVEAAQAAARSNPDWRRRYVHLAMRRHKSIAKVAMGRRLAVRLYWMWRNGCEYSPSLEFGSYAGQLGTGHGVK

SEQ ID NO: 405328 - protein, 290 aa, unidentified
MPHVTSIGLDVHARSVAAAAFNPFTGEVVHRDFGTDAAEIAEWALGFEGPRACYESGPTGFHMARELRALGLDCAVAAVSKMQRPAADARRKNDRRDAEFIARMLATHNIVEVPLPDAAVEAARDLDRALDDATVEYRRARQRLNMFLIRLGHVWDERNADGARKKAWTRAHWRWVSEIRLEGPQRDALEYYVTAARCAESDRRQLERRVVALAGTDRWRATVEALSCIKGVDTLTAFRLAAEAGSFSRFRSAPAFASWCGLTPSEHSSGESERRGVSATVKTTNFAIAP

SEQ ID NO: 405329 - protein, 340 aa, unidentified
MIGVDLAKSVFQLHGATMTGHVKFRKKLSRQQFRKFKTDHPSASVVMEACGSAHYWAREMTHLGHEVKLIAPQYVRPFVKRQKNDVADAEAIVIAAQRPEMRFVEPKCEDQQARAVLFRARERLVHQRTELVNALRAVLYEFGKIVPQGIRHLKRIDAMPEDPSSSLPMLVCEECRDLMAQIAEKTARIVAKTKKVKELAEQTVMARRLQTMPGVGPMTALAIEAFAPDMKIFRRGRDFSAWLGLVPRQHSSGGKERLGRISKAGQTDIRRLLIIGAMSRLNWMGRRSIPEGSWLAEMLSRKPRMLVAIALANKMARALWAMLTNNEGYRDPTFAKAAGA

SEQ ID NO: 405330 - protein, 350 aa, unidentified
MQDVSAASVYLGVDAHSESCTLCAVDQQGKIIMRRTVSTDTRQLRAAVRELPESTWAMIESSSVSIFVRDALASVMDRVIICETRENRLIAKSGDKSDDKDAHRLARLLRYGEFKEVYVPPRSWQEIRELIHAYQKVVGDVIRAKNRIRAKFARYGVRITDSAYDDGRQDALKKLNRPALKPVFNAMYGILDAAKEAKDDLDHALRARLSQTKEYRLLKTIPGVGPVCAAIMVAIIVDPDRFPNKKHLWSYAGIGVSEDSTGKTVRVKGMKHYNRLLKYAAMMAAQCAIRGDNRFAHLYQTLVEKFADPQKPKKAAAMAKKMVARGILAAALAMWKTGTAYNENALAKSA

SEQ ID NO: 405331 - protein, 446 aa, unidentified
MRTADWSLRARGTTYNLKRRLLPGTRSKLMIQAVVERCAGIDVGKTFVVVCVMTGAANEEPHVERRRFGTFNEDLERLRLWLKDERCTHAVMESTGSYWKPIFNILEESIEVILTNARDVKARKGHKTDWKDSWWLAHLLRHGMIRPSFIPERGIRELRDLTRRRKQLTYEATGVKNRISKVLEDANIKIGSVLTDIFGVTGRAILEALLDGNMNPSEMARLARKSAKRKIPEITASLTSHRLTEPQRFLIRQSFRHLQFLTSCIEELEEQIRRRILSVPEYREASSLLQTIPGIREDAAAAIIAEAGVNMGQFPSAKHLSSWVGLCPGNNKSADLEKAGPTTKGNAWLRALMVECAWAAAMKRGSYFRSRYQRLLPRTGKKRAVVAVAHSLIKLIYEMLSTRTPYRKAAEEVEYERTRMQYVRHHLKALARLGYIVPELSSPPSG

SEQ ID NO: 405332 - protein, 364 aa, unidentified
METVYYIGMDVHKDSVRIAVLKDSETKIEFERTVENDTAAIVRILDGYVKKGTVIAAYEAGCLGYTLYRTAKAKGIDCRVLAPNKVVRSGSDKIKTDKRDAILIARMLKHNEGESIHIPTEEDEATRDLLRCRSDLKEDMKRAKQRLQKFFLRLGFIYDSDRYWTARHREWMKTLVFANAAQTATFEQYYTYIESLEQRIDRIDATIIETAQSAPFKERVDELRCFKGIDYIVALSVVCEIGDFRRFRNAESFMAYLGLVPSEYSSGGKRKQGRITKTGNSHLRKLLVESSWHYRHRNAVSKRLAERRQGMDESLILYADKAQARLHSKFQKLVDRGKSVQVSVTATARELAGFIWGTMNHAYC

SEQ ID NO: 405333 - protein, 402 aa, unidentified
MKVSGLDVHKDIIFCAINDGKSYSGVKEYDSTTNSIRQMGEYLKKEGVQQIAMESTSIYWIPVWDILEELGFDLILVNPFLIKQMPGRKSDIKDAQWIANLLQKGLLRSSMIPCPTIKELRIYTRKYVRLQQKAIQILTEMDRIMVTANIRISSCMSKLTSKSVIQVIEALIRGETNPDNLVKLVYGNTKNKQSGKLREALTGNVKDHHRQSLKWTKELYDLHQKQIQECLFCMEKICQEHYSIEIALLQSLPGISKVSAMCIIAEIGVDMSAFESSGKITGWAGLRPRNDESAGKFKSKAITKGNKYLRSILVLVAWAASRTKGSYFKEKFNRLALRKSNKKAIVAIARKMLVIIWNMINEKKPYNPTLVHIYDPVKVERSIAYHQKEIEKASKLLPKKVV

SEQ ID NO: 405334 - protein, 321 aa, unidentified
MDVLYPRCAGLDLGKDALVACVRIHGRPVHQEVRTFGMTTRELLALAAWLAEHGVTHVAMEATGTYWKAVWYLLEETFTLTLANAAHIRNVPGRKSDVKDAEWIANLLAHGLIRGSFVPPAPMQEVRDLTRTRKQLVREIAQHTQRIQKTLDTGNLKITGLLSNVLGVSGRAILRALIAGQTDPVQLANLARGTLKNKRSELVEALTGQVTPHQRWLLKLHLDLIEGLEGAVAEIDTHLGEALAPFREAVERVDAVPGIDTVVAQAILGEIGLDMSRFPTHQHLISWACLCRRLDESAGKRKSTRTRKGACWLKTVLVQAA

SEQ ID NO: 405335 - protein, 323 aa, unidentified
MNKDIKYFGIDISHLVFDVTDSDGNYYQFKNNVSGFKKFIKLLGPNSHCVMEATGYYHYQLTYYLFENGKIVSVENPLSVKRFIQMGLSKIKTDKSDSKLICAYAEQVDLTLWKGSSKAVQESLQIVRALSVYTKQRTMIKNKLHGESVLGEPSKAVVKSLKRSLKQLDKEMKTLKNQLLIIVKESHQDLFARIKTIPGIGRKTAIMLIVLTGGFERFSSAGELCSYAGLTPMVRQSGSSVKSRPRISKMGNQKLRNLLFMCSFTACKYNKACRDLYERIVAKGKSKKLALIAVCNKLLKQAFAIAKSGLIFDQKYKSTLVKN

SEQ ID NO: 405336 - protein, 350 aa, unidentified
MEYIAFDAHKKYTVASVEDRGGRILREVRVPHRRETIGQFLAQWTLGSPVAVETVGNWYWLVDEIERAGMQPRLVQARKAKLMMGLVNKTDKLDARGLNHLQRTGTLPTVWIPPGELRDQRELPRTRMVFARERTRLKNRIHATLAKYALSVPDVSDLFGRQGRAVLTTRLAELPPHTRFATEQLLVQLRGVEEQIDHCETRMRQTFQQTPALEWLMTLPGVGLILGLVILLEVGDVRRFPDAEHLAAYAGTTPQVHGTGGKIWMGKLRTDVNHYLKWAYLEAASAISTHRAHWPTRHVVRLYERVRARKGHEKAIGAVGRHLAEATYWMLTKEEAYRAPQRHPSASTKA

SEQ ID NO: 405337 - protein, 460 aa, unidentified
MTPRKDHFPHPGPRPRRRLTLRVTNPDAAGIDVGADAHWACVPADRAAEPVRRFGTCTADLEALAAWLQACGVTTVALESTGVFWIPLYELLEARGLQVLLVDARQVARAPGRPKTDAKDCQWIQRLHSYRLLSAAFRPQDRVVVLRAYLRQRAMLVSYAGQHIQHMQKALEQMNVKLMEVVSDITGVTGMGIIQAVLGGQRDPQQLAKLRDPRCKESEATIARALQGTWRPEHLFALRQAVALYEFYHRQIDDCDRAIEAHLQTFADRSGGKPLPYRPRRRKREANEPRFNARARLYGVCGVDLTAVEGLDETTALVLLSEIGTDMSRWPSLKHFCSWLGLCPQHKISGGKVLSRRVRRGSSRAKRALRLAARSLHQSKSALGAFFRRIKARHGTPLAITAAAHKLARLVYSLLKHGTDYVAQELAAYEAKYRERKLHGITRQARELGFALVPVAAAEG

SEQ ID NO: 405338 - protein, 367 aa, unidentified
MENNITVVGLDVHKDTVVGAVLPARTENVKDIFTIENTPKALGKMLGKYEGRGSITFVYEAGPCGYDIHRQLTQKGLKCVVIAPGKIPVKAGDRVKTDRRDAEKLARLWRAGELTEVKVPTVQEEACRDLVRVREDALEDRQKARHRLSNFFLRQGRVFREAKHWRSAHEAWLKTQKFEPLELHETFEAYLRGKQEADERLRSLTSRVEEMASQEPYKKLVKHLRCLKGVDTLSAMTLAVEGQDLRRFESARNFMGYAGLGICESSSGGKIRRGGITKTGNAHLRRILVESAWSYRHGKSVGVVLEKRREGCPVEILKIARRAQDRLYKKFLKMTQRNKPIQKVVVAVARELAGFVWAIAQETTGMV

SEQ ID NO: 405339 - protein, 348 aa, unidentified
MRFYTKSHKYYCGIDLHTKMMYVCIMDADANILIHKNISTSSKAFLALIKPYKGDIVVGVECMFSWYWLADLCEQEGVEFILGHALYMRCIHGGKAKNDKFDSEKIAHIILGKNFPLAYAYPAELRPVRDLMRRRSHLVRIKSEIQSHISITNYQYNLAPFEKNIVHKANRASIAEHFQNSSVRLNVETDIAVMDGLHDQITNLENHIIKHAKHYDGRMLYRLKTVPGIGDILALTIMYEVLSVERFPTVQKFCSYSRLVKCANESAGKKAGSSGSKIGNAHLKWAFSEAAILFIRGNDQAKRYVEKLTKKFGKGKALSILSHKLGRAIYFMMKRNDVFDMKYFFLTS

SEQ ID NO: 405340 - protein, 356 aa, unidentified
MLYSGIDLHKRLIVICTVNTEGSVVARARMKTEPDAVVTYFRQWTEPHHAVVECTSNWYWLCDLLRSLGIIAVLAHAKYLKAISYAKVKTDAIDAHTLAQLLRMGFVPEAHQLPPEYRAMRDLLRQRMVMEHKRTNLMLRMTSMLAKFNITDLPMGPLQSGFADFLAECAIPEQYHMTILMYHQQCLVVADHKKQLERYFKTQLRPTATLQLLVSIPGIGDITGAIIAMETGDVNRFADAKHYCSYCRLAPGAKDSGGKHSHRSGSKDGNQYLKYAFTEAAIKAMMYYPEIKRFAAQLEQRSNATIARTVVAKELARIVYYVLTRQHPFETFKGMRVTKRHDWPRTCKPARITGDR

SEQ ID NO: 405341 - protein, 349 aa, unidentified
MRFYNGQHRHWCGIDLHARTMYVCILDAEGQVLVHKNLRTTPEAFLDVIAPYREDLVVAVECIFTWYWLADLCAREGIDFVLGHALYMKAIHGGKAKNDRIDALKIATLLRGGMLPQAYAYPAGMRATRDLLRRRLHLVRKRGQLLAHIQMTAHQYNLPPLGKRIAYPANREGVAEHFENRAVRKSIAVDLALLERYDALLSELEADLVRQAKQHDPQVFQLLRSVPGIGKVLALTILYEIHDIRRFDRVQQFASYARLVKCAKESAGKTYGASGAKMGNVHLKWAFSEAAVLFVRHSPEGKKLRARLEKRFGKGKALSILAHKLGRTVYFMLQRGKAFDRMRFLATLN

SEQ ID NO: 405342 - protein, 327 aa, unidentified
MDQRILGIDVSKDTLDVVLWDERGWRHQVFANTPEGFVRLSHWLTKQEAGFVHACLEATGQYGEGVAEYLYAAGHAVSVVNPFRIKRYGESKLHRNKTDKADASLIAEFCLKENPPLWQPLPEHVKHLRQMVRRLDDLQRNYQQESNRLQSGVNNEWVVADLKDHLQELHMRIQALKAAIQQFVTETPELKHQVDLLVSIPGIGKLTAARLLAEIGDIHSFEDAPQLAAYAGLNPKGARSGSSVKKKTRISKEGRAFLRYILYMPALVARRCNPIIQAFCARLAQKKLPEMAIIAAVMRKLLHLVFGVLKNQQAFDPFFLQRKVFAS

SEQ ID NO: 405343 - protein, 413 aa, unidentified
MELLHPCCCGLDVHQQSVVACLIQTDPDGHRTKEFRTFGTTTADLLQLADWLREATCSQVAMESTGVYWKPVYNVLEGQCTLLVANAQHVKGLPGRKTDIQDCEWIADLFQHGLLRPSFIPDRAQRELRDLTRTRTTLTDERSRTVQRLQKVLEDANIKLASVASDVTGVSARQMLAALVAGTTDPATLAELAKGRLRTKREALARALSGRLREHHRSLISMHLEHIDFLDEQIAQLSERIADQLRPFESILLRLQTIPGVGRRIAEIIAAEIGCDMSHFPTAGHLASWAGICPGNHETAGKRRSGKTRRGSKWLQRALYEAAQAAGRSKKGGFLARQYHRIRGRAGRKVAAGAVAHTILITSYYLLTRHEVYHDEVPAQFQQRHHDHLRDRAIKQLQALGYEVSAVPKTSAA

SEQ ID NO: 405344 - protein, 431 aa, unidentified
MEQKRHPYLSVGIDIGADFSLMAIALPTQEIMGKPYKILHSNNRSVQGAVERILSMEQAYELPVRVYMESTGIYHLPLYHRLKNAGLDVYVLNPLVTHANQNINIRNIHNDKLDARRIALLGLRPDLKTSIVPADDVAAVKALLREYHAMKKETSMYICRLKNQLRQIFPQYLPLFSKVNGKASLEVLSHYPSPSAVLSAGADALAKLIQEASGKGRTMAEKKAEAILSAARESLSFGHGNSGITFLIGHYVEMIRILDEKTAAILKQIKRSVQEQPDSLLARQTRLLESIPGAGFLTAVTIVCEIGDFRAFRRPKQLYSYFGLDPAVRQSGNSAGANLRISKRGSPYARRCFYILALQSVSLRKNGEPKNHVLRTYYLEKCKSKAKMTALGAIMHKLCNIVFAVLRDERPFVLISPQEHRQNYLSLPKAA

SEQ ID NO: 405345 - protein, 320 aa, unidentified
MNQALVFVGVDVSKASVDVALRPGDERWRLARDDEGARDLVARLLALRPTLIVVEASGGLELPLVAALAAEALPVVVVNPRQVRDFARATGKLAKTDALDAAVLAHFADAVRPALRPLRDAETQALTDLMARRHQLIAMLVSEKNRRGVASAAVLPRLEAHISWLEDELRALDVELRQTLQRSPHWRERDELLRSVPGVGEQLSLTLLAHLPELGNLDRRQIAALVGVAPFNRDSGALRGRRTIWGGRARVRGALSMSTLVATRFNPVIRDFYQRLLAAGKPKKLALTACMRKLLVILNAIVKHHSPWRDLSDQVATPSS

SEQ ID NO: 405346 - protein, 341 aa, unidentified
MDYYAGIDVSLEQSSVCVVDGTGKIIRERKVASEPDALTAWIGSLEFAVSRVGLEAGPLSQWLFMGMKQAGLAVELLETRHVRDAFNAMPVKTDRNDARGIAQLMRLGWFRPVHCKSISAQEARAMLTARTLIQSKLHDIEMSLRGTLRGFGLKVGKTTPTRFAGRIQELVAGNATLQGIAESLLTARAVLLREFNGFEKRLRLMAREDEDAQLLMTAPGIGAIISLTYAAGIDDPARFKASKQVGAHFGMTPKKYQSGETDITGRISKIGDKSVRTALYQAAHIILTRPVKASALKSWGMRVAKRAGMQKAKVAVARKLAVILHRMLVDRKPFAYAATAA

SEQ ID NO: 405347 - protein, 358 aa, unidentified
MNEITTVGVDLAKEVIAVCTADRAGRIVFTRIFRRDAFATWAAQLPPCVFGIEACGAAHHWARWLRSHGHTPRLMAAEFVQPFRKSRAAKNDRNDAEAVLTAVRQPNMRFVAVKSVEQQACLSWHRMRQGWSEERTGLINRLRGLLGEFGVWRGRSAAILTRALPGLEHDEALPLMVRRLLGEAGAHLARLDEAIAGCEKEIKTHIKDNTAAEHLSAINGVGPLTVAAVLATVTDARDFKNGRAFAAWQGVVPRQHSSGGKARLGRITKHGDAYLRGLLTQGARSALQATLSKPPQSLTRLQKWILQLYLRVGYHKTLVAIANKHARMIWAILAKGEAYDPDAWQRRARTSTPASQPG

SEQ ID NO: 405348 - protein, 310 aa, unidentified
MDKVVVGIDVSKDWLDVHVAPSGEHFRVGNDHACVEALIARLSSHGPALVALEATGGYEHVAVAALSAAGLAVVVVNPAQVRAYANALGKHAKTDPIDAAVIAAFVEAAKPDIRPLKDEAARAFGELVTRRRQIVQMMVAEENRERMAASPPARKSIRRVLTALRRELESLDADMDDRIRKSPLWRVRERLLTSVPGVGPAVARTLLAHMPELGSLDRRQIAALAGLAPWTRQSGKWKGRSFIGGGRSNVRSVLFMAALVASRHNAVLKAFRDHLVAAGKPKIVAIVATMRKLLTMLNAIIRDQRPWQNT

SEQ ID NO: 405349 - protein, 350 aa, unidentified
MIIIGCDYHPSFQQIAFVDTETGELQERRLQHREEAEKFYRDLAAQGVKVRVGMEASGHARWFERLLSELQFELWIGDAAEISAKRVRKQKTDRQDAQLILKLMLKDDFPQIWVPSWENRDLRQLLWHRHRMVQARTRMMNQLQAVALNEGLRCKKKLWREAGRAQLEAFKLAPWASQRRSDLLELLDRLNPTIAKLTQAIDWEVEKCPAARRLQTHPGVGPLTALAFVLIIGKADRFQCGKQIASYLGLVPLEKSSGNQRRLGHITKQGNSLLRFLLVEAAQVTVRSLPEWRSKYCHLTLRRGRKIAKVAMARKLAVRLYWMMRKEWDYEQLRKFGSYAGKPGHRDGVK

SEQ ID NO: 405350 - protein, 354 aa, unidentified
MIIIGCDYHPGFQQIAFVDTETGELQERRLEHREEAEKFYRDLGAQGASVRVGMEASGHARWFERLLSELRFELWIGDAAEIRTKRVRKQKTDRQDAQLILRLMLEDRFPQIWVPNWENRDLRQLLWHRHRMVQARTRIMNQLQAVALNEGLRCKKRLWRDAGREQLESFRLAPWASRRRRDLLELLDRLTPTIAELTQAIEQEVEKCPAAQRLQTHPGVGALTALAFVLILGRADRFQCGKQIASYLGLVPLEDSSGQRRRLGHITKQGNSLLRFLLVEAAQVTVRSDPEWRSKYFHLAMRRGRKIAKVAMARRLAVRLYWMWRKGWDYGQLTKFSSHAGQLGHRDGVQSNTE

SEQ ID NO: 405351 - protein, 342 aa, unidentified
MDFIGFDLGKVSSQVCILTEDGELIERRIKTDREHISELLGSRPPARLLIEASTESEWVARHLEELGLEVVVADPNFASMYATRSRKVKTDKRDARTLAEACRLGAYRPAHRTSDRQRHVRAQLAVREAMVRTRSRYISLISTLLRRDGLRVEPGHSASFLKRLECVTLPDSLREEIAPLVVLLQGLNEQIKAADERLAALAKEDEVVARLCTAPGVGPVTAASFVSTLDEADRFNGPKQVRAYLGLVPSERSSGERQQRGHISKAGPGRARYMLVEAAWTILRRRSPANVALHEWAAGIAARRGSRVAVVALARELAGILYAMWRDGTQFEGYAGPAPAAA

SEQ ID NO: 405352 - protein, 376 aa, unidentified
MSKIRFVGLDVHAETIAVAIAEAGGEVRAHGVIPNRLESIRKLIGKLGPVEQIKACYEAGPTGYVLYWQLTKLGVVCDVIAPSLVPTKAGDRVKTDRRDAEKLARCYRAGELTAVWVPDAAHEALRDLMRAREAAKKDQLRARHRVGKFLLRHGRRPEGLKAWTKKYLEWIKTHVRFDQPALEATLADYLEEVDHVAARILKLEKAIDEAVRKAPPEIRAVIEALQALRGVAQTTAATIVSELGSLSRFRSPRQLMGYSGLVAREHSSGNRVRRGGITKTGNSHLRRVLVEAAWAYQHRPNVTGFLLRRQKNLTLSEEVKKIAWKAQQRLHKRYQAFAVRGKNKNQIVTALGRELLGFIWAIALEAEKQHKLAKAA

SEQ ID NO: 405353 - protein, 397 aa, unidentified
MYIVGIDIAKRKHEAAVIDGEGAVIIKPFSFTNNCSGYNRLLAMLTKAKLPLDEVSFAMEATGHYWLALFTRLQKEGFRVQVINPVQTNSIRSFYIRQAKTDPRDALLIAEVIRFGHFSESTLHPENIYELRELCRGRHAIVSMQADVKRKVVALLDQVFPEYETAFTNMFGDTSMAILQTCPTPKELSEMPLEELCHLIEVSSHKRFRMVKAQELQELARNSFGFAMAGDVFSTMIRLYAKHLVFLKQQVQEMDRKIAEIMDTLDTLITTITGIGPTLGAYILSEIGDISRFSSAAKLAAYAGIDPTMRQSGEYNGVRNRMSKRGSPYLRHAIWLAASSAVLHDPALKLYFQKKRDEGKPYMASVGHACRKMVSIIYAVMRDNKAYTPCIPNEISA

SEQ ID NO: 405354 - protein, 393 aa, unidentified
MICVVIDVAKDKHDCFILSSEGEVLADVFTIPNNREGFEDLLQRIRSCTLPTDKIKVGLEATGHYSYNILGFLLDKGLATYVINPLHTNLYRKSLSLRKTKTDRIDARIIAAMLMSDVNLKSYTDTAYHNEELKSLTRYRFDKVRQRAKLKQSVSRLVNILFPELETLVPTLHMTSVYALLSELPGAQQIASVHLTHLKALLDDASKGRYDRNKAVEIREAARHSIGSKMPAKSLELRHTIQLIQELDKEIADVEAAIEEIMNAIQSPITTIPGMGLRMGAMILAEVGDFANFDSPDKILAYAGLSPSTYESGKLKATGTYAHMEKRGSRYLRYAIFNATKYVCIWDPTFAAYLAKKRAEGKHYNVAISHAAKKLVRVIFALQKSGQAYRVVA

SEQ ID NO: 405355 - protein, 308 aa, unidentified
MTTIYAGLDIAKANLQLHLNGQFHDLPNSPAGHRRLIELLATQERVHVICEATGGYERDVVAALHQAAIAVSVLNPARVRHFARAQGQRAKTDRMDAAVLSAYGGSLQPKATAARTKLEQQLAELVRRRLQLLETLIAQRQQAERLTIPALRRQAQSLMRRLERDLAQTESLLTQLREQAAELDERVQRLEAIAGVGSITALGVLAELPELGTLNRQQAAALAGLAPHPRESGQWQGRRTIGGGRAAVRRALYMAALCAARSNRQLREFYQRLRTAGKPAKVALTAVMRKLLVLMNHVLKNPNFSLAT

SEQ ID NO: 405356 - protein, 339 aa, unidentified
MELFVGLDVSLNSIAICVLSSRGKVHKETTSACEPDDLIAFLRTLQGDVACIGLEAGPLSQWLYRHLVEARFETVLMETRQVKGALKAMPIKTDRRDAEGIARLLHMGWFRPVHCKSISAQEMRALLSARKTIVQAITNLELSIRGILRNFGLKLGRVSKGGFAERVIELVEDNLKLYAAAKPILDARRALRHDLASLEKLLGDLARTDRLCHLFMTMPGVGPIVALTVKAAIDDPNRFHSSKDVGPWAGLTPRREQSGERDIIGSISRAGDAGLRTVLYQAAMVMLHKGRPSWLTAWALNVAKRRGMVALARRIGVILHRMWRDETPFRFTRAEPISS

SEQ ID NO: 405357 - protein, 335 aa, unidentified
MKHYAGLDLSMETTHVCVVDADGRKVGAQCVDSTPESIATALERYGPIERAVIETGRMTPSIALGLRELGVAIICIDARQAHQSLKAMKANKTDPHDAAGLAQLARTGFYKEVHVKSPAAHGVRSIITARGHLVEARVRLDNTLRGLCATFGIRLGLGQSERFLARMQVAAAIPGLGEAVASLLRAREGIVAEIGQLDRQLKAISTASPVCQALMSIPGVGVQTSAAFAAAVDDASRFKRSRTAGAYFGLVPRRHQSGEVDWTGRITKQGDSTVRKLLYEAANSILTRTKQSFALKTWALKIAKRRGLKKARVALARRLAVIMHAMLRDGTLFEA

SEQ ID NO: 405358 - protein, 361 aa, unidentified
MLIRYVGLDVHKESIKIAVAEEGRSPARFFTSIQSENGKLIKQINRLGPKSAVKCCYEAGPGGYTVYRALTDAGIDCRVIAPSMIPRQSGKRVKTDRLDAENLAHYLRSGDLTEVWVPDETTESIRNLVRLREDARIARQKARQQLNQFLLRKGRSYPRKTHWIRSHLTWIRSQRFTEEADNITLSDYLRHVELLDERVSNIGEDLKLHSGSWKQSKLVDCLQGLRGIAFLSAVAIAAKVGDLRRFPAAGKFMSYVGLVPGEYSSGQREKRGSITRCGNVIVRRLLVEAAWHYRHRPSKSRDIRLRSEGLPKKVQDIAWKAQERLHRKYMRLLMNGKPKNKVCVAVARELAGFIWAIGQSI

SEQ ID NO: 405359 - protein, 392 aa, unidentified
MYIVGIHIGKNHHEASIVSPEGKQIGRSLRFATTHKGADSLMSFIFKNIGNFPCVFGMEATGHYWYPIYSFLKAKGYTIYVINPIQSDSLRKMYIRQTKNDSIDSFLIAEVIRFGQFGTTSMADENILAMRQLCRYRDSVISSRTEIKLRIGTIMEQIFPEYEKQFSSLWLSTSMGILEKYLTPENIENAPIDELFEIIKDKSHNRLTRAKAISIKESAADTFGIKIAQDAFSFQLKQLIDRMNFLDKQIEALDCQILEYYEKFDCYLHTIPGIGMIAAATILAEIGDINRFKSSSALVAFAGIDPTVRQSGEFSSTHNHMSKRGSPYLRHAIFLAATTCSFHNSPLNAYYKKKRDQGKHHLTATGAVARKLTSVIYAVLRDSKPYEPKSFC

SEQ ID NO: 405360 - protein, 398 aa, unidentified
MKKNSKPQTDKNQTDKHQTKKADSAQAKTRPLTQLEQQLEQQRIQMQKDDEISAVAGVDIGDKRCFVRLTDLDGESLEECQVPTRPEALDHWFRRWPRLRIVIETGTHSNWIRRRLAALAHDVLVADARQLRLISQSDSKNDRNDAYWLAELGRTNPALLNPVAPRKLETEQQRTLLRAREAVLECRTKLKGSLRGMAKSHGIRLGRCAQTQWVERVREACPEVLHAALLGVAMQIESLGATIREYDKQIIELGKRYAAVKRLRTIGGVGPLTALTFVLALDNDPGRVKRSRQVGALVGLRPKQRQSGERSPRLGVTKSGDPLLRRTLIQCAHWVLGPFGTDSTLRRWGLGLAARGGGHQKKRAVVAVARKLAVLMHVLWVKQENYDPLHGLVKTVSP

SEQ ID NO: 405361 - protein, 354 aa, unidentified
MELHTIGIDLGKTAFHLVGLNLCGEVVVRKKFSRKQLLHFTANLQVKLMGMEACGGSHFLGRALREQGHEVRLMPAQYVKPYVKTNKSDYIDAEAIAEAVGRPKMRFVPIKTDDQLDLQSLHRVRERWVMRRTAVINQIRGLLLERGITLRQGRGHVDAALPGILEDASALLSGALRLLLAQLKLELDHLQMRIDEADAMINKAAGENEACRRLVAIPGIGPVTATAIIAAIGNGAAFKNGRGFSAWLGIVPGEYTTGGKQKLLGISKRGNSYLRRLFVQGARAVLQQRAKQSSGLSAWLAQLTTRTHSNLAAVALANKLARMAWAVLAKNEAYRPPNVGRRSYSMTGLPMTPS

SEQ ID NO: 405362 - protein, 387 aa, unidentified
MPQPNDLSRSLVALDQNSTIIAVIEMSQSSWLVAGMLPGIERQPRKKLEPNPERLLGLLHRWQDEAVRAGRTITRIAVAFEAGRDGFWLARWLAARGIEAHVIHASSVAVSREHRRAKTDRLDTELLKRGLLGWLRGERGHCSMARVPTIAEEDAKRPNRERDCLVGERTRIVNRIKSTLARLGIRNFKPTLRKAAERLATVHTPEGMPLPPNTLAELQRDMARLGFVVSQIRQIEDARQKRLEQQPETGPHAMVRLLARIVGVGVETADMLVHEVLSRPMRDRRAVARYAGLTGSPDESGAQRREQGLARAGNARVRRGMIQLAWRFLMFQKESALAVWYRTRTADSRIGTRKTMIVALARKLIIALWRFVTAGEPMEGVVLRPAS

SEQ ID NO: 405363 - protein, 346 aa, unidentified
MQSTTIAVALAKSVFQIAVSKSPGKVSESRRLTRKQFATFFARRKPALVLMEACGSSHFWARTLRGYGHEVLLLPPSEVRRYVTRDKTDRTDAKALLEAHRNEEIRSVPVKSAAQQSTASLHRLRSAWIGDRTARLNLIRGILREFGQVLPPGARQVVPQALSVLEDSSLEVSEPLRLALREACAEVRELEQRIRGVEKHLEALAAESSVFCCLASVPGIGLLGGTALEAKVGDIRRFATSRHFASFLGLPPKEHSSGLRRRLGAMSKRGDVYLRTLLIHGARAVLAAAKRKRHPDALSRWALAVETRRGHNVATVALAHKIARLAWAVWQRNTPYRAGGVAAGEV

SEQ ID NO: 405364 - protein, 384 aa, unidentified
MANDSITFIGLDTHKEFTEVAYSLSDRRCNINHLGKIKTNKQALEKLSRQLQSKHPKSTLHFIYEAGPCGYWVYRLLTKLGHACYIVAPSLIPKKPGNRVKTDKRDAIMLTQLLKNGDISPIYVPEPEDEAIRDLSRARERAMTDLNDSRFQLKALLLRNNINYDGKSNWSAKHLRWLTELILPHPCQQIVLQEMIQSINERTSRLARLDSELDYHVKLWRYYPVVKSVQAMKGVRLLVAVGVIAELGDLTRFDHPRKLMSYVGLTPSENSSGGRRHLGSITKCGNSRARRLLTEGAHSYRYPAKVSRELQQRQENLSKEVIDIAWKAQLRLCRRFQKLTHRGKHRSIIVTAIAREMVAYMWSISREVSVRPLNPRDRLVRIPA

SEQ ID NO: 405365 - protein, 252 aa, unidentified
MYQLGIDVSKKTLDICLMREGIRGRLKTKRIKNDFKAVHIITAWLEHHNCTLSDAHIIMEATGVYHELLATGLHLAGGKVSLANPHRTREFARGMDILTKTDTVDAWMLACYGALKQPEAWTPPAEEIRHLSALLKRRDVLVSDATREKNRLEKYRATHTPEAIITSAESMLIRLNDELAKIELMLKKHVESHVLLKQDYELLTSIKSVGPQLGLNMLVILRSHDFRSAEQVAAFLGVAPVEKRSGTSVRGR

SEQ ID NO: 405366 - protein, 316 aa, unidentified
MANHVTKITLGIDVAKDQHVIYNWQTNQTFRLANQRNDIQTFLKSLHGPVRIAIEPTSHYHVIMVDEALELGYEVYLINPRQLAHYRKAVNERNKTDPIDAWLLARYLEHEVDQLRPFLPRDPRAQRLWKLILRRATVVKSRQQLQQSFAEVQMSIQGLLTQYQNLMARIEREILNLIRAIGWWSDYQHCLSIPGIGSSNASALVAAYHRGSFAGSDAFVSYLGLDVRIRESGYFKGRRKLTKLGEPELRRLLFCASHPARHYHRFAEYYQKQLNKGLSKIAARVILARKLARIAFTLMRNEETFIREEKNYCVAS

SEQ ID NO: 405367 - protein, 382 aa, unidentified
METMTRGGVCDAPPTYLLLAFELGERWWKLGFAVGVGQRPRIRRIAAGAVQLLSEEIARAKARLRVPAGAPVISCYEAGRDGFWLHRYLVARGLANHVVDSSSIEVNRRARRAKTDRLDLVGLLSLLARYSQGDHRVWRVVRVPTVAEEDARQLHRTWETLQQDRTRLMNRLKGLLATLGVRLPIDGRFLERLATTRLWDGAPIPDGIRQRLTRVWAQLEIVERHLEEVRNTRAALQPDPDTPTGRFVRQLQTVRAVGPMSAWVLTTEIFGWREIRNGRQLGALVGLAPAPYHSGETQRDQGITRAGNAHVRRAVVQLAWGWVRYQPTSALTQWYQRRFGGGSRRARKIGIVALARKLLVALWRYVETGVVPVGAQLKVMAG

SEQ ID NO: 405368 - protein, 357 aa, unidentified
MEAQNSSMSFKNQDLFIGLDVHKKNWLVTIRCGKIVLKTFSMDPIAQKLGEYMTRNYPEGNYYSVYEAGFCGYRVHRDLEKAGIRNIIAAPTEIPTSISEKTNKTDPVDSRKLARELENRTLKGIYIPEKLQEEIRSLVRLRFQLVKTQTRLKNQIKGYLNFYGHELPKNFEMRHWSARFIEVLRNMEFEYPIGKQHLKILLDELTDKRKKLCEVQKSIKEFLCEYNLNEKVIHLCTVPGIGYTTAATLYTEIMDPNRFKDFDKLASYCGLVPAIRSSGDKQTVLGIKFHHNLRIRQLLVEAAWMAIRKDPALTLAYTNYIKRMSKQEAIIRIAKKLLSRIRYVWTTGNKYSNAVIK

SEQ ID NO: 405369 - protein, 346 aa, unidentified
MLYVGLDLSRKRLDFCLLDELGERVEVGAAPPDADGLRSLTTRVGRFGEPVFAAIESMNGARFVHDQLELAGWRVEIADAVKVKGLAPLACKTDRIDAWVLAELARRDLVPAIWLPDPAVRAERERARFRLHLVRHRTSLKQRVHAVLLAHGKPCPVSDLFGVAGRDLLERLALPEPWLGTVEASLQLIDELDQQIGDCERDLHRLGAEHRYVPLLVTVPGIGWVLAYTIAAEIGEISRFATPTKLTGYTGLCPRVYQSGQSDRRGALAKNGPRYLRWALIEATMHASRHPLYRDRYQQTKQRLGRQRGAKVAQIDLARRLAEAIWHMLTRDQPFAPAGATSPLAA

SEQ ID NO: 405370 - protein, 346 aa, unidentified
MNQIIRIGMDTSKHIFQLHGVDAVERPVLRRKLRRSEVLAFFAKLPPTVIGMEACGAAHYWARELRKLGHEVKLMAPQHVKAYVKRNKNDGRDAEGLCEAMSRPTMQFVPVKTEEQQAALMLAGVRQQLIARRTQLSNTIRGYAAEFGLTAAKGLDKIEPLLARIAQDETVPALARELFAVQGQDYAQLQIELKAIEVKLMAWHRANACSRRLAQIPGVGPIGATALVMKTPDPRAFPSGRHFAAWLGLTPKDHSTAGKTRLGKITRAGDEVLRSLLVAGATAVIQQVRNGRGRPSAWLLALLKRKPPKLAAVALANKIARIAWKLMTTGESYDGARMPGAQAFAA

SEQ ID NO: 405371 - protein, 406 aa, unidentified
MTPKFVASWIYLYTMNWKHINGNRDYRIQIGGHYMNYNTVYVGMDVHKESFTLCSCKYEDEKASHYQRTQASYKNVLRYLEFLRTIYGDDTRFVCGYEAGCLGYSLYRQLESFNVECVILAPTTMLEQRSKRRIKTDKRDAEIIARSLAQHNYSPVHIPTETDNQTKEFIRMRDDHKAELKKIKQQILSFCLRQGYQYDGSGNWTEKHVKWLRSLKPVGLYKEILDEYLLTYTTLTDKLNRLDHRIEELASKEEYKESVSKLTCFLGIRTHTALSVIVEVGDFQRFASARKFAGYLGLVPGQHSSGDDRNGLGITKAGNTHVRRLLTESAQSYTRGKIGYKSRVLRLRQAGNSPQVINYADRANERLRRRYYKMVLKDGKKYNIAKTAVARELACFIWGMMTDNIY

SEQ ID NO: 405372 - protein, 343 aa, unidentified
MTKDIMIGVDLAKNVFQLHAASMNGQLQYRKKLSRQAFGTFMAEQPPAVVVMEACGSAHYWAREMVRLGHEVKLIAAQYVKPFVKRQKNDAADAEAIVVAAQRPEMRFVEPKSAEQQSRAILFRARERLVHQRTELINALRACLYEYGHAVPQGAHQIKRIAEILDAPNSDLPDLMREECTELLDQIAEQTTRINARTAKIKKLAAEADTARRLQTIPGVGPLTALAVEAFAPPMENFKCGRDFAAWLGLVPRQFSSGGKERLGRISKAGQADIRRLLIIGAMSRLNWLGRKSIPENSWLARMVARKPRMLVAIALANKMARTIWALLTKNEDYQVPAQAVAA

SEQ ID NO: 405373 - protein, 424 aa, unidentified
MRVKKYTRQIEKRQRISSRTLVIGIDIGSEFNAVCLMDKEGDVIGKYPKIYNSRKGFDYFRTIIEQARRKRGFVDVLIGMEPTGHYWRKIGFYALEQGYEVRFVRTTALKHQRELDESSSAKSDIRDAFTIGNIVREGKYIDTVIEDGVFRQLRTLSHTRERIVRYNTGSKHALKAVLDDYFPELSGIFWSMKSKGLRALLETHPFPDDVLMAGIPAIEALLAKSTKRRAQAREKAEKIYQAAGQSVGLKTIGQADRMRLAVYLDEVKRSEERLKEIACQITELLHQIPLAEHILSIPGIGAVTCGVFLGELGNPGYFKEPRQIIKYAGYDPKEHDSGLRTGRKIISKKGRWLLRKYLYFMAMRVVYRSIFFKEYYERKQKGSRRPLEKKEALCAVIIKLIRVIFALMRDKKMFTEEIRCLQAA

SEQ ID NO: 405374 - protein, 318 aa, unidentified
MQISGCFIGIDVGKFELQVAGYEGSIVSGVVPNNRSSIVGWLKRLPAGSVLAMEATGGYQELLARLAHERGFVVYVLNPTHVHHYAISLGNRGKTDRLDAQVIAQYIAQRYTKLHRYEPISPELQQVRALQALRSTVVRVGTSLRLSAQRHGCASAHQKKALAGLRSWAEQLERELITKIKSQSEWDKTYGLLTSISGIGPINGAALTSLFNRVHFASSDAAVAFCGLDPRPNESGRKVGRRRLSKQGDKAARTLLYNAASAAARTVHFKDYYAMLRTRGLASTAALVVIARKLLRIAYGVWRTGQGFDPGRLNLKTA

SEQ ID NO: 405375 - protein, 312 aa, unidentified
MSQNTSILHVGLDVAKLSLQLDLAGQAHALSNDRPGHGHLLKLLRRHPNAHIVCEATGGYEQPVVRALQAAAIPVSLIEAGRVRFFARAQGQRAKTDPIDATVLTRYGVTFQPAPTPGLSAQQQQLADVIQRRRQLIHSRTMETNRAEHYTDPFCRRQHVQFLKVLDRQIDQCDAHITALMAADAGLAQKAARLQAIPGVGPVVAATMLADLPELGTLNAQTAAALAGVAPYNRDSGPRVGHRHISGGRRPVRCALYMAALSAVRHDRILKAFYQRLRDAGKKPLVALTACMRKLVVLMNHLLKHEDFQLAN

SEQ ID NO: 405376 - protein, 416 aa, unidentified
MEMEREVVCGADIHKQFLLATILTKDGQKFQDRFDSNFEGLLNFRQWLLDHDCQRLAVESTANYWQPIYFVVGKDVEFVLANAYQIKHIPGRKTDVLDSEWIAELCLKDLISPSRIFSEDDRDLRSMTRTRENYVKMRSQIKNRIHQELESACIKLSSVLSDIFGKSGIHIIRGILNGLSIDDILDRIPSKKLKAKRGEIQDAIQANISPVQIDLISLLLDSVDFLNREIESIDKQIQSLISTRQEDLKIAMSIPGMGFTSASTILAEIGNLKDFNNGEKLAAYCGLVPSVYQSAGKLITGHITKHGSPHVRRMLIEVAHAISRTKADSKLKRFYFRIKSRHGAKVAVVALARKVLCILHHLIVNREMFEDGISSKSKREKTGRSSSSTEMIIEDAIQIFVRAGYLVQKRSEKEGG

SEQ ID NO: 405377 - protein, 449 aa, unidentified
MRKPQEIEDEEYEQILERVAAVDVAKAAGMVCTRVPHPSRPGRRRTRVWEVDATTNAILELGEHLAGEGIEKVTLESTSDYWRIWFYLLEAAGLDVQLVNAGDIKNAPGRPKTDKLDSVWQAKLTERGMLRPSFVPPAEIRRLRDYTRLRTDLTRERTRHWQRLEKLLEDALLKVSAVASTLDTLSVRDMLEALIAGERDPKVLAGLARGRMKAKRAALTEALTGRFDDHHAELARMLLDQIDALTAQIGTLTTRVGELIAAIPAAQGIDADGATGPGAGTGPGAPVLPAIARLDEIPGISPLGAQIILAEIGLDMTRFPTAGHLVSWARLCPRTIQSGARNRSGKAGKGNPYLKGVLGEIAAAAARTDTFLGERYRRIVKRRGKLKALVAVARTILVIIWHLLADPAARYHDLGAGYYASRTDTGRKTRNHVRQLEALGFIVTLAPAA

SEQ ID NO: 405378 - protein, 324 aa, unidentified
MFFLGLDIAKLTFEVCLLDYEGKTLARSSFKRTLDGMGQLLAWTKTHTKNFDVWAHMEATGDLWLMPARFLNDAGFKVSVLNPQRIHHFAKSLMRRHKNDVLDAHLLALYGHRMRPELWKAIEPLRFEFRALMRRIRQLTLMRNQEKNRLSSLELSRLESESLERMLEMLGREQEQLWEQAWVMVESDQALKKEIELVSSIKGIGRKTAAQLMGEILSLERFENAKKISCWAGLIPSEFSSGTSVKKEDELCAQGCRPIRYVLYMPALSAMRYNEPIKCLVERLKDRGKTGKERIVAAMHKLLRQVYGVLNSGQPFDERRSLST

SEQ ID NO: 405379 - protein, 345 aa, unidentified
MAVYIGVDLHVRTETVCWMNTADGEIHQHTLDHSRDDLRAFYAQFTAPAVVGIESSGYALWFHQLMEQAGHRLLVGDAYAIRQFARRRQKNDRRDAELLLDLLRREEFPVVHRPAPPSQDTLALLRYRHRLVRMRTMVKNGLQAVALNHQLRLGFRLFTVRGQQQFAALPLSGAYATQRQQSQVLLTTLEAQIAAVNQELATRAAADPRVVRLRTHPGVGLQTALAVVHTLEPVTRFDRARRIAAYCGLDPSEHSSGDTTRYGHISKQGNRLLRFLLVEAAWSAVQHEEDLGRFFRRLRARKKPHAVAVVAVARKLVLRLYRMLQEGIDYEEFRRRGRDARRARK

SEQ ID NO: 405380 - protein, 392 aa, unidentified
MIYVGIDIAKDKHDCFITNSDGEVLFKSFTISNNRDGFETLFQKIQSVSDDLTKVKVGLEATGHYSYNLLGYLLDKGLPTYVINPLHTNLYRKSLSLRKTKTDKVDARTIASMIMSDVNLKSYSDTSYHNEELTSLTRYRFDKVKERAKLKTSVSRLICILFPELEKLVPTLHMASVYALLSEFPSAHAVASAHLTRLINLLSQSSKNRYGKDTAVMFREAARNSIGSNMPTKSLELKHTIKLIQELTSEIDEIEAAIKQIMDEEIQSPILTIPGIGYRMGAMIIAEIGDFCRFDSADKILAYAGMSPSTYQSGQLDNCYSHMEKRGSRYLRYALYNATKYVCHWDKSFGEYLAKKRSEGKHYNVAISHAAKKLVRLIFAMEKSRKAYLPTA

SEQ ID NO: 405381 - protein, 370 aa, unidentified
MPQSSTLYVGLDVHKESIAVAYVAQAHDAEVIYLGTIGTRQADIDQLVRKLQSKANHLVFVYEAGPCGYWLYRYLTKKGHICWVVAPSLIPKKAGDRVKTDRRDAVQLARLMRSGDLTPVYVPTVEDEAIRDLSRAREDTLRDLKAAKNRLKAFLLRQDIRYTGRAHWGPAHLRWLSEVVCPTPAQQIVFQEYVRSVNEHTERLQRLAQELQDHVKTWRLQPVVEALQALRGVQFTVAVTIIAELGDLTRFDNPRQLMSYLGLTPSEYSSGERRRQGGITKAGNTHARRALVEGAWAYRYPAKVSRHLQLRLESVPKPLQDISWKAQVRLCRRYRQLSARGKHANQVVVAIARELSAFMWAIAQEVGLPA

SEQ ID NO: 405382 - protein, 420 aa, unidentified
MKAWTEITHYAGFDWARDHHDVVVVDPQGNITTEFRIAHTLAGWQQFREKIQGYGAVAVAIETSQGAAIDQLLQSNVTVYPVHPLSAKRYRERKAPSGNKTDHLDAWALADALRVDGQGWSMLQPLDPLTQTLRLFCRDEMALIEHRTALVNQLQQALSEYYPAALEAFDDWTRPSCWEFIIHFPTPHQLVKAGKRRREQFLHVHRLWRPETVNKRLEIFARAEQFCGSEPVTAAKSFLALSLAKLLCTLEHQLQEYRKQIQALFEQHPDHDLFGSLPGAADKLAPRLLGEIGGDPDRFESVAVLQMLAGTAPVSFQSGQIHKVRIRYQCQKVLRYVVHLWANSCRKSCSWAQVYYRQKRAEGKSHACALRCLGQRLLKILHAMIRTRTRYNAELHARNQQAHGSWVLKLVTKQAPLGSE

SEQ ID NO: 405383 - protein, 347 aa, unidentified
MNFYNSTHQHYCGIDLHARSLYVCIINQQGETRLHKEISANPDALIELISPYLDDLVLGVECMHCWYWVADFCDDHDIEFILGHALYMKAIHGGKTKNDRVDSFKIAALMRGGNFPLAYVYPRNMRATRDLLRRRTNLVRHGADLKAHVANTTSQYNLPPNKVNLKNVGAREQLNTTFHDPVVQRNINLDMAVLECYHRELSQVEWFLEKQAIKHQPAYFYLLKTIPGIGRILALTILYEIGDIQRFESVQKFASYARLIKCKAESAGKTYGTQGNKIGNAHLKWAFSEAAVLYLRGNSGAQQLLQRFQKRMSKAKALSALAHKLGRAVYFMLKNEKIFDEKRFLTS

SEQ ID NO: 405384 - protein, 379 aa, unidentified
MSKVRFVGLDVHADTIAVAVAEAGGEVRSLGIIPNRLESVRKMIGKLAPSKTLKCCYEAGPTGYVLYWQLTQLGVACEVIAPSLIPTKAGDRVKTDRRDAEKLARCYRAGELTPVWVPDANHEALRDLVRAREAAKKDQLRHRHRLGKFLLRHGKRPVDAGQAWTQKYLNWIRINVHFEQPALEATLKHYREEVDHIAERIAKLEQAIDEAVKQAPAEIRVVIEALQALRGVAQTIAATVVAECGSLSRFTHPTQLMGYSGMVSREHTSGNRVQRGAITKSGNAHLRRVLVEAAWTYRHRPNVQGRVLRRQKSLALSDEAKRIAWKAQQRLYKRFTALTARGKEHNVAAIAVARELLGFMWAIAVHTESQFRPANATAA

SEQ ID NO: 405385 - protein, 331 aa, unidentified
MPHTAPIASTPLPSLGIDVAKLVLDVCLLHDTRTLYQRFANTAEGHAQLLAWLAAQGVTQAAIALEATGAYSLAVAAACQLAGHRVAVLNPRRVLDFARSLGRRNKTDRADAHVIARFAATQPLELWEPLPPAQALLRELLRRQADLEVQLQAEARRMETAPAVPALRQSLQRAAKWLAAELARLEKTIAAHLAESPALAADITRLQAIPGIGEKSARLLAAEIPRHFKNARAVAAWLGLVPRQCRSGTSVQKASRIGHAAPQLRDKLYFPAVTALRCDPRSKAFAERLRAAGKTPMQIVFAVLHKMVRTAFALLRSKADYNPNHALFQTA

SEQ ID NO: 405386 - protein, 386 aa, unidentified
MSRSSNILLPVISYDHTLVLAIELSNKSWVLAAQVPGLPRTKAQRTIEPNKNALLAAIDGYRARAAAVGYTVDRVITTYEAGWSGFWLARWLVAQGVEVHVVQPSSVPVDRRLRRAKSDGIDAELLLRTLLAWLRGEPRVCSMAPIPDEADEDARRCVRERTELLSDRVGLTNRIGAVLATLGVNDYNPLLQSRRRRLAELQTGLGEPIPPNALAKIERLLARLELVLAQIAELERERDEVAAADAPDRAGKMIQQLASLRGIGVQSATVLVREAFVRHFSNGKALGSYAGLTSTPYSSGGINREQGIGKAGNRRLRTVMVELAWLWQRYQPGAAQVAWFRDRVGSTGRRIRKVMVVALARKLLIALWRFVIDGVMPEGAVMKPSI

SEQ ID NO: 405387 - protein, 407 aa, unidentified
MDVLHECCCGLDVHKKSITACIITPKGKEIKTFGTMTRNLIELVDWIKKSRCTHVAMESTGDYWKPIYNLLELEDLQLLLVNAQHIKAVPGRKTDVKDAEWITRLLRHGLVQGSFVPDRDQRELREIVRYRRSIIEERAREVNRIQKVLEGGNIKLASVASNILGVSARNMLEAIIQGEKDTEVLADFAQKKLKAKKDDLKLALEGRLGEHQVLMIEKQLGHIDYLDDLIKELDEEVEKRMLPFVEDLELLDSIPGVGRRIAQQIIAEVGTDMSRFPTPGHLCSWAGMTPGHDESAGKKKSAKTRKGNKKLRSALTEAAKAASRQKNTYLSAQYHRIAARRGKNRAAIAVGHTILSLVHILLTRKQAYVDLGFDYLEQRKKEIIVKQSIKKLESLGLTVTIREQTAS

SEQ ID NO: 405388 - protein, 386 aa, unidentified
MKTVAGLDVHKDSVYLCILRENGEKIERVYGVLTPQLDSMRDFMAENKVSEVAMESTSVYWIPIWRVLVDSFELKLVNPYFIRQLPGRKSDVKDAQWIAECVMKELIRGSFIPSPLVQRLRLYDRRIFEINAELVRKYSKIDAILQRCNIRLSNYVSNTDCKSYKAVVKQISEGVTSPQELLRHVHKRIINKHGEDTILAALTGVVSDAEIDMLAQYVAESAILEDNKNKCIEKMREICNSEFKEQMKNLQEIPGVSERSALTVLAEIGPDVNAFPSVKHLVSWCGFNPRNDESNKKIKSNKITHGNRFIRIASVQCAWAASRTKDCYFSKFYAFHTQVRKKFKLKVVVAVARKVLVCIWHILKFNVPYKDFEPQKSVTKDCTQFA

SEQ ID NO: 405389 - protein, 371 aa, unidentified
MADYTEVFVGIDVAKVRNAIAIADGERGGEVRFLGEVDASEESMRRVVKRIASQHGRVHFCYEAGPTGYGLHRLITSLGHSCIVVAPSLIPRKPGDQVKTNRRDALALAKLLRAGELTAVWVPDEGHEAMRDLVRGRAAAVETLRVHRQQVSAFMLKHGRIFPRKKGWTMRYLRWLQEQKFEHPAHQIVLQEMVEAVRLSKERVERLEQTIEEFVASWSLAPIVRALQCLRGVDLIVAVTFVTEIGDVRRFENPRQLMGFLGLVPRERSTGATVRRGGITKAGNGRVRHMLVESAWTYRHPPRIGTKKLYRLEQVPPTVRDIAWKAQTRLTARYRALTGRGKKTTVVCTAIARELVGFMWSVAREAQTAPA

SEQ ID NO: 405390 - protein, 322 aa, unidentified
MNGSIVLGIDVAKAKLDCDLRLPDGKFKSKMVENNLKGFKILTEWAEKYCVTKAHVCMEATGVYWEAAAEYLAAKGMTVSVVNPALIKAFGGSHLVRTKTDKVDARLIAEFCAERNPDPWQAPTPSEQALRAMVLRLDSLQIMRTQESNRLDVARDAVKPGIASHIEWLDKEIKALAKKIGEHMDGDANLKDKQTLLDSIPGLGGRTIAILLAFFADFERFGNARQAAAFVGLDPHHHESGTSVKKKPRMSKVGHAFLRKSLYMPSMVALYKTAWGIRFRERLAAAGKPPKLIIGAMMRKLVHVAFGVLKSGKNFDPALHGC

SEQ ID NO: 405391 - protein, 411 aa, unidentified
MRLFVGDDWAEDHHDIEVMDQAGKVLAKRRLPEGMAGMTQLHELTGRFVPEDAADAEVVIGIETDRGPWVAALVAAGYVVYPVNPLQASRYRERHGVSGAKSDQGDSHMLADMVRTDSHQLRPAAGDSPEAGAIKVVARTHKTLIWERTRAVQRLRHQLREYFPAALEAFEDLDAPDVPELLAKAPDPARAAKLTRAQVSAALKRARRRNIKDKTDAILAALRGEHLGQPPALTAAYAATVRSLIAVITTLNEQVKILEEQVRDHFGRHPDAEIYQSQPGLAAILGARVLGEFGDDPHRYADGKARKNYGGTSPITRASGKKKAVMARWIHNDRLLDALMSWAFSSLNASPGARAFYDELRARGLEHNDALRRLANRLVGILHGCLKTRTLYDEATAWGHRENLPQSSVAA

SEQ ID NO: 405392 - protein, 338 aa, unidentified
MKLYAGIDLHSSNCYLGIIDDKLEKVVGKRLRNSLPFIIDCLAPYKKDLQGVVVESTYNWYWLVDGLQEHSYTVHLANPAAIKQYEGIKYSDDKWDALWLAHLLKLGILPQGYIYPKETRPMRDLLRRRMLFVRQRTADILSFQSMITRNTGTRISGNNIRKLTEANLEQLFPNPDLLFMAQRYLSIIDLLSQQIKIMEKQAMGKIGLMEPFKWLSTITGVGKILAMVIMMEVGDIGRFKKVGNYCSYCRCVRSERISNGKKKGVGNKKNGNKYLSWAYVEAANFCIRHNPQAEKFYQRKKAKSNGIVAIKALSNKLARASYYMMRDQVPFDSQMLFA

SEQ ID NO: 405393 - protein, 388 aa, unidentified
MLLDHPSDGPTAIRTYIAAIFVSLELSRSTWLVTSLSPGKGERMSKHSVTAGTVAELLMLFAELRRKAEIRTGQSYPIITIQEAGLDGFWLHRVLQQNGIESHVVDPASIATPRRRRRAKTDRLDGEALLRALLAYKRGEPRVCAMVVAPSPEAEDRRRLCRERATLIAERITHVNRIKGLLFSQGISDYAPLRRDRRSRLETLRTGDGRELPSHLRTQIGRELDRIELLLEQIKAVEAERDALLAARKPASEAAAPDPVTMLLALKGMGANFAAVLWSEAFYRQFANRRQVAAYAGLAATPWQSGGIRHEQGVSKAGNPRLRTTMIQVAWLWIRHQPQSALTRWFKERSQQGRKRAIVALARKLLVALWKYVTQGVVIEGAAMKPAA

SEQ ID NO: 405394 - protein, 413 aa, unidentified
MLFVGDDWAEDHHDVEVQDEAGRRLARARLPEGVDGLARLHELLAEHLDEAAVDADTGMLRCGSVVVGIETDRGTWVSALIAAGYEVFAINPLSAARYRERHSTSGAKSDRGDAHVLAEIVRLDRAHHRPLAGDSAAVEALKLLTRSHQSFIWDRTRHLQRMRAALREYFPAALEAFADLTAADALELLTRAPDPTRAAALSRSKIAAALTRARRRDVDAKAAAIQAILRAPALRADPALERAYATIVTTQAALIGQLNAHIAELQAVMVEGFGHHPDAEIITSQPGLGAVLGARVLAEFGDDRTRYTNAKARKNYAGTSPITRASGTRRLVLARYARNKHLGDAIHQWAFCALTASPGARAYYDTLRARGTGHHAALRQLGNRLVGILHGCLKTHTPYSETLAWPQPSSTAA

SEQ ID NO: 405395 - protein, 327 aa, unidentified
MYLCILDHAGTTLLHRHMQATPEALLQAIAPYRSQIVLAAECMFTWYWLADLCAEQGIPFVLGHALYMKAIHGGKAKNDKSDAQKIAVLLRGGMLPQAYVYPAEMRATRDLLRRRLHLTRKRAALLAHVQNTTSQYHLPAIGTKIAYKANRDGVAERFADPAVQKSIEVDLALIPYYDHLWRDVERTSVKTAKHHDAHTLYLLQTVPGLGQILSLVLLYEIHQIDRFPRVQEFASYCRLVKCAKASAGKRSGTSGTKIGNAHLKWAFSEAAVLFLRDNPAGQKFLTRLEKKHGQGKALTILAHQLARAVYFMFKNKKAFDMATFLRS

SEQ ID NO: 405396 - protein, 374 aa, unidentified
MENTITYVAMDTHKKQHKIALHYPCQEEIIEFTVNNTVRDIKKMVNKIKKHAPGKVEFCYEAGVCGFTLKRRIEQFDCRCCVIAPSLVPRKPGDRVKTDRRDARKLLMMFKAGLLTEVHAPNEHQEAARELTRLRETARDNLKRIRHQLLKLLTRHGYVYTDGRHWTQKHITWLRTVEFTESTLTGVFENYFNEMIYCIGRLENLDREVGLLADSPEYKEIVGLLCCYHGIDILTAITIITEIFEFGRFESPRHLMSYLGLTPSEDSSGDKQKKGAITKAGNKRIRRLLNETSWHYRHRYVPSAALKKRRKGQPQWAIEIADAAGRRLSTRHRYLINKGKMPCKANIAVARELAGFIWFTVTQYQARKNTNDAA

SEQ ID NO: 405397 - protein, 422 aa, unidentified
MLTESHDEEQIIARVAALDIGKTEVVCCVRVPGGAEAKKRLQEVTTHSTMTRALTELANHLVDLGIERVVMEATSDYWKPVFYLLEAHGLDPWLVNARDVKHLPGRPKTDKLDAVWLCKVAERQMLRPSFVPPKPIRQLRDLTRYRIDLLGARTAEKNRVEKLLEDACIKLSVVASDIFGVSGRAMMAALIGGERDPKVLAQLARARMRAKIGLLEEAFNGHFDNHHAFLLTRMLGRIDAIDADIAAVDAQIEAQLAPFAAAAARLDDIPGVGPVAAAIILAEVGVEMSRFPTAGHLCSWAKFSPGICSSAGKSKGNGSSGHGNRYLARVLGEAAVVVGRTDTFLGERYRRIAKRRGKKRAIVAVGRSILVIVWHLLSDEQAVFNDLGADHFTRHVNSETKKRNHIRQLEALGYTVTLTPAA

SEQ ID NO: 405398 - protein, 407 aa, unidentified
MIFAGVDWAEAHHDVHFQDEQGRRLAAGRLAEGVGGIARFHELAAAHAGQPGEVVIGIETDRGLFVSALVAAGYQVFAVNPMSASRYRDRHRSSGAKSDPGDAKVLADLVRTDRHNHRPVAGDSDLAQGIRALARAHQSMIWARRRQANQLRSALREFYPAALAAFDDLTSGDAVAVLKAAPQPALGAALSRAQITAALRRGGRTRRLTERTAAVQAALRAPQPQPAPALAAAMGATVAATAAVIAEMNTQITALEQQLAADFELHPDALVVRSLPGLGTILGARVLGEFGDAPDRYPSAKSRKNYAGTSPITRASGTRRAVLARHARNKRLADAIYLWAFAALGASPGARAYYDQRRAAGDTHHQALRALGNRLTGILHGCLAGHTLYSEHTAWAHRTSQQTTRAA

SEQ ID NO: 405399 - protein, 350 aa, unidentified
MELHTIGIDLGKTVFHLVGLNQRGEVVVRKKFSRKQLLHFTANLQVKLIGMEACGGSHFLGRALREQGHEVRLMPAQYVKPYVKTNKSDYIDAEAIAEAVERPKMRFVPIKSDDQLDLQSLHRVRERWVMRRTAVINQIRGLLLERGITLRQGRRHIDAALPGILEDASAKLSGALRVLLAQLRLELDHLQMRIDEADAVINKIAGDNEACRRLVAIPGIGPVTATAIIAAIGNGAAFKKGRGFSAWLGIVPGEYTTGGKQKLLGISKRGNSYLRRLFVQGARAVLQQSAKQSSGLSAWLAQLTTRTHSNVAAVALANKLARMAWAVLAKNEPYRPPMLAGAATECLACR

SEQ ID NO: 405400 - protein, 320 aa, unidentified
MYVGIDVAKAELVVAMGATGPVTTFPNDDVGLTALVGAMREAKPTLIVLEATGGYEIACTAALAAALLPVAVINPRSVRSFAKATGTLAKTDRIDARLLAQFGERVQPEPRPLPTAAQQELEALVTRRRQLLEMRTAEQHRLGQALGGHRQRVKQSLRKHLAYLDRELRITETDLRDRMQASPVWRARDDLLQSVPGIGPTVSQTLVAELPELGRLNRREIAKLVGVAPLNRDSGKRRGRRMTLGGRASVRAILYMACLSAIRHNPVLRAFYQRLTRAGKVKKLALVACMRKLLTIVNQMVRTGQHWSPSPSIACQLQPT

SEQ ID NO: 405401 - protein, 344 aa, unidentified
MDHSAGLDVSVKETSVCIVDDTGRIAREVKVASEPEELLAVLKNPAYHFKRIGLEAGPLSQWLYSALAEAGLPMICVETRHMRAVLKAQINKTDRNDARGIAQMMRAGLYRPVHVKTLRSQKLRMLLTHRKLLQSKAIAIDNDLRGTLRNFGLKVGVVGTVKFEARIRELVENIPDLAELVEPLLIVRRVLREQFVIQHRRLLAIVRDDEVCRRLMTVPGVGPVVSLTYRATVDVPARFHKSKSVRAVFGLTCAKYQSGEVEWSGRISRCGDEMMRVMLYEAAQSMLRSKKWSWLKAWAMQIARRRGMKKAIVALARRLAVIMHRIWVDGTEFRWTREQAAAAS

SEQ ID NO: 405402 - protein, 343 aa, unidentified
MQTVTTIGFDIAKSVFQVHGVDAAGQMVVRRQLKRRQVVAFFQKLPPCLVGIEACASSHYWSRELQALGHSVRLMPPAYVRPYVKRQKNDMADAEAICEAVTRANMRFVPTKTAEQQSGLMLHRTRHLFMRQQTSVINAIRAHLAEFGIVAPVGRRGVEELLRVIADPNDKRLPEVVRACLAALGSQLLSLKQQILDFDRMIMAWHRSNQTSKRLNCIPGVGPLLSTALVASVPDPKTFRSGRNFSAWIGLVPKQNSSGGRDKLGSISKQGDRYLRGLFVAGAFAVIRYAKIHGTKHRPWLTALLARRHTKVAAIALANKLARMAWAMMATGERYNYPASLKV

SEQ ID NO: 405403 - protein, 362 aa, unidentified
MAQAMTFVGLDVHARQTHAAVFDPDTGELGVSRLRMAPVEVVSFLGELGPGVRAVYEAGPTGFGLARAAREQGIDVRVAAPGSIPKGSGDRVKTDRRDALRMARLLAAGELSFAYVPSVADECFRDLVRSIEDVRGDLMRARHRLGKFLLRRGERYPGPGGAWTLKHVAWLRSHAFDDACSQATFVDYLAAVELIVGRRRTLIEELERAIPACSHAQVIARLRCFRGIDTLSAAGLCAEVGDFGRFAAPKLLSGFLGVVPSERTSDQKRRQGSITKAGPGHARRLLVEAAHHYRSQPHIGVTLARRQQGQDARVIEIAWRAQRRLHQRWQHLYRERRKPAGVAAIACARELASFLWEAATRA

SEQ ID NO: 405404 - protein, 364 aa, unidentified
MPISANRRSRHAIQENIDVEIAVIGVDIGKDTFHLVGFDDAGHRVLRKKIKRLALKSTFEKFPGCIVGMEACMSAHFVSRMLRKLGFEPRIIPAIYVKPFNKGQKNDYNDAEAIAEAAMRPNLRTVTEKSQDQLDLQAMHRVRSRLVARRTATINQIRAFLIEQGITVSSGQHRLQSSFEAILENRRDEISPRMRSTLLGLYGDWLWVDKRIKAISSEIEEISKSEESSANIMTIPGIGPLISTAIVAAIGKGEVFDRGRDFAAWLGLVPRQFSTGGRTILGRISKRGNGYLRMLLVQAANVILMRPHRWDALGLGPWLRGVKARMPHNKAAVALANKLARTAWSILHHGTTYTVQGDEALGGI

SEQ ID NO: 405405 - protein, 337 aa, unidentified
MDKFDPCGIEVSAQELVVALSRDGRAERLRSFPNTAEGHAALLRYLHSGSQRVRVALESTGLYGLDLAYALHRDAQIEVMVANPRAVRHFASALMQRSKNDRLDAEVLREFAARMPFQAWVAPSAHCFALCAVTRRLETLTEQSTAEKNRLHAASLSVAFPPAVRRDLQRSVRSIQRALARLTREAQRILEQDPLLNSSYHLLLTAKGIGPTSALRLLAETALLSEDLDVRQWVAYAGLDPREYQSGSSVHKKVRISKTGNRHLRRALYMPALVAVRHEPHLRAFYQHLLAQGKCKMQALVAAMRKLLHAVYGMLKHRQPAENLYAPSSGHCSAEAA

SEQ ID NO: 405406 - protein, 392 aa, unidentified
MVISVGIDVSKDKHDCFIVNSEGEVLADVFTIPNNMDGFHYLLQRIQDCANTQNKIKVGLEATGHYSYNLLGFLLDNGLPTYVLNPLRTNLYRKSLSLRKTKTDRVDARTIATMLLSDAGLKPYTDTAYHNEELKSLTRYRFDKVKERAKLKSSVSRLVCILFPELEKLVPSLHTASVYTLLEEFSGAKQIAAAHLTRLKTLLETASKGHYKRDMALEIRDAARNSIGSWMPAKSLELQHTIRLIRELDVEIAEIEEQIQSIMDELCSPITTIPGLGFRMAAMILAEVGDFTRFDSPDKLLAYAGMSPSTYQSGQLKNCYPHMEKRGSRYLRYALYNATKYVCHWNPTFAAYLAKKRAEGKHYNVALSHAAKKLVRLIFAMEKSRQPYCSAA

SEQ ID NO: 405407 - protein, 411 aa, unidentified
MQVVYERCCGLDVHKRTVVACVLVTHPDGTVQREVQTFGTMTADLLALSDWLRGQAVGVLAMESTGVYWKPVYNLLEEGRQILLVNPQHLKAVPGRKTDVKDSEWLADLLRHGLLQASFIPPQPVRDLRELTRYRTTLVHERAQEVNRVQKVLESANVKLAAVATDVLGASGRAMLEALLGGEQDPVALAELARGRLRAKLPQLRQALEGRVRPVHRVQLRVLLAHIEFLEGALAELQSEIERLLGPFEDAVALAQTLPGVGETAAVALIAEVGTDMDRFPTHRHLASWAGVCPGNKQSGGIRLSGATTQGNAWLQAILGEVAWAIAHTSGNYLSAQFHRLARRRGKQKAVVAVSHSVLVILYHMLREHKPYTDLGADYFDRLDIQRLQRHHVRRLEQLGYTVTLTPSPAA

SEQ ID NO: 405408 - protein, 353 aa, unidentified
MDTIYIGVDFHARQQTICSLTTMGGEIQTHELKHQHKDQVRAFYAQFTGHVIVGLEASGYSPWFEQLLEDLGHEVWLGDATEIRRRARWRQKNDRRDAELILDLMLHDEFPRLHRPSPQSREVLRMLRYRQKLIKIRTISKNSLQALALQSGLARRSQLFTRAGQQELRTAAMSPAMQWQREQWLQLLEPLNQRLVETMLWLKQQSQDDARIKLLRTHPGIGLLTSLCVVHTLWPVSRFRNQRKVAAYAGLEPMERSSAERKHFLGISKAGSRVLRYLLIEAAHTAVKKDDDLKRFYQRLVQRRGRPKAKTAAARKLLIRSYIMLRDEIDYAEFRRRAVAARLARQSSRPPCL

SEQ ID NO: 405409 - protein, 333 aa, unidentified
MQFTKILGIDISKKTFDVALSENKVNSKMTNNQFDNNLKGFQSLLKWLKTEKINLDELLICMENTGVYHRCLVVYLQSKQVFTWVETPVEIKWSMGLQRGKNDAADARMIALYAFRNQDKSKNYNALDKSLQKIADLMATRERLIKARKLLLVPVKEMTRSGLKEEAKVMERACSKSVSALEKEIKAIEIQLETVIESESELSENYQIVRSVRCVGLVCALHLMVYTHNFTRFDNAKQIASYCGIAPFEYSSGTSVRGRTKVHKMANKTLKTSLHMCSVSSVRHNPEMKQYMERKVAEGKNKMLILNAIRNKILQRVFACVKAKRLYEFKNAA

SEQ ID NO: 405410 - protein, 370 aa, unidentified
MNNYTTVVGLDVHKKTIVAAVLPAGSDHVTERVTIENQAKTIEKLVRRLAARAAVKFVYEAGPCGYKLQRQMSEMGQQCAVIAPSLMPRRPGDRVKTDRRDAENLARYQRAGELTEIPVPTLEEEAARDLVRTREDSLSDQLRAKHRLAKFLLRQGLVYGGTKSWGEKYKVWLQGLSFKLEPQQQTFAAYVRAVEEAEARRETLDIQMADLAQREPYQTQVKYLSCLKGIDRITALTLAVEARSFMRFENVRGFMSYTGMVPSEYSSGERVRRGSITKAGNAHIRRVLVESAWCYRRPNNAMSITIARRREGCPPEVVAIAKKAQTRLHRKFARMAGQNKLPQVTAVAVARELAGFVWAIARHFPVAAKA

SEQ ID NO: 405411 - protein, 372 aa, unidentified
MDKCIIVGCDLHDKTALLMISEGRGKAFRRLYENDRFGRKAMITALKKRASEAGGAKIVFAYEASCQGFGLYDELTAAGIECYVLAPTKIAKSVKQRRDKTDEKDAQRLLELLRAYVFAGNELPTVWVPDPQTRDDREVVRARLDATEKVTRLKAQVKSLLKRNGIKRPSGLGKGWTDKYRSWLRGLLGEESELSSGGIVGLKTLLRQLEHLEEEVKFLDREIEVLADEKRYRRCCAAMCKEKGVGLLTAMVFLTEMGDLSRFSNRRQIGAYLGLAPSSGESGENDDRKGHITHHGNARVRKALCQATWSRVRSDSSEKEIYKKIVRKNPKHKKIAVVAIMRRLAVRLWHAGYRAQMRAESQRFEEEKAAVI

SEQ ID NO: 405412 - protein, 481 aa, unidentified
MKAKQKEPIEKYTGQSRQLNWRHMNRKQRRDLERKIQSADLTLQLIHPDAAGIDIGNESHYVAVPPDRDSQPVQRFGCTTAELRTMANWLKQCRIRTVAMQSTSVYWIAVYDVLEQAGLEVYLVNARETKNLPGRKSDVQESQWLMKLHTYGLLRNSFRPPQEIRTMRTYWRQRNDLVRSAARHIQRIQKTLTQMNMQLANVLSDVSGVTGQAIIKAILAGERDPQRLAAFRDPRVKASEKDIARSLEGNWQEDLLFVLKQEQAAFEFCRKQMAECDHQLELYLQKMEDRSQGATLPEEKRKDRLQKKGNQPQFDLQQQLFRMTGTDLTQIDGIDVMTAATILSEAGWDMIKWKDEDHFVSWLRLAPDNRISGDRIVGKGRLPTSNRVTVALKLAANNLRTSQSYLGAQFRRLRARLDTPVAIKAMAAKLARLIYRMLRYGTKYLDHGSPYYELQQRTRDIRRLKLKAATLGFQLIPSTAA

SEQ ID NO: 405413 - protein, 461 aa, unidentified
MKGKSRRRSAKQARREQRILEKIHLHAAGIDIGSESHWVAVPDDRDDHPVREFKSFTRELLALADWLEACGIDTVAMESTGVYWIPLYEILEARGIEVLLVNARHVKGVPGRKSDILDCQWLQQLHTFGLLRGSFRPDAPIAALRSLVRHRDQLVEAAASYVQRMQKAMVLMNLQLHNVISDVTGVTGIAILRDIVAGQTDPATLARHRHPRCRASEAEIAASLTGHYRDEHRFVLRQALELYDVYQHKIRSCDEQIEAHIRSLEATCASPGTIPSPSRRAQRGANEPDFEIRSPLFTLCGGVDLSELPGIGPYGALKLISEIGLDMRRWASEKHFAAWLTLSPRNEISGGKLLRSRTQPSANRAAKILRMAAMSLGRSDHALGAFYRRMAARVGKAKAITATARKLALLVYRMLRDHIPYREMSAADYDQQQRSRILKGLRKRAASLGFELVDTQTGLVM

SEQ ID NO: 405414 - protein, 333 aa, unidentified
MIKTNETEIKSETTENESYTYIGVDLSAKYLDVWVEDSYHRYTNDEKGLTRLQKRIKQIGGQVLVACEATGSISLYFCKALDRMGIKHKVLTPSWVRHYAKSKGQVAKTDKIDSKIIRDYAQTYQVKAEVPLTDTELRMRLLTSARALLIKQQAQIKATLRNYRDETIRATFSAVLEVLEEKIEKLGQQLETIIFANDEKKALYSLLMRVPGIGERVAKSLICRLPELGSLNRKQVASTVGVCPFNWDSGGHIGKRIPRFGRNDVRTLLFMSVLADLSSKKSTVRSRYDALKAKGKPRKVALIACLRWKVCKLNAIIKAWIDQGKPDNMPLHL

SEQ ID NO: 405415 - protein, 347 aa, unidentified
MVTLGADPHKQSHSLVAVDDTGRQLGAHTVPATSAGHLDVLRWAQCWPERRWAVEDCRHVTRGLERDLLNAGEVVVRVPPHVAAEGRRSVRERGKSDAIDALAVARAALREPNLPKAQLEQHAREVRLLLDHREDLVGERTRIQNRLQWLLHELEPGFQVANGALSRRPAIRRVEGLLEGRPGIVAELARELTARTAQLSTRIGELEQQLAGMMPALSPSLLALAGCGILTAAKLVGETADVRRFRSRAAFAMHNGTAPIPASSGNQQRHRLNRGGNRQINAAIHRIAVSQIRRSGRSRDYFQGRLAAGNTKREAYRALRRRLSDEVFKLMLADQRTHASSAQSAAA

SEQ ID NO: 405416 - protein, 365 aa, unidentified
MAAKVTQRKKTNKRIRLQEGEKVHVGLDVHKRSYHVAIYSSTPGRGLVARWVQPPDFQVLHKTLFSLKSSVEQVVYEAGPTGFSLARTLQKEGYSVKVIAPGHTPTARVQESKSDGLDCVRLAEFSVKDLLKYVYIPTEEEDGARQVSRHRDAAVRKVARLKCQIKSFLLYNGIADPPGLKHWSLQSVETLRTLVLENEDLRFCLDDLLDSLREAQARLSRLNERGRRIIRREEYREASTYLATIAGVGAITILTVLTEFLAPDRFDTALQVSKYQGLCPLVRSSGGTRREMGRHRGGNRRLRTMIVEASWRWVRRDPYARSLYEHYLKRTSNKKKAIVAVARRLGIIIWRMLTRMEPYREKEAA

SEQ ID NO: 405417 - protein, 342 aa, unidentified
MLVLGIDVGKRELFVQLQDATGRSLGQRGPVANTPAGLQQVSDWVRKWTELAELHVVMEATNVYWERCAHYFQSLCCVVSVVNPAQIKYFARSVLRRGKTDAMDAELIARYGVVMHPGRWTPPSTALSDLKQLTREREAVLVRRTQEQNHLQALQDAHRASETVVKLTQQRLDLIVGQVVEIEAAMRALIEADELLSQQLKLLLSVPGFAFVAAATILAETVGFAHLDTGREMSAAAGMAPSPRQSGSKRGQGRISKTGNARLRRIAYLSALGASRSHSRMRTYYRHLRDTGKPAKVALVALGRKLLITGLAVVKSGQPYRDDFGRSQDGAGPTPTTAQPKT

SEQ ID NO: 405418 - protein, 368 aa, unidentified
MNCKPVIAPCSLFYNTRSVVCKGMVDGSDLSKKTYEMCYFDQQGKVGRSGGETTKGGRAKLYAKVKPEDIVAMEVNSLAFVMEKEMRQIGCTVVILDASQLSVIYASTKKTDKEDALKLARLVKIYEKEDLPTVDVPTDKEYYRRKLTKECKTLKDDRTQEINRLHALFLQCGITTMKRSNLQTDANRQKVLPQLFGYEVGQAKRVCERLTLLDAQIKELEQLIKKECKEDKDIQRLQTIPGVGDKTALAFAAYVGDGKRFNNGDEVANYLGLVPRVDCSGSINRYGHITKKGNRIVRALLYQAAWSIVRSKHGGALKAKYFYMTEHGKGKKISITAIARKMAKLMYLIMKNKGEEYKELPAPASRAG

SEQ ID NO: 405419 - protein, 387 aa, unidentified
MYYIGIDISKFKHDCAVIDDSGEIVTPSWSFTNDAEGFSQLKLLLNSLDTETRIGLESTGHYGMNLKLFLESNNFSFMEFNPLLINRFVKSKSLRKTKSDSIDCMMIAHYLMTVEYKPYPSSFYHTEKLKSLTRFRDSLIRFRSRLLVELTNILDKVFPEFKPFFGSRFSVTALYILSNYSSPEKIANMNSKSYEALRKLSRGRFSTVDFAKLKQLAKNTIGTTEDYLLLQMQIVLDIYRQLDSKVDETEVSIKECVSDMNPPMLSVPGIGIESAAVILAEFGDFSKFKNASKMLSFAGLEPGYFQSGTSETTGKMVKHGSSYLRYALMNCAQTVVNYEPTFAMFYSKKRAEGKPHRVALSHVVKKLLRVIYTLQTKNIAYDADLVR

SEQ ID NO: 405420 - protein, 329 aa, unidentified
MDSHPPFPIVGIDVSKATRAVCYQVQEQVKHLEVRNDKGGFQQLVQACGAHCRFVMEATGTYNLALAYYLHEQGGQVAVLNPLVIKRFIQMHLSKGKSDRKDAQWLLRYGQQQPLKVWQPDETVLVECRQLEQSTEQLLKQKRMVSNALEALQRQPVISKLALKRLQQTLKTLTTQVDAVEAELLLLLEQRFASEMTLLCSIPGIGRKTAGMLLLFAGGFTRLDNYRQLIAMAGLSPREHTSGTRIRGKVRITKMGGALIRGKLFRCSFSAKKTNAACAALFDRLVANGKNKKLALNAVCNKLLKQAFAIVKSGIPYQADFCSKLVLTA

SEQ ID NO: 405421 - protein, 428 aa, unidentified
MACLPVEVILGVDTHRDTHAVALIDLVGRLVAADTFATTRRGIAALIAWAQQHGTIRRAGVEGTGSYGASLTRALALEGVEVIEVTRTARVGARHCAKNDTRDAQAAARSVLSGQATAIPKSRDGIVESIRVLRNTRASAVKARSPAILQLKSLVLTAPDELRESLRDLNTKALVERCARMHRARQLDTLHATRHALRTLARRHNALTDEIAQLDALLADLTAKAAPRLLTQTGIGPQIAARLLLVAGDNPTRLRNDAALAALCGASPVEASSGKTIRHRLNRGGDRQANSALWLIATNRMIHDPTTRAYVNKKTSDGKSTKEIRRCLMRHIARGIFPLLIADLHDARTLHTQPSRAWPRATARAAQPQSPQSAQRSRAVQGSPPGPSNASRAAVSLDSPGAAQLSATRRHPPRPPRPTPRRPLTPTT

SEQ ID NO: 405422 - protein, 326 aa, unidentified
MFYLGIDVSKAKFDCCLFLDDSSGKIKTKCFSNSNKGFHQLLSWLNRFGLVAEETRALMEATSVYHEMLAQFLFDLKFQVCVANPARTRYFAQSSSKLNKTDKIDSEVLVRFAMTVDLHLWQPTPDNIRLLNALLDRRSSLANDLKREQNRLEKANSTLIVVPILKSIKTNIKSLTRQIQNLDTQIQNHIDQDHELKRDQKLLESIPAIAERTSLLMLVFLRAHSFEKASQAAAFVGLVPIHRQSGSSVLGKSRLSKAGPPKIRSGLYMAAVVATRYNPHIRELSERLLAKGKTKMVAIAAAMRKLIHLCYGVLKNQQPYQANYKA

SEQ ID NO: 405423 - protein, 383 aa, unidentified
MDHKQGTLDQEKSAPVPVLYVAFELSNSTWKMACSDGSKLRHVTVTAGDLAQVQRALIGAKGHFGLGDKVHPVSCYEAGRDGFWLHRYLHSCGIDNVVVDSASLEVNRRLRRAKTDRVDAGKLLSMLVRYHGGEKHLWRVVRVPSREDEDARHLHRELEALKSERTRHRNRIHGILIQQGLRVRNPSTKKFVQELELMRTWDGRALPPEMKVRLVRVHERLRLVEEQISNLVKEKTHRLKEESARMAQVTQLLRLPGIGPVSSWTFVMEFFGWRRFRNRREVAALAGLTPTPYDSGSRLREQGISKAGNRRVRTLAIEIAWAWLRFQPRSKLSRWFLERFADGGSRMRRIGIVALARRLLIDLWRFLEYGVVPEGAQVRPLAI

SEQ ID NO: 405424 - protein, 406 aa, unidentified
MDIVYQRCCGLDVHKKSIMACLIIPEGKEIKTFGTMTGDILALIDWLKEKGCTHVAMESTGVYWKPVYNLLEQEEIETLVVNAQHIKAVPGRKTDVKDAEWIAELLQHGLLQGSYIPEREQRELRELVRYRRSLINERNREANRIIKVLEGANIKLSSVASDVLGVSGRAMLKAIINGTEDPELLAGLARGRMKNKKEELIRSLHGIIGPHQRLLLATQLEHIEFLDQQIARLDEEIAERMRPFEEDLELLDTIPGVGRRAAEEILAETGTDMNRFPTAAHLASWAGMSPGNNKSAGKNKSGGTTKGNKSLRSTLVNAAHAAAHTKDTYLSARYHRIAARRGSNRAAVAVGHTILVIVYHILKNRQPYKELGANYLDRRKKEATVKQAIKKLETLGYKVRVEEVVA

SEQ ID NO: 405425 - protein, 367 aa, unidentified
MEKSSKVFVGMDVHKESIEVTLAEEGGEVRRLGRIGGDRGSLLKMARKLQSRGGERVFVYEAGPCGFWIQRELVALGERCMVVSPALVPKRAGDHVKTDRRDSERLASLARAGELGAIHVPDIRDEAIRDLVRGRDDAVIAQRRVRQQLKALLLRNDIGYVGKTSWTGAHRRWLSELKLPEPAQQIVFEEYVDATAVATDRIERLTRAIQTETLTWRFAPVVAALQAMRGIQFVHAVTLIAELGDLTRFGSARSLMGYLGLVPREASSGEHRRQGSITKAGNSYARRALIEAAWAYRHPARVTRIIATRQTGLPKAACDIAWRAQLRLSSKYRRLNARHLNHNKIVVALARELSGFVWAIGQSVKPQ

SEQ ID NO: 405426 - protein, 340 aa, unidentified
MMTTTIGLDLAKSVFQVHGVSSEGQVTVRRKLRRAELMRFFRDLPPCLIGMEACATAHYWARELSALGHEVRLMPPSYVKAYLRRQKNDAADAEAICEAVTRPTMRFVPVKSAERQAILTLHRTRELLVRQKTTLIRAIRSHCAEFGLVVPQGARRIFDLLQLVRETHASTLPEAAVLTMQMLGAQLDALAVQIRTLERRLLAWHRENETSQRLATIPGVGIITSTALAASISDPNLFRSGREFAAFLGLVPRQNSSGGKERLGRISKKGDGYLRKLLVVGATSVIRRARTGVTPSAGWVQALLERRPSRVVTVAMANKTARIAWAVMARGEIYRSIARG

SEQ ID NO: 405427 - protein, 374 aa, unidentified
MGNLLDFLQEVEKSAGGHQPSVVLESTGHYHIPVIQFLEEQKYVYVIVNPLISHRAKSSSLRKVKTDAIGAYHLCELYYKEELEPYKKRGVQLLNLRNLTRQQESIAEISAKTKLQLHSLIDQVFPEYRGVFGSLYSKVSLLTLLEFPTSKDVLSVSEKELTDKIASLCMSRSESWAKEKAQKLREAALRDPFQNNLYDSHIFNLEILVKIVLQYQEHLSNIADEIDALASEIEEYEILQSIPGIGEKIAATIISEIGEIDRFNGAKKLVAFAGIDPSVYSSGKFTASVNRITKRGSCRLRHALYMAVQSGIRDSRKKKTTDEIIPRNRRLREFYDKKREEGKPFRVAIIACTNKLLHWIYALLKSKSTFQDIT

SEQ ID NO: 405428 - protein, 413 aa, unidentified
MDVLHPRCCGLDVHKSSISACILVQEAGRVKKHQRRFSAMTQDLQELAIWLRQFEVTQVAMESSGVYWKPVWNILEGQFTVVLVNAQHIKNVPGRKTDQKDAEWIAQLLQHGLLRPSYVPCEVIRDLRDLTRMRTSLSQEASRISSRVQKVLEDANVKLASVATNTLGKSGRAMLEEIIAGQNDPECLTSLALGHLRAKAPQLRLALDGKIRPHHRFLLRRLLDQLRFVEHEIVLLDDRLEEIGRERPELSQAVARWDTIPGIDRVAGWTFLAEVGNTMAQFPTAEQLASWAALCPGNHESAGKRLGGTTRKGSPWLRRMACQCAWAAARTKNTYLSAQFRRVAARRGSKRAIIAVAHSLVIIGYYLQKNQRNYEDLGGDYFDRIDSEGLKRYFVKRLEKLGHKVTLVPIKAA

SEQ ID NO: 405429 - protein, 353 aa, unidentified
MIVIGTDTHKRTHTSVAVVAGTGEFSAELTAAAVPRGFAEMLAWAEGVDAERVWAIEDCRHVSGGLERFLLARGERVVRVAPKLMGAARRGSRSAGKSDAIDAAAIARAALAAGPERLPAATVDERAFEIKLLLDHHDDLVAQRSDEQRRLRWHLHDLWPELDLPAGCLDREKWLSRIARRLARAEQTRRVQIARELVGSIRARTRRIRELERELTSLVAEKAPQLLQLPGCGSLTAARIIAEVGDVARFSSDAQLARLAGIAPIPVSSGMRDRHRLDRGGNRKLNCAFHRLAVNQGRLHPAARDYLATKQAEGRTRMDALRCLKRHLARRVYRLLTPTTTPLAHANNAASLT

SEQ ID NO: 405430 - protein, 337 aa, unidentified
MTFYVGLDVSIQSTAICVLDDAGRVEKELLAASHADDIATGLTPFAGRIEAIGLEAGPMSEFLVAGLKKHGMDAILMETRRVHAALSAIPVKTDRKDARGIAELLRMGWFQPVHMKTPAARDLRLLLSARETLSRRIRELDGSVRGLLRGFGLRIPAGARGRFCSMVRELIDDNPMLVETIAPILSARDALAGEFAKLDKLVRDRSREDATCRRLMTIPGVGAVIAMTFRAGVDDPARFRSSKSVGACFGLTPRRYQSGETDRIGSITKAGDSSVRAALYEAAHVMLVRTSKWTPLKAWAMRVAVRRGAKRAKIALARKLAVIMHRMWVDGTEFRTA

SEQ ID NO: 405431 - protein, 471 aa, unidentified
MGRDVLGTCGVGSAPVLSPEKTGQAVKLVVLFGAHLPGSIYMGRRARIGVCNTRTRLTRAPGFLGQKPRATHRRLPMQEQSQRFVALDIHQNYIMAGAVDAQQEIVLPPEKVDIQVLEHWARKRLWPTDQVVIEASTNTWTVYDVLEPLVARVVVAHPYHIKLIASSLVKTDKRDTLALARLLAAHLIPEVWVPPIHVRELRALVSHRRRLMSQRTAAKNQLRAVVQRYHLIPPKGKLFSDQNRAWWFSLTLSPSEQLRVRHHLDTIARVSMQLEETERELTRLSADAQWIKQVTLLIQLPGIAMLNAMTILSAIGDIDRFPSAKKLVGYAGLGGKVHASGKTQRGGGITKQGRTELRQTMVEAAWTAVTVSPVWNARFEKLMSRLGKMKAITAIARKLLIVVWHVLAKQEADRQADPVTVERSLLRWASQFRLATALGSSRTAFAEQAMETLGLNQLVTPHDAPASMESG

SEQ ID NO: 405432 - protein, 400 aa, unidentified
MMTPDDIDVWVGLDVGKSAHHAHALDHDGNTLYDKPLKQDEKAIRTMLGKLSKHGRVLLVVDQPNTIGSLPLTVARNMGIAVAYLPGTAMRRTAQLLPGDAKTDRRDAHVIAWAALKLPETLRDAGPDDETLAALKLLAGHDEDLAHESTRHVNRLRSLLLQTHPAFERALKGERITRDATLALLERYGGPMGVKRAGIEDVKDWAKSNGLRAGRIIDDMFKAIGEQTVTVPGTLMAETIIPSIAHDIKTIRDRRREVGRQVEKLLEDHPLLTVLTSMPGIGVRTASNILLGIGGDIANFKSSAHLAAYEGISPVTGQSGTSIKGERPSRRGNKRLKNALWQTAFVASTKHPPSVAYYKRKREQGKHHNAAIICLARRRCDVIYSMLKNGTLYQEPALVA

SEQ ID NO: 405433 - protein, 339 aa, unidentified
MNNSVIGLDIAKHIFHLFTQGVDGKMIKKKLKRSELLEHFANYPVSTIGIEACGSAHHWARELTKLGHEVILLNARYVKSFVVGNKNDFNDAAAIYDAVTRPNKRVVAIKTVAQQDIQLVHSMRKELVDTRTALVNQMRGLLSERGIIINQGIAQVRQQLPLILEDAENGLTALSREMFAEQYEKLKALDDDIKAQDHRINRLCNANELSKRFLDVPGVGPVTATIIAADLGDNGKGYESSRDYAASLGVVPKQHSSGDKQVYLGISKRGNRYIRTMLIHGARSVLKNCSKKTDKLSLWLQELIKRRGFNKAAVALANKNARILWAMANKNKAYEALAV

SEQ ID NO: 405434 - protein, 429 aa, unidentified
MVCTRVPHPAKPGRRATKVWQVPATTNAIIELADQLACQGIQRVVVESTSDYWRAWLYLLQARGLVVWLVNARDVKHLPGRPKTDKLDAVWLARLNERGMLRPSFVPPAEIRQLRDYTRLRSDLTAERGRQVQRLEKLLEDALIKLSTVATDIMGVSGRAMLEALIAGQRDPKVLAELARGRMRGKRGALVQALTGGFDDHHAELARMLLDHYDALTGQIDRLTVRIQELIGAIPAAQAPSDGAGPTGGGDGGTTGVGAHPPVAQPPLGALDRLDEVPGVGAKAAQVIIAELGLDMGQFPTPGHLVSWARLAPRTIQSGAKHRAGATGKGNPYLKGVLGEVAAAAAKTDTFLGERYRRLVRRIGKLKALVAIARSILVIIWHLLADPTARFHDLGAGYYPSRIDRDHKTRNHVRQLQALGYSVTLTPAA

SEQ ID NO: 405435 - protein, 408 aa, unidentified
MQPILKSCCGLDVHKSMVMTCIAHGPLDKPPMFEIRKFSTMTDDLRTLKEWLKEYGVTAVAMESTGIYWKPIFNILEDDFDVVLANAQHIKNVPERKTDVKDCQWIAHLFRNGLISGSFIPPREIRELRDLTRTRRKLVEAMTAEKNRVQKVLEDANIKISSVVSKVFGVSSLNMIGALLEKDTLSADEIAEMAKGKLKRKVNQLVKALNGNVTDHHRFLLKQHLAHIDCLVERIREIDEEIQRKLRPHEREFKSIQSVTGIKEISAASVIAEIGVDMSRFPDEAHLSSWAAMCPGNNESAGKKKSGKTRRGNNYLKATLTEVAWAASRTKGTALSAMYHNIARRRGKNRALVAVGHQILIEIYRVLKTGEPYQDVGAEAVNGRKSKNRELGLIRELEGCGYVVSKVL

SEQ ID NO: 405436 - protein, 444 aa, unidentified
MSRKEHTHLRGRQGQAFADQVRGVSAERILCVSIDVSKDFHVVLIHNSLGEIVRPSFEIDIFQSGLSHLCRAIDEAVERTKAQVVLVGMEPTGHYFENLARHLHSRPQPVTLINSYAVKQNRSQQMMTYEKSDPIDAAAIGDLLRRGEGTLFQPVTGVYLELQHLARARVSEVKIQTRLKNRIIGHLDRIFPGLVLTKASVKTGRYQPLFATDFWECQTWQHLIRVCPDPRQLAEMSPQDLIAAFHARRYRLGPVFATRIITYAQKALIPDPEVVAIRCELLQLDLLALDQVMTRIAHLEAGLHERVIQTPYQILSRVKGLSPTLAASLAGAIGDPAHYTYAGQVFRRSGLVSGRNDSGAHQLKGQGKGITKVGDVHLRRALMAVTDRLILHQPILQAYYHRLKQAKSRGVARVATARRATGILWATVRDQRADTLLLKGGAPM

SEQ ID NO: 405437 - protein, 335 aa, unidentified
MNNIDYAGIDVSNKTLEVALTRKGKLVRKEFANTPAGHRKLKKFLEMKTDRFVRAVFESTGVYGLDMAILLSDSRNVQICEANPRAVRRFAEASMRRGKTDTMDAMVLSEYARKMEFRPYNPPSEEARSLRCIARRIHALSEMGVEERNRLHAAERTKTTPDTILRSLKKSIEQIEQSICELKAAAMEIISSSDELLRMFELIISISGIAKTSGTLILGEIACMPADMDVRQLVAMAGLDPVEYKSGTSVNMIKGISKQGNKYLRTALHMPAMVAHQHDPHVKAYFDHLLAMGKKKPVANTAVMRKLLHAIWGMLKNDQPFDGSKFYRMPEPPAA

SEQ ID NO: 405438 - protein, 344 aa, unidentified
MKITTIGLDLAKSVFQVHGVDATGEVVVRKSLRRSQMLPFFAKLPPCLVGIEACGTSHHWARELLKLGHEVRLMPPAYVKPYVKRGKTDAADAEAVCEAVARPTMRFVPVKSLEQQAALSMHRTRDLLVKQRTQLVNMIRGLLAEFGIDIPKGLERALLMARRIVDGEAPDVPMEAARIVSTLSQQALDIHIRLREIDRDLLVWQRGNDVARRLMTIPGIGPVGATALAASITDPHQFRSGRQFAAWLGLTPLQKSSGGKARLGRITKMGDKYLRKLLIVGMTSLVRRAKYNPKTVDPRLADLLARKPVRVATVAMANKAARIVWAVMARGETYRAGHRPALAA

SEQ ID NO: 405439 - protein, 354 aa, unidentified
MSEKPNSAIAVIGIDIGKNSFHVVGLDARGAIVLRQRWSRSQVEARFANMPPCLIGMEACVGAHHLSRKLQGLGHDARLMPAKYVRPYSKGQKNDFRDAEAIAEAVQRPTMKFVATKTADQLDLQALHRVRERLVSQRTGIINQIRAFLLERGIAVRQGQRFLRAGLRGILAAPSDVLSPRMVRVIEDLARDWRRLDERIEGLSGEIEAIARQDLGCERLMSVPGVGPIISSAMVAAIGTGDAFSRGRDFAAWLGLVPRQMSTGDRTILGKISKRGNRYLRVLFVQAAWVVLIKPKSWERHGLKPWLEAAKKRLHHNVLAIALANKLARIAWSVLARGRSFEARKIDGAIAQPA

SEQ ID NO: 405440 - protein, 444 aa, unidentified
MDEADSVAGGAGSSEASPGGITPPAPRETAASKQATDLPPVAEAVSTPAWSEPQEVGAQGRSVMRSVGLDLGARHIAYCEVRAGQVVDRVAVTRLEELASRLGNGTAPACVAFEAAREAWHVHDVLTQWGHQPKIVDTTRLKTIGVGQHKRKNDAIDAEHIAMAVDHGRIPEAHVLSPARRELRKQLSIRQALVETRSQYVVTIRGLARAEGTALPSCSTHNFLDRLQATELDGKIRALIAPLVAALEAIEQQLAHVDDELEQVAKTDPLIRLCATVPGVGLIVAATFLSVIDDPKRFKSAHAVSAYLGLVPSESTTGGPAKRRLGSITKQGNPHARAMLVQAAWSILRASPADDPLRMWGARIAKRRGSPIGAVAVARRLAGVLWAMCRDGTFYSPAEQANASSTGVRRRIQDDTAHAAALELAAKKIHRRTKRRPTSEVASM

SEQ ID NO: 405441 - protein, 369 aa, unidentified
MTDLTLFVGLDVHKKTISIAVVEATAGAAVHFYGTIANTPDTVRALCRKLTRDGQQLHFAYEAGPCGYGVQRLLTRLGHRCEVVAPALIPRKAGDRVKTDRRDAMMLAQTLRAGQLTAVWVPDEAHEAMRDLVRLRMQAMRDLRKSRQQLLSFLLRHGRNSPYRHWTKMHRRWLGELVFAHPAQHLALEEMLQRIERAEALCDRLKAAILELVPQWSLAPVVQAIQALRGVSLLVAAVIVAEVGCFGRFASPHPLMAYLGLNPSEHSSGATVRRGAITKTGNTLARTCLVEAAWTYRFPARVTQIIRDRLAGLPEPIRVIAWKAQVRLSARYRRLIAAGKPAPKVAVAIARELVGFIWAIARLVEPQFV

SEQ ID NO: 405442 - protein, 392 aa, unidentified
MFYLGIDIAKVNHVASLIAKDGSILVKAIKFTNSNEGLQKLIDSISDYDQSQIYCAMEATGTYWLSLFSALTDKGFNVSVFNPYQIKSFRGAYTNRKQKNDVIDSILIANFLSFNGIEHASLPNDDLLALKNLTRYRRNLVDNISKAKIQVTGILDKVFPEYSDLFSDIFGEASKQILLNCPTPNEVINFNTRKLANLLKKASRGYHSTNKVREVKNLAKNSFGIKFTGDACSFEIKQLVNQIIFLENQVNELEVKIKDIYSKLDNHLQSIPGIGEVTAPIILAEIGDINNFSSPSKLTAFAGIDPSENQSGNKKSSNEKTSKRGSPYLRHALFTAAMVASNNDPVMHDYYIKKRAEGKHHYVALTGIERKLLGIIFHVLKENRDYRPPKSS

SEQ ID NO: 405443 - protein, 500 aa, unidentified
MQRVEDSEEIIERVTAIDVGKAEVVVCIRIPDPARPGRRQQEIVHSSTLTPRLLVLADRLVELGVTRVVMEATSDYWKPVFYLLESRGLDPWLVNARDVKHLPGRPKTDRLDAVWLAKVAERQMLRASFVPPGPIRLLRDLTRYRAGLVKVRTAEKNRVEKLLEDAQIKLSSVVSDIFGVSGREMLAALLAGERRPAVLAQLARTRMRPKIPLLEEAFAGQFTEHHAFLLRLMLARIDEAGADIAAVEGRIQQLVAPFATVVARLDEIPGVGAAAAWTILAEIGLDMSRFPTSAHLCSWARYAPGVNQSAGKNTGKNKGRGATGHGNPYLGQPSPRPPWPPHAPTPSSATATDAWPAAAERREPPSRSDAPSWSSSGTCCLSPRPATTTSARTTPAAPTPTAPPATTSANFKPSATPSPSHTRGLRAAPHPTATETTGIAVVPFARPRLIFGLVTTDPRGLRGQVVPTTAAALACAGNPHAGEAARVHRVDTPVRTRAAA

SEQ ID NO: 405444 - protein, 436 aa, unidentified
MDIILEHCAGLDVHRSTVVACVLGVGGPSQGAKSKRAERPIQTFATTPDGLAQLVKWLQQSGVTHAGMEATGVYWMPVFAALEAVEGITPLVVNARHVKNVPGRKTDVKDAEWLAQLIRHGLVTNGFVPAKPFRELRELVRYRRSLVEAQASERQRLIKLLEGAGVKLAGVLTDVFGVSGRAMILAMIEGEATPEEMAKLAKGVARAKYRELAAALAAPLAPHQRKILACQFNRVKAAEADIAALDVEIDERLKPYAKLMTALMKIPGLDRVAAMAVLAEIGDDLSKFPSVAALSAWAGVCPGSRESAGKSKPTGARKGNPYLRTILCNAAVGATKKKNSYYKGKYHKLKARRGAGRAILAIAHKLLIAIYHVLKGEPFRDLGETYLDQRNLQRAASRHVKQLQALGYTVKLEGTPNFQPKPATSKAPKKAPRKKA

SEQ ID NO: 405445 - protein, 344 aa, unidentified
MDNRTQYLGFAGVDLAKKVMQIHFVTEDGEITDKSAKRAEFLDFFRNRGKCLIGMEACGSSQDWARKLEAMGHEVHLMSPKAVKPFVSGQKNDHNDAIGIYKAMFNGVRRVPVKSTEIRDLQTLRRIRSQVTKDKVKEINHVRGLLAEYGIVMGKSLNAFNKDISSALEILTERGAVSPLVAEELRTTVEAIKAKIERQKKLDQEIEQLARGCKNYENFLKTPGVGPFTAAMLCVLLCDPSIFANGRQFAAYIGLAPRSRGSGGKNYVTGIPSKFNCDSESRAVLVECAQAIARCKNKSLWVEEILRRKPKKVALIAIANKLARQVWAMANKGESFKQMAVLTA

SEQ ID NO: 405446 - protein, 343 aa, unidentified
MDHFAGLDVSVKDTSVCIVDDTGKIVRELKVASEPEALLAVLTSAAYLFKRIGLEAGPLSQWLFSALAEAGLPAICVETRHMRAVLQAQINKTDRNDARGMAQMMRAGLYRPVHVKTLRSQKLRMLLTHRKLLQSKAIAVENDLRGTLRNFGLKVGMAGKLKFEARIRELVENLPDLAVLVEPLLIVRRVLREQIAVLHRRLLAIVQDDAVCRRLMTIPGVGPVVALTYRATVDVPARFRNSKAVGAVFGLTPSKYQSGEIDGTGGISGCGDEMMRVMLYEAAQSMLHSKRWSWLKAWAMQIARRRGMKKAIVALARRLAVVMHRIWIDGTTFRWTREEALAA

SEQ ID NO: 405447 - protein, 342 aa, unidentified
MYYIGLDVHKKTISYCVKDASGQVHQEGKVGATRWELDDWMNTLPQPWTVAMEATIFTGWIYDHLLPHAQQVKVAHPLMLRAIAAAKKKNDRIDAGKIADCLRCDFLPECHMASTAIRDRRRTLRYRHLLVRQMVQMKNRISGLLMETGVSHNKQRLHKVGYFRELLASNEEVNESIRPLLRVSRDSIVRLQKTEYALVSSLQRDPLLAERIKRLRTVPGVGPITALTWALEIGEVSRFPSIRQAISYCGLCGDEKSSADKVTRTPLSKQRNKHIQRVLVEAAKLAPRQDHNLALVYEREKQKGNANRATLAVARKMVAYLLAVDRGQRDFVPFADSQSAAA

SEQ ID NO: 405448 - protein, 426 aa, unidentified
MVARNFKWGTIMIDQRRWYAGVDWASESHHVFVTDGDGLKIGEKIFKHSGEGLAEMAAWLMVASGAGDPSQIHIAIEVPHGPVVETLIERKFNVHAINPKQMDRFRDRFTLAGAKDDSRDAEVMASALRTDPRCFRSLAAADPVIIELREWSRIAENLGAERNRLTNRMREQLWRYFPAILELDSDLSAEWLLALWEAAPTPAKAVRIREATFAKLLKRHRIRRFNAAYVRDVLRQTPVTVAAGTTEAACAHIATLIARIRLLNRQITQAHDRLDALIAQLTSAAQVELEGKQHDAEILASLPGIGRIVLATLLAEAFDALQRRDYTALRSLTGVAPVTKKSGKSRIVIRRHACHRRLSNAMYHWARIAVQHDRISRAKYAALRQRGHSHGRALRTVADRLLNVACSMLKTGTTFDPSLAGEKKTC

SEQ ID NO: 405449 - protein, 356 aa, unidentified
MTTYYIGADVHCNNLEIAIMNRKKIIQRYSVPTNITAASQVLDSYTGKKYMVIEEGPMAGWLYRNLRGKVNRFIVSDPRRNKLISSDGDHDDKIDSGKLAMLLEGGYLREVYHSDNEYQVELKHWVILYNDRVRDAVRNINKIRSRCRMHGIAIPRKVLREPKHRAEWLKSLKNTALASQLLMLWIGYDATAKQSRMAKQHMIQLSTKYPVIKLWKKLPGIGTIRAATIFAYLDTPWRFKKKNKLWKYCGIGLQRTASGKDRKGRPKPAILEMPLASNRVLKNAIMGAALTAINQKQNAFKTDYERMVRDGVVPSNARHTVARKLLTVMWGMWKTSCQDGPAKVSLPKLNEQCIYV

SEQ ID NO: 405450 - protein, 412 aa, unidentified
MEVLYRHCAGLDVHKDTVVACVRHMANGSVRREVRSFKTTTKELLALSDWLVGEGCTHVAMEATGVYWKPVWHVLSDGDFTLVLANAAHVKNVPGRKTDVNDATWLADLLAHGLIRSSFVPDEQTQEMRTLLRTRKQLVRECSRHVQRLQKTLEDANIKLDSVISDIVGLSGRRMIEALIAGQTEPGALAAMAHRRIKATPDQLEAALRGRVTRHHRFLLQLHLQQIDAVNAAIDQIDQEVDACVEPFRATVRLLTTIPGIDELSACVILAEIGRDMSRFPTAGHLISWAGLCPKNDESAGKRRSTRMRKGAPWLKTTLVQCAAAAARKKASYLQAQFHRLRARRGAKKAIGAVAASILTAAYHMLKNGTLYHDLGPDHFDKRAKAKHVDRLVHRLRNLGFAVALTPVEVAA

SEQ ID NO: 405451 - protein, 347 aa, unidentified
MSTTIAVDVAKSVFEIALSHRPGRVAKRDRLSRGQFARFLATHPPATVLMEACGMAHFWGRHAEASGHRVVLLPPHAVRPYVPRNKTDRADATALLEAARNEAIHPVPVKSVAPQMLTALHRLRSAWLATRTARLNTVRGLLRELGVTIPIGARQVVPRITALLAAEDSAIPAGLRPGLAAVVTEIRELEGRIRTVEQQLKALAIATPLVARLRTIPGIGLLTATALVGFVSHAHRFPSGRHFASYLGLTPREHSSGLRRRLGAISKRGDPYLRMLLIHGARAVLCHAKKAAGPRRLQHWALQLERLRGHNKAAVALANKLARIAWAVWTTGTPFRDSTAPPLAPAV

SEQ ID NO: 405452 - protein, 358 aa, unidentified
MRQQSNEISFKGQNIYVGIDVHLKSWSVTILSETSVLKKMSQGADPDALHRFLTSHYPEAEYYSVYEAGFCGFWIHDRLTELGIHNIVVNPADVPTMSSEKLRKTDAVDSRKLAVSLRAKQLKGIYTPDSEALEIRSLIRLKNSITKDMTRQKNRIKSQLRYLGIEIPTEYLEPHSNWSKRFLNWLREVEMRTPSGRQTLDILIMQFEALRKQKAEMTRRLRALSHTDRFEEMLGLLMTVPGIGQTTGLALMAEIVDITRFDNAEQLAAYVGMIPMCHSSGEHEGVGDITLRKHSILRSNVIEAAWVAIRKDEAMQLCYLNNCKRMVPSKAIVKVARKLVTRIYFVLKRHQPYVNAVA

SEQ ID NO: 405453 - protein, 363 aa, unidentified
MDKYIGFDIDDKKTVACVVQKGKKDKYATLRTDIEQMKKFLRTESKAGEKLHLTFEISGQAGYRYDRLCGYAEDITVSNPSKMTWIYRTATKTDRIDARKQAVLLSIGEVPKVHIPINRVRQWRVTILHRRNTVNKITSVKNRIRALLKANGFVKASERGSWWKVANRAWMRGLAEEVQIEDECLWRMNLLDMLEELCLLDGQLKRTTGYLDGYLGKQAGGRLLMSIPGIGPRTAEAVLAYTDDIRRFGRSKQYCAYFGLTPRLDESGSRRRLGHISKQGPSVVRWLLVEAAWRTIKKSAVLRSFYERVMCGQKSRKKIAIVAVARKLLSIMRAMQFTGELFNERLVCNECGVRRIAKVKNSA

SEQ ID NO: 405454 - protein, 442 aa, unidentified
MDASLNANAKLSLRGFAICPYLAGINMGKQRDNACGADIHKNKIVATILSQLGTKIQADFGTTLPELLKFKAWLINNDCRIMAMESTGTYWIPIYSVLEGSIDIIVANPYMIKHIPGKKTDLVDSDWLAELCLKDLIVPSRIFPKEDRVLRSLTRSREGLVKIRTRLKNKIHRDLSSSHIKLSSVVTDIFGKSGTHILRGLLDNRSIDEIIESIPSRRVKKNADKIKESIENNLDSSQIFLIESSLDLMGSIQDNINRIDADLRKRTSSRLNDLKIAMSIPGIEFTSAVTILAEIGDYRDFRSPEQLASYFGIVPFVNQSADKLRTGCITKHGSKHLRWIMVQVAHAASKKIGSRLRKFYLRVKARRGANVAIVALARKILCILHHLLINQEMYEEPGVTKRTRPVKLDQPSSQSEFTAQEMIDILQRSGYEIRKIERGAFG

SEQ ID NO: 405455 - protein, 456 aa, unidentified
MPQSRKKSRKIKSPKGLPKELRHININATGIDVGSDRHLVAVPEGRDTVSVREFGTFTADLQAIGDWLEKCGVTTVAMESTGVYWIPLFEVLEQRGFEVKLVDARHVKNVSGRKSDILDCQWIQQLHTYGLLAGAYRPPDEICTLRGYMRQREMLIQSSSMHVQHMQKALQQMNVLLHNVVSDITGLTGMRILKAIIAGERDPKRLAENRHENCHNSKETIAKSLEGNFREEHVFALKQAFELYEIYQGKIVECEKAVVAHLAKQPDVTDEDLPSGGKPLGKHECIRGDMDVREKMFKLTGVDLLNIPGLGADTLLTLTAEVGLDMTPWKTVKHFTSWLSLCPGTKISGGKVLSKRTKRNANRATQAFRMAAASLARSQNALGAFYRRIRSRSTPIQAVTATAHKLARIYYGMFTTRKPYVEEGLHAYEERYKQRRIAALRKQARSLGFDLSACGD

SEQ ID NO: 405456 - protein, 402 aa, unidentified
MASIPELRVGIDVGCHQHRVGISDASGGLLEEFDVSHTPEGFRDFFRRVTIQKERLGLPVVVAMEGFNGHARPLDSYIRLRGYRLYSVNNLKLARFKEIFPGAAKSDPIDTRKILELFHLRDHLPLAKGVLHEVAPIPPENEKLKRLSRRRRQLIDEKVRVVNRLQADLQAVCPGLVEITGQVDNLWFLRFLTCRESLIQLRSLRRRTLLQLAGVGEHYARQIQAWQKRAEFSPDVDYVGPMIIADGKRILELLDQVKALEGTLAHITPLSELAGRLSTIVGFGVPTAAALAGEIGTIERFASQSSLALYLGVAPLDNQSGQYQGVKAPRQVNKRAKSALKMALMRHITFVPESKVYYEKKRKEGKSHHQALRAVGRHLVRVIWSMLKNKRDYEMRNPSSTH

SEQ ID NO: 405457 - protein, 364 aa, unidentified
MIRKAYYIGMDVHKDTVQMAVFEETGDEPIYERRLRNDTGLIIKEVGRFSRERKTEAAYETGSLGYVIQRALAGAGIPCYVLPANKVAKKRTDRIKTDKRDARLIGRELRSKNIRPISIPDETDEAARDLLRCREDAGEDLRRVKQRLLKFLVRHGHIYDSEGGHWTVSHRRWMDGIEFKHGYERAVYEEYRSQIGALEERLERLNRQVEEAAESPRYKAAVSKLRAFKGIDYIIALAVVCEIGDFRRFASAKTFMSYLGFVPSENSSGGKRNQGGITKAGNGHLRRLLIEGAWHYTKNARAGKRLEQRRQGCPVSVIDAADRALHRLHKKYVRLVFSGKHKNVAVTAVARELAGFIWAAQVSA

SEQ ID NO: 405458 - protein, 344 aa, unidentified
MMWIGLDVHKRFSRMGIFDPATGDLQDLGEVSNDREALQVRLEQVASPRTVVLEAGRSSYHMAGLVESLADEVWIVNPTELRRLQHRVAKTDRRDATALAWWAAKGALKPLWRPDRQVLELRELTRGRTALTGLATQLRNLIRSLLARHGYECPHRDLLSARGRAWLDTVTLEGYAGEMLAALRELLSPIQEKVDDFEQEVEVASADFPAAQRLRTIPGIGPVLGLSLAVEIGDIHRFPSPGHLRGYSGLTPAVSQSGEREARGPITKRGNKWLRRSAVLAAQRMSQMHQADPGIKRTFLSVSFRHGRNPGKVAAARHLLDLSYHLLKKEADYQAPRARAASTA

SEQ ID NO: 405459 - protein, 370 aa, unidentified
MSKTETGRLCVGVDLHKTQFTVCALSEDGEYLLEKKYSTKEEGYREFTSEMHNREEQGYSIELAVETTGNARFFKNRMEKEGFVVKVVNTNRFKVITTSTKKTDANDAATLAYYLMKEMLPEAHLCSQTSEEIRRLLKTRSVLVQSMVKIKNQIHGMMLGYGIETTAAQFQSKRKRQELINDLADHNYSDYTASSLKVMLKILDDLSAEIKDIEKHLEEMVERNEDVELLMTIPGIGINTATTIAAYTEDLERFEGNYKKFSAYVGIIPSVHNSNESTHYGRITKHGPQELRTAFVQAAMGMIRLTKVTSEWRLLKEYQRRKDEKGSGRAIIALARKITRIVFVMLSKRERFNSDLMRCDEQIQQTAKNY

SEQ ID NO: 405460 - protein, 370 aa, unidentified
MKQLTATKSSSALLECTAIAVDLAKRVFQVAGENRLGQVIYEDRIRSREAFTAFLHNLPAGVTVLMETGPGAQAWARQLLGQGHTARILPAQHVATHRSGHKNDRNDAHAILRAGHDSQIKAVPIKSAQALAMQALHRARSGYVGRRTALSNQMRGLLLEHGIAMAKGDASLVHGVSRAIADVTQPVPEVLRELLAELLAEWEQLGVRIEALTGKLKASASQDPKARQLMTVRGIGPVIATAVIAKQVEPGRFHNARDFAAYFGVAPNQDSSGEKKRLGKMSKRGDGYLRSMMVEGAQAVLRALDGQSQQPDDRRLQRWMSRHGRKGAAIRLANRNFRIVWAMLQNDQNYKRQMPRRAELEDMQEVAMNG

SEQ ID NO: 405461 - protein, 424 aa, unidentified
MTKYLLERRPFSMKLFIGIDVSSKDLQVAITDSENYQKPLLNQSFSNDLIGANEVKKIILQLAKQNSYDKVIIGMEATSIYSFHPAYFFANDEDLQKINLETDVINPKNTKRFHDVYEENKNDPTDAYYIAEYLRFGKYHVTIARQEEYLALQRLTRARYEITSSLTRAKQHFIETLYYRVNKLVTVDKDNIKTSIFGATMLSIVTDSKTIDEIAEMPIEDLIDYLQTKGRGRFSDPETLAKAIRKAVRGSYRLGKVMKDSIDAVLSVYYAEIKTNQKLIKNLDKAITDIVQTLPEERILQSIPGIGSVYSAGIIAEIGSIDRFDTEAQLAKYAGLAWRQKQSSNFDSEHKPMTKNGNHYLRYYLVEAANLIRQRDPVFRKYYQKKYDEAFYSPHKRACVLCARKLTRTIFTLLKNGQIYQTPR

SEQ ID NO: 405462 - protein, 339 aa, unidentified
MKYIPVGVDIAKHLMQVHFIDEITGEIVDKQIKREKFLEYFSNRAPCLIGMEACGGSQHWARELQKLGHKVRLLKGRFVKAFVMGNKNDVMDARAIWMAVQQPVKSIAVKTKEQQTILTLHRMRQQLVKFRTAQINALHGILLEFGETIHKGRAALSREVPEALDRLKKDLPPYLITLLNEQYQRVTDLDLQIDNIDKQLSAVARQNEICKRLLDIPGVGPLIATVAVATMGDSSAFKSGREFAAFVGLVPKQTGSGGKVHLLGISKRGDTYLRTMFIHGARAAALLTKEPSQWITELKSRRPATVAIVAMANKLARIVWAIAAHNRKYDKNYISIRPY

SEQ ID NO: 405463 - protein, 329 aa, unidentified
MSALVCGLDVHKDSTYATILDSSGKIVNQTRVSNERVLSYLMHFDVSKVGMESSNQIAPLYRRLASRGYSVVVSHPKKTRYIAEAKIKCDRVDSEAIAELVRLDALPLAYFPGEETAVLREKVRRRAFLVRSRVKLRVKIKSVLTYEGLKWPSDSGLFTKKGVEWLHGLNLQPVESYLRVMKPLNDEIMLLSKELRGMAEEDEDVKLLMTIPGIGYYTALLMKSEIGDINRFPFGERLCSYAGLVPSTHASGKTVRHGGITKEGSKWLRWVMVEAAQTHVHKYDTSITRAYNRIAEKRGKRVAVVAAARRLLMCSYSVLKNKRPYYDQA

SEQ ID NO: 405464 - protein, 451 aa, unidentified
MSNRRGNSTGLPVIHERAAGIDIGSRFHVVAVGADLCEQPVQTFQVFTSDLQRMADWLVATGISTVAMESTGVYWVPVYEVLESRGIEVILTNARDARAVPGRKTDVNDAQWLQRLHACGLLRASFRPGRDIAALRVYLRLRERHLDYAAAHIQHMQKALTFMNLQLHHVVADVTGITGMKIIRAIVDGQRDPLVLAQMRDVRCKASVDTVRAALVGNYQPEHVFALAQALALYDFYQARVDECDAKIKEVLAVLIAEKSPPSAPLPKARHRTVQPNAVSFDVRPILYQLAGVDLTQIHGLGPYLALRLIAECGTDLSRWRSAKHFTSWLTLSPGSKISGGKVLSAHTRKSSNRVVAHLRLAAVTVGRTNTALGAFYRRLAARIGKAKAVTATARKIAVLFYNAMRFGMDYQDPGATHYEQKYRERVIKQLHRRAAEFGFTLQEAEAVSVS

SEQ ID NO: 405465 - protein, 299 aa, unidentified
MNVSGKTVLKPLTFSNNKAGFELLDLSLRQLNQDYLIALEDTGHYAFNLLNFLHEQGYKVYTYNPLLIKKFAKSLLLRKTKTDKKDAHGIALKLLSDPNREQFQHDNRQVELKILTKHIHRLKKKQSDWKVQYTRCLDIIFPELDKIVGKHSEYTYQLLTCYPNPQKRLEAGFDKLIEIKRLTASKIQDILSVAPRSIGTTSPAREFEIIENIKHYKRLIDKAETCVNDLMAEFNSVITTVTGIGNRLGAVILAEIQNIHAFDNPAQLQAFAGLDSSIYQSGQIDLAGRMVKRGSPHLR

SEQ ID NO: 405466 - protein, 331 aa, unidentified
MKNLSIIGIDVSKLVLDVFILSCKFHFQVENSPAGFAQLLEMCCSKLDVTRKGLHVCFEHTGRYSRLIAVFLEQSEITFSQIPALDIKASKGISRGKTDKADARDIALYAWRKKGELEPTKLQSAQTSELRQLVALRDKLIKHRTAYKNSIRDLQDCYYEGETDFIRTSQVKMINHLNEEIKNVEERMDQIIGSMPEWKKNYQLIISVRGIGPVISRYLIIYTENFTRFANYKKFACYAGIAPFEYASGSSVRGRTRVHSCANKQLKSLLNMAAMNAIQINGEYKLYYQRRKKEGKNNMSTLNIIRNKLLSRIFAVVKRQTPYVDLYKFAA

SEQ ID NO: 405467 - protein, 319 aa, unidentified
MSKSFIGIDISKNNLDVHVLPESLSFSYPYETKAIKALIKKLKSFTPELIVMEATGGYEISIGAQLAAAGLNVAIVNPRQIRDYARALGKLAKTDKIDAYVIARFAQGVKPESREQLTLKEYELKSLVARRQQLIDMRSAEKNRLSRAGVTQVQNGIQKMIRIIDAQIKAIDNELHNEIKKSPTWSKKLELITSFDGVGDNTAHTLLFSLPELGNLNRQEIAALVGVAPFNRDSGTMRGKRTIVGGRANIRRVLHMPTLSAATRWNKALGAFYCRLIANGKKHSVALTACMRKLLITLNAMLKNNEMYNPEFCNIYVDN

SEQ ID NO: 405468 - protein, 343 aa, unidentified
MEYSNKTVVGVDTAKQVFQLHWMEPDGGLVDLKLSRKKFVEHFANRAPCRIGLEACGGSQEWARRFRRMGHEVMVLPAQSVRAFVIGNKSDVQDARAIWTAVQHPRAKAVAIKDEEQQMILGLHRMRQQQVKFRTATINCLRGLLSEYGEVMPKGRAGLTREIEGALTRLVDRIPEMGQEELSAQWARVRFYDATVERIERKLEAWCESHEACRRLRAVPGVGLLTATALVAAVGDARTFRNGREFAAWLGLVPRHCGTGGKTRILGISKRGDRYLRTLLIHGARALLVNGKDLPDWIEKIKRNKPFNVAVVAVANRQARIVWALLARGREYRKDYVSQPPRG

SEQ ID NO: 405469 - protein, 462 aa, unidentified
MSRPRPTPATHRIEGLPTIFSNAAGIDIGADEIVVAVPADRDPQPVRVFGSFTPDLEALVAWLLACRIATVAMESTGVYWVPIYELLEQHGIVPYLVNGRHVKTVPGRKSDWNDAQWLQKLHALGLVPASFRPDGEMAALRTLVRYRSELMAHRAPHILHMQRALQQMNIQLERVLSDIMGLTGQAIIRAMVAGERDPLTLAQLRNPACKSSEATIAKALTGSWKHELLFVRTQALVIYDVYTAQLAVCDGELEQYLQQMQARTGDPDAPLPDLPPAKRDSRSKNAPSFNARAHYARLLGVDLVAMMGLSSSSVQTIISEIGTDMSRFPTVKHFGAWLGLAPRNEISGGKVLRSRTQKVANRATQAFRQAAQSVSRSDSAVGAYYRSMRARKGPEQANVATAHKIARIVYHLLKYGEAYEAESAAAYEQQRQERELRQLSRRAAKLGYTLAPVQELLADTSP

SEQ ID NO: 405470 - protein, 463 aa, unidentified
MVIQTLKHNQGKNGSHWVNLMRQGKADRILIVAIDIGKYTHKTLMTNVFQDVIVAPFEMDASMTGFGLLVKKIEEACRCHNFDEVVVGIETTAHYYEDLVRLCYEKGYSVTVINAATTAFEREALLNWSKTDNLDLAAIVHSILQGRGNPAIQMAQEIETLKKLTRFRRTLVGKLTTLKNQMYALLDTIFRELQGKSTKVNGERVYLKPFSTLDTKAALHIIRHYPHPTDILGLGEEGLYKLSREHNLKLRKGTVDCLLEFARDSISKPKECLEGELFQLNMVLDSRELLEKQIKESESKIEDIFLQTDGAILLTIPGMGVVTAAELRAEMGQLDQFKSAKQLIKMAGTNPIVKQSGGHKATYGAISKQGRREFRCIVFLIGQICSSVNEDMRTHYVALKDKGKKTRQAYIAIGNRLLRVAFAMIRDGKPYQSKSPGYSLTAQINNKITSKEMRQQFYEKHNL

SEQ ID NO: 405471 - protein, 354 aa, unidentified
MSQTPNTAIAVIGIDIGKNSFHAVGHDARGAIVLRQKWSRGQVEARLANIPPCRIGMEACVGAHHLSRKLASLGHDARLMPAKYVRPYSKGQKNDFNDAEAIAEAVQRPTMKFVATKAAEQLDLQALHRVRERLVSQRTGIINQIRAFMLERGIAVRQGIGFLRTELPTILATRTDALSPRMLHVIEELAGDWRRLDQRIDGLSGEIEALARQDQACSRLMTVPGIGPIISSAMVAAIGTGDVFSKGRDFGAWLGLVPKQISTGDRTILGKISRRGNRYLRVLFVQAAWVVLVRIKDWERYGLKSWIEAAKRRLHHNVLAIALANKLARIAWAVLAKGRAFELTRTDDAGVRPA

SEQ ID NO: 405472 - protein, 466 aa, unidentified
MKNNYILYVGMDVSKGKADAAILKVSDRRSVKPKFLRKKLSFKFVKSEVASFLESVRSYSDVNCTSICFALEVTGIYSTNVYDYIKANLYENESIKFLNTDFVNQWRIAHNIAKSDPLDAQTISTIIGTDLDVQYVNDNVFENKNGYQDLKALVHRHYQIKKIYSQEINRLIAQCDCLFPELQYVFEPKSAAFIAVLSSYPTTHDIINASRVEVFDVVYEATKHRCSMDKVDKLFELCQDTLVPDDISSYGKSIILDLVENIKNIKGQLKSIERYIKDIASLNPAYKLLLTITGCGPITAATVIAETGNIRRFKNADCFVSYSGTSPRNKRSGTSVETMGKISKKGSRYLRHAIYMIAEFARRHNPVLKHQFERIKNGNKKRHKLANIAIANKIARYIYSIMKNKSSFVILHDHIMRLPEETRDTFFNSISLDFPKNTRKQIYQYSDINGELHRFVYIKTDEMIPA

SEQ ID NO: 405473 - protein, 426 aa, unidentified
MAAVAVTCHFFVGIDWGNEAHHVCVLNREAQIVQERRIQHTASAVAEFLDWLSGLALDFPESMAVAIEVPHGPLVEELLERRFHVLFINPKQLDRFRDRYFPAGAKDDSRDAFVLADSLRTDQHCFRAVCVGDPAVIRLRELTRLDEELNLCFQRHCCQLRQQLQRYYPQMLQLSKTADEAWIWALIELAPTPDKAAQITSKQLEKLLHGSRIRRVNAEQVATTLRGRSFSLATGTVEAASEHVLLLLPHLRLLHQQRLAIAARIDQILDQLGASKSDEQSVPDVIVLRSLPGVGRLVTATMLAEAPQLLAGRDYRGLRAYGGVAPITRRSGKKSVVLMRYGCNLRLRNALYHWSRVNMQHDARTREQYHRLRSKGHNHGRALRGVADRLLALLCAMLRSGSPYDPVRRQLLQSPSASGLPRLQDL

SEQ ID NO: 405474 - protein, 426 aa, unidentified
MNYTQNSKIAQVTERTLVVGVDIVSETNYARAFNWRGQEVSKKAFRFNNSQEGFQSFLEYLRRNQVIAAAEQIIVGCEPTGHYWFTLARYLKAQQINMVLVNPYHVKQIKELDDNSPKKTDQKDPKTIAKLVVDGRYSYPYLPEGIYADLREAVSSRERIVKEVNAVTNRIKRWLKIYFPEYLAVYKSFASESGLTVLETAPLPQDVVKLGAEGVNRLWREKKLRAVGMKRAQTLVEAAQNSIGLDGGVCARMEMQLLLEDYRAKEVQLDKVTAVLEAETLKVPHAEKLLSIKGVGLVTVAGFLSEVGDIRRFNSPKQIQKLAGLELKENSSGKHRGRTSISKRGRKRLRKILFQVMLPMIQNNAEFREVYESFATRQNNPLKGKQAIIAAGCKLIRVFYAILKHGVDYDPQKLRMDRIRPESAAA

SEQ ID NO: 405475 - protein, 436 aa, unidentified
MQVHPHAAGIDVGNSAHYVAVRPDRDPEPVRRFECFTADLHRLADWLQSCGVKTVALQSTGVYGIPLYDILEERGFEVYLVNARHTKNLPGRKSDVQESQWLLKLHTYGLLNHSFRPTSEIRVLRTYWRQRAEHVQGAATCIRRMQKALTQMNLQLANVISDLSGLTGQKIVRAIVAGQRDPYKLAELRDPRIQASPEDIAKSLQGNWRPELVFVLTQEVDMYDTYQQRIAECDQQLQKHLTRFADTVPPQAKEETKKKKGKPSKNTPSFPLSGELQRITGVDLTRIDGIDVMVAQTLVSEVGLDMSPWKTEAHFASWLGLCPDNRISGDKVLSRGTRHVVNRAATALRIAATTLLRSQTYLGAQYRRLRTKLGAPKAITAMAHRLARLVYRMLKYGQQYLDKGAAYYEQRNRHQQIQFLRKKAAQLGLQVIATHP

SEQ ID NO: 405476 - protein, 329 aa, unidentified
MNYLGIDVAKVKLDCCLLMENNRSKSKVVTNSEEGFQQLIAWCKKQGVLPADLHAVMESTSCYHEPAASALFRAGMLVSLLNPARVREFAKSQGILSKNDKLDAFAIARFGASSTPELWQPPPPEVVHLKALMARLDTIEQDLQREMNRREKTDFINAPDVVLDSFMKHIACLEQERDRLSKEIAHHIDQHPDLKKDDALLKSIPAIGPKVGPLMVGVLRQGQFASAEQCAAYLGLVPIERQSGSSVRGRARLSKNGSAKVRAKLYMAAIVALKHNPHIRDLAQRMALRGKCKMSILGAAMRKLVHLCFGVLKNQLPYQPNYSSKVLTW

SEQ ID NO: 405477 - protein, 321 aa, unidentified
MTEEEVCVGVDIARDVLDIAVSTLSEVRQFNNDRKGITGAVRYIAGFKPTRIILESTGTYGMPLAASLQSKCLPVIIVNPRQVRDFARATGVLAKTDRIDAKILALFGLQIKPEVRPLPNKQAREMKSLLTRRRQLIEMLSSERNRLLQADEGVRPGIEIHINWLEEAISAITETLDSQIRSSPAWLEKDNLLKSVPGIGKVVATTLLIELPELGQLNRRKIAALVGVAPLNRDSGTMRGKRMIWGGRAKLRAALYMAALVATKYNPVIATFYRRLLDAGKVKKAALVACMRKLLTIINAMMRTMTLWNPELSNHFAAEAK

SEQ ID NO: 405478 - protein, 349 aa, unidentified
MSQIIRIGMDTSKYIFQLHGVDASEQVVLRKRLGRKGMLEFFAKLPPTVVVIEACGAAHVLARELGKLGHTAKLIAPQLVKPYVARNKNDGRDAEGLCEAASRPRMRYVPVKTAEQQAALMLLGIREQLVVRRTQLSNMIRGYAAEFGLIEAKGLDKLVSFLAAIEHDERVPTLARELFATLARQYDQVQVELKAVEAKLLAWHRANALSRRLAQIPGIGPVTAAALVMKAPDPHAFRSGRLFAAWLGLTPKDHSTAGKTRLGKITRAGDETLRQLLVLGATSVVKIAKSKARGPSWLIELLKRKTPKLAAVALANKMARIAWKLMTTGEQYDRARLGAQNEAQTAAAV

SEQ ID NO: 405479 - protein, 321 aa, unidentified
MQANQMFVGVDVAKATLVICVQGVSGKRTVANDARSIQSWLKTLPEQAVVATESTGRYHALLARLVHRSGRNAYVLNARDVHLYAQGLGARCKSDRVDAQIIARYVAEHHAELHAWAPGSHAQEVVQALVQRRARIADHRAAVRQLLHGFKPLQPQLRQLEARFDALLAQLDRQVDEQIAREPPMADGRTRLRTITGFGPQGSALLAVLMSRLRFANADALVAYSGLDPRAKDSGTKRGRRRLSKRGSAAVRRQMYLAAFSAARSKALGALYRSIKARGFAPTEALVILARKLLRIAWAVWKSGKPFDRTRLTAPVTCAQL

SEQ ID NO: 405480 - protein, 337 aa, unidentified
MNEKIMRVGLDLAKSVFVVFGIDERGKCQLRRHLRRSEVLPFFATLSPCLVGMETGSGAHYWARELIGLGHDARIIDARLVAPYRSQGRTGKNDSNDAAAICEAVGRPQMRFVPIKDVDQQAILIVHRVRKGRVEEKNRVANQLRGLLAEFGMVIPRGLQRLKREWLPMRQRCADRVPGLAWEELDTLYRRLQDLEEEILAYDRKVEAHVHRDARARRLCEISGIGPITASALVATIGNGRDFKNGRQLGAWLGLTPRQSSSGGRNSLGRITKRGDVYLRTLLVHGARSELRFVHRRQDPKSRWAHRLKEDKPWNIAAVALANKHARHAWAILKNEF

SEQ ID NO: 405481 - protein, 353 aa, unidentified
MIISISNYDLLFPMDVDKKRIHLAVMNKERLIRKVTVPYDPVNLLNYVRNSFPGQKGIFVYEAGPTGYGLYDFLIEKGEDCVMAVPSMIPKAPGQRVKTNRLDAYNLGVQLRTNDLKLVQVPEKKYRDLRHLTRLRLKYGKRIVATKNGLKGLYLFEGIEFPNGKWSRRVISDLQQIRYRSAVEFKVQQLLINLAFFRTQELKTKAEIRRFCREDQEMNGCIAHLMSLPGVGWTVSTYVLGALGGFKHLISVKKTSGFLGLGPRENSTGDKVKKGEITAVGDPNARKMIIQASWVGIIKDPELRSVYNKIQSKNPEHYGKQKAIVAVGRKMVCRIHALLRDQRRFENRLKQVA

SEQ ID NO: 405482 - protein, 380 aa, unidentified
MEKACGLDVHKDSVFACILDERGKKIFEKRYGTLTPNLMELRDTLVEMGCGRVAMESTSIYWMPIWHVLYGDFSLTLANPYFIKQLPGRKSDVKDAQWIAECLQKDLIKSSFVVDGMLQQMRQYTRQHYRLTKGRVRLEQQLDNQLQRCNVRFSNYVSNQGQNVSMRKIIKAIRDGKRDPEELCRLVHGRTKNKHGKQVITDSLSGVIQKVDVDMLTQCMEQIELIEKQQAACLNHLEELANKYYAKEISLLCTIPSVDKLSALSILSEIGNDMNVFPNANSLVSWAGLRPRNEESAGKIQSRKTLHGNKYLRKMLVQVSWSASNSNKSFLGKKHRTLSKRMKSQKALLAITRKMLVIIYNVLKTKQPFDHSRNMQAIAA

SEQ ID NO: 405483 - protein, 370 aa, unidentified
MGPAVEPQLREAPVMSEGSWVGLDVHARSVVAGVIDMGSGEVRSLRVPPGSEATVAWLKTLPAPVRVVYEAGPTGYGLARLCAEAGISCVVAAPSKIRPAADRVKTDRRDAKRLARLLRLGEITPVRVPGPVEEAARDLVRAREDARGDLMRARHRLSKLLLRHGAVYDATAWTRAHDAWLRKQRFQDGPLAIVFDECYSRMIDAKTSRDTLDKAIAELAASEPYVDVVERLVCLRGVSTLTAFALTVELGDWNRFRPESLAPFLGLTPSESSSGERRRQGGITKTGNTHARRLLIEAAWHQRSAPRLSVTLERRRTGKSLAVRAQADSSARRLHGRWNALEARGKPRLIVVVAVARELAGHCWALATME

SEQ ID NO: 405484 - protein, 365 aa, unidentified
MIATTYGLDLAKRVFQLYWVESDTGEVINRQFSRSGLIEFLSNRPAGIVALEACGSAHWWARKLKNLGHEVKLLHAQFIRPFVQNNKTDAADAKAIWTAYQQPEMRTVAVKTEEQQAALALHRMRSNLVKSRTAQVNQLRGLLYEFGVTLRGGRLAGLKQIRERMAELESVVPAMLFEAIQGQLERIKQLDIDIARIERRMASWHKQDQACQAIADVPGIGLLTATALVATLGDAQAFKSGREFAAFVGLVPRQSGTGGKIRLGGISKRGDPYLRTLLIHEARAVVFAAKDKGSWTESALAATTDQRGRCGTGKQDGAYGVGDHCAWAQVSSQLREHCHVADDHFFRVIEYLGSETKMLRKSINE

SEQ ID NO: 405485 - protein, 341 aa, unidentified
MNIKRIGIDIAKQVFQVHGVDDHEKVVLRKKLSRAQMLAYFQKLPHCLIGMEACGSSHYWGRELQRMGHTVKLMAPQFVKPYVKSNKNDVNDAEAICEAVARPTMRFVAIKTIEQQDIQAAHRIRSELVHQRTAKVNQMRGLLGEYGLVVGQRIDVLRKALPLLLEDAENGLTVDFRILLQGLQQDIIMLDERVDEMDNKIKLLANNNEDAKRLLKIPGIGPITATALICAIGDGRQFKRGRDMAAWLGLTPRQHSSGGKDRLLGISKRGDAYLRTLLIHGARAVLRVAGNKDDPRSRWIQSLCGRRNKNIAAVALANKNARIVWALLTKKTDFLPEAKPA

SEQ ID NO: 405486 - protein, 408 aa, unidentified
MLFVGDDWAEDHHDVEVQDEHGRAIRAARLPEGVDGMTRFHELVARFLPDNAKPSDVLVCIETDRGPWVRALVAAGYQVYGVNPKQAARHREGMSLSGAKSDKADAHTLADMVRTRRHQLRQVAADSDIAEAVKVVARAHQTLIWERTRHTLRLRAALRDYFPAALAAYQVLTLTGADALELLAKAPTPVAAAKLTITQISAALRKARRRDIPVKAAAIQQALRTQHLGQADVVAGAYAATVRATVAVLQTLNAEIRTLDGQVEAHFGQHPDAEVYLSQPGIGAILGARVLAEFGDAAGRYADAKSRKNYAGTAPITRQSGKSKTVHARFIHNDRLVDALHMQAGAAILHDPGVRAYYDELRGREIGHNAALRQVGNRLVGILHGCLKTTSSYNETTAWSHRTQLAAA

SEQ ID NO: 405487 - protein, 425 aa, unidentified
MDFKQNQKINQVTEQTLVVGIDIAKRTHYACIVDDRGRVLQKSFSVPQAGNGFELFYQRVLAAMKEHEKSEVIVGIEPTGHYWLNLAYFLEERGIPLVMVNPMHVKRSKELDDNLPTKHDRKDALVIARLVKDGRFSYPRILKGMEAELRVGSTFRSKLTEELGAVKNMIIRWLDRYFPEFVQVFPSFGKMALAALECTPFPSDLYQKQPDEVLSLFRKVEGLKSPQRPKAVRLIEVAAGSIGVTEGLEMARIEIATLVRRYHQLEQDIESITGQLIELVKTSVEYEWLSTVPGLGDTTIVDLLAEIGSFSHYQDPRQLIKLAGLTLRENSSGLHKGQKRISKRGRRKLRALLFRVMMPMIRHNEAFRKLHEYYTNRQVNPLRKKQSIVVLCGKLLKVLHGISTKHKPFDAQRMMRDIPGLAEAE

SEQ ID NO: 405488 - protein, 355 aa, unidentified
MIVIGIDAHKLTHTAATVDGHTARELRVLTVRAEQEGHDRLLRFAREHDSERVWAIEDCRHVSGALERFLLRRGERVLRVAPNLMAASRKSSREPGKSDPIDALAIARAAVREPDLPSAKLAGVERDIALLLDHREDLVRESVRMQTRLRWQLHDLDPALEPPARMLTNRRTLERLTERLCAREPSVQVWLCRELVRALIDLRARISEVERALRPLVRRHGASLLSLPGCGIITAARLIAEIADVGRFASDAQLARYAGVAPLDASSGKQQRHRLNRTGNRKLNAALHIIAITQARMHPQARAYMERRQSEGKTTKEALRSLKRLLIRLIYTQLKAASRRTTVAVGAPSPMICLT

SEQ ID NO: 405489 - protein, 334 aa, unidentified
MHEVVRIRYTTDGETSYVDIVGIDVSKSDFHSCLLHGADDARKVFPNNSKGYKQLLSWLKTRRCARVHACMEATGAYWLGLATALYDAGMNVSVVNPSRTALFARSQLRRTKTDRVDAQMIAEFCKTQKPQLWSPPAPETLELRGLLSYREQLVAQRTALKQIAGGVHLGNSLRRLHATQIKALDDGIESIEKSIRNLLRVHSDMKAKVEKVTTVQGIGFLTAVAIVAKLPVERLRNGKAAAAYVGLSPRERQSGTSIKGKPRICKTGNAELRRDLYMPALSAIRHNPILRAFADRLTARGKAPRVVIVAVMRKLIVLAFRLLTEPGLSLKASA

SEQ ID NO: 405490 - protein, 318 aa, unidentified
MTKKKSKSFIGIDVSKQQLEVAAHESDYQFRCPNKASAFGELIAELMRPALIVLEATGGLEIRVVSALHAAGLPVVVVNPRQVRDFAKALGQLAKTDRLDARVLAHFATAIKPPLRPIKSKEEQELDSLTGRRAQLIEMLTDEKNRRASAASDTVRDKIKEHIDWLEEGIAELDKQLKALLQNSTEWQAKDKILQSVPGIGPVTSFSVIADLPELGTLNRQKISKLVGVAPLNCDSGQQRGTRHIYGGRAQVRRALYMATLTALRWNPVIKEFYERLCANQKPFKVAITACMHKLLNIINVMVRDSTTWKSKEEPIST

SEQ ID NO: 405491 - protein, 352 aa, unidentified
MEMIALDCHKRYSVASVQSPEGRCLLEGRIEHRRGSIRAFLRPYSSGCPVAVETVGNWYWIVDEIEQAGMVPCLVHARKAKLMLGSINKTDKLDVRGLNKLQQTGTLPTVWIPPATVRDQRELPRTRMVFAASRTRLKNRIHSVLDKYGLEDSLPEVRDLFGKQARPKLLAAVAQLPPETAYTAALLLEQLNRIEQTLEAIETRMAETFGPTPTMGLLRSLPGVGSILSVVVGLEIGEIGRFKGAPGLASYAGTVPRVHASGGRVRYGRTRPDVNHYLKWAYSEAGNSVAVNCRRLASRHVSQLYRRVRARRGHATAVGAVARHLAEATYWILIKNEPYRERGLKSVSSKGV

SEQ ID NO: 405492 - protein, 408 aa, unidentified
MIYCGVDWAETHHDVALVNDAGDLLAKRRIMDDAEGYQILVDLLADHGDGPDARIPMCIETSRGLLVALLNQGGRQVYAINPMAASRYRDRHGVSRKKSDPGDALVLANILRTDRHVHRPIPADTPQARAVAVLARAQQDALWNRQQLSNQVRSLMREFYPAALNAFATWQNPLCRPEAREILRVAPTPAKAAKLTKTQLCAALRRAGRVRGIDAEADRIKGVLRGTYAHQPPEIEAAMGTQLLGLLRQLDAACLAADDLAAQAEEAFRNHPDSEVLLSFPGVGPQLGARILAEIGDDRTRFADARALKAYAGSAPITRASGKKHHVGRRMVKNDRLNNAGYLWAFAALTKSEGANAHYRARRERGDWHAAALRHLFNRMIGQLYHCLQTSQLFEEHEAFPSSLPDAA

SEQ ID NO: 405493 - protein, 403 aa, unidentified
MNNVAGVDVSKGKSVVSVLRPFGEVVAKPFAVGHTGSELKELADYLKSLDGETRVVMEHTGRYYEPVARFLHEEGIFVSAVNPKLIKDYGNNTLHKVKTDRADARKIARYGLDNWVELRQHTPMDTIRMQLKTLNRQQGLYSKTKTMMKNNLIALLDQTYPGVNALFGSPVREDGSQKWVDFATTFWHVDCMRNMSLTTFTERYRKWCKRHGYNFSQSRAVEIHTDAHDLIAMLPKDALTKTMIRQAIDALNAVSKSLEQLKAEMRTLSTQLPEYPVVMAMRGVGDSLGPQLMAEIGDVTRFTHRGAITAFAGVDPGADQSGAHEAKSNRTSKSGPPELRRALFLVMDCLLKTQPEDDPVYRFMDKKRSEGKPYLVYMTAGANKFLRIYYGRVKEYLASLEEN

SEQ ID NO: 405494 - protein, 462 aa, unidentified
MTKKNIKCKTGNSSGKMRVSSEMTKINANVAGMDLGSEEHWVCVPCDSADENVRRFGVYTDDFRQLADFLRASRISSVAMESTGVYWIPLYEFLDKAGFEVVLVNARHLKSVAGRPKTDIYDCQWIQRLHSYGLLQGSFRPSDEICELRGLTRHRASLVAEAGTKIQHMQKALQQMNVRLDKAVSDISGKTGTLIIERIIAGERDPVTLAKLRDSRVFKSEKEIAAALDGNYRSEHLFALKQSYEAMCFIQSQMNECDGEIKRALDSLDRKLDSSMAPALPPRKGSKRSNKNQPLFELRPALYEIYGVDLTQVDGFQSGTVLNILAELGPELCKFRSDKHFTSYLGLCVNKEISGGRVLKNRTRKVQSRAAKAFRMAAQTLKESNCYLGKFYRRIKFKAGAPKAITATARKLAVIFYNMVTKRQEYKPVDPDTFDRKHKERTLKTLKKRAQALGFDLVQAEA

SEQ ID NO: 405495 - protein, 340 aa, unidentified
MQTKSLFVGIDVSKLTLDIAITLDGKTVEANLKIPNSQAGFKVLASWMKKHARLQECDEIHCCIESTGIYSDAIVDYLQELGGLKVSFINPVQAKAYGRTVLLRTKTDKVDAGLLARYVAAVKPEVTLPMPVEIKELRSLIRHLDYLITRRAQEKGHLESTTDKVVINSVKDILKHYDKQIKKLEKLINDYLDKRPDLKKKVELLKTIPGIGETTARILLCELHVENNGEKITAKVQIAHAGLAPAQKQSGQSVRGKSMICKTGNARLRRCLYFPAIVASKFNPVITVFYQRLLARGKHKKVAIVAVMRKLLSVAIGVLNNKVAFDPEWSVKTVKQVKCA

SEQ ID NO: 405496 - protein, 341 aa, unidentified
MNEVTMIGVDLAKSVFQAHGATATGEPVFRKKLSRGQFLKFLSEQSSCVVAMEACASSHYWGREIMKLGHEVRLIPPIYVKPFVKRQKNDANDAEAIAEAAVRPTMRFVPVKSAEQQSRSMVFKTRDLFVRQRNAIINALRGHLMEYGIIAPPGLTFVKKLAEQIEDPESDLPHIVVELSRVHLDQLSTITDKIVVIERRLKDEAKTDPETIRLQTAPGVGPVSAMAIKAFSPPLEGFKRGRDFAAWLGLVPIQKSTGGRQILGRTSKMGQRDIRRLLIIGAMTRIRWAIKNGPPKGSWLEQMLERKPRMLVAIALANKTARTIWAMMTKQQDYRDPIAAV

SEQ ID NO: 405497 - protein, 343 aa, unidentified
MSEQKITGIDLAKTNFYLFSINAHGKPAGKTKLSRNQLLNWLVQQPKMTVAMEACGASHYWAREIRKLNHDVMLLPAQHVKAYQRRQKNDYNDAQAIAEACQHGTIRPVPIKTLEQQDVQTFLKMRRLVSMERTQLINHVRGLLAEYGIVFSKGATELRQKLPALLEDAENELTDTMRTLLHRQYIRLITLDNELEWYDSEQKKYVRQDPVCKRLLAILGFCPLVSQAIKSWMGDGKQFRRGRDASAALGLVPRQFSTGGKQVLLGITKCGDQYVRSMLIHGARAVLFRASEKTDSLSVWVNRIREKRGFNRAVVALANKLLRIAWVIIARDEMFLPATKQNQ

SEQ ID NO: 405498 - protein, 339 aa, unidentified
MELYAGLDLHSRNTYIGIMDDALNRVFKKRVSNDLDQILQTLTPFQNQLKGFVVESTFNWYWLVDGLMDAGYSGAHLANPAAIKQYEGLKYSDDQHDAFFLAKLLILGILPEGYIYPKEHRPVRDLARKRMFLVRHKTANILSLQSFLQRCCAIKLSANDTRKLTVETLEEWLKEEYLVLTAQASLDTITFLKEKIKCLEKTISKRVKLRKGFKQLLTIPGIGNILAMTIMLEVGDINRFQKVGNFVSYCRCVPSQRLSDGKSKGSGNRKNGNRYLSWALTEAAQLGRRYNEHFRRYYNRKVAQANTSLATKALGNKLARICYYVMRDRVPFREELLAH

SEQ ID NO: 405499 - protein, 463 aa, unidentified
MTRKRTGTRKRSAQSKLDLKTVEIVHPDAAGIDVGGSEHWVAISPDRDAEPVRRFGSFTADLRDMARWLVEKGVRSVAMQSTGVYWMPVFEVLEQHGLKVFLVNARHTKNVPGRKSDVQECQWLLKLHAFGLLNNSFQPTDEIRIARTLWRQRGNLVAAASGTIQRMQKALIEMNVQLSSVLSDLSGVSGMSIIGAILEGERDPWKLAALVQPEVKAAPQAIAKSLEGNWRKELLFVLRQEVELYRTYQEKIHDCDLQLREHLKSFGSVVNLAAQPIGPKPKGKRSKNAPQFDLRTELYRITGIDWSQVNGIDVLTAQTVIAECGADLSAFPSEKQFTSWLGLVPTNEQSGGKILKRRTRKVVNRAATAFRNAATTLLRSQSYLGAQYRRLRTRLGAPKAITAAARKLACLFYRLIKNGQQYVDKGTEYYETKYREQQVRILAKKAQRLGFQLVTPTPLEPAL

SEQ ID NO: 405500 - protein, 348 aa, unidentified
MHAMTYAVDLAKSVFQVHWVDPETGEVHNRRLTRAKFITFFAQRQPGCVAMEACGSAHHWGRTFIAQGHQVELIPAFEVKKRVFGNKDDAADATAIWLSAQDRRIRRVPLKTVEQQSDLTAHRMRTQLVSERTARVNALRGLLYEFGVAMPKGRGIGLRWLAAHRAEVDAQLPVRMQRLLNLQLQTLGQLDEHIEVLDAEIREMVAANALAKRLIKIPGIGPLGASALASTLGDGSGWRNARQFACCLGLVPSHTGTGGKVRMGGISKRGDAYLRTLLVHGARNLARLATPSVWVAGMLERRPFNVVVTAVAHKLARIAWAIASHQRTYDPAWKPESPRGAPATTATA

SEQ ID NO: 405501 - protein, 361 aa, unidentified
MAKARTLVGLDVHATKIVAAVLDAETGELQWFRVSGDAAEAAALCGGLPRPVRATYEAGPTGYGLARELERRGVRCVVAAPSKIPRASGDRVKTDRRDAEHLVRLLLAGKLHAVRVPGAEEEALRDLVRAREAVRQDLMRCRHRLSKLLLRHGIRFDDGPTWTDRHRAWLASIELGRPAAQATLLDARGAVDALLHRRDALERRIVALLGDSPWATQVGRLRCLRGIDTLTAAGLCAEIGDFERFARAEQMMSYVGLVPSESTTGERRRLGAITKTGSGHARRLLVEAAWHYRPARMPGPASAPPGRPARRGDRDRLERPATPAPHLAAPGGTRQAPHDHRRRRRARTGRLLLGDRPHRMN

SEQ ID NO: 405502 - protein, 386 aa, unidentified
MQKLNDLSRSLTAFEPEGTLIAVIEMSLSSWLVAGIVPGVERQPLKKLAVDESALLKLLHRWRDEAEKAGRRIERIAVAFEAGRDGFWLARWLKARGIEAYVIHASSVAVSREHRRAKTDRLDTELLKRSFLGWLRGERDHCKMVEIPTMKDEDAKRPNREHDSLIGERSRIVNRMKAALVRLGIRGFNPKLKRATTRLDGLLTPEGEPIPPNALAELRRDMERRRLVNNQIRQIEEERLERIEQAPCDGPHVMVRLLARVMGVGIETADMLVHEVLSRNMRDRRAVARYAGLTGSPDESGRKRREKGLARSGNARVRRGMIQLAWRFLLHQKNSALTKWFRSRTENARGTRKPMIVALARKLLIALWRLVREGIVPDGIVLRPAQ

SEQ ID NO: 405503 - protein, 320 aa, unidentified
MRNTVGLDISKLTFDATAIVGNAEYSAKFDNDSKGLDQFSDRLKSLGCQNLHICMEATGSYYEEVADYFAQYYSVYVVNPLKISKYAESRFKRTKTGKQDAKLIAQYCRSAKESELVKRQKPTDEQYRLLRMTAAYAQIKSECAAMKNRHHAAKDEEAAKAYAQIIKAMNEQLEVLKEKIKEQTEKPNCKEGVKRLETIPAIGRMTAAVLFHHLTSSKFETSNKFAAFAGLSPQQKESGTSVRGKGKLTKFGNRKLRAVLFMPAMVAYRIRAFPGFIKRLEEKKKPKKVIIAALMRKLAVIAYHVHKKGGDYDPSRYKSA

SEQ ID NO: 405504 - protein, 341 aa, unidentified
MWIIGCDFHPRFQQIALVNTEGGEWGQRRLEHRGEAEQFYRSLAGHVVRVGMETGGSSRWFERLLGELGHELWIGDAAKIRAAETRKQKTDARDAEHLRELLCNGQFEKMRIWIPPADNRDLRQLLWHRHRLVQMRTRVKNQLRSLATSEGMERKPGLWSQTGQKQFQALELPPWAGRRRQDNLELLTELLRRTDPLDQEVAQQAAQQPAAVRLMTHPGVGPITALAFVLVIGDPARFANSKKLASYLGLIPSEDSSGGKQRLGHISKQGNALLRGLLVEAAHVAVRHDAHWKRDYRRLAMRKNRSIAAVAVARKLAVRLWWMWRRGVDYAQLNASGSHAG

SEQ ID NO: 405505 - protein, 343 aa, unidentified
MQTITTIGLDIAKSVFQVHGVDNDGKVVIRRQLKRRYVLAFFEKLQPCLVGIEACASSHHWSRELQALGHTVRLMPPAYVKPYVKRQKNDAADAEAICEAVTRTNMRFVPVKTPEQQSGLMLHRTRHLFIRQQTSVINAIRAHLAEFGVTAAVGRKGIEELLRVIADPSDKRVPDVVRTCLAGLGSQLLSLKKQILDFDRMIMAWHRSNQTSKRLNCIPGVGPLLATALVASVADPKTFRSGRNFSAWIGLVPKQHSSGGRDRLGSISKQGDRYLRSLFVAGALAVIRYAKIHGTKYRPWVAALLTRRPTKVAAIALANKLARMAWAMMARGERYNYPASLRV

SEQ ID NO: 405506 - protein, 371 aa, unidentified
MEQSSKTLYVGLDVHKDSIAVAYAPEDRGAEVVSLGPIGTRQCDIDKLSRRLEAKGAALVFVYEAGPCGYGLYRYLTGKGFACHVVAPSLIPRKAGDRVKTDRRDAMTLARLMRSGDLSSIYVPGIEDEALRDLSRGRDDAMQDLKRSKRRLKSFLLRQDIRYEGRATWNAAHLRWLSEVVCATPPQQIVFQEYLRAVSEQHERRQRMEHELHEAVQGWRLYPMVQAIQALRGVELTSAVIVMTELGDLTRFENPRQLMSYLGLTPSEYSSGARRHQGGITKAGNSHARRALVEGAWAYRYPAKVSRHLQLRLEKLPAEVQAIGWKAQVRLCRRYRQLTARGKHVNQVVVAIAREMAAFAWAIARLVPLAS

SEQ ID NO: 405507 - protein, 290 aa, unidentified
MMAQSEVVVVGIDVAKDKVDACIRSLSRRQMFPSSAEGRRALIGWLRKHKVGKAAMEASGGYERDWAKALREADIEVRIVDPKRVRSFARSAGRLAKNDAIDAEMIGWFAETFGEVPGQAYDAAREKLSQIVNARQGLLDLQTKLQNRGEHAGPEPVQKMQARLLKKIAVEVAKLEAVIAAMIKTTPHFAELAAIIESVPGLAGTTSAGLIARMPELGQVSNKIAPALLGAAPYDDDSGRRRGERQGTHAGGGDRGRGEERGARHGQRARAPHHSRRAGIDPRRQAVKGE

SEQ ID NO: 405508 - protein, 365 aa, unidentified
MTTRQHSTSSSTDPPVRREVVLGVDTHGEVHVAAVISPLGKILGTASFPATAAGYRQLLVWARKRGTVRRAGVEGTGTFGAGLARYLLAQQVEVYEVNRPDRSARRLLGKSDPPDAQAAARAVLSGRARARAKSGDGPVHSARMFKLAKDSAVKARTQAINQLKAVLVIADPALRERLSSLGNRELFRTCARLGPGDGEDGENAVAQATHMTLRMLAERIEQLTGQIDELNQRLTRLVEHHAPQLLVPVGIGPDSAVTLLITMGDNPERLNTEASFAALCGVSPVEYSSGRRSTRRLNYGGDRQANAALHRIVFTRLRHDARTQAYYERRTQEGKTRREIIRCLKRYAAREVFSLVRPVSRTPVL

SEQ ID NO: 405509 - protein, 375 aa, unidentified
MPTRYCKWVTVSGVSGGCSTDMEAVSRMGVDLAKCVIQLHCVDRQEHVILRRSIPTERFAEFMSRLQPCDVAMEACASAHHWARKLTAMGHSVKLIAPQFVAPYRKGGARCKNDAADAEAICEAAARPTMRFVQVKTVEQQGIATLHRMRQGWLEERTALINRLRGLLAEFGITIPQRIEALRRIPEILEDANNELPGITRGALYAAWEHLKVLDERMREVDRQIEQHAKQDDRASRIMALPGVGPITASALIAAVGNAREFKNGRQFAAWLGLAPRQNSSGGKSQLGSITKRGDSYLRMLLVLGARSALMTAGRRTDRLSRWLQEVQGRLGWQKALVALANKHARIIWALLTRDESFRPDHVPACFTPMQPQEQ

SEQ ID NO: 405510 - protein, 470 aa, unidentified
MGRPTRGKQVKRIDFNALSMIEPNAAGIDIGGTSHWVAVPSDRDERPVREFAAFTSGLHEIADWLRRCRVTTVAMESTGVYWIPLYELLESRKIRVCLVNARHVKNVPGRKSDILDCQWLQKLHSYGLLRASFRPDAEFVKLRTYLRHRQMLMQSATAHVQHMQKALVLMNVQLPVVVTDITGVTGMRIIRDIVAGNHDPVALARHRDKRCAASREKIAEALRGEYRDEHVFVLRQALELYDRYQQSLAECDLAVEKLLAHLREVMPRVDLPALPAPKKNRARNSSKRAKEFLPDVREALHCITVGVDLTATAGLGDLTALQLLAEVGTDMSPWPTAKHFASWATLAPSCRITGGKRHKSYRPGSTHRVADILRLAAVNSGRSHTALGAFHRRMSLRIGSAKAVVATAAKLARIIYTMLKTKTQFNDPGVNTYEARYHHRVVRNLKRRAAELGYDLVPTPPVLDDGAAAS

SEQ ID NO: 405511 - protein, 385 aa, unidentified
MYFVGIDISKYKHDCFICTETGEVICENLSFQNTSEGFSQLLDLLKSLDNNKIIRIGFEATGHYGMNLKLFLEKNNYSFMEFNPALVKEFIKGQTLRRTKTDKKDAYQITRYLISVDYKPHPKQFYHKYSLKSLSRMREKFVKQRSYYEVALTNVLDHTFPEFKPFFNNKFSKTALFILDKYKSADKIGHMKDFDSIRKVSRGKFTSAHFIKLKELAKNTVGSSNDIFETELESLLLLHSQIDEQIKKLEDKIEIIIKELNPPTLSIKGIGIVSCAGIISEFGNISRFKSADAMVAFAGIEPSISQSGTESHNGHMVKHGSGHLRYFLLNAADYVFMHEPIFTEFYYKKRNEGKTHQVALNHVAKKLVRIIYKLESENIKFDHNI

SEQ ID NO: 405512 - protein, 427 aa, unidentified
MNTDEATRYADFCQFKTEIRLSKDYLIVGIDVAKDKHHAFFGTATGRTLLRRLIFDNNRNGFEQLITRSSQLGLEHGLSRIVYGLEPTGNYHKPLAGWLIGNEQMLVLVSNKAIADNRQTMDGRWDKNDTKDSANVADLMGQGKCQFFEIPDLALVQVRNLLSLRRRLKRDEHALRMKIRNGLVTKYFPELDRHWGSSLTENLAIVRWCLDPRKISSMGFEDFVRQVTRTDRGLRQLKRLKRIYEAAGLSIGCPVDEGAEFEARLLVDRLEVIREQMDSTETEIKQICLGFASYRRLLTIPGFGPYVASIVLARIGDPHRFKGRKQVIRLAGYDLNAKRSGKGSKDAVPVISKRGNSELRYALYQAALIATYHNDRFRALFTRYLKGREKERGIKTKMRVKLAVKMLVIAWTMMKTDSEFNPSLIEV

SEQ ID NO: 405513 - protein, 430 aa, unidentified
MSSLPSTSAEPFAALIGIDWADQQHAVALFDCATGKTEHSTLPQQPEAIATWAAALQARFGDQPLALCLEQSKGALIYALLAYQFLVLYPVNPATSALYRQAFTTSRAKDDPDDALICLELLRHHRDKLRPWRPEDAPTRELRQLLEKRRRAVDLRTGLTNSLRDELKCSFPQALELTGEELHSKMACDFLLRWPSLQAVQKTRKETLRKFYYAHNARRMDLVEKRLAAIAQMVPLTADPAVMEPAILATTMLARQLLALRASIAAFENRIAELYAAHPDRALFDSLPGAGPTLGPRLLAAFGSDRGRFDSPASIQQYSGIAPVTERSGKSTWIHRRWSRPKFVHQSFFEYAGQSALHCPWARAFLDDQKARGKTHPTAVRALAFKWQRILFVCWRERKTYDESIYLQSLQTRGSHLISKLETTKPKPRE

SEQ ID NO: 405514 - protein, 404 aa, unidentified
MWYVGLDWSDTHHDVVVLDEAGHRVGTQRFAHSHQGLHHLKDFLLGIASRPEDLACIVETNHGLLITFLLEAGIPVYPVNPKTANTLRKTAGAKTDRIDAYLLAKTGRFDLADLRRLSPDSPIIAELKTRTRDQDALIQSQTRLVNQLTACLKEYYPVSLKLFGKLHQPSTLLFLQAYPTPTAAAAASLEEIEALLKSCKYPNARRAALEMVEQLHHQELTANEVIVRAKSRLMLSLVRQLLPLLEDIKGYDQEIATLFLKHPDHDLWQSLPRAAQRLVPRLLAEWGDDRARYRDAQSVQELAGTAPVPFQSGNFSKAHKRFACLKPLRNGLYQFAWQTTRQDGWARAYYQRKRMEGKTHSLAVRCLANVWVRIIYRMWVRKDLYQAATFEAAKLAHAPRQRVA

SEQ ID NO: 405515 - protein, 450 aa, unidentified
MREPREIEDREDELAVARVAAVDVAKASAVVCTRVPREGGPGRFVTRVWPVGATTNEIIELAAHLAGQRVEKVVLESTSDYWRPFFYLMEAAGLHVELVNARDVKNAPGRPKTDRLDAVWLAKLAGWGMLRPSFVPPAEIRQLRDYTRLRTDLTRERTRHWQRLEKLLEDALIKVTAVASRIDTMSVRDMVEALIAGQRDPRKLADLARGRMKAKRAALIEALTGRFDAHHGELAAILLAQIDGLTAQIDTLSTRIEELIAAIPGAQGVDADGTTGPQAGRGPDAAALPAIDRLQEIPGISRHAAQVIIAEIGLDMTRFPTAGRLVSWARLCPRTIQSGASERPGKTAKGNPYLKGVLGDAAAAAGKTTTFPGQRYRRLARRRGKLKALVAVARTLLVIIWHLLADRAARFEDLGDDYYLNTIDTDRRARSHIRQLQALGFTVTITPAAA

SEQ ID NO: 405516 - protein, 346 aa, unidentified
MKHTTTVGVDLAKNVIQVSVVSARRKELSNPSLTRRKFAEFLGKQKPALVAFEACATSHYWARAAERHGHDARIIPAKFVAPFRQGHKTDSNDALAVAEAARRPNIKEAPMKTVEQQGLQAIHRSRQLLIQECTALSNHLRGLLMEFGVVIPQGFASLLRAVPEVLEDGDNELPDMYRPTLHRMYTRLLELREDIEAMTKEVGILVKQHPICSRLTALEGIGPIGALLLYATLGSGTAFSSGREFAAYLGLAPRQYSSGGKTNIVGLSKKIGNCRLRSILILGARAYVYKLKEPKSSKDKWLKANIERNGESRAAIALANKNVRTAWAMVTQGTEYQRQGQLKVAA

SEQ ID NO: 405517 - protein, 369 aa, unidentified
MNECITYIGLDVHKETIAVAFAAGNGRGEVCIHGQIANTPAALARLSVKLSRAGSELRFCYEAGPCGYGIQRQLAAAGHDCVVVAPSLIPRKPGDRIKTDRRDAINLAGLHRAGALTAVWIPDPAHEAMRDLVRARLAAVRSLRQARQQLSGFLLRHGCHYSRAAWTLMHRRWLAGLRFAQPAHHIVLEDCIATIEAATARRDRLTAQIEVLLADWSLAPVVHALQSLRGLALVSAATVIAELGDITRFANPRQLMAYLGLVPSEHSSGATRRQGGVTKAGNSTARRMLIEAAWSYRFPARISREQLLRQEALPKPIRDTAWKAQVRLCGRYRKLSRAGKPATTVTTAIARELAGFVWAIACQLPRPTI

SEQ ID NO: 405518 - protein, 377 aa, unidentified
MVSGKKRRSELTAVPMLPNESLYIGVDIGKFKHVAGFLSKTLLERHKHFEHFPAFIFEQSREGFRAFVERIQAYSPLEQCFILMEQTGHYHRPLLQYLVELDLPVFVIPIQRRQTGMIKTDKRDALGLANQLYTQLELGAQVADTLQVIRRALPPSEAAAQLKGLMRHRYELVNEATQRKNKLIAMCDELFPEFTRVFKDPNAPIALDLREQFPTPRAIATIGSIGNFEGAAHLKSYFGWAPTRAQTGVSFDRTRLTKGGSREMKKVMFLVAWKAIQTDTEWAKLYKCLVPRLCSYDDRMQAYKGKGKVLGHSIGRLIVLIFALLKKDYEVLSQLSPGTEPPAPTLYDPQLHHRHRTGYYSPFPREGAKNRIVQVSQ

SEQ ID NO: 405519 - protein, 316 aa, unidentified
MQASPSSSLVFVGIDVAKDHLDVHLRPSGEAFRLAHDADALEELAGRLVGLAPELIVLEATGGFEVAVAAALAGVGLRLAVVNPRQIRAFARAVGRLAKTDRLDAEVIALFAERVRPQARAIPDAQMRALADLVARRRQIIDMITAESNRQRQTHDLRLQSSLERHLAWLQHELGDIDRDLDGTVRGTPAWRETEDLLASVPGIGPITARTLIAELPELGLLDRRRIAALVGVAPINRDSGAMRGRRMIMGGRTTVRNALFMATVSAARWNPAIRAFYQRLIQAGRPAKIARIACMRKLLTILNAILRDRRPWKVA

SEQ ID NO: 405520 - protein, 321 aa, unidentified
MAQQVKFNQMIRCGCGIDVHQQVIVATIRHSDSNFETREFDAYTRSLTELREWCKTEGVTHIAMESTGIYWKPVFNILEEDFEIILVNARHVKNVPGHKTDKKDSIWISKLLLSGLLKGSFIPPQDIRELRDLVRYKRKLTNQAASEKNRLIKTLEDCNIKLSSVISDVNDGVSATKIINDIIKGITDIDKLMLHLHGKIKADREDIRKALEGRITNHHRFMMKIIKESIDEIEKIISKVDRQIDKAVKKYQVELDSLQTVPGIGRDSAISIISEIGVDMSQFPNEQHLSSWAGMSPGNNESAGKKKVPEPPTETNISDQR

SEQ ID NO: 405521 - protein, 339 aa, unidentified
MQLYVGDDLHANNNFLALVDGEGKRVDQKKLPNDLFVIRAFLEPYQKDIVGIAVESTFNWYWLVDGLMDSGYKLHLANPSAIQQYSGLKHSDDKHDAFWLAQMLRLGILPEGYIYPREERPTRDLLRKRRHLVRLRNSLLLSLQNIISRNCGVQFRANEVKRLKEDRVSPLLESNEDLALAGKTSKEMIDQLTRQIYRIETFIVQRVELKEFYRYLLTIPGVGKILALTIMLETGPIGRFAEVGHYASYCRKVSSRWTSNDKTKGKGNQKNGNKYLAWAFSEAAEFARRYDAQARDYYTRKMRKTNFMVAHSALAHKLARAAYYLMKEQVPFMPEKLFC

SEQ ID NO: 405522 - protein, 355 aa, unidentified
MTVTIVEETRPATCRTAITGGVDTHADTHVAAALDPVGGLLGVREFPATAAGYARLLGWLGGFGTVCLVGIEGTGSYGAGLARYVTAAGIRVVEVDRSDRQDRRRQGKSDPLDAVSAARAAQSGRARGAPKGRDGVVEAIRTLMVARRSAAGERTRTINQARALVLTGPDDLRTRFATHTPAALITGLAALRPRAGDVTGHATRIALRELGRRGQFLDGQLARLDQLIIPLVTARAPGLLALYGVGPRTAALLLIAAGDHPGRLRSEAAWAHLCGAAPIPASSGKVTRHRLNPGGDRQANHALWRIVFTRLGSHPATRAYAERRTAEGKSKAEIIRCLKRYVAREVYPHLRPAGR

SEQ ID NO: 405523 - protein, 465 aa, unidentified
MDDNTSLPIQENDSIREIEPEGIPVLRRNVAGIDLGSESHWVCAPAVDGKGREVQAFGATTPELVKLARWLQERKVESVAMESTGVYWIAPHEVLERQGLEVLLVCTRDLAQVPGRKKTDRIDCKWIQRLHSCGLLRGSFRPAEQICILRTLVRDKSNLMAERADWIRRIQKSLDQMNVRVHRAVSDIEGATGMAIIRAIVDGERDPVRLAELRDPGCRKSAQEIAEQLSGHWREDHLFSLEQSMKMHEAITQRIHAYEQEILRRLANLEPPENQGKAAPPLKNPNKAKMIRQRGEEPMRQAFYRMSGVDLTSIDAVGVGVVQLVLTEYGRDLSCFPTEKHFISHVTLAPRRAVSGGKPLKKKKRGSASSRVSAALRSAALSLRHSQTALGAYFRHCANRLGADVAAFATARMLATRIYRLLRWGHAYVDEGAEAYELRYHARRISRLQTNAAQLGYSLVAAVSE

SEQ ID NO: 405524 - protein, 343 aa, unidentified
MGEVSTIGLDIAKSVFQVHGVDVDGAVVIRKRVSRAKVLEFFSTFPPCLVGIEACPSAHHWSRELQALGHTVRLMPPSYVKAYLKRSKNDANDAAAICEAVTRPSMRFVPAKSEQQQSGLMLHRSRQLLVRQRTMLSNAIRGHMAELGIISAKGRNGTAELLKIVANEDDDRLPAVARFSLDVLARQYVTITAEIGAIEKRIHAWHRSCEQSRRLEEIPGIGPIVATALVAEVGDWKAFSSGRNLAAWIGLVPKQHSTGGKERLGGISKQGNRYLRWLLVTGAMAVIRYARQRGTKRLWLARIMERRPIRVAAVALANKIARMAWAMMVRGECFKEPRLLPAA

SEQ ID NO: 405525 - protein, 359 aa, unidentified
MQRNKISFKGQKIYIGIDVHAKTWEVCVLTESGYRERHPQQASAKTLFDFLKKHFPDGEYHAVYESGFSGFATYYALKEYGIDCVVTHAADVPTTQYEEVMKTDKVDAAKLARSLRAGDIRPIYIRERENIDDRSVIRIRKTIQKQLSGYKSRVKHLLHCNGVEIPDRFASPGTHWSKAFIKWLKEDVVLLSPSRLSLDLLVKQVETIRQTLLDATRAIRRLARTDRYGSNCELLMSIPRIGVSVAMCILTEIYDVKRFRNENQFASYLGLIPTCHNSGGRTSSGEKTFRGNRHLGPMVIEAAWIAVYRDYGLGLAYARYKQSMKPQEAIVKIARKMSNIIFSLLKNGRKYEPYRWDKE

SEQ ID NO: 405526 - protein, 334 aa, unidentified
MLGIDVAKDTLACTLLDPHTRKTLWRKNLPNTPTGIQTLLSASPADAPWVLEPTGRYSTPVAALARRAQRNVLLAPPRQAKSFLRSIQCRAKTDKLDSEGLALFALSQTLAPYPLKTPMQEQIDQLLLARKGMARAAASLGQQQKELPHAKEPLAKALTELKAQLKVLDRQIATLTTHPELAAAARLRKVPGIGPVTAAAMASRLAGKQFSHPDKLVAYLGLDIGVQQSGRKKGERGLTKQGDAELRRLLFLCASASLLSKDTGFKAQYERERGKGLPSTAALCAVARKMAKVCWSIVQHGTNYDPARVYQQPKEQRQTNQKWEEETLPLDIEP

SEQ ID NO: 405527 - protein, 422 aa, unidentified
MKLKYSICCGLDVHKNVIVATIVTTNKDGISEYKQKSFSTINSDIQRFHNWLIENNCYHVCMESTGKYWIPIFNYLEHDIDVCLTHPKYVKAIKGKKTDKKDSKWIADLYKFDLVRCSFIPPKDFRQLRELSRYRFKLVCMKSSEKNRIQNCMTVSNVGIASVLSDPFGKTATEIMSYLLEHTSDSMDEHAVRKLIKKGAKAKSDEIIEAIKGYNIETDQAKKLELARAHLEYLDNMITQTEVELYVRIKPYYEFVEFVSTMPGMTELSSTIVLAETGVDMSIFDDAKHLCSWCGLSPANNESAGKKKSVQIAKAGDYLKPMMVQCALAAIKSKKQPYFAIKYGRIKKRRGHKKAIIAIARMMIVCIYHMISEKKPFSPTDYEELMDPQNHVERVVLTENNVFAYLESLGYDSSKLVKRNDN

SEQ ID NO: 405528 - protein, 345 aa, unidentified
MNQISIVGIDLAKHVFQLHAADLRGNKVFSKTVQRDQLRLTLAQLPPCRVAMEACGSAHYWAREIQALGHETELLPPQSVKPFVLGHKNDARDAAAIAEAAARPATPRVAIKTQAQQALQALHRVRSRLIRDRTATGNELRGLMSEFGLIVSQGHAVMRQGDVRELLDTQHEHLGDELHLLLTDLLGQWLELDTRVNHYDKRIQALAKASEQAQQLMSLPGIGPINATLLISHIGDPARFPNGRQFSASLGLVPRQYSSGGHVRLKGITKRGNGDVRRQLVHGARAALRQFQRQEHPDRLARWACALASRVGQRKAIVALANKLARICWSLLAKGQHYQPQGHVV

SEQ ID NO: 405529 - protein, 344 aa, unidentified
MVTFGVDAHKRTHTIVAVNDRGTPVGQTTVGTTSQDHLVLLRWAARFGAERRWAVEDCRHLSRRLERDLLAAGESIVRVPPKLMAHVRDSARTYGKSDPIDALAVARAAQREPNLPLARLDGPDREVRLLVDHRESLISERTRLICRLRWHLHELDPAWEPKARSLDAQRTLDEVRGRLQDHVGVVARLAVELTERCAELTITIKALEKEITELTTQLAPALLELPGCGALTAAKIIGETAGVDRFKSRDAYARFNGTAPLPVWSSNKARHRLSRTGNRQLNAALHRIALTQARWHPPAKEMIERRKSGGNSGREALRVLKRRLSDAVFQALLHDQTAGLTLAA

SEQ ID NO: 405530 - protein, 544 aa, unidentified
MSSLVSPTLPLGNIKSQIPPSQINSNKKGEAPLFNEPSGFRLWHNLWAVCNAAAAETKGASPMKKRTIYQNQSQELLHLFEEAGSSAKVMCIPMDYAKKDHLAMFCNGHGDILRKPFSVKNSPDGIEYLVDQVTRSCRRRGIKKKHVFFGGEDVNSFAENFVSTLRCQGWLVAGVNAHDAKKQRANLQASTDRIDLMGIATMLLNYRANCCPAQSGVYRNLRTLVRHRRKLVVMLTEVKNRVHGIVDRLFPGFLNENKCGIVPFTQSSLYLMEDRFSPKQVRRRKREKLIEILKRFSTSRAEKTAFKLQQYAAQVLHTPVEYVDTLQLSLAQHVKHIRCLQESVAQLENEMAVNLAQTQGAFLTSVRGIGIVLAAGVTAEIGDPSEQKPLNNLVSYSGIIPRVKQTGGTDGKTYTGKVAKRCNRILKDYVVQSAHHMGLHGPENLMTDYKRRDASGQHADFGIGRRYLRMGMSLMRTSQIYLPPWLRKADATLEERAGYYLMIWPKLREKWLKFGVLEVAFAKDRPLGLWRQIVQELYDIKLKL

SEQ ID NO: 405531 - protein, 320 aa, unidentified
MTSSTEPTHHVVGIDVSKRFLEVSLMPDGEAFAVANDHRGIDELLSGLEELRPELVVLEATGRYERPAATAIAARGIPVAVVNPRQARDFAKATGRLAKTDRIDAEILARFAAAVDLRPSVLPDEESSALQAILTRRRQLVEMLVAENNRLKMAPEAVAKRIRAHIGWLEKEIERTDRELDEAIEASTTFKENEALLRSVPGVGPVLARTLLAELPELGGLTRKRLCALVGVAPFNRDSGQGRGKREVWGGRAPVRATLYMGALVATRHNPTIKEFYERLLAAGKPKKVALVACMRKLLTILNALMRDRATWRCPHALTP

SEQ ID NO: 405532 - protein, 351 aa, unidentified
MPNAQTESKPSSRIVVGGVDTHADTHTVAVVDQVGRRLGCAVFPASRAGYRALTGWLAGHGEIYAVGVEGTGSYGAGLTRWLTAHQVRVVEVNRPNRAERRRRGKSDPVDAEHAAAAVLANTATTIPKARTGLVESLRLIHATRAGAVKARTAARNSFINTLRSSPDAVREALQPLSRARQLKAAAGYRPQGDDPVATVKRCLRRLAVRITELTAEITAADRDLDRLTQLLAPSMRSRPGFGPETTAQLLITAGDNPERIGSEAALAGLCGVSPVQASSGRTRYHRLNRGGDRQANRALHMIILNRLRHHQPTRAYLAVHSPDGRATPHLRRVLKRYLVREVYQLLSQLQP

SEQ ID NO: 405533 - protein, 358 aa, unidentified
MQSNKKSFKGQKIFIGIDVHAKTWAVETLTESGFTKRHAQEASAKVLFDFLSKNFPDGEYHAVYESGFSGFSTYYQLKEYGIHCVVVHAADVPSTQYEQVMKTDKIDAGKLARTLRKGDIKPIYIRERENLDDRAVVRLRKTIQKQLSGYKTRVKHLLHTNGVKLPARFDKPGTHWSRAFMNWLKDEVVLLSSTRLSLDLLVNQVESIRKNLLEATRVMRILAATDKYKANYELLLSIPGIGFNVAMCLLTEIYDFKRFGNENCFAHYLGLVPTCHDTGDKHSTGGKTFRGNKLLGPMIIEACWVAIHKDYGLSQAYCSYKQKMKPQLAIVKVARKMSNIIFSVIKNGKKYEPYKWEE

SEQ ID NO: 405534 - protein, 381 aa, unidentified
MQSIKTWAGVDVSAKTLVAERWRKDQDNERKKEFVNDAGGHRELIKWIGKGARVCMEATGVYHLQLALMLVAAGVEVMVINPRVAKDFGRALANRSKTDRVDAWTLLEYVRRMEFVPWKAPSAAVLELRELGRGLSELIRAGAEEKNRFEAKKVAAISMTVVNDVKAHVAQIEKRVKQIEKSAAVVIRGDTDLCEQFEILTKIPGVARRSAILLLTELAVLDPMMTVKQIVGHAGLDPREYESGSSVHKPPRISKVGNARLRAILYMNAITAIRHDRGARLFFAQLVARGKKKMQAIVAVMRKLLHGIWIVLQRRVPFDSSILFAASLAKAESSDSAVAANQPEPSQDHPKGRSEAEELPQQLDPGSAPATRSQRRRSKAA

SEQ ID NO: 405535 - protein, 316 aa, unidentified
MAKQVKEITLGIDVCKAELVICDWDSGEIITLENSVSTIKDWFENVYGPVRIAIEPTSNYHLEFVEQAHALGFAVYLINPRQLAHYRQAVDIRNKTDPLDAWLLARYLARESDSLRPFKPQCAKAKQLWSLLKRRAATVRARTQLKQSFAEIKLSIKALFSEIQRVLDRIDQSILALIRQLGWWPDYQRCLSIPGIGKLNAAALVTVFHRGAFAGADAFISFIGLDISVRESGKFKGKSKLSKRGEAEIRRLLYCATQSARSYQPFDAFYQKQLEKGLTKIATKVTLARKLARIAFTLMTKQQSFKKQEIAYSISP

SEQ ID NO: 405536 - protein, 414 aa, unidentified
MELLHERCAALDIGKKDLKACVRTPSPKGKRSRRQEIRTFATTTNALLELRDWLVAEQVSLVVVEATGDYWRGAFYLLEDQLNVILVNAAHAKGLPGRKTDVCDAAWLCQLGECGLLRASFVPPEPIRQLRDLTRYRTTLTAERSREAQRLEKELEDAGIKLSSVATDITGVSGRAMLAALIDGERDPQVLAEMAKARMRPKIPHLVQALTGNFGEHHAFLCRLHLQRIDELTAAIAELSARIAEQMRPFARQLEHLMTIPGVGQTVAEVIVAETGTDMGRFRTGANLASWAGVCPGHHESAGKRKSGKTRHGDRWLTGALGTAAMAAARTKDTTYLGARYRRLAPRLGKKKALVAIEHSILVAVWHMLTNNVDYHDLGGDYFARLDPERAMRRIIRQANSLGFTVRFDPIQAA

SEQ ID NO: 405537 - protein, 401 aa, unidentified
MIDTGDIDVFLGLDVGKGEHHATAVTPAGKKAFDKRLPNTEPKLRELFAKLQAKHGTVLVVVDQPASIGALPLAVARDMGCPVAYLPGLTMRRIADLYPGEAKTDARDAFIIADAARAMPHTLRAIDGEDETIAELEMIVGFDDDLASEATRVANRLHGLLTQIHPSLERVLGPRLQHPAVLTLLERFGSPAQIRKAGRRRLVTLLRPKAPRMAERLVEDIFAALDEQTVTVPGTEAAALIVPSLAGSLTAVLDQRKLLAGRIEELLEDHPLSTVLTSMPGIGVRTGARILIEVGDGSTFPTAGHLAAYAGLAPATRSSGSSIRGEQPSRRGNKQLKRAFFLSAFAALGDPASRAYYDKKIAQGKHHTQALLCLARRRADVLFAMLRDGTFYEPQPSAAVT

SEQ ID NO: 405538 - protein, 391 aa, unidentified
MIYVGIDVAKDKHDCFITNSDGEVLFKAFSISNNLDGFTELYQKIESVMDDVTKIKVGLEATGHYSYNLLGYLIDKGLPAYVINPLHTNLYRKSLSLRQTKTDKVDARTIASMLMSDVNLKSYSDTSYHNEELKSLTRYRFDKVKERAKLKTSISRLVCILFPELEKLVPQLHMASVYAMLSEFPGAKQVASAHLTRLTNLLSESSKGHYGMETAITFRDAARASIGSYMPAKSLELKHTIKLIQELDSEIDEIENEIKIIMDKINSPILSIPGISYRMGAMIIAEIGDFSRFDSPDKILAYAGFSPSTYQSGQLNGAYAHMEKRGSRYLRYALYNATKYVCHWDPTFAAYLAKKRAEGKHYNVAISYAAKKLVRVIYHLEKTKQQYITAA

SEQ ID NO: 405539 - protein, 324 aa, unidentified
MQHEPLTDAALPVAGVDVSKAELDLYVDTVGRRLRVANDDAGVARLLATMLEHKVRLVVVEATGRYHRRVAAALLEAGVNVAVVNPAHARDFARAAGKLEKSDRIDAEMLARFGRAMGPRAAVKTPENQAVLSDLVSRRRALVQVRVAEANRAHDKLPKLAAGQSRKLMRLVDQQIEDLDREIAKLVEADDDSGRKAKVIDSVPGIGPGTANQLVVDLPELGTLNRQEIAKLAGLAPLNCDSGRYRGQRKIRGGRQDVRTCLYMAAFNARQECRRFKDYFDGLIARGKLYQVAMTACMRKLLVTLNQMVRSNTHWDQNFHGALT

SEQ ID NO: 405540 - protein, 343 aa, unidentified
MELYVGLDVSLKETSICVMDRNGTIVAEGSVISEPEAIASYLAGEAPCVSRIGLESGPTSTWLWHELKARGLPVICIDARHAKAALAMQINKTDRNDAIGIARIMQTGWYREVQVKRLSCHEVRAALNSRALLVKMRQDFENQIRGLLKNFGLIIGKVGRSAFPTRVRELLVERPILERAVLPLLGLREHLKAEIAEFDRMLLQITRDNGAARRLTTVPGVGPITALTFISAIDDPTRFRRSRSVGAYIGLTPKRYASGEIDRTGRISKCGDAMLRCYLFEAAGVLLTRVPKWCAIKAWGVRLAKRIGFKKAKIAVARKLAVIMHRMWCDETDFQWTNKEVKA

SEQ ID NO: 405541 - protein, 369 aa, unidentified
MIQQTTVHHERAAARAAADHQHVSTLATIKLGLDIHARLYVVAAQYDHALPKPPRRFAPQEFVPWVETLRRAGHAVHVVYEACGFGFGLYRQLTAVGAHCYVIAPRKLDEAHTGVKTDPRDALTLCQRLSRYLEGNTRELAVIRVPSEAEERARHLSRQREQLVRHRQKLEAAGRGLLVSHGLSAPAHWWKEQTWTYRLTPHLPEWILPHLAVYRPILLALDAQIAGLTAQLEAAAPRDLPSGLGKLTSVVVTREVCDWQRFKNRRQVSSYTGLCPGEHSSGGKRVQGSVTKHGNPRLRSALVECAWRMVRFQPEYPPVRKRLSILAKGAKATGAARKKAIVAVARHLAVDLWRLHTGQCSAAQLGFTV

SEQ ID NO: 405542 - protein, 418 aa, unidentified
MTATHSIAPTLLVAIDISKHRHEVLIGIPGKTRRRRLTVMNTLEDFQRLSAALASYDLPVRIGFEATGNYHRTLAHHLGRAGFDLKLVSSVGLARTREALHNSWDKNDPKDAQVILHMLEIGAVQFFHDPLAAGTSDIQELSKTHEIVSRSKTELWHRILTHYLPLYFPEAERFHRSARTDWFLAFLEKYPSPHMISAMGRDAFIADAWDVVGRKVSKEQLLSDVYATAAGSVGLPVHPDSDAVRMFRLVLAEGRSLVRRRDEIEARAVELLSDLPDYQLLTTIPGIGPINAMTILAEAGDLRRFRHHRQFLKFCGMDLATVQSGMFRGQSRISKYGNARLRRTLWMAGQTAVLKRTNSFRDKFERYISKDRHNAHLRRKAYTAIAAKMARTVHAVVNHGEPYRPFFEGVSPGGRTSL

SEQ ID NO: 405543 - protein, 385 aa, unidentified
MLYVGIDIAKNKHDLACIDETGETIIINYRFANSYQGFHQLKLKLKQLSPITQDVQIALESTGHYRYNISAFLRELGYTVFAYNPLIIKEFAKSHSLRKTKTDRKDALLIARKLRSDITPEYYQTDKLMDEVKELTRYQNRLIQSRSKCKNLYIRLLDIIFPELHEIVSNLHNQFIYDLLTNYPSPQKLARAHSSSLLKIKRLTADKAHQIQEAAKQTIGNASPALSLELVQLIETIKHYDKQINQLQEEMNRLMTELESPITSIPGIGNRLGAIILAEIKTIHNFKNPNQLQAFAGLDPAIYRSGQMDNTGHMVKRGSSYLRYALIQAAKLISIYSPHFKAYLRLKISQGKHYNVAVTHVAKKLTRIIYHLLKTNQTFDEAKLR

SEQ ID NO: 405544 - protein, 308 aa, unidentified
MSVSVLGIDIAKQKFDAALLVDGKTKHKTCKNSAEGFETLMLWLEKQGIQKVHVCLEATGSYGEDLAIYLHEAGHIVSIVNPARIKGFAQSELIRTKTDKIDAALIARFCLAMKPGAWIPPSPEIRSLRALVKRVDSLIDMRSQEKNRISTAHESVILMIKEHIAYLDQEIEKIKRRKELLDSIPGIGKATIPHILAELDDMEKFNHVRQMVAFIGLAPKETLSGSSIKGKPRLCKIGHARLRKALYMPALVSIQCNPVMIAFYNRLKDKGKNGKVIVCAIMRKLVHVIFGVLKSGKMYDPNFKPISA

SEQ ID NO: 405545 - protein, 413 aa, unidentified
MDVLHPRCCGLDVHKNSISACILVQEAGRVQKHQRRFGAMTQDLQELANWLRQFEATQVAMESSGVYWKPVWNILEGRFTIVLVNAQHIKNVPGRKTDQKDAEWIAQLLQHGLLRPSYVPCEVIRDLRDLTRMRTSLSQEASRISSRVQKVLEDANVKLASVATNTLGKSGRAMLEEIIAGQNDPEYLASLALGHLRAKAPQLRLALDGKIRPHHRFLLRRLLDQLRFVEHEIVLLDERLEEIGRERPELSQAVARWDTIPGIDRVAGWTLLAEVGNTMAQFPTAEQLASWAALCPGNHESAGKRLGGTTRKGSPWLRRMACQCAWAAARTKNTYLSAQFRRVAARRGSKRAIIAVAHSIVIIGYYLQKNQRNYEDLGGDYFDRIESDGLKRYFVRRLEKLGHKVTLVPIKAA

SEQ ID NO: 405546 - protein, 332 aa, unidentified
MSYKIAGIDVHKKMLAVVVSDVEVNGEYQFERIRYSTTPEHLRLLAEWLAAQQVEEIVMESTAQYWKPVWGALERYWKPICQERKGAGPMSGTLHLAQAQSNRGRRGRKKDFPDAERLVKRLVANELTLSFVPDAEQRLWRTVTRRKYQLRCNHVRLQNQLEGLLEECHIKLSSLVSDLLGASARRMLKALAEGETKPAALAAMADKNLRATQEQLCDALGACTELKPIYRQLLKMFLEELHLIDQQIVKLDQELASLLSRHHDAVVHLAEIPGLGVDSAQQIIAEVGAGAATFPSAKHLSSWVGACPGDEESAEVSKNHRSRKATATCGGF

SEQ ID NO: 405547 - protein, 310 aa, unidentified
MDPIIAGIDVSKDKLDVHLLPMAQAFAVPRTGAGIEELALRLAALEPKVVAIEATGGFETIVAAGLAGAGLPLVVVNPAQIRAYAKATKRHAKTDRIDAAVIAEFARATRPEVRPLPDAATRLLADLVARRRQIVEMMAAEGQRGRRVDHKRVAKSIARVRKTLEAELAELDQEIGDQVRGSPLWREKEDLLVSVPGVGPVVARTLLAELPELGRLDRREIAALAGLAPFTRQSGRWRGKSFIGGGRASVRTVLFLAAMTAARYNPQLKAFRDRLVQAGKPKMVALVAVARKLLTILNAIIRDNRPWQPA

SEQ ID NO: 405548 - protein, 406 aa, unidentified
MGWHEVACGLDVHRSSLVACLVRGTPGGPREVEERRFGTTGAEVTAFRVWLEEAGCRTLGMEATGVFWRPVYREFEGRMRVVVTNPAHVKAIRGRKTDRKDAAWLAGKVQEDGIPASFIPAPEVREGREWARLHTNLVRARTQARNQTLKLLLGAGIPLSAVLSDVFGISGMGLLEALGEGQTAWEELEGRLRGRARLKADQIRLALEVRLREAEREQLSFQLKRLKALEEQVAEVDGHLRMWSETYRAKRILLTTIPGIGELAAQLVLAEVGPDLSAFPSAKHFAAWLGLAPANNQTGGRQRPAGTRKGNHRLQSLLVECAQSSARTKGCSLRAKYQGLKMRMPPQKAIVAIAHKLALIIYRVLMDEVPYREQEVDSTPSPTRARRLRQAIHLIREMGGTVSMSN

SEQ ID NO: 405549 - protein, 523 aa, unidentified
MASKHAAKKSKSQAPKFLQKPSGVIHPRVQKVGPERFGIVCVDCHKLSSKWMLADFYGNVLVPPTVVAHNRVELEDAVAQVRLALTKHGILDCIVAVERTGRYHHAVKNVFAKAGFDTRMVHPYATKQFRQPADPDQKSDDTDLAAMRCAAVNGFALIETKLSEDWRQLQLCIRHRRDLVRKASALACQIREHLDAVLPGYAACFDKLWDSNIAFRLVRQFGTAQALLEQGVAGLSLYLRQHQVRYQERSLDTVVAWAKTAAAADVGADLHRQIALAYEDDRQQKNQQIIALERAIAQRLAQTPYVLLMSFPGINVVSAADFAGEMGPIENYATARAITGRAGLFPSRHQSGGVDRADGPLVRRANRALRAVILGIAANLICCNFHFRALAGQWKLAGKDPRHTHVKVGSRFCRIAYQIVAGRQVFRHPSLRERGYILDKLLAFHIAHQTPWPETLRDLHNALDQIPPSEYAAEAKPLADRILATRKRGKTGPQPLSEILAVVLARLGVGMLPSTPSGEKDPT

SEQ ID NO: 405550 - protein, 313 aa, unidentified
MYYIAFDVSKKELSVYDGKKDMTFSNSEGLGSLKKYLKNYYRDFSQLIFLLEATGSYSDYLIKMCAQYQIKAVIINPKASHHFAKSLGIRNKTDKIDARMIYQYHRLIHDQMITVPRINKEAKTLSTYLGSYQLAMKQRVALSNHLRHVRDKDLFGLLKKELKRALGLEEQILKRITAYILKDPQLKADYQRLLTIPGIGEKSAPALLYLFITYQGANRNQITALCGLDPIQRQSGTSVSGKPKISKHGSKLIRKVLYMPMLSAIQTNLKIRAFYQRLLRNHKVKKTAVIAAMRKLILIAHAIYRDKTEYVPA

SEQ ID NO: 405551 - protein, 389 aa, unidentified
MLCIGIDVAKRKHDCCIIDSDALKTVESFTFPNSREGFDMLLSKISELGIPKDKIRVGLEATGHYSSNLAHFISEHDLPLLTFNPLLTNRYKQGFSLRKTKTDKVDACAIAQMIVSGKGSQTYSSSLYHNEEMKSLSRYRSQTMQKCSKLKISVSRLVTILFPELEGLTSSIHLASIYALLKAYPGHEQIAHCSMKRLTHLLSDASQGRFDKSKALEIHQAACRSIGKVSLSASMELVHTITDIEVLKQHIAEIDEKLKEMVDQEESSIIDIPGIGYTLCASILGEVGDFKRFPDVDKLLAYAGMSPSKHDSGNYHSKHNKMEKRGSPYLRKALYLAARLVAQNVLKFKEYLEKKLSEHKPYKVALSHVAKKLIRLIYRLGISGCPYLA

SEQ ID NO: 405552 - protein, 366 aa, unidentified
MKKTSTVRINGNVIFKGHKLTTGLDLGDRWSNYCVLDEAGEVLLEQKLATTPEAMKQTFERIPRSLIALETGTHSPWLSRLLKELGHEVLVAHAQKVELISKSNRKDDRHDARTLARLARIDPELLGPVRHRSAKAQIHLTVIRARAELVRARTALVNAARGLAKSYGERLPKCGTEQVSQELAAELSVELREVLEPLLKEIESLNERIKEYDARMEKIARESYPQVALLKQVKGVGTQIALTYVLTLDDPDRFAKSREVGCFLGLKPGRRDSGESQPQMHISKEGDRYLRTMMVQGAHYILGPFGEDSDLRRWGLRLAERGGKNAKKRAVVAVARKLAVLLHRLWVSGEVYEPLRNSHKALRTAA

SEQ ID NO: 405553 - protein, 447 aa, unidentified
MKKKNVTMEVVNSNAAGIDIGSRSHYVAIGQGDEDVKEFGVYNEDLQALSQWLLENEIKTVAMESTGTYWQNLYAVLQSSGLEVILCNGKFTKNIKGRKSDVQDCQWIQKLHTLGLLSGSFLPDEATEQLRTYCRHRSNLLEQAADTTRKMQKYLRLLNLRLDVVVKDVTGLTGLSIIEAICKGEINPQTLASLRNGNCKKSEAEIAKALQNNGRKDYLFALNHEYQMYLNLQSKIKECDQEIEKMLNKQINCDNKKREHYIEKKVHKRVNKNTPKNIDINLLSYQYFEGVDLLAIEGVSHSTVLTLISEVGMGIHKFASAKQFTSWLRLSPNNKISGGKVLSNRIPKGSNRLKIALRNAANAIGNLKDTALSNFFKRIAFRKGRVSAISATARKLAVIIWNMIIKKVPYKPETEYQFLDQKRKKITQMKKIITKFEITINDLSFQL

SEQ ID NO: 405554 - protein, 339 aa, unidentified
MKLYAGIDLHSNNSVVSVIDENDKVVAEKRLPNELERIVLFLAAFKDALVGVVVESTFNWYWLVDGLMAAGFRVHLANLAAIVQYEGLKHSGDEHDARWLAHLLRLKILREGYIYPKAARGVRDLMRRRMQLVQSRSTQLLAMQTQLMRSTGRSLSSAQLKGAQAAALLPGLVDEPNVVSALQANLAVAQALSAEIERLEREIVSQVKLAAQFEPLLSVPGIGKILGLCIMLETGEIARFAKVGNFASYARCVDSERVSNGKKKGEGNAKCGNGYLAWAFVEAAHFAVRYNGRIQRFYQRKAAKTNKMVAIKAVAHKLARAAYHVMRTCEPFEEERAFA

SEQ ID NO: 405555 - protein, 341 aa, unidentified
MKKNLFFIGLDISKADFAASIYKTPGQSIITKEAIPNDRKGFEMLLLWLNDHHIDKKNCRICMEATGVYSQAIAYYLLFQGFPLSVEPPLKVKRAFDPVGHKTDPVDSKQIAEYAYRFQDELTSWKPRDEILEKIRQLLSVREQFTKQKVALDNSIQAYSKQRVQVALIKKAQKETLNQLKKQIARIDKELEKLIKQDPEIFQRANNLDSIPGCGMLLAAHLLVITENFTKIQNFKRLAAFIGIVPYQHQSGSSVSKMAKIRHFGPGPSRKLLRLAAQSVATHNVTFRRYYLRKLDQGKPKPLVLNNIANKLLKIACTIIRNNTRYIKDYRSIHPMYLKSA

SEQ ID NO: 405556 - protein, 391 aa, unidentified
MPKPQQRQPDDLSRSLISLNMDTTLIVVIEMSQSSWLVAGIVPGVERQPLKKMKPDEAQLLALLYRWRDEASRAGRHVARIAVAFEAGRDGFWLARWLKAHAIDAHVMHASSIAVSREHRRAKTDRLDTELLKRAFLGWLRGERGHCKMVAIPTINVEDAKRPNRERENLVSEENRIVNRMKAALTRLGIRGFNPKLKKAPERLEGLRTPEGEAIPPNTIAELRRDMARRQFVRKQILEIETARQQHHAKGSGDGPHAMVRLLARVIGVGIETADMLVQEVLSRNLRDRRAVARYAGLTGAPDESGAKRREKGLARSGNARVRRGMIQLAWRFLMFQKDSALAQWYRARTENAAGSRKTMVVALARKLLIALWRLVRDGVVPDGVVLRPAQ

SEQ ID NO: 405557 - protein, 351 aa, unidentified
MESQQTAYPKLFIGIDIHKRSWKVHCATDLFCGKSFSMNPEPEQLKGYVSKHFPGYDVSTAYEAGCCGYYAHRCFEGYGWRSLVVNPADIHRKGKERHTKTDKIDAQLIARELKDGRLESIIIPDKKREELRSLFRRRNDLVKDFRRVKSYIKMQLLYFGIKEPEEFDNDHWSHKYRKWLDDMVFQYPTAKATLDSRMRFFRFVDQELRDVSTQLRRYCKTHYKKDYTLLRSIPGIGGIVACGILCELGDLRRFNNIKHLAGYVGLAPSVHQSGNNQRTMGMTPRANRLLRSYFVEASWQAIRADPVMQSYYRKHQGKNVKSIIIKVARKLLSRTLAVIKTEVPYTIGVVE

SEQ ID NO: 405558 - protein, 301 aa, unidentified
MTNYVGLDVSQKTTTLCIVDREGHRQWRGECITSPEHIAQAVLQHAGAKASIGIETGPMTPWLVHELRLRGLDVICLDARHARAALRMQLNKTDRNDAEGLAQIMRTGWYRAVHVKSFDAHRARALLGARLQLVGMVTRLSNHIRGVLKTFGMLPGSVRGRSFAERVELLVAERPDVAPIVRPMLAAWSKLREQVTAFDKAVRTEVKQNRECRLLMSVPGVGPITVLAYVSAIENPDRFRRSRLVGAHLGLTPRQYQSGEVDRSGHISKCGDTLAANRSAGPRAKQSPDVVKHIRNATTIR

SEQ ID NO: 405559 - protein, 407 aa, unidentified
MNETGKRYIGLDVHKHYLIALGVDADLKVVLPARRVELSRLEAWMKKTLTKQDEVVLEMTTNTWQLYDELVQYAGKVLVVHPPHVALITRSQVMNDKIAASILARLLAKGLLVGIWIPPQEIREARGLVAQRQKMVRLATQAKNRLHAVLQRHHLVPPAGNPFGASNKEWWMSVSLGKLEQLNLQSDLETLQFAEKQVKRLSGIMEGMAAEQEEIGRLLHLAGFGEVTAVTVWAAIGTIQRFVDPQHLVGYAGLGTRVHDSGMTSRSGKITKAGRRDLRTVLIEAANVAANHHPHWKAELARLEPRLGRNKAIVAIARKLLIAVWYVLQGKTDKYAEPEAVAQKLLRFAYAVGKANRPKGQTAAQFARVRMDALGLGGKLTSIPWGSKKPIPLPPSALKERSDVPNR

SEQ ID NO: 405560 - protein, 408 aa, unidentified
MNAVGIDVSKGKSMVAALRPMGEVALLPQEFLHTEVGLEQMAYAIIALGENTRVIMEATGRYHEPVAAALHEYGIYVCVLNPLFIKQSGGGSIRKVKTDKADAMKIAKYGLDNWVDLREYTPMDTVRQQLKLCSRQYNLYMKTVVSLQNNLISLTDKTFPGVNELFSSPERADGHQKWVDFVMTFWHCDCICRVSEKAFTERYQKWCKHKGYHFSAEKALDVYAGSCGYFTTLPKNDNTKLLITTAAQQLLAGKMTLAALRAEMARLARQLPEYDTVHAMYGVGEITAAQLMAEIGDVRRFPRRSSIVGFAGVDPAVNQSGKHEAKSTPTTKRGSPHLRKTLYQIACTYLRKAPEDEPVYQFLDKKRSEGKPYFVYMTAAQNKFLRIYYARVKECLEAFDAQQDTSQR

SEQ ID NO: 405561 - protein, 315 aa, unidentified
MTNTKTRKSVVNVGVDVGKACLDITIHEKNLHWQEDNTAEGIKRILKRLSHYQVERLVMEATGRYEFDLAQAAYEKGLPVCIAKPLSVRRYAGAVDQLAKTDKIDAAIIAEYAAIVKPRVTPKKSKNLIAIKNLVVRRRQLVNLRTQEMNRLKIMGKTLEVSCRRMIRALNAEIERMEKRLAIHVEQQAEWTEKQILLTSAPGVGNTLCYTLLADLPELGCLNNREISALVGVAPMNRDSGRMRGKRRVQGGRAAIRSVLYMATLSALQCNPVIKAFYRKLIAQGKHSKVAITACMRKFITILNTMVKNKTEWEF

SEQ ID NO: 405562 - protein, 395 aa, unidentified
MNKIMHYIGLDVHKETIAVSIAPQNSTEIRRYGIIGGTLDAVDKLVKKLAKENTELRLAYEAGPCGFVLCRHLRNQGIHCEVIAPSLIPKKASDRVKTDRRDADQLARLYRAGELTAVHVPDQEDEAIRDLVRARTSAMTDQRQARNRLKGFLLRLGFRYTGKSSWNDAHKRYLSGLLMPQGPQQIAFQEYIHAITDATDRLERLAKAVEDALPGWKWEPVARALMSLRGVQVLTAMTLVAEVGDFSRFDDPRSLMHFFGLTPSEHTSSDKRVQGGITRCGNAHCRRVLTEAAWHYRLQPKVSEAIQKRQEGQSKQVQLIAWKAQERLHKRFRQLSAKKKSVVAATAVARELAAFVWAIACQVKPAERPAALEIIRTCRGKVYRLDPEKKFQKNK

SEQ ID NO: 405563 - protein, 339 aa, unidentified
MEAYVGQQFVGIDLHRRRTVIVRQTQAGERLGMTRIDNDPFALAEQVASWGESPQVVLEATYGWYWAADVLAEAGAQVHLAHPLGVKGFAYRRVKNDERDAADLADLLRMGRLPEAWIAPPATRELRELVRHRAKLVALRSGIKASVHAVLAKCGVSVPMSDLFGVGGNRLLDELRIPAVYAGRIASLRRLIDAFGFEIDVYTKLATSRLATHRGYRAIQAVDGVGPVLGTVFVAEVGDVQRFPGPEQLCSWAGLTPRHHESDTKVRRGRITKQGSTLVRWAAVEAVQRVRSGPLGSVRASIGERRGANVAKVATARKLLTLVYYGLRDGHIRCLARPA

SEQ ID NO: 405564 - protein, 316 aa, unidentified
MYLGIDVSKKTIDCCLIKEDSKRQKQFKNEQGGFEQLKQWLDDNHATSELKCCCEATGTYYKQLALYLKNYYKISVENPRKIKGYAISELQRAKTDKQDAKLIAMYCQEKSHRLREWQPPEKDQQELEELTKYLDYLTRQRATEKNKLHESPDYITAHIKTTIDNLTVQIKAVKQQIKQFYKQHPEYGQNQKRLMTITGIGETAASVLLSIYKKHEFKTSKQFVAFIGLDPKPHESGTSVKGKSRISKIGKADTRKALFMPALVAYRINAFPTLINRLKSKNKPLKVILVALMRKLAVIVFTLLENGEDFDKTRYA

SEQ ID NO: 405565 - protein, 343 aa, unidentified
MNANMNLTVVGVDLAKNVFQLHFVDEETSEVKRLKLSRQKFQQFFVNRAPCLIGMEACGGSHYWAREFLKLGHQVKVMPVSDVKAFNSGNKSDARDAQAIWAATRAGTTREVAVKTEEQQAILSMHRILELKKVHRVGLTNQIRGLLTEFGLVVPTGFKALREGLPKMLEDLEQQAPKMLCEQIQDLWQDILRLREQENAIDQKLAVWAKTNADCQRLMEIPGVGLLTATAVVATVGNARVFKNGRQLAAFFGVAPAHIGSGGKIQVLGMSKRGDCYVRKLLVHCARTSVLLCKDPPKVVDRLKKKHHVNVVIGAMANRLCRIIWTLMKHETKYVKDYQHLLT

SEQ ID NO: 405566 - protein, 323 aa, unidentified
MPRDSLVSNERYTLGVDVAKYKLDCSEVPGRSHWHLRNKPEPVAALVAELLARQAGGTDILVVVEASGGCERLLCEALWEAGIPVHLANPKRARDYAKAIGRLAKTDKVDAAVLASFGQNQRLHLHPTARPDPRLEEIRALVAHRRRLVDEAVARKNALQAAMPDVLRRLVEQELERLTADAQTILDAARDIIASHDDLDTRHAILRGFCGIGPIAAAELIAYLPELGRLDRRQIAAIAGLAPMADDSGKRNGKRFIRGGRPEVRRALYMPAITAMTADPILKAFHQLLIARGKPQKLAITAVMRKLLIHINAACRDSLKAQN

SEQ ID NO: 405567 - protein, 356 aa, unidentified
MDSTKYIGMDVHKEATTIAVMNSAGKLVMESIVETKAATMVQFFEGLRGELYVTLEEGTWAAWLYDLLKPHVTKVVVCNPRKNALLKVGNKSDRIDARKLAELLRAGLLSAVYHGETGLRTLKELGRSYLAISKDLTRTMNRVKALYRSWSIPCGGPSVYAPRHRAEWLSKITEPGVRRRAELFYQQLDGLQKLRQEARRDLLAESRKHGATELLRRIPYIGPIRAALLIALMQTPHRFRTKRQLWAYSGLALETHSSAEYHYVQGQLQRSKRPVALRGLNQNHNHDLKSIFKGAAAKAGTAKGPFHDFYTALVGKGMKPTMARLTLARKIAAITLIVWKKGVCFDAQQLKQQVSV

SEQ ID NO: 405568 - protein, 362 aa, unidentified
MIGQRTSVGLDVHARSVVGCGLDEQTGEVLRARLTPAHEDVVGWLRTLPGPVKATYEAGPTGFGLARALGAAGIECVVAAPSRLLRPSGDRVKTDAKDALHLARLLAVGQVTAVAVPDEETEAARDLVRARDDARADLVSARLRVIHLLLRQGIVYSGGTPWTREHENWLRTHRFPRPALQAAYDAALEALAATEGRRGRLDEAITGMAAASRFTPVIDRLACLRGISTLTGFGLAVEIGDWHRLSATTIGAYLGLVPGEHSSGESRSQHGATKTGNSHVRRLLVEAAWHHRPPYRPSTKLQRRWSRASGPVVAHAAKGNRRLHARWQSFDARRKRPVVANLAIARELAGWCHALAVMEPGS

SEQ ID NO: 405569 - protein, 338 aa, unidentified
MSEITTIGLDLAKHVFHVVCCDEQGKVIRKNMLKRTQVLAYFANLPPCLVGMEACASAHHWARELGVLGHQVKLIPPQYVKPYVRGNKNDYNDALAIAEAVTRPEMRFVTVKTTAQQDIQALHRLRERCLADRTALCNQLRGLLAEYGLIFPKGVNLLRRRLPELLEDGENGLSDLFRRLLAQGYQQLQELDGHIDHYTQEMKQQSQQNEACRRLQTIPGYGPIVAGVFHSVVGHGEAYRRGRDVSAALGLVPRQQSSGGKEVLLGISKRGDRYLRSLLVHGARSVVIRAAKKDDPLSRWINKVKAARGFNKAVVALANKMARIGWAVVVNKTVYQIA

SEQ ID NO: 405570 - protein, 375 aa, unidentified
MAAVMIGVDPHKGSHTAVVIGAAEEPLGELRVCASAAQAGKLVEWAAAWPERTWAVEGAGGLGHLLAQQLVAAGERVLDVQPKLASRVRLLQAGDTNKNDPNDALSVAVAALRSTACRPVAADDYAAVLKVWSKRHRDLARTRNQAACRLHAVLCDLVPGGHPKEISAAQAARILEQASLSGAVALARAELAAEFLADLRHLDAQLRDTRKKLAAAVRASRTSLTQVFGVGPVIAGTIADDVGDVARFPSRDHFAAYNGTAPVEVSSGNRKIHRLSLRGNRRINHAIHMAAITQLRHKHSQGRAYYDKKVTGGKTHKEALRSLKRKISDAIFARLQADARQASTKGPGGQPGNGSDPAGVLTPRTPALRTSHSRT

SEQ ID NO: 405571 - protein, 437 aa, unidentified
MEEVTDEPLYRDRVCGIDIGKAGMVATIRVPSDKDPARRAAETRSFGTTKREVLALADWLRCWQVPAVVMEATGDYWKGPFYRLEAEGLECVLADAKQVKNLPGRPKRDPSDSRWLAACFERGAVTGCFVATPEFRLIRLHTRYRRDLTEERGREKQRAEKLLESAALKLSSVITDLHGVTGRDIMDHLIAGERNPKVLAQLARARARRKISQLEEALEGAEFFTEDHAALLAAMLERIDRVNAEIDELTAVIERLLAPYEEQLAQAGSMPGWGRRSAQDAIAETGVDMTRFRTGPHLASWAGRTPLDNQSGKRTGRAKSKKGNRYLAAITGETAIAAGKTQTREGARYRRLARRRGKPKAQVALGNTQLKVYHKLLSNPGMRYDDLGPDYYERQRDVRRQIAHHVGKLGALGFEVTLARTPEPEPEPTRPGSTQAA

SEQ ID NO: 405572 - protein, 376 aa, unidentified
MREKLRFLSLDVHAETIAVAVAEPDGEVRSLGTIANREDSIRKFIKKLGSPEHLHACYEAGPTGFVLYWQLAQLGVQCAVVAPTLVPKKPGDRVKTDRRDALKLARSHRSGDLTAVWVPDEGSEALRDLVRQREAAKQDQLRARHRLTKFLLRSGRRPPLGVKTWTERFWEWIHQVHYTQPAQEATFLDCLNEVHHMGERVKRLEEAIVEVVKVAPAAAQEVIRGLQALRGVAHISAVTIAAELGSITSRFESARKLMGYCGIFPSEDSSGKRIRKGSITKTGNAHLRRIVVESAWSYRHRPSLGAKLRRRQEGVSAEITEIAWKAQNRLHKRYMTLMARGKDQRKTMTAIGRELMGFIWAIGIKAESVCTQQLAA

SEQ ID NO: 405573 - protein, 330 aa, unidentified
MNEFTNAIGIDVSKKTLEVYDHSNQVSMQVLNNIAGFKDLLRWIGKHNEGRVLLCFEHTGMYSMPLAVYLSGQNLPYAMVPGLEIKRSLGLRRGKSDRADAQAIARYAFQRKEEIRIYQLPSKHILELKSLLSLRERMITQRGGYQASKREMRAFLKVIKPSDVVFEIQDKLIKELNTQIAKVEKQIKQIIANDELLKKTFDLVTSVKGVGLVLGTTMMVYTNCFTAFEDWRKFACYCGIVPFDYQSGSSIKGRKKISRFGNKRLKTLLSNAACTSIQFNPEMKLYYQKRLKEGKDKMSTQNIIRNKIVARVFAAVHRGTPYVDTFKYAA

SEQ ID NO: 405574 - protein, 344 aa, unidentified
MSNLDTCGIEVSAKQLVIRLRRQGELEPWRDFPNTPEGREMVVRHLRRGGRVVRVCLESSGLYGLDLALLLSEAKGLEVMVANPRAVRHFAQALMKRSKSDPMDAGVLEEFAARMPFQAWQRPSPRALSLHALARRLHELVEIETAEKSRQHAAGVSDATPAAVRRDLARSLRAQQRAIQRLTRHARQWVAQDPVLNERFELLDSIPGIGETSALQLLGELAVLAPDLEARQWVAYAGLDPRQYTSGSSVHKKPRISKAGNKHLRRALYMPALVAVQHDPYLGGFYQHLLARGKLKMQALVAVMRKLLHAIHAMFKKHQLYDGSTLFRLPATSTQEVPCAHVAC

SEQ ID NO: 405575 - protein, 407 aa, unidentified
MLFVGDDWAEDHHDVEVVNDDGRRLAAKRFPEGVSGLAGLHALIADHLPDDADPADVVIGIETDRGPWVQALIAAGYTVYAVNPLQAARYRERHGTSGSKSDPGDAHVLAELVRLDRAHHRPVAGDSDTAEHVKVLARTHQSMIWSRQRQSNMLRSMLREFYPAALVAFGDDLTGRDALAVLAVAPSPEQGRRLTTARVVTVLRKAGRKRNHQVIAEQIVAALRTEQLAARPAVVGAYAASAAALVAVLAALSLQIDLLAEQVAAGFGRHPDVEIYLSQPGLGEILGARVLAEFGDDPKRYVDARARKNYSGMAPVTKTSGKSRVVLARHTRNKRLADALYQQAFSAISNSPGARAFYDAHRARNNTHHQALRALGNRLVGILDGCLRHHMKYDETIAWPDHNAATA

SEQ ID NO: 405576 - protein, 339 aa, unidentified
MFYVGLDVSVARTSVCIMDALGQIVREQSVASTPEAIAGAIRAAGTNVERVGLEAGINSGWIARGLLDAKLPVIVIDATHAAAALKTGFRNKTDKNDARGIADLMRVNKFRAVWVKSPGAQRDRAMLTVREQLRRQSLDTRNTIWSILQIEGLKPPKLANPAFDALVARSLEDEVLAPLLRPLVAVVEHVDRQVAELDKLIAARAKASAVCKLLMKVPGVGPLVAMTYTAGVDDPARFGNSRSVGAHFGLTPRRFQSGEMDWSGGISRAGDASVRRALYQAANVLIHHSGGWCALKSWAVRLAKRRGLGKAKVALARKLAVVLHRIWLTGKDYRLTAAV

SEQ ID NO: 405577 - protein, 409 aa, unidentified
MRYYLGVDWADQTHAVWVVDERGTKLTARTVPHTAEGLSEWGRELDEWRAQGLELWAAIERPDGRVVDFLLDHGVVVYPVNPKALDRARDRFRQSGAKSDPFDARVLAEFLRTDHAHLRALQPSSEAAQELKLLTEDCQRQVRQQTRLVNQLTATLKAYYPRALEVAELTTALAREFLQAYPTPAAVAGLTERQWPRWARAHRLSEARTQELWAVLQRPQLPVPAHVVRAKARLMQTLLTQLGPVVAAVGEYRQAVEDFFAAMPAAQWIRTLPIGDHGVTAPTLWARLGDAPGRWESFQHLQAQAGTVPVTVRSGKQRVVHFRFACDKMLRYVVDQVAFLSLRSSEWARAYYDEQRARGHSHHEALRALGAKWVKIIFVLWERQVPYDEQYHLATMARQQLRQRPRKIA

SEQ ID NO: 405578 - protein, 453 aa, unidentified
MSKQRKTVMQARPIQRKHAAGIDIGATSIYVAVPLDRDPQPVRSFQTFTEDPHRLADWLQGCRIKTVAMESTGVFWVPLFQILEQRGFEVCLVNAHHVKNVPGRKTDVSDCQWLQYLHSVGLLQASFRPAQQVCALRSLLRHRDSLVQTASTYAQRMQKALDQMNLQLHHVISDITGVSGIAILEGILNGERDPHKLAGLRDYRIKASEETVAKSLVGDYRPEHLFTLQQSLDAWRYHRKLIADCDDEVQRHLTQFASKADPKEGPLPRARKVSSSKVYSSQPDYDLRTEHYRILGVDLTDVPGINTLLVQTLLAEVGPDLSKFRSAAAFASWLGLCPDNRISGGKILSVRTRHVQNRAALALRIAAHTLHHNQSALGHYYRRMRAKLGAPKAITATAHKLARVVYHLLTAGQPYQESVFAERENQHQQRSLFKLHVRARALGYQLIPVAASA

SEQ ID NO: 405579 - protein, 453 aa, unidentified
MGKTTAGGHPELKVVNSCAAAIDIGSTMHMAAVNPDSTDTPVRAFGTFTRDLHDLAEWFRSCGVTSVAMESTGVYWIPAFEILEQHGFDVILVNARYAKNVPGRKTDVSDAGWLRQLHSYGLLRGSFRPEAEIATLRAYMRQRERLVEYAAAHIQHMQKALIEMNLQLHHVVSDMTGVTGMRIIRAIVAGERDPDVLASFRDVRCHASVETIRAALVGNDRDEHIFALTQSLELYDTYRAMMATCDAKLEAALAALTINTSGPVTSLPKARVKRKQVNAPSFDVRAALYGVLGTDLTQIHGLGPSLALKLVAECGTDLKAWPSAKHFTSWLCLAPGNKISGGKILSSRTRRSSSRAAALLRLAAVTIGRSDTSLGAFYRRLSSRVGKQKAVTATARKIAVLFYNTLRFGMTYNDPGAAAYDERHRTRVLANLHRRARSLGYVLAPAQDAEAVS

SEQ ID NO: 405580 - protein, 407 aa, unidentified
MIFVGVDWAEAHHDVCVQNEDGRRLAAGRLPEGVEGIARFHQMVGAHADEPDEVVIGIETDRGLFVGALVAAGYQVFAVNPMSTSRYRDRHSTSGAKSDPGDAKVLADMVRTDRHNHRPVAGDSELAEAIKVLARAHQSMIWSRGRQTNFLRSALREFYPAALVAFEDLTSGDALEILRVAPTPTLGAGLSRSKIAAALRRGGRQRRVDQRAEEIQKALRAPQLKGSALVATAMGSSVSATVAVIATMNTQVAELAQGLEVHFEQHPDAEVVRSLPGLGTILSARVLGEFGDEPNRYATAKCRKNYAGTSPITRASGTKRVVLARYARNMRLADAIYQWAFTSLTASPGARTFYDYRRAAGDTHHAALRHLGNRLVGILHGCLIHHTNYDENTAWGHRAEIELARAA

SEQ ID NO: 405581 - protein, 328 aa, unidentified
MVAKVSDAIVGIDVSEETLDAYCAKGQRKQGRIFANSPDGWKLVRTWLKAMGSKQAHVCMEATGRHSLGVALALHDAGHVVSVVNPAQIRDFARTKLGRNKTDKVDAALIREYTELFKPEPWTPPSPAMRRLCELQTMRAGIVRSRAEWKNRIGSGLGDTTATKLAAATIDHFTTQLEAIDRAISETIDQDAELHARRDLLVSVIGVGDTLAALLTAKMPEPGVLRRSGEIVAYAGLNPSHHRSGTSIDRPTRISKIGNAELRSALYMPALSAMRFNPAVAALVARLKSAGRLKPRQIVVAAMRKLLVLCFGVLKTGKRFDPAIAMPA

SEQ ID NO: 405582 - protein, 387 aa, unidentified
MARKRTLSTLDTSIAYEAVGLDLAKEDTAIAAFGPDHEGPYLIDRMPYDKLYELLADMAPTLVAMEPCSGAHQIAEQIQELGHEVMMISGRHVQAWVKDHCNGQKTDLNDAFAILNLAYDRWLTPIRGKTREECRLLALQASYRQLKGQRTKTMVHVKATLHAWGFPIRAGSFNQKVLHELIDANREAFGDEVAETLHLMINRVRDLDNDIATVLKLLTEATKRDPRASLLRSIPGFGVLTTSRWCAVIGDIARFDSPKQTMAFIGLVPNNRITGHHTETSSGREARGQGRMSKRGDKMLRSLCIMGAGSLCLMVRNDRLPDCPFVASIKERLASPRPWFKVLVYVAAKLVRIATALLKYGETFSFEKAGISKAVLKQWELEQAKAA

SEQ ID NO: 405583 - protein, 340 aa, unidentified
MKLYTAFDLHANNSYAAIIDQEGHKVAGKKLINDPQVVLEFLKPHQKDIMGIVVESTFNWYWLVDNLMDCGYKVHLANTTAIQKYNGLKHSGDKEDAFWLAELLRLNILPEGHIYPKEERPIRDLLRKRSHLVRLRTSLILSLQNIVDRNCGKRIKVKDIKKRKEDLVAPFFEGNDDLSLTGKISKEAIDFFTAKILTVENFVEDKLELKKPYQYLLSIPGIGKIPGLTIMLETGPVERFEKVGNYVSYCRKVSTRWTSNDKTKGKGNKKNGNKYLAWAFSEAAEFSRRYDEKAKAFYNRKMQKTNFMVAHNALAHKLARAAYHIMKDQVPFMPDKLFSS

SEQ ID NO: 405584 - protein, 326 aa, unidentified
MQSFLGVDVSKAKLDVALLLPNDKFRSKVFANDRSGHQALVQWLLVQLPGGLQSLHICMESTGSYHEALACVMHDQGLIVSVVNPLLVKRFAESNGQRNKTDAADAKCLAQFCREKRPERWDAPSVGVRTLQALVARLETLQDMRLAECNRRDVAHVSVIESIAGVIAELDAAIAQVKAQIAKTIDDDPDLKRRAQLLETIPGLGEKSIAQLLAYIGRPERFRNVKAVTAFASLTPLIRQSGTSLDKRRGTHPMGHQQLKRALYFPAMVAGRHNPLVATFWNRLKAQGKPGKVIVVACMHKLLAIAYGVLRSGKPFNADHLKPNAA

SEQ ID NO: 405585 - protein, 409 aa, unidentified
MQPILKSCCGIDVHKEQIKACIAKGPFDKPPKFEIKTFSTMTSGLLKLKDWLRHNMVEAVAMESTGVYWKPIFNILEDEFTIVLANPQHLKKIPGKKSDVSDSQWIASLLRCGLIPSSFIPPRPIRELRDLNRTRKKLVGVMASEKNRLQKVLEDANVKLTSVVSKVDGVSSMNMIQALLTKDELTREEIKAMVHGKLRSKIDQLVEAVNGKLTYHHRFLLKLHLENIAFMAEQIQELDEEIQERMIPFQGESNLIQTIPGISSITASAIIAEIGVNMSQFPDEAHISSWAGISPGNNESAGIRKSGKIRKGDKFLKAALVEAAWAASKRKGSAYSAIYNNIAKRRGKKRALIALGHQILVDVYRALKTGEPYVDEGAEAVFQRNSAARQKSAIRFLEQSGYAIVKASA

SEQ ID NO: 405586 - protein, 408 aa, unidentified
MRIIGLDIHRVFAEAVALDNGELRRLGRIGMTRNHLEAFARTLCLTDHVVVEATSNATAVTEILAPYVARVAVANPLQVHLIAKAKIKTDAIDARVLAKLYAAGFLPEVWIPDAATLARRRQITRRTQLVRQRVRLKSIVQSILHANLIPRCPHADLFGGKGRAWLRAQYLPGDEQEAVEQHIQEYDRLTEVLKGVERDIARAALADPNVTRLMTIPGIDMVVAVGLMAAIGRIERFSNPGKLAAYIGLNPSVYQSGDGAAHHGRITKRGRSNARHLLVEAAWQTVRSPGPLRAFYHRVRAKRGNHIAAVAVARKLTVIIWHLLTKHEDYDWVRQAFHAKKIRDLELRAGYPEQRGQRGRSYDYNLPHRRRQERARAEQAESAYRRMTEGWRRTGPQRPTGAAIEERQ

SEQ ID NO: 405587 - protein, 389 aa, unidentified
MLLDHPSDEPTAIRTYIAAIFVSLELSRSTWLVTSLSPGKGERMSKHSVTAGNVAELLTLFAELRRKAEVRTGQSYPIITIQEAGLDGFWLHRVLQQNGIESYVVDPASIAMPRRRRRAKTDRLDGETLLRACLAYKRGEPRVCAMVVAPSPEEEDRRRLCRERRTLIDERITHVNRIKGLLFAQGICDYGPLRRDRRARLEALRTGDGRELPSHLKAQIGRELDRIELLLDQIKAVEAAQDALLATASKPASEEAAPDPVTMLLALRGVGANFAAVLWSEAFYRQFANRRQVAAYAGLAATPWQSGGIRHEQGVSKAGNPRLRTTMIQLAWLWIRHQPQSALTRWFKLRSPQGRKRAIVALARKLLVALWKYVTQGVVIEGAAMKPAA

SEQ ID NO: 405588 - protein, 419 aa, unidentified
MNKIETKKQKIVNAKTLIVAIDIGKTTDTGYCRCPSGEECKPFEFSNNAEGFRKLWDRICWMKTSHHLEEVVVGFESTGAYGEPLVHYLRQKPVKLVQVNPMHTKRMKELQGNSPGKTDRKDPKVIADIIGLGHALSVVIPEGAAAELRRLTLARERSIERRTALYNQLQDLVFIVFPEFLQVMKDIKTQTAQYLLRHYPTPQDMVACGSEELIRILRQVSRGKLGKVRAQALYDAAVQSVGLQEGRRGILLETEEILSGLEACKRFIEKMEEEMVPYLEQIPYSDSLLSVKGIGKITVAGLIGEVGDFRQFHTLREVMKLAGLDLFEISSGKHKGNRHISKRGRPLLRKLLYFAAINTIRKGGVMHASYQRYLERGMPKIKALIAIARKLLGILFALVRDHSQYVENYSPKEVLKLAA

SEQ ID NO: 405589 - protein, 326 aa, unidentified
MQGKEASEQETKVKSSVGIDVSKDWLDVHILPCGKRLRMANTADGIRRLKRCLMRFDLGLVVCEATGKWHRLLWRSLFASAIPVAMIDPFKARMFAKAQGIFAKTDRLDAAVLARFAAIMTPAIRPPPPQAVEELAELAAAREAAVAEQTGLKNQLSAANVAMLCRQLGRRIARLAKDIAALEREILARIAADEGLARRYAILTSIPSIGPAVAATLVARLTELGSLTDKQIAMLAGLAPVADQSGSHDGKRVIWGGRARVRRMLYLAAVSAVRCNPALRSLYRRLRAAGKPAKVALIAVARKLVLLANTLIRQNRNWLPNAPQPT

SEQ ID NO: 405590 - protein, 406 aa, unidentified
MYYLGIDVSKSTSRFVILDDNGERFTKAFTLQNNNQDFRKLLLRLKELNLKPANLLAGVEATGIWWENLYCLLTEKKFKVIVLNPHQTNKFREALRKKAKTDDIDAYVIAGLLRSKDYAASFIPEELIQVLREITKLRYQLIKDRKNFQRQAYSLLSLVFPEYPKTAIKNPFAVASTAILKAYPTAKHLSLAKPKHIEKIVRSIKGNNFNIKEIQQLIDTAKDSIYSGRARDDRGLNLNLLLSHVEHLNKSIAELNQRIQEILAPTNNDDFNSFPGANLLTIPGVGPKTVAAVLSSVGINGQSFSSGKQFIGHIGFFPQIYESGETKRANKISKRGPKYLRWALYVAAVACIKHNPQFRVLYHKKISQGKNGKQALVYVAKKLAHLCLSMLKSGETYRPERVFMPA

SEQ ID NO: 405591 - protein, 312 aa, unidentified
MYYIGIDVSKKDLAVFDGKKDLKFINKEGLTSFKKYLKKKHNLQEIAIIFEPTGVYSLYLKEFCAENSIKAYIVNPKKSHNFTRALGRRSKTDKIDARILYQFHRLIDLKDIKVPRIDQQAKTLASYLTSYEFALRQRVALSNHLESLRDKKLTSLLKKDLKRAQILEDKIFNDILEYVSKNQNLKEDYQRLLTISGVGDKTAIALLTLFKTYQGTNRAQITALAGLDPVRRESGTSVKGKVKISKNGKGIYRKIFYLPTICATVHNQKIRVFYQRLLAHHKIKKLAVIASMRKILLIAHAMYRDKTEYVTT

SEQ ID NO: 405592 - protein, 332 aa, unidentified
MNLVSTLGIDLAKNTFSVHGVNSNGVVVLRRTVCRSRLSELVAQLPPCLIGLEACSGAHEWARRFSGCGHTVKLMAPKFVAPYRKSGKNDDNDAEAICEAVSRPNMRFVPVKSVQQQADLSLHRVRQGFIEERTATLNRIRGLLAEFGYVLANGAIQIRRQVPPLLEVLPVRVARCVRDLVEHADRLAAKALEYEREIRSAVRDNDLARRARTRQGIGPITASALVATVGNGHDFKNGRQFAAWLGLVPRQYSTGGKTRLGHITKRGDPYLRTLLVMGARAVLQRAARGQDPLSRWALAVQARRGYHRACVAVAAKNARVAWALLAKESRAA

SEQ ID NO: 405593 - protein, 354 aa, unidentified
MSNRINSIVKTIGIDIGKNAFHVVGLDQRGAIVLRQRWSRRQIEVRLANLPPCLVGMEACVGAHHLSRRLQSQGHDARLMPAKYVRPYSKGQKNDFRDAEAIAEAVQRPTMKFVATKTAEQLDLQALHRVRQRLVSQRTGIINQIRAFLLERGIAVRQGLRFLRTELPIILATRSDVLSPRMLRVIEELAGDWRRLDERIDGLSQEIEALARQDPACERLMTVPGIGPIISSAMVAAIGNGAAFTKGRDFGAWLGLVPKQISTGDRTILGAISRRGNRYLRALFVQAAWVVLVRIRDWERYGLKAWIDAAKKRLHHNVLAIALANRLARIAWAVLNKERAFECVKRYATTSQPA

SEQ ID NO: 405594 - protein, 401 aa, unidentified
MNKFSHFLGIDVSKDSFDACLIDVKQKVIMNEKFSMDSDEFEKFIQKLQMFEQDEILVVLESTGIYHTNLLFHLEDKGFKTAVVNPMLIHNFTKSVTLRKNKTDKIDAFRIASFALYNQNNIDLNKTSTASARNISRERDRLAKETAKIKTEIKNHLQILFPELVNNYNVFTKTMLLLLLKAPGAFPIKKLKPIQIERIFNKTGGNKVQISPKNLIKMAKRSFGIEDEYRQSILIMKIEMLLFIQKQKSELDKKIKEYIDKNLKQEFDIITSIDGIGQTTAEKFLIEIGNINRFKSHNQLRAFIGTDPSIKQSGSSVNVNGKISKRGNSHLRRTIWQMAFAVRKFSPQFQQYYLKKRREGKKYKQAVIAVANKLIKTLYALLKNNSFYYENYRNQSKLIYS

SEQ ID NO: 405595 - protein, 369 aa, unidentified
MKKHITFVGLDVHKNSINVALADGDRNGEVRYYGAIGGTLDDLDRVVKKLSSSSRELRFVYEAGPCGYDIFRSLTDKGYACSVASPSHIGKKPSERIKTDRRDAMMLARLHRAGELTYVFVPHAEDEAMRDLTRAREDALKAQRVARQQLGGMLLRLGFRYQGRTAWTPAHFRWLADQKMPTPSQQVVFQEYINAIDETTKRVERHTQQIENLVPSWRMAPVVKALHALRGVSLIVAATMIAELGDLTRFENPGKLMAFLGLVPSEHSSGQKKRQGAITKCGNGHARRVLVEAGQAYSYQARITPLLLKRQEGVSKEVKDISWKCQVRLCARFRRLSATGKNRNTVITAIARELAAFMWSIAKQVPIGA

SEQ ID NO: 405596 - protein, 347 aa, unidentified
MDHVGLDLGKRESQIAILAEDGELINMRIRTERRRLVEMFGRRPKARILMEASTESEWVARCLEDLGHEVIVADPNYAPMYAQRTRRVKTDRRDAHALAHACRAGTYRPAHRTSTERRELRARLAVREAVVRTRAAWITRIQSLVRREGCRFRTGAPETFLTRVEELALPPALMTVIAPLVELLGPINKQIAVLDEELERIVAADEVARHLTTVPGVGPVTAMAYVATVDDVTRFRGAHQVEAYLGLVPSEWSSSEVQRRGHITKAGNSRMRWLLVQAAWCILRRRKRPQTAALRDWAERIAGRRGRSIAVVALARRLAGILFAIWRDGTVYDATKVRGPLPARRAA

SEQ ID NO: 405597 - protein, 532 aa, unidentified
MATKRNSRKNRANGPGRLGKPNGIIQPRVEEVGPQRFGVVAVDCAKARSKWMLCDFFGKVLLPPTEVEHARTQMQLATLRFRQACEHHDIRDVIVAVEMTGTYHRPIQRAFRAAGAETRLVHPFASKHYRQPAHGDNKTDDHDLEAIFRAAVNGFGLLEPVWGETYLQLQLLVRHRRDLVDKRSKLQCQIRQYLERCLPGYGALFPGDYLWSRPVAISIARRATSAEAIHQAGIAGVTRWLREEKLRFQARTVEKIVAWAGNAADADPLAAHLSRVWHALHDDWQSKTESIRRLERELAGILVKTPYLLLLSLPGINVTSAAELAGEMGPIEHYAHARAVTGRAGLFPSRYQSDTVDRADGPLAHFRNARLRAVWMRVADNLIKCNAYYRGKHQFWKQRRVDSRDIRCRVANRAVRSVFQMVSGRKLYRHPSRLDRGYVMDKLLAFHREHATPPHEIVRDLQRAAEQIPKQDRLEEAAPLRTTYERSRRSRRKGPQEIGTILVSVLARLGISGLESQPEARGPIANVSEAST

SEQ ID NO: 405598 - protein, 343 aa, unidentified
MQVVTTIGLDIAKSVFQVHGIDAEGKVTIRRQLKRRYVLAFFQKLQPCLVGIEACATSHHWSRQLKALGHTVRLMPPAYVKPYVKRQKNDAADAEAICEAVTRANMRFVETKIPEQQSCLMLHRTRQLFIRQQTSVINAIRAHLAEFGIVAPVGRKGVEQLLAVAADASDHHVPEMARACVVALGAQLRMLKAQILEFDRRILAWHRSNEICQRLDELPGVGPALATALVASVADPKAFRSGRNFSAWIGLVPKQHSSGGKNKLGGISKQGDRYLRSLFTAGALAVIRYAKIYGTQHRPWLTALLARRPTKVAAIALANKIARMAWAIMAKGEPYKEPVAFAA

SEQ ID NO: 405599 - protein, 343 aa, unidentified
MLHAGLDLSRKRLDVCLLTEHGELIDHVTAPPDGDGLCALARRVAPFGVPVRGVIESMNGARFVRDTLEEHGWEVLIADAQRVKGLAPLACKTDRIDARVLAELSWRELVPAIWLPDPTIRRERELARFRLHLVRHRTSLKNRVHATLITFGTPCPVSDLFGHAGRELLDRLAIPDPWRRTVDASLALIDELELQIAQLTVELRRLGADHRYVPLLVTVPGVGWVIAFTIASEIGDINRFASPTKLCGYTGLCPRVMQSGNTDRRGPITKHGPKYLRWALFEVALHACTHPLYRDRYERTKKRLGRQRGPKVAQIDLSRKITEAIWHMLTRNQPFAPAGANFV

SEQ ID NO: 405600 - protein, 417 aa, unidentified
MERLYETCCGIDIHKQTAVACLITTGPRGQRARETRTFATTTGALGELRDWLRAAGCTHVAIESTGVYWKPAFNVLEEHCTVIVVNAAHIKQVPGRKTDVADARWIADLLQHGLLRASFIPSRAQRELRDLTRTRTSLIDERSASVNRVQKVLEDANIKVAGAGVVTDIMGKSGRDILAALLAGTLSPAAMAELARGRMRSKREALEKALQGRMSDHHRMLIALHLEHIDLLDEQIERLSAEIAARLRPYEAELLRLETIPGVGRHIAEVLAAEMGLNMEQFPSAGHLASWAGMCPGNHESAGKRKKGPMRKGNTALRRALNEAAQAAARTKKPGRTYLRGQYRRLVVRCGKKKAAVAVGHTILRIAYHLLKEKETYREGVLVQLDERRRARVQQRAVDQLRALGYEVTIIPKEPAA

SEQ ID NO: 405601 - protein, 412 aa, unidentified
MDRIYERVAGLDVHRDSVAACVRVPGPRGGTLTHKQRFSTMTTGLGQLRGWLVEHRVEVVGMEATGVYWKPPFYALEGHGFELWLCNAHHVKNVPGRKTDMSDAEWLADVVAHGMVRPSFVPPPPIRVLRDLTRRRKTQVDMRAAETQRLEKVLQDAGIKLSSVASRVLSMSGRNMVEALIAGERDTAVLAELAIGRMRNKRPELSEALSGHFGPHHALAARQILDHVAFIDASITALSEEIAARMERFASVFELLLPVPGLSRLAIEVIIAETGADMSRFPSGGHLASWAGVCPGNHESAGKRRRVGTTPGDPWLRRTLIESAHAAARTKSSYFAVQYRQLAHRRGPNRAAMAVAHSLLVVIWHLLSTGESYQDLGGDWFEKRRDPERETRCLVRQLEALGHTVNLAAPAA

SEQ ID NO: 405602 - protein, 384 aa, unidentified
MSQDNARAAGTPQEKLGAIFASIELSKKTWLLTTMSPGAGDKMSRHIIPGGDIGALFAQLAALKRKAHDRTGRHYPFVIIQEAGLDGFWVHRALTAEGYESHVVDAASIATSRRKRRVKTDRLDGESLIRALLAFKRGEPRVCSMLRVPNPDEEDRRRIVRERKVLMEERIRHSNRIKGLLFSQGITGYDPLRRDRREQLEMLRTGDGRPLPLNMKRQVLREFARMELLIDQIKEVEAERDDMLIEERQSAREVALLSKVVGIGPEFAAVLWGEGLFRHFDNRRQVAAYAGLAPTPWQSGSIDREQGIGKSGNPRLRSTLLEMAWLWLRHQPSSTLSRWFNERVAQNGGRFKKVMITALARKLVVALWKYTSAGVLIEGAVIRP

SEQ ID NO: 405603 - protein, 347 aa, unidentified
MLYAGLDLSRQRLDVHLLDEDGRTVEVTAVRPDADALQSLVAAVARHGQPVSAAIESMNGARFVHDTLELAGWEVEIADALKVKGLAPLAAKTDKIDAWVLAELGRRELVPAIWLPDPANRAERERARFRLHLVRHRTALKNRIHATLIAFGHPVPVSDLFGVSGRELLAGLAIPEPWTTTLATSLRFVDELDTEIDACERELRAMGAGHPYLPLLRTVPGIAWVLGYTIAAEIGDIGRFSSAKKLTGYTGLCPIVRQSGGRDDRGPLAKNGPKYLRWALIEAATHAARHPMYKDRYERNKKRLGRQRGSKVARVDIARELATAIWHMLSKNEPFALGRSPATPLVA

SEQ ID NO: 405604 - protein, 412 aa, unidentified
MYYVGIDIAKRSHVACIMREDNALEVQPFTFASTQEGFKKLLAHLQSLGCATSEIIIGMEATGLLFENLYRFLRDLKYLVVLLNPYQTSKFREMDTMKRVKNDNIDSIMIAALIKSGRFSEGYVSQEQLQSLRVLYRHRASLEDQLKAIKRQVSTLLAVVFPELETVLPNPFSVTGLALLEKYPTAKHYEYASCERILKTFRGIKGNNFSKEKAQTLLELARVSIYSGAAKEERAFSIRSNIALIRLLSSQMEAIEEQMLLLFHKTQATPGEQDEMASLIDNLRTIPGVSDKTILALLAECGNLDRFHNAKALTGYLGLYPTLEQSGSSSKPGRLAKRGARLAKKAIYMAAIASVRHNAELAQVFRNYRSKGRAPKECLVIVARKLLGIIYAIYVHNTPYDPARVFRAARPS

SEQ ID NO: 405605 - protein, 354 aa, unidentified
MSNKSNATIATMGIDIGKNSFHVVGLDQRGAIVLRQKWSRGQVEARLANMPPCLIGMEACVGAHHLSRKLQSLGHDARLMPARYVRAYLKGQKNDFRDGEAIAEAVQRPTMKFVATKTAEQLDLQALHRVRARLVGQRTGIVNQIRAFLLDRGVAVRKGPRFLRTELPRILATRCDVLSPRMVHVIEELAGDWHRLDERIKTVSSEIEALADQDPACERLMTVPGIGPIISSATVAAIGNGAAFSKGRDFGAWLGLVPRQISTGDRTILGKISKQGNRYLRVLFVQAARVVLLRPNSWERYGLKSWIEAAKKRLHHNVLAIALANKLARIAWAVLNKERKFECVRTSAMAPRSA

SEQ ID NO: 405606 - protein, 402 aa, unidentified
MNAVGIDVSKGKSMVAIMRPFGEIVSAPFEIKHTASDIHSLVELINSVEGESRIVMEHTGRYYEVLAHQLSEANLFVSAINPKLIKDFDNDSLRKVKSDKADAVKIARYALDKWQNLKQYNVMDELRNQLKTMNRQFGFYIKHKTAMKNNLIGILDQTYPGVNTYFDSPARSDGSQKWVDFASTYWHVDCVRKMSLNAFIDHYQNWCKRKKYNFSQSKAEEIYGKAKELVPVLPKDAITKLIIKQAVDQLNSASTTVESLRTLMNETASKLPEYPVVMAMKGVGTSLGPQLIAEIGDVSRFTHKSAITAFAGVDPGVNESGSYEQKSVPTSKRGSSDLRKTLFQVMDVLIKTHPQDDPVYQFLDKKRAQGKPYYVYMTAGANKFLRIYYGRVKEYLSSLPES

SEQ ID NO: 405607 - protein, 431 aa, unidentified
MGLIVPTAMDSQREDQPLPYDWFVGIDWGSKQHQVCVLDRDRRRVGERAVDHDGASLVRLAEWLWSVSAGQPQRVAVAIEVPRGAIVEGLLERGFHLFAINPKQLDRFRDRHSVAGAKDDRRDAFVLADSVRTDQPSFRQLQLEEPQFLVLRELSRAEETLLEEFRRSANRLRDQLHRFYPQMLELCSAADEPWLWDLIDLAPTPAHAALLSEEQVQRVLKAHRIRRIKAHAVLTCLQAPALPVAPGAAEAAQAYCGFLLPCLRVLAEQLQACSHQVSTLLRTLSEEPGEGEGPSDVAIVQSLPGVGRKITAWLFAEAAQPLAERDYQVLRTHGGVAPVTKQSGKRRLVVMRRGCNPRLRHALYHMARVAMQRDAHFSRVYEALRAKGQRHGQALRNIGDRLLRILMAMLRDRTLYDSSRRYSGQIVLMGG

SEQ ID NO: 405608 - protein, 387 aa, unidentified
MLLDHPSDGQTAIRTQFGAIFVSLELSRSTWLVTSLSPGNSEKMSKYSVKAGDLPELLKLFSELKQKALARSGESYRIVTIQEAGLDGFWLHRALQQEGVESHVVDPASIATPRRRRRAKTDRLDGETLLRSLLAYKRGEPRVCAMVVSPSPEEEDRRRLCRERRTLIAERIVHVNRIKGLLFAQGIFDYVPLRRDRRAALDLLRTGDGRVLPTHLKVQIRRELDRLELLLEQIATVEREQDALLAASRPADGTERSNPVAMLLDLKSLGPNFAAVLWTEAFWRQFANRRQVASYAGLAATPWRSGGIEREQGVSKAGNPRLRTMMIQLAWLWIRHQPQSALTQWFNANSPRGRKRTIVALARKLLVALWKYVTAGVVIEGAVMKSA

SEQ ID NO: 405609 - protein, 319 aa, unidentified
MAQNGLVVAGIDVAKDKADVSIRALSQRQTFPSTAAGRRQLISWLRKHKVTKAVMEASGGYERQWAKALRDAGIEVRIVDPKRVRSFAQSAGRLAKNDGIDSDTIGWFAEVFVEAPSQAHDAARETLQQMVNARQGLLDIRTMLSNKAEQDVPEPVQKSHACLLKTVAVELAKLEAAITALVKATPHFAKRAEIIESVPGLAATTAAGLIAAMPELGEVSNEAIAALLGVAPYDDDSGKRQGERQIKGGRRKVRNLFYMASLGAATRHNPALNAFYRRLIAKGKKAKVALVACMRKLIVILNTMIARGEKWDASRYPVS

SEQ ID NO: 405610 - protein, 397 aa, unidentified
MTESSDYESVQVFIGVDVGKDTHHAVAINRSGKRLFDKALPNDENKLRSLISDLKQHGQILLVDQPATIGALPVAVARSEGVLVGYLPGLAMRRIADLHAGEAKTDARDAAIIAEAARTLPHALRTLKLADEQIAELSMLCGFDDDLAAQTTQASNRIRGLLTQIHPALERVLGPRLEHPAVLDLLQRYPSPEKLASLGEKKLAAQLCKLAPRLGKRLAADIAQALAEQTVVVPGTNAAAVVLPRLALQLITLRKQRDEVALEVEQRVLAHPLYPVLTSMPGVGVRTAARLLTEVACRAFASAAHLAAYAGLAPVTRRSGSSIRGEHPSRRGNKALKRALFLSAFAALRDPLSRAYYTRKMSQGKRHNQALIALARRRCDVLFAMMRDGTFYTPQRS

SEQ ID NO: 405611 - protein, 338 aa, unidentified
MDVTSGLICIAAGSVIYTMDADGERLGCVRIANDPWVLLEEVAKAGADAEVVIEATYGWYWAVDLLRDAGFSVHLSHPSGNDWGNRRVKNDERDARDLADLLRLGRLAEAWIAPPATRELRELVRYRAKLVQLRSGLKAQVHAVMAKEGVLPGLGDMFGPGGQRLLDEMELADAYTARVESLRDLIGIYDREVVMLERTIHQQLRGDRGYRAIQAITGVGPTLAAMFVAEIGDVSRFRSAEALCSWAGLTPKHRESDTKVVRGGISKMGSRLVRWAALEAVSAYKGGPVLREDFHRIAERRGKNKARVAVARKLLTLVYYGLRDGEIRCLRDTTAVAA

SEQ ID NO: 405612 - protein, 318 aa, unidentified
MLIHYIDIAKRNFVIAVSSLSKTKTETNNPKGIAHTIEYLKKHKVALVVTESTGGLEIPAAKAIRRAGIAVIIANPRQTHQFAQSQPLTKTDAKDAKMPAFFAQMTAQKEDSQTMPYQPPTEAEEVLEALVNRRNQPADMRTAEKNRLHQVHETQVGSVKQLIAHFDRLIDELDKQIDDHTHTHFDGKAQVAEQIKGIGSITTATLMAMLPELGRLSHKRIASLAGIAPHPRESGETKFKSRCFGGKSAVRKALYMATVAATRFEPLIRDFYQRLLSEGKPYKVAVTACMRKLLETFAKFLSLPTAETQTQVFVYFRS

SEQ ID NO: 405613 - protein, 305 aa, unidentified
MERYLGLDVHAESCTFSVLGESGKEIRRDVVETNGKALVGFLKQLPGQLHLCVEEGEWSPWLYEILSPHVAQMVVVWPEKKRGAKSDALDARGLAERLRTGRLGRVVFKAPRQFAKLRELARVYALLTRDVARTKNRLKSLFRRRGILCPGDEIFHSKVREARLKELPAAMRQAVEVLGTELDCLEELKAEIQEAMLEESHRYRMARILETAPGMGPIRVAQMLPIVITPHRFRTKRQFCSYCGFGVVTHSSADWVRQGERWVKAQVALTRGLNRNHNHLLKAIFKGAATTVIAHAAPNPPARGL

SEQ ID NO: 405614 - protein, 440 aa, unidentified
MQIIYHRVAGLDVHKKTVVATRRRITEERVEQETKTFGTTTPELLQLHDWLEEWSCEQVAMESTGEYWKPVYNILEDSFEVLVVNSRHVKHVPGRKTDVKDAEWLAELMMYGLLKASFVPSKPQRALRDLTRYRKRLIQERTRVVNRVQKLLEGANIKLASVASDVMGVSARAMLAEIASGQSDASQLADLARGRLRNKIPELEKALTGLVGEHHRFLLASQLEHIDFLDEQVANMEAEIARQVEGMPPLSKPSAGGEDSPSSSDEKPENELTWEAAVELLDSIPGVNERTAQAILAEIGLDMSQFPTAKHLAAWAGLAPGNHQSGGKRYSGRTKKGSPTITSTMVQAAWSAVRVKEGSFLKSRYRRLAARRGKKRAIVAVAHSMLVSVWHMLTKRQPYQELGGDFFDQRRKEAKVNYLTRQLEKLTGGLVHIELQPTPV

SEQ ID NO: 405615 - protein, 355 aa, unidentified
MESVKYIGLDVHQSTISVAVLDAEGKLRMQSVIATKATAVLDVVKGLRGELHVTFEEGTNSAWLYDVVVRQVARVVVCNPRKNALLKSGNKSDQIDARKLAELLRAGLLSPVYHGEQSTRTLQQLVASYSALTEDTGRAMRRIKALYRSQAIVCAGKKPFGKRHRGEWLARLTDSGQRRRAEWLYQELDAVQVLRREARQAVMVECHKNSAAKLLRTMPFFGPLRAAVLIARVQTPHRFRTKRQFWTYCGLGLETRSGADYVEKDGQIVRRRKPVYIRGLNWNYSHELKNVFKSAATTASAMDGPFRAFYEMRVANGMLPAMARLTLARKMAAIALILWKRGETFAAEHLNLQAA

SEQ ID NO: 405616 - protein, 337 aa, unidentified
MEQQQQYVGIDLHRRRSVIVRRNEAGQTLETVRINNDPVALAAELAKAGEHPEVILEATYGWYWAADVLEECGAKVHLAHPLGNNWGHRRVKNDERDATDLVDLLRMGRLAEAWIAPPPLRELRELIRYRGKLVHFRTSLKSQVHAVLAKEGVTVPMSDLFGVGGQVLLDKVHLADAYRVRVESLRKLIEHVNREIAMLEEQTAPYFAGDLGYHAVQAIPGVGPVLAAIFVAEIGDISRFTSARHLCSWAGLTPTHHESDEKVRRGHITKQGSRLVRWAAVEAVARQRADTPIRRHHHNVGDRRGTQIGRVAAARKLLILVYYGLRDGEIRCLAETG

SEQ ID NO: 405617 - protein, 393 aa, unidentified
MVCVGIDVAKDKHDCFIISSEGEILADVFTIPNNAEGFDTLLQAIRRSTRPEDKIKVGLEATGHYSYNILGFLLDKGLPTYVINPLHTNLYRKSLSLRKTKTDRVDARTIAAMLMSDVDLKSYTDTVYHNEELKSLTRYRFDKVRERAKLKQSVSRLVTILFPELEKLVSSLHSASVYALLSEFPGAKQISSTHMTHLKAILKNASQGRYGQEMAETIRNAARSAVGSVMPAKSLELQHTIRLIRELDAEIEDIETAIQAIVDEMQSPITTIPGMGVRMGAVILAEIGDFSRFDSPDKILAYAGMSPSTYQSGQLSLSGAYSHMEKRGSRYLRYALYNATKHVCHWDPTFAAYLAKKRAEGKHYNVALSHAAKKLVRLIFAMEKSQRPYCAAP

SEQ ID NO: 405618 - protein, 344 aa, unidentified
MDHFAGLDVSVKETSVCIVDDTGKIVREVKVASEPEALLAVLRNPAYHFKRIGLEAGPLSQWLCSAFAEAELPVVCVETRHMQAVLKAQINKTDRNDARGIAQMMRVGLYRPVHVKTLRSQKLRMLLTHRKLLQSKAIAIENDLRGTLRNFGLKVGMVGTAKFEGRIKELVENLPDLAILVEPLLIVRRTLREQIVILHHRLLAIVRDDEVCRRLMTTPGVGPVVALTYRATVDVPARFRKSKSVGAVFGLTCAKYQSGEIDRSGRISRCGDEMMRVMLYEAAQSMLRSKKWSWLKAWAMQIARRRGMKKAIVALARRLAVIMHRIWVDGTEFRWTREQAAAAA

SEQ ID NO: 405619 - protein, 366 aa, unidentified
MNHIAIDLGSRESQICVRNSEGLILEEQRRPTTALGKYLKTKEKGRVVLETCAEAFAVADAAREAGHDVTVVPSKLVRMLGVGDRGIKNDVRDAQNLSKVSCRLEELPSVHVPGEESRERKAMSAMRESLVEVRTKLVNTTRSWLRTQGVGVLAGGTLPTFPGRYRRHVEKKTGKPVPGYVDRVLKAIEELNPKIAEADKDLESIATQDSTCKLLMTAPGVGPVTAVRFTAAIDDVSRFQDGHGVESYLGLIPGENSSGDAKKRHMKGITKAGPPRVRWALTQAAWTAMRCRKHDPMVEWARQIEQRRGKKVAVMALVRKLAGVLYAMWRDGKPYDPQHESKVKAAATQRGDTATGSGVTATPTAP

SEQ ID NO: 405620 - protein, 520 aa, unidentified
MKVNQINYEAKTSFMRVVLFADNAIYGSLKPHESLCNIVCDTMQSVTGLLNPKTLKSMAKKAQKIKNGKRNELLIVNPHAAGIDIASTEYQVCVPEDRDNEPNRRFEAYTCDLHAIAIWLQQCQIESVGMEATGIYWVQLYTVLKRYGFDVTLCNAKHLKNIGEKKTDYVDASWIQVLHSYGLLKDSFQPDNQIRQLKDLMRFREHLVQRSSQDILRVQKALEMMNIKVHKVISNIKGKSGLAILDAIVRGERNPDVLADLADHRIKAKHGDVVKSLEGNWNDTQILIMKQNLDAYRFALKQIDELDQSIEQVLIAYAQIAHTPDKPIERALKSKQKQGNTFKFDAEQYSYEILGVNLVRIPGISSLTAVKFISELGNDFTSKFPTCKHFCSWLNLVPNNKISGGKVLSSKVPKRKHFAGQAFRVAANTLSHSKGYLGDYFRRMKSRLGYNQAVIAVGHKLARIVFHMVSLGVEYDEEIDHVKNIKQLDNIRSYLLKSLAKVENELGITNFVPDNYVLVR

SEQ ID NO: 405621 - protein, 385 aa, unidentified
MRAEAHGRGPPWSPNGIDVPEWRCLVTTRGTGGSTMNVTTYGLDLAKRVFQVHWVEPETGELKRKALARSDVSVFFARRQPGVVAMEACGSAHHWGRRLRDLGYEVRLIAPQFTRPFVKTNKTDVADGEAIWEASQRPGMRYVALKSEEQQAVLSLHRIRAQLIKFRTMQANQVRGLLYEFGVVAPKGWRVLLVQVAPVLAEGERGPVPELMRQELLTQVEGLRMLTSRIHELERQIGAWQRWETECRRIAQVPGVGQLTATAVVAMVGDARTFRSGREFAAYLGLVPRQWGTGGRVRLLGISKRGDPYLRTLLIHGARAVVLQQSRADRERDPWLKELQSRRPKNVAIVALANKMARTIWALLAYGREFDRSWSRTQMPAAAES

SEQ ID NO: 405622 - protein, 392 aa, unidentified
MVISVGIDVSKDKHDCFIVSSEGEVLADVFTVPNNMDGFHCLLQRIQDCTTPQDKIRVGLEATGHYSYNLLGFLLDNGLATYVLNPLRTNLYRKSLSLRKTKTDRVDARMIASMLLSDAGLKPYTNTAYHNEELKSLTRYRFDKVKERAKLKTSISRLVCILFPELEKLVPTLHMASVYALLEELPSAKQIAAAHLTRLKALLETASKGHYKRDMALEIRDAARNSIGSRMPAKSLELQHTIRLIRELNAEIAEIEEQIQSLMEELDSPITTIPGLGFRMAAMILAEVGDFTRFSSPDKLLAYAGMSPSTYQSGQLKNCYPHMEKRGSRYLRYAIYNATKYVCLWDPNFADYLAKKRAEGKHYNVAISHAAKKLVRLIFAMEKSGMPYLLAS

SEQ ID NO: 405623 - protein, 326 aa, unidentified
MFVGLDLHKNYLQAAVMDDQGTLLREERIPNTDDDIQAFRDKVLKERAEIVIESSSTWYHVYELLSKEHHVILSNPVKTKAIASAKVKTDKVDALMLANLLRGGYIPESYIPPKRIMDLREVVRYRASLVRMRVSAKNKVHAVLLMNGIKIEGKPFTREFVEELKKLGDYRIDGYLVVISSLNKQINAVSNTIRKEAKEDESTKLLMTIPGIGYYSALLIMSEIGDIDRFPDSHHLCSYAGLTPSTHSSGGVEYHGPITRAGSSYLRWIVTECVKTHIRTQKESDLTRFYRELAKRRGGSKATVAAASKLLRIVFWVLKEKRPYYG

SEQ ID NO: 405624 - protein, 431 aa, unidentified
MLKINPLSTLYVGIDVSSKSNYVCALDFYKNKYINSSFANNQPGAEELALKILECLKEHPDITTIVAALESTSVYSIHIANYLSSCEELMRFKPYVFVLNPKCTANYKKSYIGLGKSDPIDAFVIADYARAGNIESEPWRGSQFLALKRLTRHRLHLVECMTREKTYLVSNLYLKFSELQMLEGDDQPFCDIYGATSSSVLMEYFSPEEILDSSEEDLIAFLAKKSRNRIKDISKTADLLKKAARDSYRLDKALYEPLNVSIASSFNCIETFKREIKVIDNAIEKEIKGLNPNAFIILQSIDGIGPVFAGGIIAEIGDITAFHSSDALAKYAGLTWKSNQSGDFDGEDTPMIKAGNRYLRFYLGEAANSMRKHNVEYGAYYRKKYNEVPKHQHKRALALTSRKFVRLVYGLLARNQLYSGVSLDTSIKDSN

SEQ ID NO: 405625 - protein, 389 aa, unidentified
MPAVADRHDAPTAIQSNLAAIFISLELSRSIWLVTSLSPGSAEKMSKHSVRAGDVAALLARFSELKRKASERTGKSFPIVVIHEAGLDGFWLHRVLQSEGIESHVVDPASIATSRRRRRAKTDRIDGEALLRALLAFKRGEPRVCAMVKAPTPEEEDRRRLCRERKVLIAERVKHVNRVKGLLFSQGVSGYEPLRRDRRQRLDELTTGDGRSLPMHLKNQISRELDRLELLLDQIKQAEAERDALLAAQQAAAPGPAGRMLLEFRGIGAEFAASLWLEALFRHFDNRRQLASYAGLAPTPWQSGSVDHEQGVSKAGNPRLRTTLIQLAWLWLRHQPQSALALWFKERVNRSGGRLKKTTIVALARKLLVALWKYVTAGVVIEGAVMKDA

SEQ ID NO: 405626 - protein, 412 aa, unidentified
MDALIERAAGLDVHQGSVVACIILGAAGRRPTKEVRRFGTMRQDLAALRAWLLEKGVTHVGMEGTGVYWQPVYAALEDAFTLIVGNASHMRNVPGRKTDVKDAEWIADLVRHGLVRASFVPPPEIRVLRELIRHRKALVGTLAAERNRTLKLLESAGIKLAGVMSDVFGVSGMLMLRALAEGTADAATMADLAKRRLRRKRDRLALALDGSLAEHQRFLLGLHIRRLEEIERDLAEVEAAIGAAMRPFAAQQALLVTIPGVDALTAAAIVAEIGADMAAFGTAQRLAAWAGLCPANHESAGQQKRRGTRKGNPYLKAMLVAAAISASRTKGTYLRDKFHRLKARMGPKKAAVAIAHKILTAVFHMLQRAVAFIDLGADYLDRIDKHRTAKRLVRRLDALGYDVMLRPKMAGA

SEQ ID NO: 405627 - protein, 410 aa, unidentified
MERVIERCCGLDVHKKTVVACVRVPGRTGGREQHVRTFGTTTAELLALRDWLGGYGVTHVAMESTGVYWKPIFYVLEDAFTCVLANAAQIAQVPGRKTDVKDCAWIAQLLEHGLVRGSFVPPVPIRELRDLTRYRAALIGEHTRETNRLQKVLEDAGIKLASVASDVLGVSGRAMLDALTQGTRDPDVLADLARGALRRKLPALRQALTGRFRPHHAFLVSQVLAHLDYLDEVIEALSTHLDEVMAPFAEAVSRLDTIPGVNKRTAEVLIAEIGVDMGVFPTAGHLASWAGLCPGNNESAGKHRSGKTRKGNRWLRGALIQAALAGGTRATKGAFAARYRRVMRHRGHKKAVVAVAHAMLVAAYHLLARHTTYQEPGADYYERRHAERVRHRAVQLLERQGYRVILEPAA

SEQ ID NO: 405628 - protein, 411 aa, unidentified
MDGLNPLHKRVAGIDVHRMLHVVTVLIEDDDGTIIKHQREFGGFKRDMKAMAFWLLELQVSLVVMESTGIYWKSAHAHIERAGILAMVVNAHFIKYVPGRKTDMGDSEWLAVLARFGLVRGSFIPPKDLRELRLISRYRRKLSQMLSSETNRMHKILDDGGIKLGAVVSDIKGVSARAMVAGLVAGKPISELLGMARGSLKNKREDLAASLEGDLSPRHLYILTELHESVTMLEQKLARLDAYLIEAMRPYQWAFELLQTIPGIDATSSAMILIEIGDDMSRFGDADRLASWAALCPGNNESAGKRKSGKTRKGNAIIRYILCECANAARNTKSSLAAKYRSLMVRKSHKKSIVAIAHKIIRIIYFMLSRHEPYCDPGVDYEAMSAQKNAPRWIKALKKIGKLPIAKPALA

SEQ ID NO: 405629 - protein, 348 aa, unidentified
MTHYAGIDVSLECSSVCVVDANGKIVREDKVASEPEALVAWFGSLGLELTRIGLEAGPLSQWLYAGMVKAGLAVELLETRHVRDAFKAMPVKTDRNDARGIAQLMRLGWFRPVHCKSLGAQEQRAMLTARKLVQSKLRDVENSLRGILRGFGLKVGKTTKRHFAERIQELVSGHPNLETIARALLAVHSVLLREFNGFEKRVRGLARLDMKARLLMSAPGVGPIVSLTYAAAIDDPSRFKSSKQAGAHFGLTPKKYQSGETDYTGRISKIGDAAVREALYQAGHIILTKPVKGCPELKAWAMRIARRAGFEKAKVALARKLAVIMHRMLADGTTFNSTGKAKTMATAA

SEQ ID NO: 405630 - protein, 311 aa, unidentified
MTEHTIGVDISKSHLDVFRLENGAARRFENTAAGFRALVKWLGEAPVARIVFEPTGPYHKAFEAALADRFPLVKVNPLQARRFAEAYGTRAKTDAVDAQMLARMGAAFDLAPQEPCSKEARVLRDLHVARTGLIKDRTRLRNRAQTQDIAVLKRQTKARLAQVEGQIAELDAEIAALIEAAQGTARCRDILCSMPGIGAITAAAMLTLLPEIGTLERKQVASLAGLAPITRQSGQWQGKAFISGGRKPLRDALYMPALVAMRFNPDLKAKYAALRNAGKPAKVAIVAVMRKLIETANALVKADRKWVPKTA

SEQ ID NO: 405631 - protein, 409 aa, unidentified
MPNSLLVGIDVSSSDNKVRLLDSSGNSLSKFSVANNQPGAKTLISKIVSAMTLNRFDSLVIGLEATSVYGEPLVHFLKQDAGIGPFKPSIHVLNPKQVNAFKKAYPDLPKTDDVDAWIIAENLRFGRINQEVYMDDRITALKKLTRARYYAARNLTREKNHFLNSLFLKFSSLTQEKVFSDQFGATALAVVEEFLSVDEIAYMSIEELSAFVNEKGKGKFDVPEDVAKLIQKAARSSYRLPKTVNDSVNQVLAISLVAIRALKDQLKLFDKAIEEQMKVIPNTLTSVKGIGPVYAAGIIAEIGDIHRFKNQAALAKFAGICWSKYQSGKYTADNTHLISSGNRYLRYYLMEAANKVRMHDPEFKRFYDLKYRETPKTPHKRALALTARKLVRLVYALLHDNRLYIPPTE

SEQ ID NO: 405632 - protein, 343 aa, unidentified
MEAYAGKQFVGIDLHRRRTVIVRTTEAGEVLETVRIVNDVQRLASVMARAGRCPEVVLEATYGWYWAVDALQAGGANVHLAHPLGVKAFEYRRVKNDVRDAQDLADLLRMGRLPEAWIAPPPTRELRELVRHRAKLVSLRSHCKAEVHAVLAKCGVQVLMSDLFGLAGTELLDRLDLPAPYAARIASVRRLMDDMDFEISVFAGLVRGRMAKEPGYAAVQKIPGIGPTLGAVLVAEIGDVSRFASASKLTCWAGLTPKHHESDTHVRRGRITKQGSRLVRWAAIESVKRVPKASPVGVLRERVADRRGPNIGTVAAARRQLELVFYALRDGHVRALEHQPEAA

SEQ ID NO: 405633 - protein, 458 aa, unidentified
MSRVRKNPTPPTQPVAAVDVLTIINANAAGIDIGLAESWVSVPADRDPQPLRKFGMNTPDLITIADWLKACGVTTVAMESTGVYWIPLYEILEARGFKVYLVNARHAKNLPGRKKDETDAQWLRRLHAFGLLNNSFRPEGEMCAVRTYLRHRAELIEHRAAHIQHMQKAMQQMNVRLSPTVTDITGVTGMAIIRAILAGERDPVQLAALRNPCCAQPESEFVKALTGNYRDEHVFALKQAVALYDCYTQQILECDQELERKFSALKPIHDDHLPPLDPTDKRNTHSKNAPAYDGRSLLYQLLGIDLVAVHGLNEVTAQIIISEIGTDMSRWPDEKHFCSWLGLAPHNDISGGKLLRSRTLKTHNRAGQAFRLAAQAVSRTETAYGAFFRRMRAMHGPKKAIVATAHKIARAVYRMLRDHKPFDVVSADAYLQRDREREIARLQKKATKLGLTLAPVST

SEQ ID NO: 405634 - protein, 336 aa, unidentified
MWHVGLDAHWKQSTFCVLDENGRKIRSRTIRGGWSKVLRELASLEEPFGVCFEASTGYGFLFEKLSRIARQVVVAHPGQLRLIFRSKRKNDRVDAEKLAKLLFLDEVPPVYVPSVETRSWRSLIEHRRRLVFQRAGTKNTVRALLRSHGIAPPIRPWSQRGLVWLRQVELPTEMNQLQLDLLIERLESLTSMIDRVEKVLGGIATKHAGVQLLMTIPGVGIRTAEAVMAYIDDPRRFKRIKAVGSYFGLVPTQDASAKINRLGHITGDGPACVRWLTVEAAWQVVRRSEKVRTFFDRIHRGERERRKIALVATAHYLLRIMLAMLRTGEVWRQEAA

SEQ ID NO: 405635 - protein, 311 aa, unidentified
MYYIGIDVSKKDLSVFDGKDLNFINQEGLKSFKKYLKKKYSLSEIVIIFEPTGVYSLYLKEFCAENSIKVYIVNPKKSHNFSRALGIRPKTDKIDARTLYQFHKLIDLKDIKVPKIDQQAKTLSSYLVSYEFALKQRISLSHHLESLRDEQLITLIKKELKRAQKLEDKIFHDLLEYLGKNQNLKEDYQRLSTIPGIGEKAAIALLALFKTYPGTSRAQITALAGLDPVKRESGTSVKYKVKISKNGKGVYRKMLYLPTLCATVHNQKIKIFYQRLLANHKPKKLAVIASMRKILLIAHAMYQDKTEYITV

SEQ ID NO: 405636 - protein, 417 aa, unidentified
MVNDVQWFVGIDWATQSHCVCLLDAEGRRVGEREFAHGGAGLTELRNWLLEKTRAVPGQIAVAIEMPHGPVVEMLLEHGFVVFAINPKQLDRFRDRFTVAGAKDDRRDAHVLAGSLRTDRAAFRQLAADNPVVIELREWSRMADELQQERTRLANRLRQQLWRYYPQAAKLTDDVADDWFLALWQKVPTPDSAAKASEKAIARVLSAYRIRRLDAATVLSILREPPLFVAPGTTEAACAHIRSLAVRLHLVNQQIREAQHSLDRLCAELEGEENPSGQSCEQCDVTILRSWPGIGRINLATLLAEAAEPLRRRDYHALRALAGVAPVTRQSGKQRFVTRRLACNRRLQTAVHHWSRVAIQHDATARRRYDALRQRGHGHARALRSVGDRLLYALCTALKRHTPYDPNHKNVPMTSKG

SEQ ID NO: 405637 - protein, 464 aa, unidentified
MPKAKKGARRNSRKPKEVTEGLPPLNLNAAGIDVGNAEHYVAVPPGGVSQPGQKFGSFTADGHRLGQWLKACGVDTVVMQATGVYWVGLYEILEQQGLDVKVVNARYTKTLPGRKSDVQECQWLQKLHTFGLLNNSFLPPPEIRRLRTYLRQRENLVAAAATCIQHLQKALTEMNVQLANVLSDLSGVTGMAILRAIVKGERDPQRLAMLKNERVKASREEIARSLEGNWREELLFVLTQTLDLYDIYLGKIADCDQEIEAQLKTMKGKVDVEAQPIPEPRQVKRPRRQKHQPCYDLRGELYRVTGVDLTQIDSFDVQTVQVVISEVGVDMSAWKTEKHFASWLGLCPDNRTSGGKILHRGTRKVVNRASTALRLAASNLLRSDSALGANFRRLRARLGAPKAITALAHKLACLIYRMLKFGKAYLDRGVAYYEAQYQRRRLNWLKKQAAALNLQLVPMAELAH

SEQ ID NO: 405638 - protein, 316 aa, unidentified
MVTQPVFVGIDVAKASLDVAVHPTAERWTVEHTERELAGLTRRLTALQPALVVLEATGGLEGPLVGALAAAGLPVVVVNPRQVRDFAKATGLLAKTDALDAAVLAHFAAAVRPTPRPLPDAATQTLAALVTRRRQLVEMLTAERNRLGSAPRALRGEIQAHITWLKRRLARLDTDLGQAIRTSPVWRVQEDLLRSVPGVGPVLSATLLASLPELGTLNRKAIAALVGVAPLNRDSGTLRGRRRVWGGRAAVRAVLYMGALVAVRHNPVLRAFYQRLRAAGKLPKVALTACMRKLLTILNAMLKHQTPWSPAYAHSA

SEQ ID NO: 405639 - protein, 362 aa, unidentified
MAKARSWAGLDVHAAKVIAVTVDGESGELRSHRLSGDTAQVVAFCGGLPGPVRVAYEAGPTGFGLARSLAANGIECVVAAPGKIERPASDRVKTDRRDAERLVRLLMIGGLHPVRVPSDAEEALRDLVRAREDVRGDRMRARHRLGKLLLRHDVRYDGAGDNWSPRHRDWLDRIELGDRGAQFTLLDYLGAIDALVIRRDALERTIGELVPASPWAQTVARLRCLRGIDTLSAVGLCAEIGDWERFGRPAQLMSFLGLVPSENSTGEQRRLGAITKTGSRHARRLLVEAAWHYRRPPRRSRELARRQEGQPAHVIALAWKTQQRLHRTWRRLDAERGKRRTIVAVAVARELAGFCWAIATTR

SEQ ID NO: 405640 - protein, 423 aa, unidentified
MDIIHERVAGLDVHKAMIVACVRVMADGKAERTCRTYDTTTDGLKSLLAWLMEQRCTHVAMEATGVYWKPVWNILSDGTFELLVANAAHIKNVPGRKTDVNDATWIANLLACGLIKGSFVPCEEIQQLRTLLRSRKQLTREQTSHTQRIQKTLEEANIKLDTVISEILGVSGRRMIEAMIAGVTSPLKLAALADRRIKATPKVLYDALHGRLTGHHRFLLQLYLDQYDAAAEGILRIDQEVDAAIEKMDQAVPAGQASFRSLIGLLYTIPGVSGLSATTILAEIGTDMSRFPDAGHLLAWAGMCPSQNESAGKRKSSRLRKGAPWLKTMLVQCAWAAKRKKDSYYRALFHRIRGKRGQKVAACAVAASLLTAIYHMLKDGTTHQDLGINHFEERSVEVRARRLVGQLSKLGFQVQLQPLATAA

SEQ ID NO: 405641 - protein, 337 aa, unidentified
MDYFAGLDISMDETHVCVVDREGVVVRESKTSSATDAIAGELAKAPSCRRIVFETGRMAPILFHGLSQLGLPVICIESRQAYQALKSLSTHKTDRNDARGLAHLARTGFFKSVHVKSLQAHALRSLIIARKKLVGQRVTLENQIRGLAVVFGIRLPRALTAAFVNQALKASEGIVGLSAAMRGLIAARTAVMTAVAAIDADMRRMTRASAACRRLMTIPGVGQLTALAFVAAIDDPLRIRRSRDVGAYLGLVPRRHQSGEIDYVGSISKCGDRRVRTLLYEAANVMLTRYKGQLKLKDWAFAIAKRSTMRKARVALARRLAIIMHAMLRDGTEFELA

SEQ ID NO: 405642 - protein, 367 aa, unidentified
MKKVSTAAARQTKNLHEHKLTIGLDLGDRSSWYCVLDETGEVLLEQKLATTPKAMKEVFGGMPRSRIALETGTHSPWVSRLLSELGHEVIVAHARNVRLIGESRKKDDRLDARTLARLARIDPELLAPVKHRSAKAQADLTVIRARAGLVRSRTALVNTVRGLTKSYGERLRGCNPRNMNVERAQELSPELQAALGPLLAGIESLSERIGEYNEQIAKIAKESYPQVARLEQVKGIGTLIALTYMLTLEDPHRFHKSRDVGCYVGLQPGRRNSGQSEPQLHISKEGDSYLRTLLVQGAHHILGPFGADSDLRRWGLKLAERGGKNGKKRAVIATARKLAVLLHRLWVSGEAYEPLRQSYQRAMPAAA

SEQ ID NO: 405643 - protein, 356 aa, unidentified
MPNIQGPVTGGVDTHGQTHHVAVIDQVGREVADAEFPATPAGYRALLAWLRALGQLVERVGVEGTGAYGAALSRYLRGQGVVIVEVDRPDRKTRRAKGKSDPIDAYAAARAALSGAAGGTPKTRDGQVEAIRALRLARGSAVKARTQAINQLKSLLVTGPADLREQLRPLAPAALIVTCARLRPGANLTDPAVAVKTALRRLAIRIHTLNAEIAQADRELRPLVTAAAPRLTALTGVGPDVAGQLLVTAGDNPDRLRSEAGFAHLCGVAPIPASSGRIDRHRLNRGGDRAANSALYTVVLCRLRYDPATQAYAKRRTTQGLSKPEIIRCLKRYVAREVYRTLLPLTPPTEDLAPAA

SEQ ID NO: 405644 - protein, 343 aa, unidentified
MSPYYYIGLDIHKRTISYCIKAIDGSLIGQGKIEADRKSLDEWAKGLPGPWVGAMEATIFTGWVYDFLKPHAVALKVAHPEMLKAITAAKKKNDRSDAEKIADLLRVNLLPECHMLSEEIRELRRVLRYRNHIVRTAVKMQNKISGLLMEVGVSYSKRRIHGRKYFHEILERVEEIPPSVKELLKLSRSSYEMFRAFQKRLVETLRTNNLIHDRVQRLMTIPGVGEITALTWVLEIGDPGRFASIRQAVSYCGLCSAQRESAGKEQRGPISKKRNKHLQTMLIEAAKLAPHWNEQLAIVHERELKKGNRNRATLAVARRLVAYMLAVDKKQADFKLPAEIQAA

SEQ ID NO: 405645 - protein, 412 aa, unidentified
MEVLCPRCAGLDVHKDTVVAAVRRIEGDGSVRREVETFATTTPGLLALSDWLEGHDCPCVAMEATGIYWRPVWQVLAAEGRTLILANAAHVKNVPGRKTDVADAVWLCDLLAHGLIRPSFVPDAGTRAMRDLLRTRKQLVREQASHVQRIQKTLEDANLKLASVLSDIMGLSGRAVLAALAAGETDPDRLRALVGSRVKASPEAIRAALTGRPGPHHRFLLGLHLGQIDALAAAIAAIDAEVDRDLGPFREAVALLATIPGVGELTAEVILSEIGLDMSRFPSAGHLLSWAGLCPRQDESAGKRRSTRLKKGAPWLKTALVQAAWAAVRKKQSYLQAQFQRLRARRGPRKAICAVAASMLTAAYHMLGDGAFYADPGPDHFRRSEPMTRAKALARQIERLGFRCSISVPVSI

SEQ ID NO: 405646 - protein, 394 aa, unidentified
MKLVGIDVGKNSHHFCVMDKETGEFNVAPSSFSNNKEGFDFLINSLKPYSKKSILIGMEDTGHYHVALLKFLLSNGYTVALINPKTTDLTRKMEGGITKNDKLDTITICDVLDTPERKKQYRITKVDRFDLYEQRQLTRHHHNLKEELNVYCNRLQKSIDLVFPEFNTLFSSKYSIVYMNLLKTFGSAEAIASTDIRTIRKCFEIKGRGNRISLTPEKLKECAKNSIGISSEVETIQIKHLVSQIMLIKEQIAEIDKKIEEFSITNNSPILSIPGISHFSGTSILAELGDIGNYSKPSQIIKFAGVAPYHYESSQYNAQHTGITKKGSKYLRKTLYQIILTVINNNPVFKKYYRLKISQGKGHRCAQGHCIRKLLRIIYHLLETGQSFDPALLR

SEQ ID NO: 405647 - protein, 412 aa, unidentified
MTAKDQFAAHVGLDWADKKHDVCVQFKNGDRIFHVIEHTPEALDIWLNELHQRAKGRIAIAVELKKGPVVYALQKYPFVTVFPVHALSLARYRQAFWPSGAKDDPQDAELALDLMLRYPHKIKAIEADNPDIRLLQQLVEQRRLLVEDKRRFVNRLINTLKQYYPQPLEWFSHRDSSLFCELIIRWPSLQQLKRARSDTVRHVMNAKGGPAVAYTEQRVASIASAIPLTTDKTVIEANALMATALASQIKLTGDLIRTYDERIESLFDTLPDAELFKSLPGMGPCMGPRMLAALGDNRDRFNSAEEIQNYAGIAPATERSGQKSWVHWRWQCAKFVRQTFVEWTAKTVNSSYWARLNYQGQREKGKSHQSAIRALAFKWIRIIYHCWKTRTRYDEAKYLLALEARKSPLLKP

SEQ ID NO: 405648 - protein, 342 aa, unidentified
MSVYVGIDVHRKRSQVAVIDQSGEVLTNRNVPNGAEPILKVIGGLPPGTPAAFEACYGTSWLVQLLEDYGFDPHLVHPSRCKAIASARLKNDKVDAAILAQLLRADLLPEAWIAPPAIRQLRALLRHRVALVRLRTRLRNRIHAIVADYGHDRPVGGYWTGPGRAWLAALELPAVSRELVEDYLGLIDALQDRVDRLDWEVRQRARSDPRVKVLTQLPGVGPFTALVILAEVGDISRFASARQLASWAGLTPTVRGSDRVAHYGHISKEGSVWLRWVLCEAAQTAKRSPQFAAAFQRIAKRRGKKIATTAVARKLATCAWHLLTDAEHAAAPPPAAPQTAAR

SEQ ID NO: 405649 - protein, 339 aa, unidentified
MFMIGIDPHKGSHTATAVDASEAVVGEIRVEADRHQRARLLEWAAAFEPRTWAIEGATGLGSMLAQQLVGAGERVVDVPPKLSSRVRLMDNGRIDKTDPNDARSAAIVALRNASLNTVTGEHEDRVILRLLADRYHQLTAQRTRAVCRLHAVLCLVIEGGTSRSLTAARATKLLAEVEICDAITFQRVATCGDFVTEIATYDQALADTRTRTVAAVAAAKTTVDEVYGIGPIGAAIILGRSGDIRRFPTGGHYARHNGTAPIEASSGPKARHRLNPRGDRQLNHAIHTAALTQVAHDHPGRVYYLRKQAEGKTKKEAMRALKRRISDVVYRQLIADTRD

SEQ ID NO: 405650 - protein, 322 aa, unidentified
MDKSIKIIGIDISKDSFDIWSESFGHKQFENSLKGFRRFNKLLEDRSLCVMEYTSSYYQKLALFLYEKQIQVSVVNPLIIKRFIQMKLQRNKTDKSDSKMIALYALEQGVKLWKPAPAYIEQCNFIHTTISVYFKQTTALKNKLHSFNSIGVKGKVISSLKRQIRNINNEIKNLESILEELIKEYEPELLTNLMSIKGIGKKTAILLIVSTEGFTKFENAKQLSSFFGLAPTEISSGSSVRGKNRISKKGNGIVRNHLFMCSFTASQTNLQCVNLYNRIVAKGKSKKLALIAVCNKLLKQSFAVAKSGIPYDPYYKSCILTI

SEQ ID NO: 405651 - protein, 352 aa, unidentified
MRAQVSKVEFSGQTFYCGIDIHKKNWAVTIETDDMSLKTFTQDANPDLLVKYLNRNYPGGRYIAAYEAGYFGFNTQRRLTDQGVECLVINPSDIPTTHKEKDQKRDPIDSRKIARSLRAGQIRTIWIPPVTVVQDRQLIRTRKLLVKDRVRTKNRIKAFLQLHGIEYPERFINVQTHWSKAFIKWLEGIQLEGPSGTEALQSLVRILKHTRDELVILSKRIKELSEDERYHLAYSRLIAIPGIGRLTAMTILTEVGDINRFRSADAFRSFIGLIPRTHSSGEKDYKGRITNRKSVNLRSLLVEAAWSAIRADPGYLYIFNQYKSRMETNKAIVRTTRKLANHIYFTLKEVNR

SEQ ID NO: 405652 - protein, 482 aa, unidentified
MKKRNIYQNQSQELLHLFEEAGSSDKVMCVPMDYAKKDHLVMFCNGHGNILRKPFSVKNTPEGIAYIADQVTRSCRRRGIQKKHVFFGGEDANSFAKNFVSTLRSKGFLVANVNAHDAKKQRGNVQASTDRIDLMGIATMLLNYRANCCPAQSGIYRNLRTLVRHRRKLVQMLTEVKNRVHGIVDELFPGFLKEKNSGIIPFTQSSLYLMEDRFSPKQIRRRRRQKLIEILKRFGTSKAEKTAAKLQQYAAKVLHAPVEYVDTMQLSLAQHVKHIRCLKESVAQMEKEIALNLAQTQGAFLTSVRGIGLVLAAGVTAEIGDLNEQKPLNNLASYSGIIPRVKQTGGLDGKTYTGPVAKRCNRILKDYVVKSAYHLGLHGPQDLMTDYKRRDASGQHADFGMGRRYLRMAISLMRTSQIYLPPNLRKDDYTLEERAGYYLTNWPYLKEKWKKVGALEAAFAKNRPLGLWRQIVQELYDIKLKL

SEQ ID NO: 405653 - protein, 317 aa, unidentified
MSKEDWFVGIDVAKESLEVAFLRGEEEVVLQLPNAPDGWAALVTACRERPAERIVLEATGGYERRVTAELMTAGLPVVVINPRQARDFARATGRLAKTDRLDARALARFGEAIRPALRPLPDEKAAELQEKLSRHRQLIQMRTAENNRLGHARSKRVRESIQSLLEVIDRQLKELDKDIDQRIEESPAWREKDQLLQSAPGVGPQTARTLLSGLPELGQCSRQQVAFLVGVAPLNRDSGKMRGTRTIHGGRAQVRQALYMATLAATRCNPLIRQHYQHLLQAGKKKKVALVACMRKLLCILNAMLRDHKTWNCALPT

SEQ ID NO: 405654 - protein, 446 aa, unidentified
MGNASGVSRGDCNRNARLARLRSLVPVTNAIVGIDLADAKQMVVVTDHDSKVLARKTFRCRAWDLGAALGWAAERAAAKGFSGVTVACEPTGHRWRVLGQLAADRSMPFVCVQPMLSSWARRSEDLTSDKTDEKDAVLIARLRCYVPEPVDETWGRLRHLGARREQVIVEMVSQIQQMRALLECVWPAALDTAKQPFRSKTWVAAMSAICERDGGDLDRTRRLGPARFEQAVRREILKRGGQKPSLRIARRLFAALTDPTGVIAHRPGALERVAFLLVDWHTAGDKLTDTEARMISVLGELKLTALATSIPGLSPVGAAAILAETGDPNRFASGRALVKHAGLAPREKLSGTFVGRTKLTGAGRPGLRLAAWRAVWGTQRGNTVYAARYRHLTSREQNKLTATQAQTVIAAAILRQLHAVITTGQAWDPDIATHGTGHRKQMPIAA

SEQ ID NO: 405655 - protein, 343 aa, unidentified
MSILPLYVGLDYHDDSIRVCIVNEEGRMLANRDRCNDAEMVGEFIYNFGAPKAIAIEACCGAADFAAELSRLYGWEVRMAHPGYVKRLKQSPDKSDFDDAELLADLLRVNYLPEVWLAPEETRQLRRLARYRQGLATDRKRIKQQIRSLLREERLKCDDANPWTKDWMEWLRHKAALGEHARWVMERQLERLADIEKQLKEVENKFVEATRDDPLMQELLAQPGVGVITAFVMRAEIGSFHRFRSGKQLARFCSLSPLNASSGKRQADAGLVRQANPELRRVLIETAHRIARYDERWQALKERLKARGKPTTVAVAAVANRWVRWLHYEIKERLPEQTLETAT

SEQ ID NO: 405656 - protein, 363 aa, unidentified
MLQHTTVTHVGLDVSKASISVALLRPDGHLDEDRIASNPEAVRSLVRRWAEPSKVRACYEAGPTGYDLYRQLTSLGIETTVIAPSLTPRRPGDRIKTDRRDARKLAGLFRAGELTAVRVPTPAEEAVRDLLRARQDEREDILRARHRLSKFLLRHGRVFGDGKAWTLRHDAWLRSQRFDEAAAQRTLGHYRAELDMRLAALKLLDDEIHAIAHHQPFAATVARLSALRGIAELSALTIAVEVGDFARFESAPAFMAFVGLVPSERSSGERRSQGSITKAGNAHLRRVLVEAAWHARRRPNIGPALAKRLAGQPPEVLAVATRAQGRLHKRYWRLVGRHKPSNVAVVAVARELAGFCWALGRVA

SEQ ID NO: 405657 - protein, 394 aa, unidentified
MEMVGCGTTCYKHTQPMHTTKQNKPSNNTKVNVIKLSADVHKRDYKISRQIGDQNIQPAQVFKPEEAFEWAVKQLDHAQRVVFCYEAGFSGFSLARRLEKRGVEVVVMCPQKLDERCRKVNTDKRDSRAIAGRLDRFLAGNDEALVQVRVPSEKEEDQRALSRQREQMIKARKQFEAQGRSLLYFKGLNCPAYWWRCNEAGWKATVQEQCWPAEVVQRLEVYRRMALAADQEVAALTIQMEKAAQENLPKTMPELPHGFGELSMEMLRREVCDWSRFKNRRKVGSFFGLCCAESSSGMQQSQGSITKTGTSRGRHALIELAWRALQFQPEYWVVKKFKSRIEQAKPRSVLRKKLIVALARLIAVDLWRLYTGQTIMAKLGLKAQSAKTYVLKPR

SEQ ID NO: 405658 - protein, 329 aa, unidentified
MSVHQQGRETVAALRPCAGIDVSKAYLDAAWGERFERVSNDADGWDALVAKFQADGVDVVVLEASGGYENAAACALQAAGLAVVVLNPRQARDFAKAMGQLEKTDRVDAYSLRDFAGVIARHPQRERYIRELPDAQRVHLAALVMRRRQLLDMRTEESNRLRTAHQAARKSVQAMLKAIDKQLVAVEDDIDNHMQQHFKEVRTWLESVSGVADVTSSTLVALLGELGQLPGRSIAKLVGVAPLARDSGPRKGTRAIWGGRAEVRAVLYMATVSAITHNPVIREFHQHLIAKGKPKKVAIVACMRKLLTILNAMARDHAAWDESKHIKTA

SEQ ID NO: 405659 - protein, 425 aa, unidentified
MNTKQNERISQVSSDTLVVGVDIGEEKHYARAFDYRGIEFSRRALPFSNSAVGFNVFYKWLEDMKERTGMKKVIIGCEPTGHYWFTFQKFLHDHKLKLVVVNPYSVNRSKELDDNSPEKDDIKDPKTIAQLVREGRYSIAYIPEGRYAEIREAQVCRDQIMKQHIRLANQIQAWLQQYFPEYLEVYKKFDTESGLLVLEQAPLPADIRKLGAEEIRQIWKDAKLRGRLGISRAQTLIEAAQKSVGLEGGEAARFRIRVLISDYRRKQEQLARVDEILQKEVMLVPNVEKLLAIKGVGIGSVAGFIAEVGDIGRFTDPKQIQKLAGLEITKISSGKRKGKPGISRRGRRRLRRVMFEAARALMQWDTAFSDLFLYYRTRIHHPLGSMQAKVAVECKAIRVFYAILKHGCDYDPEKLRRDIKKLVTE

SEQ ID NO: 405660 - protein, 321 aa, unidentified
MKTVLGIDMAKKKFDVALLLNGKYKSKVFENNPAGFSALLAWLAKNDVATVHACMEATGSYGEALARFLHEAGHSVSVTNPARIKAFGQSELLRTKNDKTDAKLIARFCEKMEPTLWQPPPVEVEYLRGLGRRRDALICMRTQELNRQETSNETVNSSVQTVLECLDKEIEQISKLIKEHISKHPGLKHKHDLLNSIPGVGPATIEAVLSEINAFEGFETIEQVVAYMGLSPKEHTSGTSVKGKSVVCKIGNARLRKALYMPALSAIIYNPIVRALYIRMKAKSKNGMVIACACMKKLVHLIYGVIKTNKPFDPAYMLKTA

SEQ ID NO: 405661 - protein, 344 aa, unidentified
MHISILGIDIGKNSCSVVGVDDRGAVVVRRTMRRQTLIEFVEKLPTCVIAMEACCGAHHLGRLFTARGHEIRLMSPEYVRPYVKAQKNDDRDAEGIAEAASRPTMRFVELKSQEQLDIQTLHRVRSRLVAERTSLINQLRAVLLERGVIFAVGRVKFESALDGLLAEADEILSPRIRSLVIELRDEWRMLDKKIEALNAEFVALARQNSAMRRLTSIPGIGVLNATARVSAIGDAASFKHARDLGAWLGLVPRQFTTGGKARLLGITKRGNTYLRTLLVHGARAAMHTLSQSATPIGQWLQTMLSRGVQRNVVIVALANKLARIAWAVLRKGQPYERTYGVAAI

SEQ ID NO: 405662 - protein, 370 aa, unidentified
MGKSVLYVGLDVHKMSVDVAIAETGPAGEVRFYGRIGGDLEALDKVTRKLQAQGAELRLAYEAGPCGYQVYRHLTARGLECLVAAPALIPRRPGDRLKNDRRDALALARLLRAGELTPVKVPDADDEAMRDLTRAREDAICVERRARQRTVAFLLRHGRVYPGKTTWGRGHWAWLLQQVMDHPAQQIVLQEYLDAVREASARVLRLTGQIRDLVPQWHQAPFVAAYQALRGVSFIVAATVVAEVGDLDRFNNPKELMAYLGLVPSEHSSGASVRRGRITKTGNSHARRVLVEAAWAYRLQARVTRHLLKRQEGLPECVRQLAWKAQLRLCARYRRLLARGKARQTIVIALARELAAFLWAIGRAVAPATA

SEQ ID NO: 405663 - protein, 415 aa, unidentified
MNRLIERCAMLDIHKSQITACARVPDGDGGRRQEIREFAATTSGLLTLADWLRSFQVTVVGMESTGIYWRPVFYLLEDEFECQLFNARHLRHVPGRKSDVQDAEWGCQLLEHGLVRTSFVPPRPLRELRDLVRYRKAKIQERTREVQRVEKTLQDAGIKLSSVASEVLGVSARKMLDALISGTHDPEILAELAKGTLRKKIPALREALQGRFSGHHALLVGQMLAQIDFLDETIATLSARDEELTAPFSRELELLDTIPGVDRRAAEMLLSEIGPDMSRFPTDAHLASWGGLCPGQRESGGKQHSGKTRKGSTWLRGTLTESAKAVVRTKGTYLSARYHRIKSRRGHAKATIATAHKILTAAYHVLNQGVPYHELGDEFFYRRDTENTERYRRRLIKQLERLGHKVTLEPLKEAA

SEQ ID NO: 405664 - protein, 436 aa, unidentified
MRGCRCSMIMGFTKPIEHFNLQRKKVITMNTLYVGIDVSSKSNVVYLMLPNGDKHSNFSVANSHEGSTQLVKRILSALTSHSLDTVLIGLEATSVYGDNLVYFLREDATLAPFNRKIHVLNPKQVKKFHDAYNDLSKNDYVDSFVIADCLRFGRINKEVYMGDYRYKALQNLTRARFFAVQNLVKEKQRFMNVLFKKYSTMTQEKVFSDTFSTTALAVYDEFESAEALANMDLHELTDFIIGKGKNRFPDPDAVAKAIQKAARSSYRLPKTVNDSVNQVLSISITSMKALESQIKEFDKAIKAQMELLPNVLISIPGIGPVYSAGIIAEIGDINRFNSQAALAKYAGLAWKQHQSGGFESEVTRLIPSGNRFLKYYLCEAAFSLVRCDKEYSDFYHLKYKEVNRCQHKRALALTARKFVRLVFRLLKGNRLYCPAK

SEQ ID NO: 405665 - protein, 319 aa, unidentified
MSPANVYVGIDVAKDWLDVAQRPGGEAWRVSSDETGVAALVERLKDVRPMLVVLEATGGLQIPAVAALAAAGLRTVVVNPRQLRQFAGATGRLAKTDAIDAQVLAQFGEAVRPEVRPLPDAATRELSALVARRRQLIEMLTAEKNRLRVATKKVRANIEAHIRWLEGELLDLEGGLGDVIRSSPVWRERDNLLRSVPGVGPVLSSVLLADLPELGRLNRKEIAALAGVAPLNRDSGQFRGRRTVWGGRSHVRTALYMATLVASRYNPAIKSFYQRLLSVGKPKKVALTACMRKLLTILNAMMRHEAPWEISRLDTQDSC

SEQ ID NO: 405666 - protein, 428 aa, unidentified
MNQEDGSRLEEFRQFRKEVRGSGEYLLVGIDVAKDKHYAFFGTARGKTLLRRLVFENSLGGFRKLLAQAEAMKVQEGLTKVVFGMEPTGNYHKPLGEHLIRCGQGVVLVSGVAAHENRKTLDGRWDTNDPRDAANVADLMSQGKCLFYEFPVGALQELRNLLSLKRRLKREEHGYRVRIRNHLVAKYFPELDRYYEQSESTVLGIVRWCLDPSEIAGLEYREFVQMVGSVRGRSSQERRLQAIWKMAVDSVGCEAGLAVEFEARVMAEGLREIRKKIQEIEEKIQEVCLGFPEYEFLLSIPGFGPDVSSKVLGAIGDPFRFQSGRQVLKMAGLDLSAERSGKSSQSAVPVISKRGKADLRYALYQAAFIASVRDRHFIVYFTNQLRGREREPGIKTKMRVKLAAKLLIMAWTLMKKKEPFDPDYLNLE

SEQ ID NO: 405667 - protein, 330 aa, unidentified
MKTNLIVGIDVSKDDLDYAEKSLSESVKMYAGQGKISNTVSKIKKYLSQYDPLSVRIVLEPTGTYSNKLQTVLDQMGFQYHCVNPKKSHHYALSKGIINKTDDQAARMLAEMGQVLDLPIYVASSQSYQQRKQLLKAIAGLEDEVRRYKNKLHALTQLAQSNEVLEQMCTEMIASFCKQKKILEKEIKQLDDQEFAKKKELATSVKGVGDLTATWLLTITNGLENFEKDKQVIKFLGLAPGSHRSGSSVNKKSGINKGCAGKIRGLLYMASQSAIRFNPACKALYERLRAKGKNYYQAIVAVMCKLIKQVFAVVKSGKTYDEKYHLKFQK

SEQ ID NO: 405668 - protein, 352 aa, unidentified
MQIVSALDVHRRQITYKTLDRETGEVKRGRIAPAARSDVRGWLARFAGCEAEFVLEGTTGWRFVVEEIVRAGHTAHLADPAETAAKRGRKRRAKTDNADCDLQLRLLLAGELPESWIPPAPILELRTRVRMRKTLVDQRSAWQQRLQAQLFHQGTAAGLRPRTRAGREALARVELSAAGRELVALALRMLDVIDLELAPLDGELGAFARRQPGCRALIAQLYGVGVVTATAILAELGDCRRFTSSDDAVRHTGLDVTVHQSDSKRAPGHLSHEGPQVLRWALFEAAQSAARRSSPDHAYFCQVRERIDYNRACLSVARKLCRRAYHILRELGEQALAPVELDQAEEAIQAAA

SEQ ID NO: 405669 - protein, 407 aa, unidentified
MEVVYERCCGLDVHRNTVVACLSVIEAGQRRKEIRTYRTVTKELLSLRQWLLSEGCSHVGMESTGVLWRPVYDRLSGYFKLVLVNTAHMRQVPGRKTDVQDADWLADLLQHGLLTPSFVPDQSQQDLRDLTRLRVHLVQDRAQLINRMLKVLQQGGIKLSGVLSNVVGVSGRAILQAFCRGERGPEQLALLVHQSVAHKHVQLVEALAGDLRPHHLFLLRELLSLLEGMELSIKHVEIEIEQRLEAEEEKIERLEKITGVSRHTLHLLCAEVGLDLSRFPDAAHLASWAGICPGQKESAGKRQSGKTRPANPYVKAALVQAAHTTARTQTYLGEQYRRLRKRRGPKRAAVAVGHSILVIYYHMMTTGEPYHEKGVNYFHSRDSGKAERQLIRRLEQLGYQVTAPPAA

SEQ ID NO: 405670 - protein, 354 aa, unidentified
MEKITPQASVATIGIDLGKKVFQFHGIDCAGEVVIRRAVKRREVLSFAAQLPACVIGMEACATAHHWARELGKLGHEVKLIPPAYVKAYVRRQKNDAADAAAICEAVTRPAMRFVPVKSAEQQGVLMLHRVRELLVGQRTALINALRSHLAEFGVVAPQGARHVAALVAVVADAGDSRVPDIARAALAPLVSQMQRLETEIGHLDRRLLSWHRADASSRLLATIPGIGPVTASAIVASVTDPSMFNSGREFAAFLGPVPRQSSSGGKERLGRISKMGDRYIRTLLVVGATAVLRHAKKGGSPSKAWAEALLQRKSFKVAAVALANKTARIAWAVLTRGEPYQAGKIGAAAPTAA

SEQ ID NO: 405671 - protein, 357 aa, unidentified
MTSTEKYIGMDVHKESISIAVMNSTGKFVMECVIETKASMLLQFIDGLRGDVRVTFEEGTWAAWLYDLLKPHVSEVVVCNPRKNALLKDGSKSDRIDARKLAELLRGNQLKPVYHGEQGLRTLKELARSYLTISKDVTRVMNRLKALYRSWGIACAGTQVYAPRHRSEWLGRIREAGVRRRAEHCYQQLDVLRLLRQQIRRDLLLEGKKHQAWRLLGLIPGIGPIRAALLIALIQTPHRFRTKRQLWTYSGLGLETHDSAQYRVVEGQLQRSKKPVTLRGLNQDHNHDLKDIFKGAATRVSSSSNGPLHDFYEHLLSQGRKPTMARLTLARKIAAITLIVWKKEVHFDASYLTSQAA

SEQ ID NO: 405672 - protein, 340 aa, unidentified
MTEDIIIGVDLAKNVFQLHGAAADGTVMFRKKLTRVQFHRFMTDQQPSQVVMEACGGAHYWARELERLGHQAQLISPHYVKPFVKRQKNDAADAEAIVEAAQRPSMRFVEAKSEDQQASAVLFRYREKLVKQRTELINAIRSYLYEFGYVVPKGPRHLRKVTELVEGVSTALPEEVRDICRDLLDQIVAKSRRIDDALKQINARSRQGETLKRLQTMPGLGPITAVAIETFAPPMETFRRGRDFAAWLGLVPLQNSTGGKQRLGRTSKMGQRDIRRLLIIGAMSVINWASRGHDFGNGWLNAMLKRKPRMVVAVALANKMARAIWAMTMKKEDYRSPAAV

SEQ ID NO: 405673 - protein, 358 aa, unidentified
MTQVKKLDFSGTTIYCGVDVHKKSWRVNIQDSEFELEDFTQNPDAVLLHKHLTQRYPGASYKIGYEAGFSGFSMQRSLSQSGCQCWVVNAADIPASDKDKKQKQDKADARKLCAYLQSKKLKGIHIPDVAWEHARTLVRTRERIVNNQTRCKNRIWQLLHFSGLPVPADQQEGKYWSKRFIDGLQKMDCGGSIHLQQSLQLHIKDYLQTRQLLLEATRTIRTLCREQKYAGDIKLLRSIPGIGEINAAVLLFELQDVTRFKRFDYLCSYVGLVPDTSDSGDIKRTKGITHRHNYYLRTALVESSWSVVRKDPALLMKYKEYCKRMEKNKAIIRIAKHLLSRINFVLKNKKEYVTGVVA

SEQ ID NO: 405674 - protein, 536 aa, unidentified
MADKKRNTQRKHIRSEGAYSLDEIRSLTMDDGTRVITSADGDIKRPVCAGIDVHKEILMAAVCKTDPKTLNAVFYVRQFKSTNSDIRTMGAWFQSHGVQDVCMESTGKYWIPVFNILEQCGQRPVLTHPKYVKQAKGQKTDFRDAVHIASMFRMDLVVASFIPPADIRDLRELCRYRLKLTYIRTSEKNRFQNSMTVSKVRLDCVFSDPFGKSASSIMEYLIMTEPEDVSDKQILSMVDRRVKASGEDILDSIHGYEFIGIQRDKLKVINLHLGQINECIRLIDEKLDYFRQKYSRIIRHLATMVGVTEESALYILGEIGTDMSVWRDDASLASWAGLSPANNASAGKKKSTRTGDGGHYLKPLLVQCALAAAKSTKKDPYFHYKYETLKKRRGHKKAIIAIARKMLVAIYHMIRDDADFLPVDHEEVLHSTKKQKGLNLDNVIAFLKEQGADDDTLRLVERQCGAQEMDAAEEMESVSSAEKKQSVSGSAATSQPIQESVNGSPVLISGSQKGRALNHHPKDSAVATATAQNELL

SEQ ID NO: 405675 - protein, 315 aa, unidentified
MAMPVALSNPIVGVDVAKNELVIYQADSDLLEAIPNTKTSIKQWLKALLGPVSIAIEATNIYHLEFADLAYAAGCTIYMVGGYELKHYREGVKIRAKTDALDAKLLARYLKNEAEELHPWTPPSPLYRQLLSLFRRRAALVQARVGLVQSWSNEPLLKAAFAEQIKSMQRLETMIEKTINDQLKQAGLLGELKRCLKVEGIGFLTGARLLTAFQRGEFSNADAFIAFLGMDLRVSKSGQKDGRRSLTKRGDPEARRLLHNAAMSASRTIAWKGFYEAQRARGFSTTQALVMLARKLARVVFALLKGQSEYQAKVS

SEQ ID NO: 405676 - protein, 319 aa, unidentified
MEKKIYVGIDVSKDTMEVAVHGEKHHWSFSSDEAGISKIVSKFMEISPELVVLEATGGFEVPLAAELAVTKIPTAVVNPRQIRDFAKSVGMLAKTDILDARIIARFAATVQPSPHPIPNIEAQELGAITARRRQIVNMITAEKNRFSTAGKEVKPRIRAHINWLEKELDEINRNLRQKVKDSPIWREKDELLQSVPGVGPNFSTTILAELPELGTLNRKQIAALVGVAPLNRDSGTLRGKRTTWGGRETVRTALYMATLVATRYNPIIRRFYKRLCASGKVKKVALTACMRKLLTILNAMLKYRTPWNYDVSQISGPCC

SEQ ID NO: 405677 - protein, 351 aa, unidentified
MTNDITTILTVGIDLGDRRSEVCVLGSDGEVKRRFGVATTREGLEKKLGGLVRARVVIEVGTHSPWVSRWLEAKGHEVIVANARAVRSIAESDRKTDRNDAEQLARLGRADPKLLRPIRHRGEAVQRHRMLLAVRDHLVRTRSSFVVQARGLAKALGERLPKCKAETFAKKMRREVGTDVFPAMDVIVTTVEQLDAQIAALDAQLDELARRAYPETELLRQVSGVGPITALAFVLTLEDPRRFAKSRAVGPFLGLTVRKRQSGSRDPALRITKAGDPFLRRLLLQGAHYILARGPDCDLRRFGLRVMARRGRAKAAIAVTRKLAVRLHHLWRNGEVYQPLYDAERKALAAA

SEQ ID NO: 405678 - protein, 315 aa, unidentified
MANIEVYIGVDVSKDTLDIFNPSDSKWGKIKNTQTAALGFVRKIKEKHPSAMICSESTGGYERTLMDACREEEQPFCVMNAQQVRHYAQHLGLLEKTDKVDARTISRAANDKKPSPFIHPTPEQRKRKELWTLRDTLINAKEAVSNQLEHLREKEAIAAVKKLVKVYDKEIEKLEKLCHGFILQDERDAGLFKRSQKVKGIGKLTSIGVITLMPELYTLDDKKLSKLVGVAPLCDQSGQSDGARHIQKGRTLVRHSLYMAALAASRHNEILSKIYKKMVNAGKPKKVALIAIMRKLLCLFRRMAQDPGFKPLMST

SEQ ID NO: 405679 - protein, 391 aa, unidentified
MVCVGIDVAKDKHDCCILDSDGMVRADCFTIPNNMDGFKQLLQTIRNCTKKSDKIKVGLEATGHYSYNILGFLLDNGLPTYVINPLHTNLYRKSLSLRKTKTDRVDARTIATMLLSDVDLKSYTDIAYHNEELKSLTRYRFDKVQECAKLKQSVSRLATILFPELEGLVSSIHGTSIYALLSEYPGTKQISEVHLTKLTNLLTTASKGRYGKEKAIQIREAARASIGSVMPAKSLELKHTIKLIQELASEIDEIEDSIQKIIDELNPPILSIPGMGVNSAAVILAEIGDFSNFSSPDKILAYAGCSPSTYQSGKLTNCYAHMEKRGSRYLRHALYNATKYVCYWNPVFAEYLAKKRAEGKHYNVALSHAMKKLVRLIYALQKSGKAYLAAA

SEQ ID NO: 405680 - protein, 419 aa, unidentified
MEDVVEYCAGLDVHRDTVVATVRYPEGNRRSSTTRTFGTGTAELMALGDWLTSWKVTRVGLESTGVYWKPVFYLLEDRIPQVWLLNAQHLKNVPGRKTDVADSAWIAQLVEHGLVRPSFVPPPQIRQLRDFTRHRRVLSEERTRTVQRLEKVLQDAGTKLTSVASTVLSKSGRAMLEAMLAGQSDPVLLAELAKGRMRSKIPQLVDALRGNFRIDHHGVLVAQILAQVDFLDRQLADIDEHIGALVADLEPIIERVQTIPGVARKCAIGMVAEIGVDMTVFPTAAHLASWAGICPGNNASGGKARSGHTRRGPVALKTVLTEAAQAAGRTKNTYLGARYHAIRGRRGTFKAVGAIRHDILIAYWHIVSTAASTEDVSASYRELGPDWITRRHSREYQIAKLAKQIEKLGATVTVTLPAA

SEQ ID NO: 405681 - protein, 346 aa, unidentified
MEHYVGLGISLKLTAICIVDRTGKIQREGVVPSDPEAIAAFIESHSSNVARVGLEAGATSTWLWTELNKLGLPVICIDARHAKAVLKMQINKSDRNDAVGIARIMQCGWYKEVRVKDLDSHAVKALLVSRALLVKIKRDLENQIRGLLKNLGLVIGRAKMNVFAARAAELIQDRPELTAAVIPLLKTREVIERQIADLDRKVLRLARNNALVRRFMTVPGVGPITALCYLATIDDATRFKKSRSVGAYAGLTTRRYRSGEIDWTGRISKCGDAMLRTYLYEAANVLLTRIAKWSALKSWGMRIAKRSSLRKAKAAVARKLAVILHRMWVDGTEFNWSSKEVAAHGA

SEQ ID NO: 405682 - protein, 440 aa, unidentified
MTTRAFVGVDVSQADAHVCFLLADGSEPAPRWSIPNTQPGAEALSQTLAQLAQQHTITELRIGMEATGLLWWHLAQYLRSASVLLPFTPQVYVLNPHLVTTFRANYGALPKTDRADAFLIAERIRFGRQLPAPFHLDARYAPLQRLTRFRLHLVQNLAREKNYCLSFLFLTFSGFGQVSPFGDPFGITSSAVLEEFTTEELAQQPLEALTAYLQAKGHGRFADPTAVAITLQRAARDSYRLDQVLQEPLRVVLATTFASIRGLQAQLKTLDTTIARELAGLPQTLDTVPGLGPIWTAGLIGELGDIRRFDDEAAIAQYAGLTWDTYQSAEYQAEDTALTKRGNPYLRYYLVEAANSVRQHCPEYGQYYAAKAAQTPRHAHKRALVLTARKLVRLIDALLRSGTRYQTPVERQGRIGDTTTAPHAARPRPPRRYKRAATVA

SEQ ID NO: 405683 - protein, 426 aa, unidentified
MRKTYPICCGVDVHKTFLVATIVKTTNNIPHYEKKRFSTFAKDLKLLKQWLLDNNCFDLCIESTGKYWIPVWNMLEDKINITIANPKWVSAVKGNKDDTKDSKWIADLFRMGIVPGSYIPCRTIRILREFTRYRYKLVCMRSSEKNRYQNAFTVSNCNLDAVVSDMFGKSAMDIENYLLEIDMENFDPEYCKSLLRRSLKKKADSVIESVESFNMIVEQKERIKIIQEHFNDLDTRINRIDEQIEKLIVTNKWQSAISLICSIPGIDRHVAITIISEIGTDMTPFSSSKRLCCWAGLTPGNNQSAGKKKSVKITRAGIYLKPALVQAAHAAVKSTTNPYFKNKYERIYKRRGKKRAIIAIARKILTAIYHMFKNGELFNPCDIYKESIPETIQLHQKKKAAKQAIKLLVNLGLITEEAVSLELLAS

SEQ ID NO: 405684 - protein, 457 aa, unidentified
MKQNTKSSTRKLAPLNLLDPTCAGIDVGSNELFVCIAKNQSEQEVRSFLTFTADLRAMIQWLKESNIKSVAMESTGVYWIVPYEMLDEAGFEVILVNAQFFKSVPGRKTDVQDCQWIQQLHSYGLLRGSFRPSNDIIELRSYVRQRSRLFESAATQVLLMHKALTQMNIQLNHVISDITGVTGLNIIRAILQGQRKPEILAELSVGQCRKNIKLIIKALEGNFRKEHLFALEQSYEGYEFFHKQIHKCEQSIQKTLSSMQTDRVIPPQDNKESNSPKKCAHKTKSNRSPYFFNASDAIKKVTLTDLTTIPGVDTNTAMKILSEIGTAMEHWPNAKAFASWLGLCPGNKVSGGKILSSKTKPTDNRVAKALRMAAASLYRSKTAIGAFFRRMRARLGAPKAITAVAHKLSRILYRMMTTGESYREVGENYYEQQYQERVLVNLMKRAKDLGYILIKAN

SEQ ID NO: 405685 - protein, 340 aa, unidentified
MKRRYIGVDLHRDCFTACIREENGKETLRGWKLDQLSEFLKTLRGSDEVAVEVSGNTRFFYDAVAPRVSKVVVVNTTEFRVISESVKKTDTNDARTLALFLSKAMLPEVRLKDKSRLEIASLAQTRDSLVRLRTALKNKINGMLSARGMNLKREALASDRRLEAILKMKFEPVQQAELQVIVEQIRSLNGSIKKLEVIIDEHGRKLEGYRNIRSIKGTGPLNAPLLLSVIGDANDFPDEGKLASYFGIVPRIDQSNQTRRMGSITRRGNKLARTALIQSALIAKRYSSYLESYYQRIKKRRGAGRAIIALARKFLGIIYRTLKKNWIFEDFTTFTLASQV

SEQ ID NO: 405686 - protein, 390 aa, unidentified
MQALYPRPDEHAAVRTDLKAIFVSLELSRSTWVITSLSPGGGEKMSKHAVPSGDIPALLARLSQLKEKARARTGQVFPIIVIQEAGLDGFWIHRVLQQEGIESHVVDPASIATSRRRRRAKTDKIDGEALVRALLAYKRGEPRVCAMVQAPTPHEEDRRRISREREVLTAERVQHVNRIKGLLFAQGIGDYEPLHRNRRERLEELITGDGRPLPEGLKAQISRELDRLELLIEQIKAVEAERDTVLAQAQASPGVSAPAAQLLTLRGIGPEAAAMLCSEGLFRTFSNRKQVAAYAGLAPTPWQSGAVHRDQGVSKAGNPRLRTTMIQIAWLWLRHQPQSALALWYRARIKRTGGRLGKTMIVALARKLLVALWKYATAGVLIEGAVLKPA

SEQ ID NO: 405687 - protein, 339 aa, unidentified
MKYYIGLDVSLKETFVSVIDEKGKAVHHGTVGSEVPLISDYLSKHGYKKGSRLGIESGQLSISLCKGLAQAGFDVICVDARHMAAALSARINKNDKNDALGIGIMLRNECYRAVQVKSDDSCELKVMLGSRRQLVSGRQEIMGTIRGLLKIYGIKLSSSRKEGFMQEVSRRISKLPIPVVESINVMLESLRTIEKSLEQINMLIERYSKEDEDCRLLMSIPGVGKITAVTYKSSLDDPNRFKDSATVGAYMGLTPRQYASGEVNRHGSISKMGPKECRSMLYEAAQSLLVVSKGKSKLKSWGLKLAKKKGMKKAIVAVARRLAVIMHRMLVDRTEFKAA

SEQ ID NO: 405688 - protein, 387 aa, unidentified
MPQPNDLSRSPIALNQDGTVIAVVEMSRSSWLVAGIVPGIARQPLKKLAPDEAALLGLLERWRGEATQAGRLITRIVVAFEAGRDGFWLARWLRAHGIEAYVIHPTSVAVSREHRRAKTDRLDTALLKRVFLGWLRGETGHCTMAAIPTLEEEDARRPNRERESLVGERTRIVNRMKATLARLGIRGFKPTVRGASERLEALRTPEGAALPPNTRAELRRDMARLGFIVGQIKEIEDARQEGLATQPDQGPHAMVRLLARVIGIGIETADMLVHEILSRNLRDRRAVARYAGLTGASDESGSRRREKGLAKAGNARVRRGMVQLAWRFLLFQKDSALAQWYRARTADARSGTRKTMIVALARKLLIALWRFVATGEAPEGVVLRPAP

SEQ ID NO: 405689 - protein, 387 aa, unidentified
MRKPGSHIPKIKTQVALDVSSKALDVHFKSDGQAFSVPNTEEGLNCILKTFTAYDVSLVLMESTGGYEDLAACFFQDHGFDVVVVNARHARNFARAMGKLAKTDRIDAAVLADMAFMIDSSHDRDRYIKPLTDEQRKRLSVMTVRRRQVVGLISTEKQRLTRADDWTRASIKKTIKALTTELRHIEQQISAHVKKNFVDLSKMLLSIPGIGEQAMTILIGEVPELGKADRRMISALIGVAPFNHDSGNFRGRRRIWGGRQSVRNVLYMGIISATRFNPVIRSFYNRLVSAGKPKKVALIACMRKLLTIINAMMRTGKPFDVALHGGDMQTIIYDYSPEFPDCGVLADLPDGEGVFFNTLDDFLSFVDDEFSGVQLVPLFEEGENEYL

SEQ ID NO: 405690 - protein, 329 aa, unidentified
MGTVLATDEFPATADGYCDLLKWARKSGAVRRAGVEGAGSYGASLSRYLLTQDIVVFDVNRMDRADRRRRGKSDPLDAQNAARAVLSGRARARAKSGDGPVQIARMYKLTKASAVKARTQAINQLKAVLVTADPALREELAGLGNAELFRTCARFADAGSLEEVGEESVLQATRITRGLLAHRIGQLSGQIRDVDARLARLVECHAPQLLDVVGVGPDTAVALLITVGDNPERLGSEASFAVLCGVSPVERSSGRRQFRRLNRGGDRQANAALHRIVFTRLRVDPRTQDYYERRIKEGKTRREIVRCLERYAAREVFHLVGQLQPGPRS

SEQ ID NO: 405691 - protein, 377 aa, unidentified
MLYVGIDVAKNKHDVTALKTVLKPLTFSNTRAGFDLLDHSLRQLNQDCLIALEDTGHYAFNLLKFLHEQGYKVYTYNPLLIKEFAKSLSLRKTKTDKKDARIIALKLLSDPNREQFQHDNRKEELKILTRHIHRLKKKQSDWKVQYTRCLDIIFPELDKIVGKHSEYTYQLLTRYPSPQKMLEAGFDNLIEIKRLTASKIQDSLSVAPLSIGTTSPAREFELIEIIENIKHYNRLIDKAEKQANELMAEINSVITTVTGIGNRLGAVILAEIRNIHAFDNPAQLQAFAGLDPSIYQSGKIDLAGKMVKRGSPHLRWALIQAAKACARFSPAFKAYLRTKLDQGKHYNVAIIHLAKKLIRTLFYLLKNKLPFDEQKVI

SEQ ID NO: 405692 - protein, 347 aa, unidentified
MSEVTTIGLDLAKSVFQVHGIDASGKPVVRRQLRRRQVLAFFKKLPPCLVGMEACATSHYWAREIAALGHEVRMMPARYVKPYVKRNKNDAADAEAICEAVARPTMRFVPIKTPEQQSVLMLHRTRALFVRQRTALINALRAHLAEFGIVAGVGRNGLEKLLEVIADEQDERVPPAARGSLLALHDQLVMVRQQILEADRRILAWHRASEVSRRLAEIPGVGPLIATALVAAVPDPYAFRSGRDLSAWIGLVPREDSTGGKHRPGHISKAGDRYLRRLLVIGALSVIKRAKQTGSTRRAWLIALMGRRPTKIAAIALANKIARIAWAIMVRGTRYKEPQVEPTAQAA

SEQ ID NO: 405693 - protein, 379 aa, unidentified
MRREPVVKNAITWVGLDAHKKFIQIAMRLPGTEDLVEWRIPNTAKDVQKLGRKLLKRAPGPIKSAYEAGPCGFVLQRQLEAMGERIACDVIAPSLIPRKPGERVKTDRRDARKLCELLQAGLLTEVHAPTEAQETVRDLCRCREAAKTDLHRAHHRLGKLLLRRGYRYTQGRAWTQRHRVWLRSLKFDDPVEQFVFDDYLLAIEQLEARIQNIEVRMQEVADQDPYREPVAALCCFRGIALVTALTIVAELHDIRRFDHPRQLMSFLGLTPSEHSSSGVAKRGSITKAGNSRVRRLLIESSWHYRHRPAVGAKLAKRREGQPTKVIAIADRAQQRLHRRYWRLTEGSKKPANKAVVAVARELAGFVWAALRELDEGKAA

SEQ ID NO: 405694 - protein, 398 aa, unidentified
MKTCGLDVHKDSIFCAIYNGKEYSEVKEYDTTTPKIRQMGEYLRSEGVERVAMESTSTYWVPVWDVLLEMGFKLMLVNPFLIKQMPGRKSDVKDAQWIACLLYKGMLRGSMIPSPVIQELRTYSRKYTKLQEQKTRTLQKMDRIMVMSGFRIGSCMSNLGTKSVMNIITALIAGETNPEVLSKLVYGSTANKKSGKLREALTGNLKEHYRQQLEWDKQEYDLFEKQTEQCLTQMRRICHEHYSEEMTLLQTIPGVSEISAMIIIAETGGDMNVFENSGKITGWAGLRPRNDESAGKYKSTATTKGNKYLRSVLVQVSWAASRIKNGWFKEKFNRLSMRKSRKKALIAIARKLLTVTWNVIYYKTPYKPQLAHIYDPIKVEAKMDYHQREMERMQKLLQ

SEQ ID NO: 405695 - protein, 426 aa, unidentified
MDIVHPRVAEIDVHKKIIWVAVRLPGEGPAERAVTVRRFATFWRPLQQMAAWLASLGVTDVAMESTGVYWWPVYHALAGAGIEVCVCNAAHMRNVPGRKTDLRDCQWIAELHEHGLLRPSFIPAAEVAALRQRTRYRKKLIESRSSELQRLAKVLEDGGVKIDSVASSLTTLSARDMIEALIAGERDPAVLAGLARGVMRKKIPELQMACDGRFTESHGQMCRLHLDAYDHLTAKIAGLDALVAEAAAPFAALIARLITIPGIGPRTAQVIVAETGGDMRRFATAARLAAWAGLAPGDNESAGKRKHAAARKGNQHLRAALTESAWTVGRTATRPGARFRRLARRFGRGNEKKAATAVAHTLLCIAWAVMKYDADYAEAGAGYYDRRDQRNHEHLVRHHQQALARLGYHVTLTPPGDGSPPPAQAA

SEQ ID NO: 405696 - protein, 396 aa, unidentified
MTQFNAESASIHTVGAPVEPVQPTVHTAYVGLDVHKETIAIAVAEPGRQEPVYEGEIPNTPKRVERKIQQLSERYGGGLLQFVYEAGPCGYGLYRQLLASGHDVQVVAPSRIPKAPGERIKTDRRDALKLARLARGGDLTPVWVPDTEQEAIRDLTRARDDMKAQERKARQQLNAFVLRHGHHWPKGRTRWTQTHYNWLESLRFEHDWQQVVLQEYIDAVRAATQRVNDLTVQMERALPQWSLAPVVEALVALRGIDKLAAMVLMAELGDISRFDSPRQLMGFLGLVPSEHSSGSRRRQGAITLTGNSHARRMLVESAWSYRFPARQTGHLKRKAAKAPEDARAVAWKAQKRLCGRYRDLTRAGKNTKLVCVAIARELTGFIWDIVCRVMPRARVA

SEQ ID NO: 405697 - protein, 352 aa, unidentified
MLIIGCDFHPGFQQVAIFDNRTGEMQEKRLQHRGEAEQFYRSLGGQEVRVGMEACGHYPWYERLLAELGFELWLGDAAKVRASVVRKQKTDRRDAEHLLHLLLEERFPKIWVPSLEERDVRQLLVHRHKQVQARTRSKNQLQAMALSCGMQKKRKLWSKAGRAELEQLPLLPYAAERRKCLLEALDALEAEIVELDRRVEEEARRRPEAVLLMTHPGVGPVTALAMVLTLGPAERFESGKQVGSYFGLIPSEESSGGKQRLGKISKQGSSFLRFLLVEAGQTAARYDPQLKRFYRRLAVRKNRGVAKVAVARKLATRLYLMLREEWTYAQLNQAVMSVSPSHSVAGEQEPNA

SEQ ID NO: 405698 - protein, 387 aa, unidentified
MSEMFNPHAPATAYDHNTTIVAVLELSGKNWLLGAVAPGLSRRMKRSFEARNVEAVVRALEQAKGEAAKARIEVGRIVVGFESGRDGFWLARALQQRGLEVYVMHAASIAVERRGKRAKTDRLDVDLLLTTLMGWLRGEPGRCTMAPVPSEEEEDLREAGRRRETLVHARLKVENQIASLLIRHGIEGFKPRLKNAETKLCELRTFDGRSLRANTMNSLRLLLAQHRLLSAQLKEIEEARQRVLNVAKPDRLQRMIQALARVVGVGVETATVLVHEVFSRSFKDRRALGAFVGLTGTPYNSGSSKTEQGISKNGNGRVRRMLSQLAWRWLGHQPESALAQWFNARLGGAKGRMKKVLIVALMRKLVIALWRLAETGEVPIGGRLAAR

SEQ ID NO: 405699 - protein, 371 aa, unidentified
MSQSITFVGLDAHKDTIVVAMLLPGRSVPLEWRIVNEPGAVRRLARKLEREAPGPVRACYEAGPCGYVLQRQLTEQRIACAVVAPSLIPVKPGQPIKTDHRDARKLAELFRAGLLTEVHAPSEDEEAVRDLTRAREDAQRDLTRARNRLSKFLLRRGCVYHVGRRPTWSRKYRVWLHGLRFERVADQLVCDDYLLAVEQTEARLEALDGELAKLSGHERYRAPVAALRCFHGIDTVTAMALVAELHEPRRFPGARQLAAYLGLVPREASSGDRRRLGGITGAGNRHVRRLLVEAAWHYRHKPLVGRALRLRRRGQPPAVIALADRALRRLTLRQRRMLYQGKHPNTTTVAIARELAGHVWNALLAVTPARG

SEQ ID NO: 405700 - protein, 427 aa, unidentified
MLVPRENAVLGLDLGERKQALAVAGADGRVLARRSPRVSVHELGPFLDWALAQARAAGYGGLSVACEPTGPGWMAVQDLCAARGLPFVCVQPLMSRLAREQEDLTGDKTDEGDCVLIARLARELHCYEPERLEGAWAELREEGRRRAQLITNATAAKQLLRDKLGLVAPALLEAACEPFDSPAWLASLEVVLERCGGDPATVTAIGFAGFTAAVRAALPGWGGQRAGGTCRQLFAALGDGRGVARMRRAALRRVRGALADLKYARARRAQTETDMTALLAELGIDTARICQIPGLSPVTLAAILAETGDLDKYESSSSVVKHAGMSPARNESGSFRGQAKISRRGRPALRLATWRATWAVLRHCDVLAAKHAALTSRDDDSRLTPGQARVACAASLLRWIWSLTVHGTQWDPRIAAGQLGHHHAVAA

SEQ ID NO: 405701 - protein, 355 aa, unidentified
MNAIKYIGMDVHLATISIAVLDAAGKLIMEVTIATQAGALLDFIRGLSGTLYVTFEEGTSAHWLYTLLEPQVAKVLVCDPRQNPRRLGEKKSDRLDARKLAGWLRLGTLKPVYHGNSLGPALKELARSYRTLVSDTTRVMSRLKALYRARGIRCAGTRVYSSRFRDQWLAQLREPGVRGRADLLYKQLDLLLPLRQEARAAMRAESRKHPGQKILRSIPALGPVRVALLLALLQTPYRFRGKRQLWTYAGLGLVTRTSADYQMLDGQVTRSRKPALVLGLNANHNHFLKGLFKDAAVTALTRPGPFKDFYTTRVAEGMEPELARLTLARKIAAMALTLWKKGEGFNAEHLKAQAA

SEQ ID NO: 405702 - protein, 424 aa, unidentified
MSKFKKTFELTYPNAAGIDIGASSHFAAVPADRDEQPVREFASFTEDLHALADWLAACGINTVAMESTGVYWIPLFELLESRGFTVFLVNSRHVKNVPGRKSDVLDCQWLQQLMSFGLLSGAFRPQGDYAALRVLARLREMLLRCQATHIQHIQKALLLMNILLTEVLSDVMGETGQKIIRAILAGERDGETLAKYRNGHVRASEGEITKALQGSWRDEHLFSLKVAVELYDFYAEQLVACDQQIEQQMKDLARYDLTPEKHKRRGGKSKNTPKFDARLLLMQMCGVDLTDIDGIDVTTAFKVLSEIGADMSKFKSAKHFASWLGLCPGTKISGGKVLSAATKRTANKAAQALKMAAMNLRNSQSALGAYYRRLCGRMDKGKAVTACAHKLARLIYAMLTKGEGYVDQGQAYYEEIIANGYLKT

SEQ ID NO: 405703 - protein, 384 aa, unidentified
MHFIGIDVAKDKHECCLLNGGDGRATTFTFANSHNGFAEFLLRVKSQCGDEKIKVGLESTGHYTANLLSFLNAHGFEVAVFNPLSVSLHSKADSLRRTKTDKNDSRYLAQMLMAADFKPYQKPSYHNERLKSLTRARFRLVGELQPVKNRFRRLLQILFPEIQGFFSPLYSPTALSLLEKFPSAKDIASANIVKLRNILSVGRMRLDKPDSLKALAKTSVGTYDAGAAFELKMVVQRIVFLTNQKMLFDEEIKAVMDELKSPITSIPGIGMVLGATILAEIGNRNFETSAKLLAFAGCEPATYQSGNYTATKTKMVKRGSRYMRWALFLATRAARIHSPSFAAYLSRKKSQGKHEFVALTHGMKKLIRIIHTILTKNIQYSEPF

SEQ ID NO: 405704 - protein, 339 aa, unidentified
MKAYCGIDLHSNNNVMVVIDETDKILLERKLSNNLGVVLDALSAIREPISGIAVESTYNWYWLVDGLQEAGYVLHLVNTTAIKQYDGLKYSDDKDDAFHLAHLLRLNILPTGYIYPKEERAVRDLLRKRSQLVQQRTAHVLSIQNQLTRNTGKQFKANEVKKLTSSTVKRSIKEANIQEAILSNVTILNVLSSKIKQLEKRVLKQIELKPEFIKLLEIPGIGMILAMTIMLETGEINRFKKVGNYASYCRCVNSKRFSNGKQKGQGNRKSGNKYLAWAYIEAANYAIRFNEKAKRFYQRKMAKTQRIVALKALSHKLARACYYVIKNNEDFDNQRLFSG

SEQ ID NO: 405705 - protein, 312 aa, unidentified
MAKDTIGIDVSKDRLDAFWHSRTEACCLPNTPEGFGQLCDWLAKEEDVLIVFEATGAYHRGLERHLSLAELPFIKVNPKQARRFAQAIGRLAKTDSVDAKMLARMGVVLDLTPQVVEGEDVHDLRELLTARRALVKDQVTAKTRLATALNPLVREQLGRRIEDISADIQALDEVIAQIAKQRGTLEERIRRLMTIPGIGRLTATTMLIDMPELGYLDGKKITALAGLAPMTQQSGKWQGKERIAGGRSSIRRAIYMPALVAIRFNRDLHDKYQQLLKVGKAKKVAITAIMRRIIILANTLLRESRDWLPDRP

SEQ ID NO: 405706 - protein, 313 aa, unidentified
MKKYIGIDVSKRDFHACFSENGDVTKFDNTQLGIENFIHFLLKNRLARKSTLIALESTGSYHLQLSFLATKAGCTVNVINPLITSRQSKSAVRSVKTDIHDAGLIRLCAINGAGHPFHDTAFSLALKTLVRQRAKFSMLRLQAKLRQEEVVLRESYLENDISEVNKELVDFFDEKLLFLDRKIRKFNPELQKLLQSIPGVGPQTASTCVAEIGDIFRFSDSKTLTAYIGLDSRVYESGTSIKGKGYISKRGSKILRTRFYNAASVAVLHENIFREFFLKKRSEGKPYRVALCAVMHKMVHVVFAVWKRGTPFA

SEQ ID NO: 405707 - protein, 343 aa, unidentified
MQPITTIGLDIAKSVFQVHGVDAQGYVVARRQLRRRQVVPFFKKLSPCLVGIEACATSHHWSRQLKALGHTVRLMPPAYVKPYLKRQKNDAADAEAICEAVMRPSMRFVETKTLEQQSCLMLHRTRHLYIRQQTAVINAIRAHLAEFGIVAPVGRNGVEELLDVVADPDDDRVPEVARECLAALGAQLRMLKAQILEFDRRILAWHRSNETSRRLDEIPGVGPALATALVASVADPRAFRSGRDFSAWVGLVPKQNSSGGREKLGNITKRGDRYLRSLFTAGALAVIRYAKIHGCKHRPWLTALLARRPTKVAAIALANKIARMAWAMMAKGERYREPVALAA

SEQ ID NO: 405708 - protein, 386 aa, unidentified
MTQHSHVTTSNGLDYDRTLILAVEISNRSWVVAAQVPGLRQKGVKQQLVPRADALMAAVEGYKRRAAAAGMTVERVIVAYESGGSGFWLARWLQQRGVEVYVMQPSSVPVDRRMRRAKSDRIDADMLLRTLLAWLRGEPRVCSMVPVPDEAVEDARRPIREREELIRARVALVNRIEAVLTVLGAGDYNPLRRDCRERLGQLRTALDQPLPPHARAQIERLLDRLDLIRQQVADLEAQRDQAVEGEAAGRTEQMIQRLARLRGIGVQTATVLVHEAFVRRFRNARALGSYAGLTGTPYSSGGTQREQGISKDGNRRLRATLVELAWMWLRYQPGCALSRWFHDRLGGSRGRLRKVMIVALARKLLIALWRYIQDGAVPQGMELKPA

SEQ ID NO: 405709 - protein, 314 aa, unidentified
MTFYLGIDVSSKTLDVAFFRAGEKTGACEQFDNSPAGAKKLLRVMARLDVQHVVLEATGGYENLILDAMAQIYTVTRIASHRGTAFVRSLGKFAKTDKADARALAHMAQTITPQPYKPPTPAQRHLRGLVKGRDQLIRQRDDNRRRIKRCESMVVQGALERVDALLTAEIKALEGLMAEAAKAADAPLAEQLLQVPGLGKIAVATLLAFLPELGQRGNRQISALVGVAPYTKQSGRRDGPRQIMAGRPFVRRILYMAALAAIRSTQSPLRAHYQALKERGKPPKVAIVACMRKLLITLNAMVRDQTPWHGTVEA

SEQ ID NO: 405710 - protein, 353 aa, unidentified
MKTKNTSSSAITVGLDLGDRKHAVCVLDAKGKVLKQEAITNTRGSLLALSRRHPRALVVMEVGMHSPWTSRFLESLGHRVLVANPRKVRAIYQNNRKSDRKDAEMLARIARSDESLLHPVKHVSEDMQRDLLQIKLRDNLVRQRVDIISSVRFTLKGLGVRLPSPSSECFARKARIKLESEHPDLLALVEASLCVLDTMTEQIRRLEKSIERMAVEKYPEAEFLTQVGGVGLLTSLTFILTVGDPTRFPRKRDVGAFLGLVPGRDQSGDTDKQLRITKAGNRYLRKLLVGCAQYILGQFGPDTALRRKGLKLAERGGPRAKRKAVVAVARNLAVLLLTLWHDEAIYQANHRAA

SEQ ID NO: 405711 - protein, 338 aa, unidentified
MYYTGIDLHKFSSYLTTIDSDGCIVKQANIKNFNYNFLQYFSDLGAEHQTTVESTCTWYWLNDLLTSLNIPLTLAHAKYVKAIAYAKVKTDKVDSHILAQLLRLNFIPQAHKISNENRILRDALRARLKIVQRHTSVTNSIALLLAKYNLTEPDQLTCIAKLQYDQLSAHASLLKEQMLTLEKSLYPYLIPNDDIQRLLWIPGIGKMNAFTILLEADDINRFADVKNFFSYCRLVPSARNSAGKSKQRSSKDGNRYLKIVFTDAAIHAVQYYPVIRKYHNSLLRKKNKQIAKTIIAKEIAEIVFHVLKNKTNFNNKFKGVELQHKKSLQWPRVVNPYA

SEQ ID NO: 405712 - protein, 340 aa, unidentified
MSEITTIGLDLAKNVFQVHGVDETGQVVVRKQLRRGQILGFFGRLSRCLIGMEACATAHHWARELMALGHEVRLMPPQYVKAYVKRNKNDAADAEAICEAVSRPAMRFVPVKTAEQQGVLMMHRARDLLVRQRTMLVNALRGHLAEFGLVGAQGLHKVAALVTIIKNGTDERVPEIARQILTVVAGQIEEVEARVAALEAQILAWHKSNPVSQRLATIPGIGPIIATAITATVPDPGMFRSGREFAAWLGLVPRQNSTGGRARLGGISKRGDSYLRRLLVNGAHAVLFWSKTAKTDPWLTSLRARKHRLVVAVALANKTARIAWAVMSSEEKYRTTPAAA

SEQ ID NO: 405713 - protein, 353 aa, unidentified
MKTYYVGMDVHRASIVIVVLNGAGKIVMQSVVETGAERVRGFLKQLRGKVYVTFEEGTQANWLHDVVRPLVSEVVVCDPRHNKLLQSGNKNDRVDAQKLAELLRNRSLRAVYHGDNGVRTLKELVRTYDCLVSDTTRVMNRLKAIYRGRALACGGHEIYRPDRRKEWLAKLSEPGAKQRAGFLYEQLAALKPLRHKAKLAMVKEVRRQTAYLWLMSVPRLGSVSVAQLIAVVGTPYRFRSKQQFWTYVGLAVVTCSSADHELVNGVLRRSRKPLATRGLNRNHNHLLKRVFKNAASSACHSGPFKAGYEARVARGMAPSLARLTIARQLAATTLAIWKRGEQFDPERKKQQAT

SEQ ID NO: 405714 - protein, 412 aa, unidentified
MEVLVERCAGLDVGKADLKACVRVPGPRGGRRQQVKTFATTTGALLQLRQWLIGQDVAVAGVEAAGDYWKPVYYLLEDVVQVQLLNAAHMHNVPGRKTDVSDSAWIARLVEHGLVRSGFVPPPPIRRLRDLTRYRAALVAERTREKQRVEKLLEDAGIKLSVFVSDLFGVSGRAMLAALVDGERDPEVLAGYARGRMRPKIPDLVQALTGRFGDHHAFLCQLMLERVDGLDGVIMRVTAQVEAEIRPFQAVVGRLDTIPGVNQRVAQVIVAEIGVDMSRFPTAAQLASWAGMCPGNNESAGKYFSGRTRKGDRWLRAALGEAAVAAAGAKDTYCQAQYRRLALRRGKKRALVAVGHSQLIAAWHIINDNVGYHDLGPLHFLTRIDPARQTRRLVTQLQQLGYRVELNPGGGS

SEQ ID NO: 405715 - protein, 345 aa, unidentified
MNCYCGIDLGAKRSQVCVIDQDQKVLINRKVANDLDAIHRLIRPYGQVPTVIESTFNWYWIVDGLQARKVPVTLAHSLKLAAISSAKVKTDKRDALTLARLLRTDMIPESYIYPAEDRPLRDLMRQRWNMVALRADEYRRMRGLLYRNGVFDVGSNDVRLMGEEAFNELVEHPLIRAQAAYGIQRAELLTQQIRSLEREILAQVKERPEFQRLQTIPGIGKVLALTILLEIGEISRFPKSRQFASYCRVAPGCADSGDSHRRGRGNKQGNAYLKWALTQAAACARRSDPTFRDYFTAMQRKHPGASGIIITHCIVAHRLAFAVWHVLKDGLPYNQEKLFRSNPDS

SEQ ID NO: 405716 - protein, 446 aa, unidentified
MERKTSAAVCQKAMVAMIAAAVERCAGIDIGKKQLSVCVMVGPLEGEPQVERRQFLTIRGDLERLRDWLKRKQVTHVAMESTGSYWKPVFNVLEGTVTVYLANPQEVKNRRGHKTDDKDGWWLAHLLRHAMIHPSFIPPRPIRELRDLTRRRKRLLGAATSEKNRVQKILEDANVKLGSVLSDVFGMSGQLMLDKLLKGEAAPAEIAALAKHKAKKKIPQIIAALEGHQMNDHHRRMIRYSLDHLRFLEEQLGELDRHIVEQIEAAGLSRQWEDLRSLPGIQQTSAATILAETGSDMTQFPSEKDFSSWAGVCPGNNQSGGKPNKGGRTTRGNPWLRSALTECAWAAASTKGCFLKEKFWRITSKHGGKKAPALVAVAHTLLLLTYQVLSTGTPYQERDAPVLTERQRERLIRHHVRRLGKLGIATRCRPVSLKSAANSLNRGAET

SEQ ID NO: 405717 - protein, 354 aa, unidentified
MEDDGGSPQPIRRNKVILIPVGIDIAKNVMQVHYVDAETGEIVNKPIKRAQFLEYFANHVPCLIGMEACGGAHHWARELVKMGHQVKLLPAEFVKAFNVRNKNDAADARAIWLAVQQPSKPVAVKTEMQQAMLALHRARQQLVAFRTMQINGLRGMLAEFGEVMGKKRAGIVRAIPEVLARVAERLPAVLIDTLREQWKRVMELDEQIGGIERRMREWKKDDLAVKAISEIPGVGLLTATATVAMMGDAKAFKSGREFAAWLGLVPKQTGSGGRVKLHGISKRGDTYLRTLLIHGARSVMTNAREPGAWLEQLKKRRPWNVAIVALANKMARTIWAVLAHDQPYQKGHVSVKPA

SEQ ID NO: 405718 - protein, 410 aa, unidentified
MLKIVYPICCGIDVHKKFVVACIASTDDRGVTSYRSNRFSTFTSGLNKLSEWLLSNSCRHVCMESTGKYWIPVYNILEDISHITLAHPKYVKAIRGKKTDKKDARWIADLFKHDLVAASFMPPLCIRQLRDLMRYRAKLINFGSSEKNRMQNCLTVSNIQLASVVSDTFGKSSMKIIDYLLENPDDRDFDFVPLLYGSMKNKADSIRLALDGMITVEQQQKMKIILCHYSEIKKCKDSLESVILSLSEPYARQCSLVSTVPGIKNPFSAIAIISEIGADMSVFATAKHLCSWAGLVPQNNESAGKRHSVRISRAGVYIKPLLVQCANAVVKSDKHPEIKGRYLSIKKRRGHKRAIIAITRMLLTAIYHILLKEEPYNPELYKEVEILPKTRSITVDQAISFARRHGYSVA

SEQ ID NO: 405719 - protein, 339 aa, unidentified
MKNTKYYIGLDVHKERTSYCVRDKLGNILTEAEAATLYSELEPRLKPYLAASMIGLEASTSYYTLYQNFLRNGFHIKVANTIQLRQLIAKNDKLDAQRLSEMLRLGAFPESYIPEEEIQHLRSLIQMRHALMQEKVRCNNRVQAFLDRNGVMMPMCKAFSKKWKHALMQYMGSGNVSTELRYEYDHYVYLEKTNEQADQEIIGYTKTYWNQEYQLLRSITGFGVLLPCYIIAFVHPIERFLSNRKLRRYAGVIPVAKESGNTTSRGRIPKTSSKALLRWALVQAANTIGKTNTTLGRYYRRKKNQKKNTGIAKIAVASTLVDIIYKVLTTKKPYISAAC

SEQ ID NO: 405720 - protein, 408 aa, unidentified
MRIIGLDIHRAFAEAVALEDGVCHRLGRIGMTRDQLESFADTLQSTDHVVVECTGNATAVLDILAPKVARVAVANPLQVHLIARAKTKTDKIDARVLAKLYAAGFLPEVWIPDAATQARRRQVTRRKQLVKSRARLKAIVQSILHAHLAPRCPHADLFGGKGRAWLRTQDLPEDERVAIERHLEEYDRQTAAQKAVERDIAGIALDDANVRRLMTIPGIDMVVAVGMMAAIGRIDRFAAPEKLVAYLGLNPSVRQSGDGRAHHGRITKRGSSRARHFLVEAAWQTVRSPGPMRAFYERVRARRGAHVAAVAVARKLTVLIWHMLTKGEDYAWGRPLLMARKLRNLELAAGHAAKPGTRGAAYEYGITERRQADRAQAEQAERAYRRITEHWRRQNKKDGAGAASEVRH

SEQ ID NO: 405721 - protein, 416 aa, unidentified
MYYVGIDWADENHQVFITDDSAQRLGAFSIENSRSGVEELFERIRYFVKDQKQVLFALETSKGLLIDSILDAGYTVYPINPKSVDRYRDRYKVSGHKSDDFDAMVLANILRTDRHNYRPILPDSPITRELKILTRECCSLIRLKTLLSNQLTSCLKDYYPVALELFCKLDQPITLLFLKNFPTYQQAKQVSLPQWGKFLSKHHYRVGVKKKAHEIYLKLQEPQFNVEPFVDNAKARYTLALVEQLQLLLAQIKSFEDKIEQLLKQHTDGEIFLSLPGAGITLAARMVSEFGDNRERYKKVSSVQAEAGTAPITESSGNWKFVHFRSACRKSFRNTMHQFAFCSIKESSWAKQRYQQYVASGKKHTQSIRCLANAWLEIIFPMWKNYMPYSEQRHLLKYVKEQKPVNYSRNLNYLSV

SEQ ID NO: 405722 - protein, 325 aa, unidentified
MHIIGVDVSKKKLHAAYLKDPSEEKTKPKAASNSPEGVDALLTWAQRQTSAAPEAMHFIMEATGVYHEAAAEALIAAGATVSVVNPKHVRRFAESRGIESKTDAHDRRVLALFGHERRPAGWQPPPAHAKQLRTLLDRLDALDDDIQREYNRREKAAIQGNDDVLRSHHTVIGALQRERDRLRQEIDHHIDRHPDLRDTHKLLESIPGIGEQLARHLTAFFALGSFGSAAQAAAYLGLAPKHRQSGTSIHAQPRLAKIGPSPLRAKLYFPSIVALTHNHHIRAMAQRLRSKGKSNMAIIGAAMRKLIHIAFGVIKNQRPYDPALT

SEQ ID NO: 405723 - protein, 355 aa, unidentified
MNKIKYIGLDVHKSSISIAVLDATGKLVMEVTIETQAEALLDFVRGLRGTLYVALEEGTCAAWLYALLAPQVAKVVVCDPRQNPRRLGEKKSDRLDARKLAEWLRLGTLKPVYHGDPLEPGLRESARSYRTLVSDTTRVMNRLKALYRGRGIRCAGTRVYSPRWRGEWLEQLPPSGVRPRAELLYQQLDLLMPLRQEARATMLAESRRHAAQKILRSIPALGPVRVALLIALLQTPHRFRGKRQLWAYAGLALVTRSSADYRIVDGQLGRSRQQALVLGLNANHNHVLKALFKDAAASALAHPGPLKDFYATRVAQGMKPELARLTLARKIAAITLTLWKKGERFNVEHLKAQAA

SEQ ID NO: 405724 - protein, 465 aa, unidentified
MARKSKHVKSKERKRLPRSLKTIQANAAGIDLGSREHWVCGPPREDGTPNVERFGTTTPDLVQLADWLKEQGVKTVAMESTGVYWIPLYEILDSRGCEVLLVNARHISNVPGRKTDMLDCQWIQLLHGCGLLRGSFRPSDDICRLRALIRERNTMVEQRSDWVRRMQKALDQMNVCVHHAVSDITGVTGMAIIRAIVEGERDPHALARLRDARCRKSEKQIAEELTGNWRPEHLFNLRQALKMYDQLCAVIDDYDAEILTYITKHQPENAGPTPAPRHSSKSKARNLAKRGQEPLRQALYGFSGFDLTTIDGIGVDTASVVLSELGLDFSMFPDESHFVSYLRLAPNLSISAGKKVPSKFKPTTCTRVSTALRMAALTLRNSKSALGGYYRRIAWRKGASVAVFATARKLAQLIYRLVRYGQAYVDTGVEAYDARFNRRRLKFYTKALKSMGYTVQPLTQTTSAT

SEQ ID NO: 405725 - protein, 333 aa, unidentified
MHARRSVICRIDDRGKELSCKQIDNDPKVLVREVRRAGRGAPVAIEATYGWYWAVDALQAAAFDVHLAHPYGMTAMRKRKRVKTDAKDSYELANLLRLGSLPEAYIAPRGLREIRELVRHRQRLTQANTAVKAGIRGVLAKHNIHLQVADLESGLGTRLLDEVSLMPAYAHHLDSQRRQMMLLEAEIGATEVELDRRLKHQPEYRHLQKIKGIGPVLAAVLFAEIGDITRFAGPDQLACWAGLTPRHYASDRTTRRGHISKEGSVLVRWAVVEAVQRPCEPSVRALRERILARRGPGGRNIAKVAAAHRMLDIVFYTLRDGTCRAFADTQDAA

SEQ ID NO: 405726 - protein, 323 aa, unidentified
MFYLGVDVSKKKLDCMLLNSTNGKLKSKSLSNTKAGFEELIGWLAENKAPEAHVVMEPTGVYHEPAALALTDAGLTLSLVNPAQLRQFAQGLGVRNKTDKADSTVLARYGEAVKPEAWQPPSKSARHLKALLARRDAVADDLQREQNRQEAVEFAVSPEEVRQSINQSISFLKAELKRLEETIEEHIDSDPGLRDKKDLLETIPGVGERVSTNLTALFAAKTFDSAEQLAGYLGLVPVHGESGTSVHKRPHMSKAGPAHLRKLLYMPALVARQWNPHIKAFSERLLAKGKAKMAVIGACMRKLAHLCFGVVHTGRPYDPNYAM

SEQ ID NO: 405727 - protein, 328 aa, unidentified
MEHFAGLDISVKQTSICIVDDAGKIVKEVKVASEPEALLKVLGKPAYRFKRIGLEAGPLSQWLFSALAEAELPVVCVETRHMQAVLKAQINKTDRNDARGIAQMVRAGLYRPVHVKTLRSQKLRMLLTYRKLLQSKAIAIENDLRGTLRNFGLKVGMVGKVKFESRIQELVETIPDLAVLVEPLLVVRRALREQIVILHRRLLAIVRDDEVCRRLMTTPGVGPVVALTYRATVDVPARFRKSKSVGAVFGLTCSKYQSGEIDWSGRISRCGDEMMRVMLYEAAQSMLRSKKWSWLKAWAMQIARRRGMKKAIVALARPAGCHHAPHLG

SEQ ID NO: 405728 - protein, 392 aa, unidentified
MLFIGIDVSKSKHNCYLVDSEGTVYENNLQIQNDINGFKILSQKITSICQAQNHKKVKIGLESTGHYSINITNYLYSEGFEVILFNPIITNNNRKSNTLRKTKTDKTDAKVIATMLFTDDSKSYSPISYQIIELKSLTRHRHRMVSQRSKFKLSFTRLVTIVFPELPEHVYSIHQKSSEALLLELPTAKDISNCHLTKLTNLLKKNSRGKYSREKAIELKNLAAESIGSSNRATAFELKQTIKFIQFFDSEIKIIDQKIKELMDEINTPVITIPGIGYTLAATIISEIGDINRFAKPSKLVAFAGLDPSVYQSGKYNATHTMMVKRGSKYLRWSILQAVKTVAMRDKTFKDYLNKKLSEGKHYFVALSHVGKKLIRVIFHLLKNNISFVPQA

SEQ ID NO: 405729 - protein, 310 aa, unidentified
MQDILECCCGLDIHKESIVACLLKGPVNKQPSSEIRVFSTLLSDLDSLKAWLVEENCMHVAMESTGIYWVPVYETLETAFDGRMSLIVANARHMKNVPGKKTDMKDAEWIATLLRAGLLNGSFIPEKDIREARDLTRYRKSVISDITSQKNRIEKFLQSCGFRLSSFISDIFGASGSAIIKHLYTHGSITIKDLDSCLKTQTRRRINEIMQAINGRLDKHQMQFLKMMFGHLESLKAHLSEVESQINSFICKYDHQIELIDGIPGIDKTAASTILAEIGTDMSKFKTAEHICSWAGLSPGNNESAGKKNE

SEQ ID NO: 405730 - protein, 381 aa, unidentified
MPSMQLRRDDVIVGVDTHKDNHVAVAIDGFGGRLGDIVVPTTIAGFEELLAFCLAFVGSAGRLIGFGVEGTGSYGVGLARYLRNHGHDVHEIARPARAAERRLAGKNDTIDAEHAARQLLAGHGLSTPKTADGAVETIRLVKIAYDGAVQARTTAMITLKATLATGSEALRAELETLTDHKLILACAALEGPTPLPPVRRGAPAVVVPGDPDVAMRHVLSSMAKRWLALHEEAKAHAASLKALTAAAAPQLVEAVGVGYDTAAQMLITAGDNTNRIKSEAAFAKMCGACPIPAGSGKTNSRHRLYRGGNRQANAALYRVVIVRMRWHQPTIDYVARRTAEGMSKREIIRCLKRYLARELFRLLPAPDAIAKPVNGELEIAA

SEQ ID NO: 405731 - protein, 340 aa, unidentified
MKVAIAAIDLGKHSFHLHAQDDRGHELYRKKFTRAALTQHLANLEPCTVVMEACGGAHFMAQQVAKLGHTPKLIAPHLVRPYVKSNKNDFADAEAICEAATRPTMRFVPPKTQAQQVLAMLNSTRDSFIKDRTATANRIHAALLEVGISLAPGYKSIKDLPALLETSSVPEPFKKILMGLHEHFNYLDGQVKKLDKDVECQAAGDDLATRLMTMPCIGPITSSVLAAELGDGKQFKCGRGYSASIGLVPKQHSTGGKTVLLGISKRGDRNQRRLLIQCARVYLMQLDRQKGWLADWVRQLLAHHHSNHVVCALANKLARIAWAIAAHHTEFDAGPSAMNA

SEQ ID NO: 405732 - protein, 334 aa, unidentified
MGKITTVGIDLAKSVFSVHAIDENGAVLIRKTVSRSRLMAMVAQWPACLIGVEACSGAHEWARRFQDLGHTVRIMASRFVAPYRKSGKNDGNDAEAICEAVGRPNMRFVPVKSVEQQALLSLHRIRQGFVEERTATANRIRGLLAEFGIVLPLKIAELRRGAARAAETLPPLARHGIEDLLDHMRSLDTRITTYERELEHLAKANETAVRLMTIGGVGPLTALATVASVGHAHEFRNGRQFAAWLGLVPRQWSTGGKSRLGKITKRGDAYLRTLLVLGARAVLQMAARRDDKLSRWALALKARCGYHKAVVAIAAKNARIMWALLARGNTFKAA

SEQ ID NO: 405733 - protein, 363 aa, unidentified
MNCVIENTELSSHEGTRSQFNGCRASIKLGIDVHQDYYVVVKQEDGTNPKPAQRFKKEVFFLWAAKLQSQGGEIYAVYEACGFGFSLQRQLTALGIQCYVVCPQKLDERNKRVKTDGLDAKALCLKLDRFVQGNRDALALVRIPTPEEEQKRAIHRQREQLVQTRKRLEAQGRSLLVNHGMEPLSNWWKARTFAQLQVPEWMKELLGNSQPILVALQEKIQALTAQLQGAAGPNQPRGFGALSSVVIDREIGNWKRFNNRRQVGSYTGLCPGEYSSGKTRVQSCVTKHGNPRLRAALVETAWRLVRFQPDYKPVRKWRQTLAKAALATKAARKKAIVAVARQLAVDLWRIRTGRVQAEALGLF

SEQ ID NO: 405734 - protein, 424 aa, unidentified
MVRFIGIDIGQQACEVAIGLDGVIRSAGRITTTRAQLELFAQSLGPDDHVAMEAGSSTLEIARILEPHVARVVVANTKKLRQISHAKAKTDTLDARTLARLLAAGMLDAVWLPDEQTRAQRRWIARRAAGASAHALQERDHAVLARNLIESPAVSDLFGKRGRAWLDEQRLAADEQTTVKGCLRQIAFLDGEIAIIERELARHALSCEQIRRLMTVPGVDLIVAATFMAQIGDIRRFAMARHLVGYLGLDPRVRQSGAQPARHGRISKKGRLGGPPRALRGREVRRADRGPIARVRQAHPRPARQQRRGDRRRAQAVRRVLAPADPRRGLRLRTPIADQDQAAASGTARRRPATPRPARRHHQALPPPRGPRARARTRPASRTRLRTPRRRLEADQAKGRGRDTGARISQRPSKGKAARQTTSP

SEQ ID NO: 405735 - protein, 369 aa, unidentified
MIDYFTSTFYFMKAIKQAVGIDVAQDELVCSYGILFEDLSWQIKSRKTFPNHNSGFKACLKWVESMRDVNSEVLFAMEATGVYHEKFAHWLVDMEQNLSIVLPNKISNYMRTLSIKTVTDSTCADAITQFGLERKLDYWAPPKPIFRTLKQLTRERDQIVAERVTIDNQLHAEKTEAFPNANSLKRLDARRRLLCKQEQEIKGEIRQLVKSDQELDQEVKRMTSIPGVGELTAVIVLAETNGFELVRNKRQLSSYAGLDVREKQSGTSVKGKPRISKKGNRSLRKAMHLPALAAIRHCEINKATFARLVGRHGIKMKAVVAVQRKLLELIYILFKNKTTFDPAYEEKREDGKNHTPLYSLADADLSNEI

SEQ ID NO: 405736 - protein, 482 aa, unidentified
MKKKNIFQNRSQQLLRLFEKAGNRLKMMCVPIDYAKKDHMVMFCNGYGDIVRKPFSVNNTLEGVKYLIDQVMRSCRQRHIKKEYVFFGGEDVNSYAENFANALRTKGFLVANVNAHDAKKQRETLQASTDRIDLMGIAMMLLNLRAKCSPAQDGIYRNLRTLVRHRKKLVVMKTEVKNRVHTLVDRLFPGFLNEKNTGINAFSKSSLVLMEDRFSAQQIRRRQKSTLIKILKRCATPDAEKIASKLHSYAAQVITTPNEYAATLQLSLEHHIKHFRCLQENIDQLLSEIALVLAQTQAAFLTSIKGVGIVLAAGVSSEIGNPFEQKPLNNLTSYCGIIPRVKQSGGLEGHTHTGRVSKRSNHILKDYVVQSALQMGLRGPQPLLQDYKRREAAGQHADFGIGRRFLRMAMCLMRSSQVYLPPTLRSPKTQMQERAGYYLTTWPLFRDKWKKAHAHQAAFAKDQPLGQWRQVVQELYDIKLKL

SEQ ID NO: 405737 - protein, 407 aa, unidentified
MLFIGDDWAEDHHDVEIVNATGARLARRRLPEGVAGLAGLHALIADHLGPDQDAAQVVIGIETDRGPWVQALLAAGYLVYAINPLQSARYRERHSVSGAKSDPGDAHVLAELVRLDRAHHRPIAGDSVIAEHVKIVARAHQSMVWSRQRQTNSLRSMLREYYPGALAVFGDDLAGRDALAVLTLAPTPQQGARLSEHQVAAALRRAGRQRNITVRAVDIVAGLRAEQLAARPGVVGAYAAAAQALLAVITELSRQTLVLAGEVEAGFGRHPDVEIYLSQPGLGVILGARVLAEFGDDPDRYTDTRARKNYSGMAPVTRTSGKSRAVLARHARNRRLADALYQQAFAALNSSPGARAYYDTHRARGNTHHQALRALANRLVGILHGCLRHHTLYDETQAWAAPTTAAA

SEQ ID NO: 405738 - protein, 324 aa, unidentified
MILPALGIDIAKLRFDVCLMNTNGKLKHMVFANTEVGCEQLAHWLAKQRVERVPACMEATGTYGEALALHLHAAGHITSVINPAAVKAFAGSRLSRTKTDKVDAELIARFCVAQQPPAWMPPAAEVRQLQAFVRRLEALIEMRVAEENRLEAGSPVAAVRSSVEQHVAYLAAEIKRTEVLIREHIGNHPSLKQQSELLDSISGVGPTTAALLLAEIVDVTQYRSTWQVAAYAGLVPRERRSGSSVRGCPRLSKIGNARLRKALYFPAITALRCSAFFQSWAKGLRERGKCKMSVIGAAMRKLIHLAYGVLKTGKPFDPQWMKTA

SEQ ID NO: 405739 - protein, 393 aa, unidentified
MICVGIDVAKDKYDCFILSSEGEVLADVFTIPNNAEGFDTLLQTIRRCARPEDKIKVGLEATGHYSYNILGFLLNEGLDTYVINPLHTNLYRKSLSLRKTKTDRVDARTIAAMLMSDVDLKSYTDTAYHNEELKSLTSNRFDKVRERAKQKQSVSRLVTILFPELEKLVSTLHMASVYALLSEFPGAKQVSEAHLTHLKAVLYDASKGRYGSDMATTLRDAARCSVGSVMSAKSLELRHTIRLIHELDAEIEDIEAAIQSMMDEIQSPITTIPGMGVRMGAMILAEIGDFSRFDSPDKILAYAGISPSTYQSGQLSLSGAYSHMEKRGSRYLRYALYNATKYVCLWNPTFAAYLAKKRAEGKHYNVALSHATKKLVRLIYALEKSKRPYSTAA

SEQ ID NO: 405740 - protein, 409 aa, unidentified
MQVVHEVCCGLDVHKKTVTACVLWASGRRRQTREFGTFTKDLLEMSDWLQSCGVTHVALESTGVYWKPVWNLLEGQFEVLLVNAQHIKAVPGRKTDQKDSEWIADLLQHGLLRASFVPPTPTRELRDLTRYRASLAQEINRIANRIQKVLEDANIKLASVATDTLGASGRAMLEAIVNGEQDSQRLAEMSRGLLRNKIPQLQQALEGRVTPHHRFLLRELLDHHYFVESKMRRIEQEVAERLGPFQSEVARLCTIPGVDRVTAWGLLAEIGLDMSQFPDAQHLASWAGLCPGSHESAGKRKSGKIRKGSLWLRRCLCQGAWAISTKKNNYLSALYRRLAARRGSKRATIAVAHNLLVIAYYILRDKTCYRDLGPDYFDRLNPEGLRRRLTKRLEGLGFKVTVEPLAEVA

SEQ ID NO: 405741 - protein, 362 aa, unidentified
MFRPHTLYIRIRIVRKVSEPAFAMKDQDVTDVIRRKQQTAMRYIGIDVSKATFVVAYSSDKGGEIRTFNNTTTGIKQFIGALPKDSSIHCVMEATGNYSAMLLYLLNVAGIAVSMENPLKIKNFARAMLSTVKTDKIDARLIALYGEKMNPQPFKIQGEAILRLRQKRTVIRQLTKQITAMSNLRGSLACLPVPDKGATHTVDETIEFLEKRRDRLQSELTDLVEVEFSRQLALLTTIKGIGITLATALIITTGGFTYFQNAKQVSRYLGICPTYEQSGTSVNIRGHINRNGDAYTRGLLYVAAWTASRFNTKCGETYTRLRQNGRPGKLAMIAVANKLVRQAFAVVTHDKEYVDGFVSNRP

SEQ ID NO: 405742 - protein, 356 aa, unidentified
MSRDIKYIGMDVHKEAIVIAVLNGGGKLVMETILETKASSILQFIHGLRGELHVTWEEGTWAAWLYDLLQPQVQEVLVCNPRRNALLKEGSKSDKVDARKLAELLRTGMLRPVYHGENGLRTLRELARSYQTISKDLTRVMNRLKALYRGWGIPCAGTQVYAPRYREQWLNKIPQAGVRRRAELLYQQLDGLQALRRNLRPELLAESRKHKGAKLLRQIPCIGPIRAARLIALMQTPHRFRSKRQLWTYSGLGIETHDSAQFRFVRGQLQRSRKPQQLRGLNRNHNHEMKEIFKSTATRASCGTGPFHDFYAALLGKGMKPEMARLTLARKIAAITLTLWKGGKRFDAEQLKAQAA

SEQ ID NO: 405743 - protein, 371 aa, unidentified
MDESSKTLYVGLDVHKDSIAVAYAPEDRGADVVPLGAIGTRQCDIDKLIRKLQSKGATLVFVYEAGPCGYWLYRYLTRKGLACHVVAPSLIPRKPGDRVKTDRRDAVMLARLMRSGDLSSIYVPGIEDEALRDLSRGREDAMRDLTATKYRLKAFLLRQDIRYEGRANWNAAHLRWLSEVVCPTPPQQIVFQEYVRAVTEQHERLQRLERALHDQVKSWRLYPVVEAIQALRGVELTSAVILIAELGDLTRFDTPRKLMSYLGLTPSEYSSGERRRQGGITKAGNTHARRALVEGAWAYRYPAKVSRHLQLRLEKLPAEVQAISWKAQVRLCKRYRQLIARGKHANEVVVAIAREMAAFAWAIARIVPLAP

SEQ ID NO: 405744 - protein, 465 aa, unidentified
MKRKEKSKTASEGMARVHPNAAAIDIGATMHMAAVGADRSSEPVRSFGTFTSDLRALADWFAECAVTTVVMESTSVYWIPIYELLDERGFEVFLVNARDAKHVPGRKTDVNDAQWLQRLHSYGLLRASFRPKGEIIELRAYLRQRERLLDTAASHIQYIQKAMTEMNLQLHHVVSDITGATGMRIIRAIIAGERDPAVLGAMRDTRCHSSAEVIEKALTGHYRAEHLFVLEQALALYDVYREKVAACDVQIESVLKELNSVRGREKSTKADGQGTSRRRSRQANGLAFDVGEALHLLLGKDLTLIDGVGPYLALKLVSECGDDLLAWPSAKHFTSWLCLAPSNKISGGKVLSSRTRRSSSRAASLLRLAAITVGRTETALGAFYRRLSARVGKAKAVTATARKIAVLFYNAVRHGMDYVDPGASYYETRYRERVVKNLHRRAKAFGFVLHAADMSAEPAAAAAVS

SEQ ID NO: 405745 - protein, 453 aa, unidentified
MAQRNATVRLKPGKSRAALTITHPNAAGIDIGSASHFVAVPPDRDEEPVREFPCFTVDLNALADWLQACAVDTVAMESTGVYWIPLFELLESRGFTVLLVNARHVKNVSGRKSDVQDCQWLQQLMTYGLLSGAFRPADQVCVLRALWRQRGMLLRNQGRDVQHMQKALTQMNVQLANVISDVVGETGQKILRAIVAGERDGQVLGLMKNVRIRASVDEIAKSLQGNWRAEHLFALKQALGAFDFVGTQLAECDREIEQQLQRLQVHDSEPAKGKPRGRARNAPKFDLRTHLFKMCGVDLTRIDGIDVTTALAVISETGADMSRFATVGHFASWLGLCPGTKITGGKVISGKTKRCANRAAQALRLAAAALRPSKSALGAYFRRMCSRMDKPKAITATAHKLARLIYTMLTKGEEYTDQGQDYYEERYRERVLRQLSQRAQKMGMTLVPTPQPA

SEQ ID NO: 405746 - protein, 398 aa, unidentified
MPNSPDTTALTGATHSTIFVAVEISLKSWIVGVHCPDASGGSVSIHTLAAADTAGLLDLVGSVRERVARELGARPRVMLTYEAGYEGFWLARDIERRGAEIDIFMNDPASLRVNRRAKKKKTDRIDARRMVRALKAWDQGDSEAMSWVRVPDVDQEDAKRLLRERDTLVSERTRLNNRIKGLLQLHGIFDLAPRKPEFLERLATARTGYGAPLPPRARAEIERAVAMLRLVESHIEMIEAEKKALLKAGRKAQDASDCDGTAMIAALTRIHGIGLNDATLLAGEVFYRDFHNRRELGSWAGLTSVPWASGDVDHDLGISKAGPSHVRKHMIQMAWRWLKLQPESAITKWFHAYVAKDAGGGRGRRARKRAIVGVARKLLIALWRYATQGLVPEGAIVA

SEQ ID NO: 405747 - protein, 344 aa, unidentified
MGVAIGVDSHKSSFAAAAVDEVGRELERREFGNNAKGHRQALKWARAIGSDSIFGIEGSGRYGAGLARVLLASGEDVREVPPFLSHRERKRTPSKGKSDLSDAVAIARIVARGEGLVPLVGARLHEDLRLLSDHRDQLVHTRTRLANRVHKDLSIMHPGYEQQIPKLTRKKQLAAAEALLGADGSVRARLARERIEDLFHLDARIAAVTKEIAARVTETGTTLTRLTGISFVLAARILGEIGDPRRLGSKACFAMLNGTAPLEASSGNTRRHRLNRKGNRKLNFVLHRMAIVCCRVDADTKNYMAGKVAEGKSKKEALRCLKRHLSNVVHRQLLADLERGAIAA

SEQ ID NO: 405748 - protein, 423 aa, unidentified
MSDNRKVCGIDVHKEFLQTCILSRTGETSFHRFRHTHDEILLLKELLLMEGCEEVAFESTGIYWYRLYALLETDLRVVVANAYRIKSIPGRKTDIRDAQWIAELLLNKLIKPSRILPRGDREFRDLTRNRETLVRTRTTVKNRIHKILDGAGITLKPVLKDLFGRSGRHILQGVIEGRNPETIIETIPSSVVRRRSEALREALQGSLSEIQILLLREQLDLLRTIDEKVSRVDDLILSRLDENGISDMQICLSVPGIGSIAAVTILAEIGDYRDFDRADRLASWAGLTPSVYQSADKLVTGRITKYGSTHLRWILVQSAQAASRMKDTVLSRFFRRVAFKRGRQKAIIALARKILCILWHLLQKREVYQEEQKMKKVKIRDIQKIRKLSVEEAIDFIVKEGYRVFAPGTTVSGLGPAHSGGGS

SEQ ID NO: 405749 - protein, 358 aa, unidentified
MEQNSLEVPERCIGIDLGNERSNYCLVDRAGKIVSEGVFSMTRDGLREAFGDLGRARVVLESCPQSHWVVQVLAELGHEPIVANTHKLSLISRNVCKTDRNDARLLARIGRLDVDLLHPVEPRTDGEMAARSLLRVRKHFVRTRTQMINQVRSAVKGFGHRIPSCSTERFHVVARRHIPEILGPSLFPLLEMLEIVGQRIQAYDREVDRLCKEEFPQTAVCQQVRGIGPIAALSFVTAIGDPRRFERSRSVGPYLGLTPRKHDSGDSQPQLPISKHGDGDVRSLLVTASIHTLRQSAPDSDLKRYGRRIAASNKPKDRGRARIAVARKIAVLLHRLLLTGEVYHPLRENIAPVTTTAA

SEQ ID NO: 405750 - protein, 408 aa, unidentified
MPRYYLGVDWADRVHQLYGGDENGVKVMEMKVQENPEGLMELGRWLDQSRAEEVELWAAIEKPHGRIVDFLLDHGVVVYPINPKVLDRARDRFRMSQSKSDPFDAWVLSEFLRTDHAHLRPLRPNSEQAQELKLLTRDHQRMVRHKTRLLNQLKFTLKEYYPRAVDVFTDLDSRVALDFLKQYSTPTALSKLSRKQWNRFAEQHPHLGQARSTKLWEELKKPQLMIPDHVIRAKAQLLEVLLDQLEASLRAVEKYSDKVERFFASTPAARLVAKLPGAKSATLLPALWAELGDAPARWESFKHLQAEAGTVPVTKSSGKSRIVEFRFSCNKQLRYAIYWFAFLSINRSEWAKAFYRDQRARGHSHPQALRALGAKWLKIIFVMWRDHKPYDETHHLANIARQKMRQAA

SEQ ID NO: 405751 - protein, 369 aa, unidentified
MKKKVLHVGLDVDDKSFHIGAFSKETCEIFEMTSKPNLGNLMRKLEKFTEKDFELKLCYEATYIGYSLCRDLNKNGYQTEIIAPSMIPEISSNRVKTDRLDARKLAQYYANDLLTPIHIPTEEDEIDRGLLRSRSFLVDQRKTLRRHILSVCRINGLHFKLATGAKYHWTKQHANWLVDNVNKLEGIGKLNFEILLRQLEKIDEGIAEYEKEIEKLSETERYKKKKDALNCFRGISTLTAMTFITEIGDIRRFKHPKQLTSYSGLDVSEYSSGGKEKKFGITKMGNKRIRTSAIESCQILNKVKPLSKRLKAHRVGQDLKVIDIADRCNKRLKKKANNLLNAGKHRNKVKTACAREFLGFVWEALHAVA

SEQ ID NO: 405752 - protein, 455 aa, unidentified
MPKPKRIRNARTSPVPRILEPDAAGIDIAATEVYVAVPTDRDPEPIRSFSTFTDDLHRLADWLRACNVQSVAMESTGVFWIPLFQILEDRGFRVCLVNARHVKNVPGRKTDVSDCQWLQYLHSVGLLRASHRPAQTICAVRSIWRHRESLVQMAAAHIQHMQKALDQMNLQLHHVISDISGTTGLSIIDAILDGERNPETLAALRDPRIVASRETIARALVGDYRTEHLFTLQQSLRAYRQYQHWIAACDVEIERQLRVLPNNLADDQKPLSKPKDHHKPRRNEPGFDLRSQLYRIFGVDLTEVPGVSSLTAHALLTEVGPDLRRFPNAAAFASWLGLCPDNRISGGRILSVVTRKVKNRLTMALRMAAQSLHRSQSHLGQYFRRMRVRLGTPAAITAAAHKLARILYHLITTRQPYQESTFAAMEERSRHRQLLRLKKQAASFGFQLVPGSSVP

SEQ ID NO: 405753 - protein, 422 aa, unidentified
MMTDTAGTRTRDRSDDGPWVVAGVDTHKDTHHVAVLNAATGAGLGDMQVPATPAGHDRPRDFVRSRGRIRMIGIEGTGSYGAGLARALRAAGAPIREVIRPKRSQRRRGKSDPIDAYAAAGRALAEADALPVAKTGTGPCEQIRVLLVERRSAMKARVAAHRQITALLTTAPDAVRTRFARLSGGELIGALARTRPAPTADTPASTTTRTLRRLARRHRILTDEITDIDTELRALTARAAPTMLATKGYGVITTATLLVTAGDNPDRIRSEASFAALCGAAPIPAGSGRTNRHRLNRGGDRQANWALHQIALVRLSSDPRTKVYAARLTATGKSRKEILRCLKRAIAREAWHLLTHPRPAPRTDDLRRLRHERGLTLTQAAHHLNTHPARISELERGTRPDTTLTAAYRQWLSTQQPQTHTT

SEQ ID NO: 405754 - protein, 404 aa, unidentified
MSVRVAPVTSSTIVVAVDVGKTSALFSVTDAARQRLVGPSEFVMNRAGLTDAAARAMAVVASPGRVKVAVEAAGHYHRPVLDYRWPSGWEVLELNPAHVAEQRRVQGRRRVKTDVIDLEAITELVLAGHGRPVTDGDVVIGELSAWAAHRGRRVATRCATKNQLLGQLDRAFPGLTLALPDVLGTRVGRLVAAEFADPARLVGLGVNRLIRFAAARDLQLRRPVAERLVAAARDALPTRDAVIARQILAADLRLLAELDDQIQSAETALGLLLPRSPYATLTSVPGWAVVRVSNYAAALGDPQRWPGSRQIYRASGLSPMQYESAHKRRDGAISREGSVALRRALIDLGIGLWLNEPAAKTYAHQLKGRGKHGGIVACALAHRANRIAHALVRDHTTYDPTRWA

SEQ ID NO: 405755 - protein, 333 aa, unidentified
MKLKRIGVDWAKQVFQLHGVDSHEQAVCRKQLKRSQMLDFFRRLEPCTVAMEACGSAHYWARELRTLGHEVRLIAPQFVKPYVKSGKNDANDAEAICEAASRPSMRYVEVKSAGQQASQALHRIRSRLIRARTALVNEIRGLLGEFGLVEARHGVAATRRLTQTALDAQNGLPGQMRELLAELSGELDEHDARLSRLDDMIQRQAREDERVGRLLHGPITATALVSAVGDARQFSSARQFAAWLGLVPRQHSSGGKERLGAINTRGDSYLRTLLIHGARAVLRHCQDKADRRSQWLRQRVCRRNPNIATVALANKNARIVWAILSRGEGYWPG

SEQ ID NO: 405756 - protein, 318 aa, unidentified
MKTKTNQNINVGVDTGKFQLDIYIRPLDIYFTVTNDDKGIKEAVKTIKKYKPERIIIEATGRLEMPFILACAKANLPFVIANPIHIKRFAGAIGQRAKTDKLDAQLIAHFGEAIQPKLSMLKPENMQAMSDLVARRNQLLTMQTMEKNRLQILPANLAMTIKPILTAFKNQINKIENKIAELIEKCPDYQAKNLIVQSMPGIGKIAAASLIGNLPELGYISSKQASALVGVAPINRESGRYKGQRKIQGGRHQVRTVLYMAMMSAMQCNPIFKATYQRLVAAGKPKKVAIIACVRKMIVILNSMLRDGVMWDATTVNN

SEQ ID NO: 405757 - protein, 366 aa, unidentified
MNKSSTVTLNGNQILKQKKLTIGMDLGDRSTRYCVLDEAGDVILEGGVPTTKKGLDQVFAAMPRSRVALETGAHSPWVSRQLTQLGHEVIVAHARNVRLIGESSRKDDRLDARTLARLARIDPQLLSPVRHRSAEAQAHLTVIRARAALVGARTALVNAARGLAKSYGERLRKCGTQQVRQDLAAGLSVELRAALEPLLGEIESLSQRIAAYDRQIEQIAQKDYPQVSLLQQVKGVGTLIGLTYVLTLEDPHRFRRSRDVGCYLGLRPGRRNSGQSQPQLHISKEGDAYLRTLMVQGAHYILGPFGEDSDLRRWGLQLAERGGKNAKKRAIVAVARKLAVLLHKLWVNGEVYEPLRNHPTAVDAVA

SEQ ID NO: 405758 - protein, 418 aa, unidentified
MSLTETTPTRPAATAGIDWASDNHAVCVLDPDGQVIDRQSVAHTAAGLRRLTDLLACHHVTAVGIERGDGPVIDALLGTDLSVYVIAPQQVKNLRSRYGSAGNKDDRFDAYVLADTIRTDWRRLNPLTLDTDATTALRKLCRARRDLVAHRVAVANQLRAHLATAMPAAVGLFGDLDSPISLRFLTRFTTQDDLDWLSPKRLATWLSGASYSGRTSAQTLHARITAAPHGATGTHGQALAGITRAYLATLEAITAQIRALNRQISHAYDTHPDKPIYATLPKAGTVRAARLLAEIGDARGRFPTTSSLACLAGVAPSTRESGKLRIVSFRWAVDKQLRDAVCDFAGDSRHANAWAAQLYNRARARGHDHPHAVRILARAWLDVIWKCWTTNTAYDPDQHRALQNILKPEESGSFPKAA

SEQ ID NO: 405759 - protein, 414 aa, unidentified
MLKIVYPICCGMDVHKSFVVASIASTNEQGVTTYKIKRFSTFTGDLRRCATWLAKNNCKDVCMESTGKYWIPIYNILEPTCNIVLAHPKYVKSIRGKKTDKRDARWIADIFKHDLVAGSFIPPADIRQLRDLVRYRWKLTSFTTGEKNRAQNCLTVSNLKLDDVFSDVFGKAASAITARILENPTEKITDVSGFRTKGMKATNEQVLAAVDGEMCEEQAEKLRIIRSHMDSLELCKLNLESLILATAEKYLPQLDLVMTVPGIQSFAAIGIISEIGVDMSVFPTSKHLCSWAGLTPQNNESAGKKKTTRISRAGAYIKPLLVQCALCAIRAKRFPEVRNRYLALKKRRGHKKAIIAIARMLLTAIYNMLKKNEPYNPELYRSADRPPAHREVSVEEAVFILQRQGYLVTAPPTA

SEQ ID NO: 405760 - protein, 336 aa, unidentified
MKKKMLFIGIDVSKSTFDATIIPKGSLQTVHHKQFKNQKTGFIQLARWIKSLYANLDELTWVFCMEQTGVYSYHLCCFFEGNNLDYCHESALKINRSLGIIKREKSDKADSRDIAKYLYQHIEELSFYKLPSQSLQKLKALISFRRRLIKQKAALQVSSTEISAFSDRETSRFIKTESNRLIKSYELKIKKTEAEILKLMDVDQTLSKAYQLTKSVVGVGPIIAAYIIARTNCYSNFSNPRNFASYSGSAPFERSSGTSIKKVVRINKMADKELKSLLTNGAYAAIRYDGQIKQYYLRKIKEGKNEFSVINAIRNKLIHRVFATVKRGTPYVKMDF

SEQ ID NO: 405761 - protein, 337 aa, unidentified
MKFCGIDLHSNNSVVVVTDETDRVLVSRRCPNELTPILSLLEPHRDELVGVVVESTYNWYWLVDGLMAAGMDVKLANPVAMRRYDGLKHSDDKDDAVFLAHLLRLGILPTGYIHPPQERALRDLARKRIQLVRTRTQHILAVENIAARQFGHGFSCNEIKGFSAASVDRLGLPTDVALAMNANVAVIQTLEAQIAGLEARLLQQAKLRPEYLLLKTMPSVGEVLATVIMLETGDIGRFAEVGHFASYARCVKSARYSNGKKKGEGNAKNGNAYLIWAFIEAANFARRFSDDAKRFFEKKKAKTNGVVATKALAHKLARATYHILKEKQPFDAKRCFA

SEQ ID NO: 405762 - protein, 347 aa, unidentified
MTTVTIGMDLGDRKHQICVLDERGRRVSQTSVNNTAAALRKYFQKYAGAVVAMETGTHSPWISRLLESLGCRVLVGNSRKLRAIWKNPQKCDVRDAEMLARIARLDPNLLWPVQHRSEQAHADLERIKARDALVRSRRSLVNHVRGAVKAFGVRVPACSTDSFARRARAHLPKVLHEAVAGVLAMIEQLTDQIHDYDRQIATLSRERYAQSERLQQVDGVGALTALAFVLTLEEPQRFATSRSVGAYLGLAPRRDQSGETDKQLPITKAGNRYLRQLLVTSSHYILGPFGPDSDLRRYGLRIAARGGKNAKKRAVVAVARKLSVLLHHLWKTGADYDPLYATDVQAA

SEQ ID NO: 405763 - protein, 393 aa, unidentified
MFNLPVFVGIDYHTHTIQVCVMDSQRKILANQSVPNDSHAVFQIVAPFGSNISAAIEASTGSSAFAEELVSKYQWSVELAHPGYVARMKQTPDKSDWTDAKLLADLTRVGYIPRVWLAPPFIRELRDLVRHRHSFVGQRTQVKLRLRALLRQHRIACPHKPWTIDGKEWLLDENNITSSQTLYLIRDHYDMIEYLDKKIDAANERMKSVVADDPLVEQLMQQPGIGFITAVTMRAMIGQFDRFRTGKQLSHFCGVCPRNNSSAGKTTTGGLIKAGDDLLRQVVIEAAHRLIRYDARWKSLATHLLANGKKKCVVVAAVANRWVRWLFNQMGTPTLSGEADVRFLRHGQESISEEGSSSAEPLQVSTPEVCFLDSVIPCRVARQQSPSPFTERV

SEQ ID NO: 405764 - protein, 412 aa, unidentified
MLFVGDDWAEDHHDVEVVDDQGSVLARRRLPEGFDGIAALHALIANHLPEEWADLEPGQAQALVKVGIETDRGPWVAALVAAGYEVFAINPMSVARYRERHSTSGAKSDAADAHLLAEIVRLDRAHHRPVAGDSQDAEAIKLVARTHQSLIWDRTRHLLRLRAALRDFFPAAVEAFADLDAPDVLELLAKAPDPTRASRLTRGQIAAALRRANRRDVEAKTDRIHQVLHAEQLHRSATVESAYAAIVTGQVAILQTLNTQIAELGTVVADHFRRHPDAEIYASQPGLGVVLGARVLGEFGDDPDRYADAKARKNYAGTSPITKASGSRKIVLARYARNRRLADALQQWALGSMRGSPGAHAYYQALRDRGTSHHAALRQLANRLVGILHGCLKTHTRYDEHTAWSHHIHDAA

SEQ ID NO: 405765 - protein, 433 aa, unidentified
MGLIVPTVMPPERADQPPSYDGFVGIDWGSQQQQVSVLDRDRRRMGERVVDHDGASLAQFVAWLWGLSAGQPQRVAVAIEVPRGALVEGLVERGFHVFAMNPKQLDRFRDRHSVAGAKDDRRDAFVLADSLRTDQPSFRRLRLDDPQLLVLRELSRAEETLLEAFRRSANQLRDQLHRFYPQMLQLCSAADAPWLWDLIDLAPTPAHAALLREEQVQGGLKAHRRRRLKAHEVLACLQTPALPVAPGAVQAAQAHCRFLLPCLRVLAEHLQACGQQVGALLHTLAEMPGAGAGPSDVAIVQSLPGVGRKMTAWLFAEAAQPLAERDYQVLRTHGGVAPVTKQSGKRRVVVMRRGGNPRLRHALYHMARVAMQRDAHFNSVYAALRAKGQRHGQALRSIGNRLLRILMAMLRHRTCYDASRIHCEPVVQMGETI

SEQ ID NO: 405766 - protein, 398 aa, unidentified
MKNTDFSHFVGIDVAKDKFNYAVIDNSMHILREGQFSMNAEGFTDFLVIVKDYPHSVFALESTGSYHVNLLAFLTANDKKVALINPVLIKKFMQTLTLRKTKTDKIDAVVIAKFIFKNIEHVNRFVPDSTDDITALARARESVTKQLARIKTQLKQHLAVVFPELTANCNVFTDFILNVLEVFPTPQSVVNSPDNKVKAVFDRLMTGRGRRPALSYQRFIKIAETSIGFSSDNYALIVRHDVRMIKFLDKQLEEITETFIDEIRKNRKDELEIIKSIKGISDVTSAHFLAEIKDVKRFENKRKLAAYAGIDPSVRQSGYMYANGRISRRGSKSLRRCLYLMASGLVRCNEYFRAYYLKKKKEGMPHRKAMIALCNKLVRVLFALLKKHEKFNPRFHYL

SEQ ID NO: 405767 - protein, 312 aa, unidentified
MDGIFVGLDISKDAVDVHVQPTGECFVAGTDEAALATVVQRVQAMAPTLVVLEATGGYEIPVAAALATAGLPVAVVNPRQIRDFARATGHLAKTDALDARVIARFAEAVQPAVRPLPTAQAQMLSDLVARRRQVVDMLGAELNRHRQARAAQLQHRIAGHVAWLRQALGELDRDIAQLIRSSPVWRAQETLLTSMPGIGDVTAQALIADLPELGQLDRRRIAALVGLAPFNRDSGQWRGRRMIGGGRPAVRRALYMATIVAIQYNPAIAAGYQRLVSGGRPKKVALVAAMRKLLTTLNAMLRDQRPWEARIA

SEQ ID NO: 405768 - protein, 344 aa, unidentified
MDHFAGLDVSVKETSVCIVDDAGKIVREVKVASEPEALLAVLKDPTYRFKRIGLEAGPLSQWLFSALAEAGLPVICVETRHMQALLKAQINKTDRNDARGIAQMMRVGLYRPVHVKTLRSQKLRMLLTHRKLLQSKAIAIENDLRATLRNFGLKVGMSGKVKFEMRIKELVENQPDLVALVEPLLIVRRVLREQTVILHRRLLAIVRDDDVCQLLMTIPGVGPVVALTYRATVDVPARFRKSKAVGAVFGLTCSKYQSGEIDRTGRISRCGDELMRTMLYEAAQSMLLRSTKWSWLKAWAMQIARRRGMKKAIVALARRLAVIMHRIWVDGTEFRWTREQAAAA

SEQ ID NO: 405769 - protein, 401 aa, unidentified
MNAVGIDVSKGKSMVCVMRPFGEVVLEPFEVLHTAQNLRDLAEKLKALDGETRIVLEATGNYHKPVAFILHDAGLFVSVVNPVLIHDYDNNSLRRVKTDRKDAAKIANYTLDKWTRLRQYLPEDDTRLALKNCYRQYQQAVAIRTMLKNNLISSLDLTFPDANKLFVSPPKSNGCEKWVDFIGDFWHSECVSSLSADAFAKKYLKWCQKHGYIFTRSKSDEIYACALNSASLPKSPTSKLLIQQQVAQLKAVSQSVAAFQQEMLRLSQQLPEFDTVMEMYGVGPSLGPQLMAEIGDVRRFSSKKSLIAFAGIEPLPNDSGKVVGNDKGISKVGSAVLRRTLFLIMSVILQTQPQDEPVFQFMNKKRSEGKPYKVYMMASANKFLRIYYARVKAVMDSERSQ

SEQ ID NO: 405770 - protein, 348 aa, unidentified
MAYFVGLDVSVKETSVCVVDDAGKVILEQKVPTEPDTIIALLTSLGATYGRIGIEAGSLSQWLVNALTAAELPVICVETRHMKALLTAQQINKTDRNDARGIAQMMRVGLFKPVHVKTLVAQEQRMLLTSRKLLQRKLLDVESDLRGTLRNFGLKVGVVSGGRYEARVRELVAGFPRLTAIAEPLLIVRRIMRQQLAVLHKMLLDTVRDDPVCRRLMTAPGVGAVVALTYRATVDQPQRFVHSRAVGAHVGLTPKRYQSGEIDYDGGVSKCGDALLRTMLYEAAHSLLTHNRKWSWLKAWGVRVAQRRGMRRAIVAVARRLAVVLHRMWVDGSEFRWSKDSTPVPAVA

SEQ ID NO: 405771 - protein, 343 aa, unidentified
MQVSTIGVDLAKNVFQVHGVDSAGKVVIIRQLRRKQVIDFFSKIPPCLVGMEACGTAHHWAREVSKLGHTVRLMPPSYVKGYVKRSKNDAADAAAICEAVTRPSMRFVPIKSADQQALLMLHRTRDLLIRQRTQLINALRAHLAEFGLVAETGREGLAQLAAIITDRSNREALPSAMKQALQAIVDQLAALELQIGTLDRAIHAHHRANDMSCRLETVPGIGVIGATAIASTVADPSDFKSGRDFAAWIGLVPRQHSTGGKERLGGISKQGDRYLRRLLVIGATAVVRHARQCPQKHPWVMKLLGKKPAKLVAVAVANKMARIAWAIMAKGGYYRAPELAAAA

SEQ ID NO: 405772 - protein, 432 aa, unidentified
MEKRTKDWKLEQITAGTLIIGVDVAKEVHWARFIDYRGIEFGKAIRFNNIRVGFESIIARIEEIRNMKVLKNSIERTIIGMEPTGHYWKALADYLLKAGYYVVGVNPYHTKKAKELDDNSPTKNDKKDAMTIAKLMKDGRYFEPYLPEGVYGELRGLTNARVSVMKRSNAVKNTITAIIDEHFPEIVTVFKNPLTGKASRQILRSCPFPVLILEKGEVGVLAEINKAVKKTVGLKKVRQLMATAETSVGVRYGMETAKMRLGWLLDEMELLERQLRELAQSMKQRLYETGYAEQMLGIKGIGIVTAASFFGEVGDPLRFQNARQISNYAGYNLVEDSSGKSKSGTVISKRGRKHLRALLYQMAFTMVGQNAEMKEFYKYLTTRAKNPLKKKQALVVVSKKIVTVIYSLLKKRETYKPILVFGAARREMLLAA

SEQ ID NO: 405773 - protein, 437 aa, unidentified
MDEVTDEPLYRDRVCGIDIGKAGLAATIRVPSDKDPARRAAETRSFGTTKRKVLALADWLRCWQVPAVVMEATSDYWKGPFYRLEAEGFECVLADARQVRHLPGRPKHDPGDSRWLAACFERGAVTGCFVAAPEFRVIRLHTRCRRDLTDERTREKQRAEKLLESAAIKLSSVVTDLHGVTGRDIMDHLIAGERNPRVLAQLARARARRKISELEAALEGAEFFTPAHAALLAAMLGRIDRVNAEISQLTEVIERLLAPYEEQLAQAESMPGWGRRASQDAVAETGVDMTRFPTGAHLASWAGRTPLDNSSGKRAGRAKSKKGNRYLGGLLGETAVAAGKTQTREGARYRRLSRRRGKAKALVAVGNTQLKVYHKLLSSPGARYEDLGPDYYERQASTRRQIAHHVGKLGALGFEVTLCRLPEPDPHPGRAASTQAA

SEQ ID NO: 405774 - protein, 318 aa, unidentified
MSDSVFIGIDVSSQTLELASTAQATTWQVANDVAGIEQLVRQILAMAPELVVLEATGGYEFEAACALQAAGLAVAVVNPRAARDFARAMGALAKTDALDARMLAAFARVLHQHPQRERFVKPLADTELQQLQALVLRRRQLVQMLTAERQRLRLAHVAARPSIERVIEFLKKELGDSDAEVATHVQRHHAQLAQALASVPGIGPASVAVLLAELPELGKLDRRRIAALVGVAPLNRDSGQMRGQRCIWGGRADVRRALYMATLTAVRHNPALKACYERLLAAGKRKKVALVACMRKLLTILNAIARHGSTWNSTMHSA

SEQ ID NO: 405775 - protein, 404 aa, unidentified
MSETRDKGSFSGFLGIDISKGTFDGCCIDREGKVLFHVSLPMNRAGFEKLITQVCAISLPQGSILIGMESTACYHVSLFSFLMALGYSVSVINPLLISNFVKLQLRKTKTDKKDAAVIARFLLAHGASLPQTMADSHVADLRELSRQRESLLHQMTALKCDIKRVLSISFPELERTMGIFTRTTLRLLGRFPSARALAQANREELAPLLHHASRGRSTPVSIDTLLKLARSSVGTANPSREMILRQKASILVHLEEHLREMTNTLIELCQSALEQDVEILTSIRGIGDKTAATFLIEMGGEIQKFDTHNKLIAMAGLDPSVYQSGQYDGHSRITKRGNRHLRRVIWLMTIRVIQFNDLFKSYYRKRIEDGLPFKKAVLATAHKLIRIIFVLLTRRTMFYHQVTS

SEQ ID NO: 405776 - protein, 349 aa, unidentified
MTEQRLSYIGERVYVGVDVHKETYTVTCVCQRQIVKTATVQADPASFAVSLLRWFPGATLYSAYEAGFSAFVLHRALTKTGITNIVVNPASIAVAANDKVKTDRRDAKKLAIDLADGRLRGIYVPTETEELARLLPRTRAQIVEHRATIARQSKAKLPQCGRIAPSRRRMLRSRYVRESAAWSLPPERSVRLTLLAEQWRCATRQLIEMRRLLRDQAQAQEEIDKVYRSVPGLGEVVARTCATEWGDMTRVAKERALCSSTGLTPSEDASGASVRRGPMSRQGSSRVRPVLVETAWRAMPRDGVRKERFARIAATRGKKRAIGAMARRLTGRIRACFRQGTTYAVGTYA

SEQ ID NO: 405777 - protein, 353 aa, unidentified
MEQFIGCDAHKKFSIFATLNEKGEYEPTKRVGHMREEFRAYLKGLPSGSRIALETSGCYYWMVDEMEEAGHIPLLAHALTVKRRMQGRHKTNQRDAQGLAMLLRNGTLPVVWIPPAELRDQREMLRWRMCLSRMRTRVKNRIHGLLQRYNIEIAASDLFGDGGRVQLLARSDELPPYSRHSMLDQLQMVDSIETELSECEQLLQEMLYPSAERDLLDSLPCVGKILSAVMALEIGDVRRFSGPDRLVSYSGLVPVARESADWKRQGRCPRDCNVYLKWAYVEAANLVSVHRRRWPERHVAQLYERVKDSTKLHGKAVVAVGRHLAEASYWILKKQQLYQEPKSKRNALSSTHG

SEQ ID NO: 405778 - protein, 338 aa, unidentified
MEFKRIFIDTSKHVFTIHGVDDQERPLLRREIRRAQVEPFFVKLAPTEVVLEACAGSHHWGRVLGGMGHRVRLIPPQYVKPFVKRSKNDRNDAEAISEAASRPTMRTVPVKSVDEQAAAIIVKHRELLVNQRTQAINALRGHAAEFGIVAAKGCANVSALLVLLSAEEAIPAIAKAMFEQMGQHVTDLDAKIDALERQLLEQHKANAVSKLLAAIPGVGAITAITMALNVNPANFETGRHFAAWLGLTPREHSTGGKHRMGKISKAGNERLRQLLVVGAMAVIRFAKPGSKSATAWLLQLLERKPRKVAAIALANKMARIIWAMMARGEAYRRQPVAA

SEQ ID NO: 405779 - protein, 422 aa, unidentified
MLEESSDREEIIERVAALDIGKAELVCCVRVPGAEGKSRRVQEVTTYPTMTRALLGMVDRLTELEVTRVVMEATSDYWKPPFYLLEAAGFETWLVNAKDVKHLPGRPKTDKLDAVWLCKLAERQMLRPSFVPPPPIRVLRDLARYRADLIGVRTAEKQRVEKLLEDAQIKLSVVATDIFGVSGRQMLAALIAGQRDPQILARYAHGRLRGKLAALEEAFTGRFNDHHGFLLSKMLARIDQVSADLDDLDAAIEAEVAPFAQAVARLDEIPGVGHETACVILSEIGVDMSRFPTAAHLCSWARFAPAVKESAGRRQGNGTTGHGNSYLARVLGEAAVSAGRTDTFLGERYRRIARRRGKKKAIVAVGRSILVIIWHLLSDDQARFHDLGADFYDTRAGTEHAKRNHIRQLQALGYRVTLEPAA

SEQ ID NO: 405780 - protein, 348 aa, unidentified
MQRYIGLDAHAISCSFGVINEKGKKVGQAVIETNGTALVEHVKNIPGRKSLCLEEGGQSSWLYEILSPHVDDLVVTRVVQKSQGSKDDFRDAFRAAEMLRLGNVLPVFKEKGQFSKLRAHSDLYGKMNSDSVRVQCRLKALFRSRGVPTAEGDLYAPEQREQWLNLLPVAYRSAAEVMYQQYDASCRAKLQAAKLLKKESHTHPISRILQTAPGMGEIRVAQLMAIVVTPYRFRTSRQLWSYSGLAIEMRSSSDWIPGPEGWQRVNLDKTRGLVRAYNRTMKDIFKGAAVTVLQHRMQPLYNDYLRQQQQGTKPPMARLTLARRIAATVLAMWKNKEAYDPNKYRYER

SEQ ID NO: 405781 - protein, 339 aa, unidentified
MSIQSKQIVQESKPLFAGIDVGAEELILVIRKNGTPYKAQKFTNTPADRARLVKKLVNLPGIIVCLEATGVYHFDLSIALHDAGVALMVVNPKASHNFAKALMKNSKTDAVDAETLAQYAERMDFVAWTRPSDEKLAIRSYARRIDALTRQKAAAKNHLHALSATQETPKAVLRDVNLSISQLEKRIDRLSKETRGLIGKHPDLERVFLLLVGIKGVAETSAIALMGELLLLPPGLSHREWVKFAGLDPRAFDSGKSVHKQARLAKAGNRHIRSALYMPALSAKQHDPHVKAYFQHLVDNGKKPLQAVCAVMRKLLHAIHGMLKYDKPFDNTRFYAIPA

SEQ ID NO: 405782 - protein, 408 aa, unidentified
MKTLHKRCAGLDVHKAEVVACLRVITNRKVGREVRRFPTTTQGLLALAEWLENAGCTHVAMEATGVYWKPVWHILEGHFVLILANAAHVKNVPGRKSDVNDATWLADLLAHGLIRSSFVPPPEIQELRDLTRTRRQLTREIVQHVQRIQAVLEEANIKLCSVITDIIGASGRRMLKAMIAGETDAEKLAALGHERLGCTRAELVEVLTGCVREHHRFLLGQHLRTIEQLEDSIAAFDARIEGALLPFHDIVERLKEVPGLAATATETVIAEIGTNMSPFPTAGHLLSWAGFVPRLDESAGKRRSTRIRKGAPWLKPVLVQAAWGAARKKNSYFQAQFLRLKARHGAKKAAIAVAASILTTVYHMLRDGTCYQDLGPEYFTRRNPAKAAARLANRIRNLGYHVEIRAAA

SEQ ID NO: 405783 - protein, 410 aa, unidentified
MGLFCGIDWATEHHDVAVIDDDGRVVARGRVSNDAAGFAALLTLLAEAGDSAAHPIPVGIETDRGLWVAALRETGRVIYPINPLAASRYRARHAVSGAKSDATDAVLLANIVRTDAAAHRPLPADTELAQAIRVLARAQQDAVWARQQIGNQIRDLLKDFYPAAIAAFAGLPEGGLARADARTILAAAPTPTQAATLTPARLRRLLTKAGRRRHLDRDIERLRAVFTDTYLHQPPAVENAMGIQLAALLRQLEAACTAADELAEAAIAHFEQHPDAKIITSFPGLGMLAGARVLAEIGDDRTRFAEARGLKAFAGSAPITRASGKKTVVLHRHIKNRRLAAVGPIWALGSLRASPGARRHYDARRAAGDWNHQAQRHLFNKFLGQLHHCLQTGRLYNEHLAFPPPLSLVA

SEQ ID NO: 405784 - protein, 376 aa, unidentified
MIETTRYAISVSDPTLYVAFELGLKTWKLAMTPAIGTKPWVRTVPGSDVRGVRELLTRATARFGLPGSARVVSCYEAGRDGFWIHRALTAMGVENRVIDSASIEVSRRARRSKTDRLDALKLVAMLLRVCGGERGVWHEVRVPSVAEEAARQVSRERTQLVQDATRIINQMRSVLATVGTHLPQPRPGAWWTTVCDWSGVALPAAVQQRLAHAHARLALLEQQIAELDALQRARVATAAPAVGLGRLVALKGIAATSASVLIDEGLVWRAFHNRRELGGLLGFRPVPHQSGDSARDVGIDRAGNKRWRSVMIQLAWGWLHWQPSSALAQWYTRRFATGGARARRVGIVALARKLLIALWRCATTGIVPDGAIVKVG

SEQ ID NO: 405785 - protein, 356 aa, unidentified
MRGTNQSEEIAVRGKEVFVGIDVHKESWQVTVRAEGEEVFHGRISSEYRVLRRILNRFVGSEVKVAYEAGPCGFGLHDQLREDGIEGVVVPPSLIPVESGNKVKTDKRDSRKLARLLESNMLKRVQVLTPEDRADRELLRTRRQMVEHRNDVARQIKSKLLFYGIRSPFSAKAGWSRKFIRWIKDLNLEWGSVKVSLQSLIELYEYLSGQIVGLNRKVAELCRSDKYRGRVKLLRSVPGIGVLIAMEILVELQDMERFQRADELASYIGLTPSEFSTGQYVRQGRITRCGNKRVRTCLVESSWHLITKDPWMRRKYERLKQWKGGKRAIIAIARNLIIRIRRILLNEEPYVIGAVA

SEQ ID NO: 405786 - protein, 343 aa, unidentified
MKITTIGIDLAKEVFQIHGVDTHGKAVLRKQLRRGEMAKFFINIDPCLIGMEACGSAHHWARKLGEFGHTVRLMSPQFVKPYVKTNKNDMAEAICEAVSRPNMRFVQIKNVEQQAILSVHRARQGFVKARTAQGNQIRGLLSEFGIVIPQGINAITKRVPEMLEDAENGLPGTMRQLIARLTDNLKEMDRQVNELEAQIRTWHNANAASRKLAEIPGIGPITASAIVATVGNAKEYKNGRQLAAWLGLVPKQHSSGGKQTLLGISKRGDTYLRTLLIHGARAVIRYAESKAGPDSWLGKLMARRNKNVAAVALANKNARIVWALLTKESKFRQDYATVQPTAA

SEQ ID NO: 405787 - protein, 381 aa, unidentified
MRSVALDLGVKKIAYCEVSAGEVVDRRMVNSLSSLEPTLGPGAKPARVAIEACREAWFVHATLTAWGNEVLVVDTTRSRKLGIGQHRRKNDRIDAEVMARAVESGGIPMAHVLSPHRQELRRQLSVRRTLVETRSQYVTTMRGLACALGARLPSCDTEQFSAKMRKAPLNPDVRTAIEPLLALLSPLQEQLAMVEQGLEELCALEPVVAQLRTVPGVGPIVAAQFVSVIDEAKRFRTAHEVESYLGLVPSEDTTGGKRRLGAITKHGNTYLRALLVQSAWSMFRQPGRTDPLQKWALAVAERRGKRIAIVALARRLAGVLWAMWRDDTVYDAELAMRSGVRGLRNAAQSIEFRAQALERAAAKLRQHRARPAKITEVTSSN

SEQ ID NO: 405788 - protein, 347 aa, unidentified
MFVGIDVHKDTHTAVGISPYGEKLFEITVGNYQNDFETLDLKVKEHRGVLSPYIGLEDVRGYGERLAGYLYEKYPLYHVPSILVDRARQNATHPEKSDSLDALGVAKVMIQSIDTLLPYTISQESEKAKQLKEISIDREDLVLERTRLKNQVYTLLYRIYNTKYEQKFKDPFSLKALRFWRNAKPKCDPFLLKTMKRKVRRLLDIHTEVSELEKDMEKLLENNYTIQTASGCGVVLASTIVGEIGDISRFTSPGALSKYAGCSPRERSSGKKTRHVKSRSGNRRLNCAFHRMALAQISRMGNDRARAYFKRKISEGKSKSQALVCLRRQMVNIIWMMLKHKTIYRNA

SEQ ID NO: 405789 - protein, 413 aa, unidentified
MVPAAAVTARSSGVRLEDFVAVPIDVGKHTAMASVVDFTGAVLEKAFEFALDRRGVDELVARVRAAVPVTVSLVRVGLEAAGHYHLPLAGGALPAEWELRLLNPGHVALQRKANGQRGVKTDRVDLVAITDLLLAGRGTVAPAFADPVMTLAGWVAHRRRRSLVRRRTIQQLTTHVDRCFPGLGRVLWSVALTKSGRLILAELPDPARVARLGPARLRTFAAKRGVRMTMPLAERIVDAARNALPVPGADVARRLLAADLELLDDIDAQIIVAEREIEQLLPATPFAVLRTVPGWGPLRVAAYGAAVGDPDRWPSPKQLYRAAGLTPRLYESAGRRRDGHITREGSVPLRVALVDLGLGLWHTEPAARAHGVAMRARGKPGAVIAIAMAHRANRIAFAMVRDQHPWDGCRWAA

SEQ ID NO: 405790 - protein, 392 aa, unidentified
MPVDSSREVTRMFYAGIDIAKRKHEVSIIDTEGRALSQSLSFTNDREGSERLLALFERLNISAGDLVVGMEATGHYWLSLYSWLLEKGYDVKVINPIQSDAFRRLSIRKTGNDSKDSLVIAQLMRFGEYSATRLSEENIHALKQLSRYRLSLVEECGNCKRRVIALLDQVFPEYETLFSDTFGTTSKELPLNCPTPEDMPAISSGKLTTLLTKTSKGRFRDEKANQIRKTASNSFGVTFSRDAFSFQIRQLIEQIIFLEKQTEELEKKIAALLRKTNTVITTIPGIGETIGAAIIGEIGDIDRFDSPGKLVAFAGLDASVHQSGEFSGTRGGNIQTGLAVSPQGDLDGRFQSRLLRSDSVQILPGPQRAGETSSDSRQRRCKKNVQYHFHYP

SEQ ID NO: 405791 - protein, 366 aa, unidentified
MKKDSIRNRNGKGDWEGKKLTIGMDLGDRTSRYCVLGEGGEVLLEGSVATTQKGLSETFAALLPSRIAIETGQHSPWVSRHLSGLGHEVIVAHARNVRLIGESTRKDDRLDAKTLARLARIDPALLSPVQHRSAEAQTHLTRIRARAVLVGARTALVNAIRGLTKAYGERLRKCHPEQIRKETAAELSPELRTALEPLFQEVQSLTERIQHYDREIEKIAQQHYPEVAQLQQVNGVGPLIALTYVLTVDDPHRFRRSRDLGCYIGLRPGRRNSGNSQPQLHISKEGNRYLRTLMVQGAHYILGPFGKDSDLRRWGLKLAERGGRNAKKRAVVAVARKLAVLLHKLWVSGEVYEPLRNHRGEKCAAA

SEQ ID NO: 405792 - protein, 358 aa, unidentified
MAKLSLTRLEAFVSGFETTAFRVGIDVHKKSYALALLREDGACLTWTGPAKAETLLEPVRRFGLCITAVVYEAGPTGFTLARRLEAAGHRVKVVAPSRVPRPVRAGAKCDRLDGIKLAAYADDCRVRPIAVPSESEEAERSLLRRRHALANGRRRCKQRIKAHLLYLGVSAPEGLDHWSQAAVGSLRGLDLNPSAQLTLESLLRELDFHKEELRRVEGQLVELLTSGAQHERLGHLRSVPGVGFLTAASYMLEMFRPERFNNARQVASYLGLAPMVHHSGARKPRGQITPAGQSRLRSLLIEASWVWKSHDSYAAKLYNRYLSQMGIAQKAIVAVARRLAIILWRLSIEQRAYRRQPA

SEQ ID NO: 405793 - protein, 454 aa, unidentified
MVAEGFRGNRGLVPSSPSVRLLNLPALPTTDAAGVRVGRERRAVEVVHARCAGLDISKKDAKVCVRVAGAGRRKTVETVTTWGSMTSQILALRDHLMAERITCAVMEATSDYWKPFYYLLEDAGFDVLLVNARHVKNLPGRKTDVADATWLAQLGAHGLVRASFVPPEPIRQLRDLTRARTAITRERSREGQRLEKLLEDAGIKLSAVASDILGVSGRAMLESLIAGNNDPAALADLAKRRLRSKIPALTEALTGRFTDHHAFLARVHLDLIDQHTAAINDITTRIEATIAPFHGFRDLICTIPGVSTLTADVIIAETGADMTRFPTAGHLASWAGTTPGNNESAGKVKSSQTRPGNPYLQGALGAAAMACAQNPRTYLGARYRRIASRRGPQKANVAIQHSMLIAIWHMGTNGCLYDDPGADYFNRLQPQRAKRRAISQLEAMGYHVTLTHAS

SEQ ID NO: 405794 - protein, 463 aa, unidentified
MRKKVQRKNSGRTNKPKVDWKALDIVHPNAAGIDIGGSEHWVAINPEVDQQPVRCFDCFTADLQQMADWLIERGVRSVAMQSTGVYWIPVFEILQQGGLEVYLVNARHTKNLPGRKSDIAECQWLLKLHTFGLLNNSFQPSDEVRRARTLWRHRGGLVAQASSAIQRMQKALTEMNIQLSNVLSDLSGVSGMRIVRAILDGQRESRVLAALADPQVKASKEVIAKSLEGNWRQELLFVLGQEVEMYRMYQERIAACDLELQQHLRVRASKVDLQAQPLGPRPKGKRARGNAPKFDLRTELYRISGVDWTQVDGIDVPVAQSVIAEVGVDLDAFPREGNFASWLGLCPTNDSSGGKVLNRKTPKVVNRAKVAFRQAASSLIRSQSYLGAQYRRLRTRLGAPKAITAMARKLACLFYRLLKQGQQYVDKGTEYYEERYREQPVRFVIRRAKQLGIEVVGPAPTNA

SEQ ID NO: 405795 - protein, 436 aa, unidentified
MANVVTFEQVNAHAAAIDIGAEKNFVSPAGVEVTCYQTFTADYRRCVEELLQRGTRCVCMEATGVYWIALYEMLEQAGLQVCLVNPKEVKQVKGRKTDPKDCRWIQKVFSAGLVRQSYVPAGTLKELRMMVREREDIIQMGSAYVNKMQKALELMNIKLTLALSQIHGASGIRVIEAIISGQRDPLELLLLCEKSIIDNKADKMIKALEGNYNESWVFLLEQNLKMWKIHQEQISVIDKKLEFLLESLAVNKPIVKGVVPPKPIRHHPPKIEELHQKLLSIYGVDGNSLSGVNDYTLLKLLGEVGTDMSRFETCKQFVSWCQLAPPLERSGKMRRRSKVRHGSKAGQIFRSIAQGLLNSKYIAIGVFMRRLRARTDSKIAVKAGARKLAEAFYRLLTKGSAYVETGTKDYLKQLEEKEKKYLQKLATKHNLILMAP

SEQ ID NO: 405796 - protein, 429 aa, unidentified
MNISTSIAEADSKYVWSVGIDWADEKHDISQRCWADGRYQTFQIGADPVSVRTWLEELKELAGPQGRIVVGFEQNRGSLFEMLREQKDWLDLCPLNPLTLSRYRQSFYTSGAKDDPLDSQLIEELLRKHLDRLRLYEPPEPVLRQLDLLCQLRRKAVDSAVGLENQLRSHLKVYYPLAVELHEDLSSTLTLHFLKRWPTLQSLKRAKAQTLRSFYYQHHSRSQSLIEERLQKIARAEAVTEDGTLIDPLVLSVQGLVNQLLAHKASEAAFDKAVQKLALKHPDYEIFNSLPGAGPQMTPRLMVAFGSNRSALTEPSQMQKKSGFAPVLDRSSQSQRIHRRWCRPKFLCQTFHEFAAYSIPHCTWAKAYYEQLMARGKSHHTAVRALAFKWIRIIFRLWQDHTTYDEERYLRDLQKRHSPLSQKIQLQPL

SEQ ID NO: 405797 - protein, 336 aa, unidentified
MRYIGVDLHTTQITVCYLTEKEEVTIHKFQLCEIERFVSGLSLSDEIAVEATGNTRWFYEQVKEAVKRVVLVNPRQFDVVKNSVKKTDRNDAINLALFLKADMLPEVRAKKEEADKVQSLVGTRTKLVRLKTSLTNKIHALSVSKGRKIRKTSLGSERGLEKILEEDWTQVERIELDIIIEQIRSLKAGIKKLDAAIAQESEKLAGFRNLISISGIGNLSAGILLSVIGDASDFGSADKLASYFGIVPRVSNSNETVNHGRITKRGSKTGRTTLVQCSLSAIKKNDYLKKYYEQVKARRGHGKAKIALARKYLKIIYSTLTNNWVFADFNNFELAE

SEQ ID NO: 405798 - protein, 340 aa, unidentified
MRTIATIGLDIAKSVFHVHGVDAAGEVVVRRKLTRGRVLAFFERLPRCLVGIEACSTSHYWARELIALGHDVRLLPAQYVKPYLKRQKNDAADAEAICEAVTRPTMRFVPVKSPQQQSVMMLHRVRLMLNRQRTQISNALRAHLSEFGVVAPTGRNGIEQLLAVVHDENDIMIPADARLCLRMLEAQLRVVKEQILENDRRVRASARETELGRRLMEIPGVGPLLASAFVATVADPHAFKSGRCLSAWIGLVPKQNSSGGKERLGSISKAGNRYLRQLLVVGSMAVIRYAERNGTRRPWLVQLMARRTTKVAAVALANKTARMVWALMTGGESYREPVIA

SEQ ID NO: 405799 - protein, 365 aa, unidentified
MSSVPSAAELIHLGMDTSMNEIVAGVLRPGEEMPVVSRILNDEESIRRLIGRFPDRRLLSACYEAGPGGYELHRLLTSMGVACDVVAPSLIPKGASDKVKTGRRDAVRLTLMHRAGLLTPVRVPSPVEEAVRDLVRARGDLLDDRKRMQQRLNAVLLRHGRTWRGAKWTYAHRVWVDKQAFDEPALAEAFALYCGGLNAREAELRAAEARLAAWAGRDPLAGPVARLGAYRGIAQLTGLTLAAEVVDWRRFASARAFMGFAGLTPTEYSSGSRTRRGHITKAGPEGVRTALIEAAWAYRYRPAIGVTLARRQAGQSPDTLARSWKAQQRLHARYKKMTARGKPAGVAVVAVARELAGFVRAEMTS

SEQ ID NO: 405800 - protein, 343 aa, unidentified
MEFIGIDVHKKESQVCILAAEGKVIEKRIRTERERFAELLEGRSSARILIEASTESEWVARCLEELGHEVVVADPNFAPMYATRSRRVKTDKRDARTLAEACKLGAYKPAHRTSDARRHLRAQLAVREALVRTRTRYISLMRALVRREGFRVGSGGAEAFPTRLELLELPEHLKAEVEPLLSVMEPLNEQIAALNGTLEQVAQQDEAVANLCTTPHVGPVTASAFVAAVDTPERFDNAHQVESYFGLVPSEMSSGEKQRKGRITKAGNARVRWLLVQVAISMMRLSSPDTAHLRAWAERIAGRRGKKTAVVALARKLAGILFAMMRDKAAFTPPPPKQEAQAA

SEQ ID NO: 405801 - protein, 404 aa, unidentified
MKDTTVRYAGVDWASASHAVCIVGEDGEVAERFEVAHRAGDLTQMCRRLIRAGVSRVAIERPDGPVVDALMETGLEVVVIASRQVKALRERYGSAGNKDDALDAYVLADCLRTDGRRLRPLTPDSPETLTLRAHVRARRDLVAQRVAAANQLRAHLQIVFPGAVGLFADIDSPISLRFLARFPSAASGQWLSERRLGTWLRANGYCGRRNARELYERLAGAPAGLLGDEGRARGAVTGAFVAVLVTLRAQIAELEARIAEQLELHPDGEIFTSLPRSGTLRAAALLAEIGDCRERFPSAESLACLAGAAPSTRSSGKHRAVGFRWAAGKKLRNALIDFAGDSRHANPWAADLYARARARGKTHPHATRILARSWCGVIWQCWQDRTPYDPERHNALQRLVAVEG

SEQ ID NO: 405802 - protein, 459 aa, unidentified
MRKKNQNQKKAKQKVSINQEWPLINPHAAGVDLGAREHWVAVPTDRDPRPVRGFGTFTEDLEALAKWLKDCGITSVAMEATGVYWIPLFQLLERQGFAVLLVNARQIKNVSGRKSDVLDCQWIQRLHTYGLLGGSFRPADPYCVLRSYLRYRDELVAGRSTQTQHMQKALQQMNLQLTQVLSDINGLSGQAIITALLAGERNPLKLAGLIHQRVKASQKEVAKALVGDYRAEHLFQLKIAFELYQTYERNIATCDEVLIKELDQLPDRVKESAQPLPTQSGHKCVPEPLRLALRQKLGVDLTAVEGFGTQVALTVLSEVGANLSRFKTEKHFTSWLGLCPDNRISGGKVLSCRTRRVVNRLSDILRMAATTLERSQSALGAYHRRMKAKLGGAAGITATAHKLARILYALLTHGEAYVRQGMDDYEQKYRERKLKHLQSTAKTFGFQLIQMQKVPESVS

SEQ ID NO: 405803 - protein, 294 aa, unidentified
MGNITAIGLDLAKKVFQVHAVDEAGSVIMRKQLRRGQVLAFFAGLPSCLVGLEACATAHHWARELTALGHVPRLMPPAYVKAYVRRNKNDVADAEAICEAVRRPSMRFVPIKTTEQQSALMIHRARDLLIRQRTMLVNALRGHLAEFGLIEAQGLHKVAKLIAIVLDEEDRRISDIARQVLTVIVSQIEDTQTRIAGLEKQILAWHKNNPVSQRLATVPGIGPIIATAIAATVADPKTFCSGREFAAWLGLVPRQNSTGGKARLGRISKRGDSYLRRLLVNSAQDTYRNAALAA

SEQ ID NO: 405804 - protein, 426 aa, unidentified
MRFIGLDVHKDFCEVAVVEGDACWSGPRVRSTPEDLEVFAQSLGPKDQVVLEATGGALAIARILEPHVGRVLMANPMAVRAIATAKAKTDRLDARTLAKLLAAGFVPGVWISDERTRLLRRLVSRHAHLVRQRTRAKNEVHAVLQRTLKGRPPVSDLFGKRGRAWLGTQDLPADERQTVEASLRHIDFLDGELRLVDRTMAIQVLSWPEVRWIMTIPGMGAVAAAGVMAAMGDVRRFPTSRHLVGYLGLDARVRQSGSGPARHGRISKQGSAEARHLLVEAAWAAMRTPGPLRAFGERIRARRGANIATVAVARKLAVLCWHLLTREEDYAFGQPSLVREKIRRLELAAGAPNRNGYRNPVRVFATPAQRRLEREVGDQAEKAYRRFVKDFRSSGKKGAGATTGARISAARKGQAARQEQAPDPAL

SEQ ID NO: 405805 - protein, 477 aa, unidentified
MKDNRRSPAPRQAAATKHRSWSPLLKRIQPDAAGVDCGATSHYVAVAEDREPQPVRAFSTFTADLHRLADWLVQCGITTVAMESTGVYWIPLYEVLEERGLEVVLVNARQLHNVRGRKSDVQDCQWLQELHSVGLLQASFRPAGEIVALRSYMRHRQSLVEAAATCIRRMQKALTQMNLKLHHLLSDLTGVTGMAIVRDTLAGVRDPQALAAHRDGRCKASEQDIAAALTGHYRPEHLFALRQNFAAFEFHQRQIAQCDQAIEAQLASLAESRPPASRELPAARPRVKLSKNEPRGELRAPLHRITGGADLSQIDGIGPYGALQLIAEIGTDMSRWRSEKHFSAWLTLAPNNKISGGRLLSSKTQPSANRAAVVLRRCAMSLTRSATALGAYYRRLAYRLGQPKAITATARKLAILVYRVLGGEMVYRDPGATAYDQLHRTRLINGLRRRAQEFGLSLINLETGEVLDHALVPQSVS

SEQ ID NO: 405806 - protein, 449 aa, unidentified
MVEPQEIEDEGHERIVERVAAIDVAKASGMVCVRVPHESRPGRRVSRVWEVAATTGAVTGLGDQLVSQGIEKVTVESTSDYWRIWFYLLEAAGLQVQLVNAREARNMPGRPKTDKLDSVWLAKCTERGVLRPSFVPPAEIRVLRDYTRLRTDLTRERTRHYARLEKLLEDALIKVSAVASTMTTKSVRDMIEALIAGERSPRALADLARGRMRAKRAALIEALTGRFDDHHAELAQMLLDQIDALSAQIGTLTGRIEELTSAIPAARGVNADGTTGPGAGTGPDAAVLPAAVRLDEIPGISQAGAQAILAEIGLDMTRFPTAGHLVSWAKLSPRTIQSGASNRSGKTGKGNPYLKGALGEAAAAAARTDTFLGERYRRLVKRIGKLKALVAVARSILVIIWHLLADPAARFCELGSAYHASRTDTQRKARGHIRQLEALGYTVTLTQAA

SEQ ID NO: 405807 - protein, 424 aa, unidentified
MKPHPDVEFAAFAGIDWADAKHDICLQAANSEDREFVVLAHRSAAIEAWAGALRQRFGGQPVAVCLELAKGPLVYALQKYDFLVLFPIHPATLAKYREAFAPSHAKADPTDAQLALELLLRYRAKLKALTPQSVPMRMLLRLVEQRRRLVGDQTRISNRLTDALKQYFPDVLAWFPDKDTLLFCDFLSRWSTLKQLKNARRATLLSFFHEHHVRSQARIEERLRAIKAATTLTDDLAVISPNQLLVLTLVEQLRVTLQAIERFDAEIATVSESLPDYSLFRALPGAGASLAPRLLAAFGEQRERYQSAAEIQRYTGIAPVTESSGKKRWVHWRLQCPTFVRQTFVEWAGATIPRSFWAAAYYRQQRDKGCSHQAAVRALAFKWIRILYRCWQSRTPYDEATYLNALSRRGSPLLASITEVAKNT

SEQ ID NO: 405808 - protein, 344 aa, unidentified
MKEVITIGVDLAKNVFQVHGVDEEGGVIVVRQLRRSQMLAFFKKQPPCLVGMEACATSHHWARQLIELGHEVKLMPPHYVKPYVKRSKNDAADAAAICEAVTRPTMRFVSVKSTDQQGVLMLHRTRELMVRQRTMLVNAIRAHMAEFGIVAPVGIPRVKQLFAVIADGDDDRLPPIARTCLEGLVRQFLLLHEEINVTEKRIHAWHRSNEVSQRLETIPGIGPIIASALTASITDPEVFRNGRELAAWIGLVPRQNSTGGKQRLGKISKQGDQYLRWLLVAGAMSVILHAKRKGTTNLPWLADIIARKPTKVAAVALANKTARIVWALLKQGGIYQKPIAALEA

SEQ ID NO: 405809 - protein, 436 aa, unidentified
MRAVVGLDVGRDQVDICFLVADGSEPVARWRVPNTQPGAEALAARLADLAQQHRVAALHIGLEATGLYWWPLACALKDAPALGPYQAQVYALNPQLVHTFRANYGALPKTDKADAFVIAERVRWGRHLPAPFQVDLRYAPLQRLTRFRYHLVHTLVREKNYFLTFLFLQFSGFCQVRPFQDPFGTTSCAVLEEFTTEELAQAALEELADFVATQGRGQFHDPQAVATTLQRAARDSFRLDKVLAEPLRVVLGTTMATIRTLQRQLKAVDRTIAQELQALPQTLDSVPGLGPVWTAGLVAEIGDITRFATQASLAQYAGLTWKIRQSGQFQAEDTALTKRGNTYLRYYLVEAANSVRVHCADYRAYYQAKYAQSTKHHHKRALVLTARKLVRLVDALLRTDRRYRPSESGQDQKEGALPSRQRPGRHRHPRRAVAVG

SEQ ID NO: 405810 - protein, 370 aa, unidentified
MGNRSMFVGLDVHKDTIDVSIAEGERDGEVRHYGVIASDLEPLDKVVRALRAPDRRLHFVYEAGPCGFGIYRHLTKHGEECVVVSPSMIPKRSGDRVKTDRRDSLMLARLHRAGELRAIYVPDDTDEAMRDLVRAREDAVIVGTQAKYRLKAFLLRQGRRYPGREGWMRPYRRWLTDLSLPSAPQHIALQEYRNAIDETEQRIDRLTEQLRQLAPTWRWAPVVAALQALRGISFITAVALVAELGDLTRFRHPRELMAYLGLVPSEHSSGPSVRRGGITKAGNPHVRRLLAEAAWAYQGIPRIGRQHGYRQEGLPKVVCDIAWKAQLRLTARFKRLVARGKAKPKVATAIARELSGFVWAIALEVSPTPR

SEQ ID NO: 405811 - protein, 347 aa, unidentified
MLHAGLDLSRRRLDVCLLGADGSRLQELQVPPDRDGLRWLALSIYDRHGEQPVQAAIESMTGARFVHDQLELAGWEVEIADAVKAKGLAPLACKTDRVDAWVLAELSRRDLVPAIWLPDPSQRAERERARWRLHLVKHRSALKNRIGSTLMTFGHPRAMSDLFGLRGRQLLEAIELPQPWRGDVAAAVELIDDLDRRIDECAAELQRLGADHPYVPLLLTLPGVAWVLAYTIAAEIGDIHRFGSATKLCGYTGLCPRVRQSGEHDERGPLAKNGPRYLRWALIEAARHAARTPYFRAKYERTCQRLGKRGTKIGAVEIARQLAQAIWHMLTRNQPFAPAGAPLPLVA

SEQ ID NO: 405812 - protein, 341 aa, unidentified
MQITTIGLDIAKHVFQVHGIDAEEKVVVRRQLRRSQVIKFFEELSPCLIGLEACATSHYWARELTKLGHEVRLMPAKDVKAYVKRNKNDAADAEAICEAVRRPTMRFVQVKSAEQQAHLMQHRARDLLMQQRTQLINSMRSHLAELGIIAPQGREGVKELLAIAAKDTDTQLPNDARVSLVVLAAQLHALQTTIGAIEKRIVVQHRANKESKRLQTIPGIGPIGASAIAATVTNPKIFRSGRDFAAWIGLVPRQMSTGGKAKLGPISKQGDRYLRRLLVVGAVSTLRRAKLNPQRYPWVTRLLARRPFKVVAIALANKMARIAWALMISGKVCRSSWFAAA

SEQ ID NO: 405813 - protein, 346 aa, unidentified
MKINRVGVDLAKNVFQLHGADYKGKTVWKRQLSRAKWLAVLCDTVEPGTEIGMEACAGAHHWARQLMQRGHPVKIIPPQFVKPFIKSNKNDANDAQAICEAMARPDMYPVKVKTIEQQDLQAMHRIRDEIKGHRIAKANQIRGLVTEYGLVAPLQLPALRRAIPEWLEDADNGLTFLFRQLLQGLWGDLYALDQRMTELDKQIAVVAQEDPTARRLQQLRGVGPLIATALVATIGDGKQYRKGRDMAAALGLTPRQHSSGGKDRLLGISKRGDAYLRCLLVHGARSAMRTAKDKDDRLSRWIIDLQSRRHANVVAVALANKMARMAWAMMTRDVDYDPALAAASVN

SEQ ID NO: 405814 - protein, 351 aa, unidentified
MVIIGCDFHPGFQQIAVLDTGSGEVKDLRLAHKEEARRFYASLQGEEVLVGVEACGYTQWFEQMLEQMGHRYQVGDAAAIRASYVRRQKTDRRDAGHILRLLVEGRFPALWVPTASERDARQLIVHRHKRVQMRTRVKNQLHALALNQGLRLRWQLWSEKGLEQLRALPLLPYAASRRADLLEQLEAMNADIERLDRMVGKEAEARPAAVRLMSHPGVGPVTALAFVLTIGDVRRFEKSRQVASYLGLIPSERSSGGKQRLGHISKQGNSLLRFLLVEAGHTAVRGDAELKRCYQRLQHRHSTGVAKVAVARKLALRLYWMLRNQINYAQLHGPYAGKPVSFCGAKTRPAA

SEQ ID NO: 405815 - protein, 340 aa, unidentified
MNIKRIGLDLAKNVFQIHAVDHREHVVLRKTLRRDRMAAFFTQLSPCLIGIEACGSAHYWARELTRMGHTVRIIPPRLVKPYLKGQKNDANDAEAICEAVSRPGMRFVAIRTERQQTLQAEHRVRARLIRARTALSNEIRGLPGEFGVVLPAGIAQLRKALPEIVSQQVQWDECFIRLLCELSEELQGLDERVARHDRRLQQSARDDIRIKRLLAIEGMGPVVASALVAAVGDGRQFRSGREMAAYLGLVPRQHSSGGKARLGHISKRGDRYVRTLIIHGARAVLNACQNKTDRRSQWLQGVSERRNRNIATVALANKNARIAWALLSREEDYHGIQVTG

SEQ ID NO: 405816 - protein, 477 aa, unidentified
MARNRKSDKSKKRQRPIRSLETIQPNAAGIDLGSREHWVAGPPQEDRSPNVERFGTTTPELLRLADWLAQQGVKTEAMESTGVYWIPLFEILDSKGFEVLLANARQVTHVPGRKTDMLDCQWLQLLHACGLLRGSFRPSDDVCRLRALMRERNTMVQQRSDWVRRMQKSLNQMNVCVHHAVSDITGVTGMTIIRAIVDGERDPHALARMRDRRCRKAEEQIAEELTGNWRPEHLFNLRQALKMYDQLRAVVTDYDSEILAYVQTLQPADNNDTDVPPPASKAKARNIAKRGQEPLRQALYQFSGFDLTTIDGIGVDTASDIISELGLDFTVFPDENHFVSYLRLAPNLSISAGKKVSSKSKANTCTRVATALRMSALTLRNSKTALGAFYRRMAWRKGASVAVFATARKLAQLIYRLVRYGQAYVDAGAKAYEARFNQRRLKFYTKALNDMGYNVEPLAAVEASTVEASTAAEASIV

SEQ ID NO: 405817 - protein, 295 aa, unidentified
MKCKVIGIDLAKRVFQACALSDTLQPLFNRSITRKKLAATVAQWPSTLIAMEACAGAHYWGRVFEGMGHRVMLIPPQHVKAFTRTHKSDVHDALAIAEASLRPRLHAVPIKPVDQQDAQLLNRLRQRLIQQRTRTLNQIRGFAGEYGVIFPMSRQQCLLQLPLALEDAENSLSFIAREQLALLRDEVIEITTKLETLQQQQRAKAEQDPAYARLLAIPGFGPIVTAGFLGSVGNGHQFQRGRDCSAWVGLVPKQDGTGGKIRLLGITKNGDRHYAIYWSMPPVRLFVGSTNAMMP

SEQ ID NO: 405818 - protein, 342 aa, unidentified
MQDSSYFVGLDVHRQVIAYCVKTAAGEIVQEGSVAARRVALDEWLKTVPGPWQGALEATLFSHWIYRYLRPHAAGLWMGNPARMKAICSAKKKSDKLDARTLADLLRAQLFPACYVIAEELEGLRRQMRFRRFLVRETVACKNKAAGLLMELGAEYEGRRLHSKRYFASLLKDNPVIDSELRPLLAFTREQIEALERMDGAILRWLENHPLLKARLEALTAIPGVGSVTALTWALEIAEPARFHSLKQAVSYCGFASALRESAGKQKRGPLSKQRNAHLQSTLIEAAKLAPRYHPTLKTVYEKACLQGSKNRATLTVARKLTAYLLAADRAFFAQQSHSAAA

SEQ ID NO: 405819 - protein, 343 aa, unidentified
MQAVTTIGFDIAKSIFQVHGIDAEGQAVIRQQLRRSRVLGFFGKLSPCVVGVEACASSHHWSRQLQALGHTVRLMPPAYVKPYLKRQKNDASDAEAICEAVQRPSMRFVPTKTPDQQACLMLHRTRHLFIRQQTAVINAIRAHLAEFGIVAPVGRNGVEELLDVVANPDDGRVPEIARECLEALGNQLRRLKGQILAFDRRINAWHRSNETSHRLDELPGVGPALATALVASIPDPRVFRSGRDFSAWIGLVPKQNSSGGKERLGNITKQGDRYLRSLFCAGALAVIRYAKIHGTKHRPWLAKLLERRPTKVAAIALANKLARMAWAMMAKGERYKEPVALAR

SEQ ID NO: 405820 - protein, 435 aa, unidentified
MEEVEDEPLFCDRVAGIDIGKATVMVTIRVPSEARAKGRQQETREFGTTRRELLALADWLRGWQVERAGMEATSDYWKPVLFTLEQEGFDCLLYQASQVKALPGRPKTDKLDSVWLARITEQGSLAGSFVPPEEIRRLRTHTRYRRKLVQMRTAQKERCEKLLEDAHLKLSSVISDIHGVSGRDMLRAIAAGERNPKVLAQMARGVMRSKIARLEQALDCSFFTGEHAFILTMMLDSIDSLTAQAGVLDARIADMCQPYQRQLGQLDEIPGFGTTTAQDLIAEIGTDMNVFPTAGHLASYARQAPRVKESAGKRKGKNATGRGNPYIGGALGEASISAGRTQTFIGEKYRRLTRRMPKRKAQVAIMRSQLVIAHALLSDPDARYQDPGPDYYERKADIRRRARNHARALERLGYKVTLEAIDPGTGELHLAATAG

SEQ ID NO: 405821 - protein, 315 aa, unidentified
MTTKAEIHVGIDVSKDRLDLAVLEEKRIEQYANTASGIKELVDEMIELAPSLIVVEVTGGYERAVVNALFEAGLPVARVSGYRARQYAHAKGRLAKTDELDAVNLADYGKHVQLRLFEAKSEQGQRISGKLARRRQLGEMLKAEKNRLRLVYGDIGASIERVIEFLQSELKQLDEEIRAYVDNDPEWLEQEQLLRSVKAVGPVTAVTLLAELPELGKLDGKQIASLVGLAPINRDSGKRSRYRKTGKGRPSVRSVLYMAVLTGIRYNPVIKKQYDALVSRGKVKKVALTACMRKLLTILNAMMRDQQPFRYAATA

SEQ ID NO: 405822 - protein, 348 aa, unidentified
MLADELDYVIGVDPHRDTHALAVVDVRSSGVVFETTAVADGEGYASVLRLADQHAPGRRAFAVEGTGSFGAGLARFLVSHEERVLEVGRLGRERSSGGKSDALDAIRAARSVLGQTRPARPRAGGEREALRALSAAREGAVTARRAGLCQLRGLLVSAPEPLRAELRSLTRAQLLRRLAAVRPEGRQDPELRGTLLALRALARRVKALTVEERELAREIETLTRKLAPQLLAQPGVGPLAAAQVLISWSHRGRITSEAAFARLAGCAPIPASSGQTVRYRLDRGGDRRLNRALHMILVTRRRTHAPTIAYIERRIHEGKSRREAIRCLKRYLARNLYRLLENGSPLPT

SEQ ID NO: 405823 - protein, 367 aa, unidentified
MKKHTTMNKPVSATDVSVCTTVAVDLAKKVFQVAGEDAQGQLAYEQRIKSREAFQVFLQKLPEGVTVLMETGPGAQAWARLLQAQGNLVRILPAQRVAEHRSGAKNDRNDAHAILRAGRDSSIASVPVKSVAALAMQAWHRVRRGYVRRRTAMGNQIRGLLLEQGIALAQGDVGLKQGVTRVLEDARQPLPALLRELIDEMLNEWKRLGERIAALTGRLEACAAADPTAKRLMTVRGIGPITATALLAKQVEPERFANARQFAAYFGIVPDQHSSGQKVRLGKMTKRGDAYVRSLMVVGSHAVLKQLRPDSEHPDDRRLQRWLQRLGRKGAAVRLANRNLRIAWVLLCSEQTYQRKPNACREMEMSH

SEQ ID NO: 405824 - protein, 412 aa, unidentified
MEVMYPRCCGLDVHKSSISACVLLAQSGKPLKHIRRFGCTTRELRELVVWLQEFDVEHVAMESTGVYWKPVWNVLESHFQIVLANAQHIKAVPGRKTDTKDCQWIAELLQHGLLRGSFIPPLVIRDLRDLTRARTSLSQEHSRIASRIQKVLEDANLKLASVASNTLGKSGRAILAAIIGGEESPERLADLALGHLRVKIPQLQAALEGRVREHHRFLLRSLLRQLQFLEAEIASLDARLDQLGQEQGELADALNRWITVPGVDRVAAWSFIAEMGADVSQFPTAAHLASWAGVCPGNNESAGKRISSKIRKGSPWLRRMACQCAWAAARTKNTYLSAQFKRLAARRGRKCAIIAVAHSILVIGYHLQRRSCTYTDLGSNYFDRLHADGLKRYLVKRLESLGLSVTLQPRTA

SEQ ID NO: 405825 - protein, 386 aa, unidentified
MKTVAGLDVHKDSVYLCILRENGEKIERVYGVLTPQLDSMRDFMAKNKVSEVAMESTSVYWIPIWRVLVDSFELKLVNPYFIRQLPGRKSDVKDAQWIAECVMKELIRGSFIPSPLVQRLRLYDRRIFEINAELVRKYSKIDAILQRCNIRLSNYVSNTDCKSYKAVVKQISEGVTSPQELLRHVHKRIINKHGEDTILAALTGVVSDAEIDMLAQYVAESAILEDNKNKCIEKMREICNSEFEEQMKNLQEIPGVSERSALTVLAEIGPDVNAFPSAKHLVSWCGFNPRNDESNKKIKSNKITHGNRFIRIASVQCAWAASRTKDCYFSKFYAFHTQVRKKFKLKVVVAVARKVLVCIWHILKFNVPYKDFEPQKSVTKDCTQFA

SEQ ID NO: 405826 - protein, 445 aa, unidentified
MSNGSGLSRGDRNRNARLARLRELVPLGNAILGIDLADDKQAAVVTDHDSRVIARRRVSARAWELGGLLDWAVVAAAGAGFASVTVACEPTGHRWRVLDQLAVERGLALVCVQPLLVYRAREGEDLTWDKSDPKDAVIIARLAAGLRCYEPERADAVWARLRHLGARRSALIADATAEVNQVRDLLECAWPAVLAAAGVPFRSATWRAALAVTLDRCAGDLARVRRLGPARVESAVRRELPRWGARRPCLRIIRAVFAALADPAGVRVHRPGALERARLVLGDWRETRARLADVEARMVAVLDDLGLTGLVTTIAGLTPAGAAAILAETGDPARFTSPRALVKHAGLCPRDNASGGYQGKTSISGRGRPALRVAAWRAVWAALPNNPVMAARFAYLTTRDHNRLARQQARTACAAALLRWIHVVITRRIAWDPAIAGRTPPCRAA

SEQ ID NO: 405827 - protein, 407 aa, unidentified
MDRMQQPGAFAGIDWGGHEHQLCVVDGAGSKKLELRVTHDVSGLDELVRALALHGEHVPVAIERAEGLLVEHLQAHGHPVFPVSPRISARARERYRVAPVKDDRFDAFVLADTLRHEHAHWRALAVPSSLLAELRALTRDRGRLLETQQATEAQLRAILECYHPAPARLFSSLDRQIALAFVADYPTPAVASRVRTTRMAGFLRRNAYTGRVPAQVLAERMRANLLSGAEGTIAGKSLSAKTFAHLLGVMNDALAEFDDAIASVLAEHPDAHIFASFPGVGPILTGVLLAEIGEDRTRYPSPEALLAEAGLAPVTRSSGRSRSVRFRYAANTRLREATMWWAFNSIKTSPWAAVAFRQARDERGQRYHRALRGLAARWMRVAWRCWQDGASYEPARHAAAANAEAAA

SEQ ID NO: 405828 - protein, 385 aa, unidentified
MTTTGQVSTFIPRDYDVFAGLDVDKRSIAITFTDHGTMRKSLKLPYSARQLLNYTGKHFPGQRVAFVYEAGPTGFGLHDELMAASQYCLVVSPSTVPSAPRNKVKTNRLDSKKLSEGLRGGQLRGIHVPPSSYRELRHLVQLRDTQVAQLTATKLRIKSLLLYEGIAFPAVDGKWSGRVLRQLETLPCNATVRFKLDQLIDTLQFHFLSAAKVQKQIRYFCQNDPELNQCISFLTSLPGVGTITATHALARLGDWRQIKDVRQIAGFLGLVSSEHSTGDKENRGEITRIGDKRLRSKLIQCAWTAIRKDPELRSFYRRIYERHPKKVAARKAIVAVARKLTTRMYAVLKEQRPFVIRADNSIAPLTAEETTGHGERLDAAQNDQP

SEQ ID NO: 405829 - protein, 415 aa, unidentified
MGLPRWVGRAVGLDVHREFCEVAICEEGVTRSAGRVPATPDGIKTLAGSLLPSDRVALEVTGSCWEIARILEPHVNRVVVVSPDDTGITSARAKTDKLDARTLATLLWKGGELEAVWMPDERCRILRRRLARREQLVRSRTRAKNEIHAALQRRLQAKPPCSDLFGVKGRQWLASLELPLEERESVNAAMRHVEFLDAEIAAAEKLIAQQALSWPEIRRLMTVPGVNLICAASFIAAIGDLNRFLTSRKLVAYLGLDPRVKQSGEGPARSGRISKRGSPAARWALVEAAWTAVLQPGPLHGFYERTKTRRGHGKAIVATARKLAVLFWCMLTRGQDYAHQQPSLTRKKLRRLEITAGARKNTRQATGVWSTNAMMRQAERELAQQAEASYKRMVQDQLAGGRARKAGASVTPERA

SEQ ID NO: 405830 - protein, 331 aa, unidentified
MEQRKTIIGIDVSKKTLDIFIKTLDVYLQISNNAEGFKKLLALLKTSKLKLEDCFFVLEYTGGYEYHLVQFCQSKQISYVRISGLAIKRSMGLVRGKNDKIDARRIADYGDEKQSKLEAETASLDGIVRLKRLLSQRDVFVSDRKAHQNRYQEIQYMMDLPEKDSMLKRYKKIADELQKLIDKTEDEIRKLIKANDAFQFNFDLITSIKGIGEVNGWTMIAYTENFTSFDNARQFGAYIGVVPYPYSSGTSIKGKSRTSKMANQHIKALLDMAARAAINHDRESTLYYERRIAAGKHHMAVMNEIKFKLVRIMFAVVKKQEPYVDKYKNVG

SEQ ID NO: 405831 - protein, 352 aa, unidentified
MLIIGCDFHPGFQQVAIFDNQTGEYQEKRLSHRQEAEQFYRSLAGQTVRVGMEACGHYPWFERLLAELGFELWLGDAAKIRASVVRKQKTDRRDAEHLQVLLREERFPQIWVPTLEERDARQVLVDRHKQVQARTRTKNQLHALALSQGVQRKRKLWTEVGRAELEKLELLPYAAIRRKKLLETLDRLEAEIAALNRQVDEEVKQRPAAMRLMTHPGVGPVTALAMVLTLGPAERFASGRKVGSYFGLIPSEHSSGGRQQLGRISKQGSSFLRFLLVEAGQSAARYDAELGRFYRRLAVRKHRALAKVAVARKLATRLYLMLRENWNYAQLCKAVVQASPSHSVDGRQKPSV

SEQ ID NO: 405832 - protein, 412 aa, unidentified
MEVLYPRCCGLDVHKSSITACVLIAQSGKPLKHIRRFGCTTRELRELVAWLQEFAVEHVAMESTGVYWKPVWNVLERHFQIILANAQHIKAVPGRKTDTKDCQWIAELLQHGLLRGSFIPPLVIRDLRDLTRARTSLSQEHSRIASRIQKVLEDANLKLASVASNTLGKSGRAILAAIIGGEESCERLADLALGHLRAKIPQLQAALEGQVRDHHRFLLQSLLRQLYFIETEIELLDARLDQLGQQHLDLAEALNRWVTVPGVDRVAAWSFIAEMGADVSQFPTAAHLASWAGVCPGNNESAGKRISGKIRKGSPWLRRMACQSAWAAARTKNTYLSAQFKKLAARRGRKCAIIAVAHSILVIGYSLQRKRCAYADLGSNYFDRLHAEGLKRYLVKRLESLGHSVTLQPRIA

SEQ ID NO: 405833 - protein, 345 aa, unidentified
MTQYKRIGLDTSKAVFTLHGVDQQDRPLLRITLRRPQLLAFFKRLPPTEIAMEACGSAHYWARELTSLGHEVRLIPPQYVKPYVKRGKNDRNDAEAICEAAGRPGMHFVPVKSVTQQAQGMVLKVRETLVGQRTQLVNTLRGHAAEFGVIAAKGIRQVAPLLAAIDAETTIPPEAKDMAALLGQEIEHLDTRIKEIEARLIAAHKANEVSQRLTTIPGVGPVTALTLATEIDPAAFESGRHLAAWVGLTPKEHSTAGRQRMGGISRAGNERLRVLLVIGATSVIKAAVRPGSKQMTDWLRALLQRKPRKVAAVALANKMARVAWALMMRGNVYRRPTAAAGAAAA

SEQ ID NO: 405834 - protein, 373 aa, unidentified
MEIERTFVGLDVHARSVVACALDDRTGELSRARLVPDNETVLAWLQQLPGPVAVVYEAGPTGYGLARFLTGRGVRCVVAAPSKMHRPSGDRVKTDAKDALLLARLLRLGEITAVRVPSLVQEAARDLVRVREDVRADLMRARHRTSKLLLRQGIVWSGGTAWTGAHEQWLGQQRFDLAGLQAAYDTTLETVLLASSRRARLDKAIVEMAHEVQWWPTVARLQCLRGVSTLTAFGLAVEVGDWTRFSGSTIGAFLGLVPTENSSGEGRHQGSITKTGNTHARRLLVEAAWHHRRPYRPSKTMRDRWDVAPAPARARGHAGNQRLHERWVRFNERKKRTVIANVAVARELAGWCWSLATLTEDAPPARNVRGGRR

SEQ ID NO: 405835 - protein, 462 aa, unidentified
MASRSKAPKGAKEAQAIDGLPVIRRNVAGIDLGSKDHWVCAPSRDGSGREVAKLGATTPELQRMVEWLKERQVESVALESTGVYWIPPYEVLEAHGFEVRLVDTRQLAQVPGRNKKTDPKDCEWIQRLHSCGLLKGSFRPGEEVCKVRTLMRDKGNLVAEAGDWVRRMQKALDQMNVRLHRAVVDVDGVTGMASLRAIVAGERDPRKLAQLRDRRCHKNESEIAEQLTGHWREDHLFSLQQSLKMYDSIQERIGEYEKEILKKLAAMAGERRGEEAAPLKNAHKAQAIRRRGQEPMRQALYQMSGVDLTQIDAIGVETVAVVISEYGPDLSSFPHEKEFVSHLRLAPYVPSSGGKQLTKKKRRNSASTRVAAQLRMAALSLRNSKTAMGAAYRNTARRLGPDVAVFVSARKLATLIYRRLRWGAAYVDEGLEAYEKRYQQIRIKSLTAKAKDLGFKLMPMTA

SEQ ID NO: 405836 - protein, 307 aa, unidentified
MWIIGCDFHPSWQQMAWCNSETGETGEQRLEHSNGEAERWYGQLPVGSRIGLEATGNSQWFVELLQRLGHEVWIGDAAQIRASYVRKQKTDKRDAAHILRLLLESRFPRLWRPSAEQRDIRQLLIHRHKLVEIRTRVKNGLQHLAMNRGMQKKRQLWSEAGQRALRELAMPGWAGCRRQDLLETLAYLDRKIAPLDRAAEETAQRDKMALLLKTQPGVGAITALAFAVTIGEASRFPRGKQVASYLGLIPCEHSSGGKQRLGGISKQGNRFCGSCWWKRRRVRCVVTRVCGGRIYTAATASRRAWPR

SEQ ID NO: 405837 - protein, 375 aa, unidentified
MMKNTRYVGLDVHGETIAAAMGEEQGKVRSLGQFPNRPEAVRRFIQQLGGPEGLKVCYEAGPTGYALYWLLTKLGVACEVVAPSLIPRKPGDKIKTDRRDAEKLAQCYQSGTLTCVWVPDAAHEALRDLVRARAASKRDESRAKHRLVKYLLRNGLRHPDDCRAWTHPWWRWVQAIKFDFETQQVTLADCVAEVLHQRERLARLDLAIDRAIESAPAEKKAVVEALQALRGVAKLTAVTIVTEVGTFRRFRKPTELMGYTGLVPSEYSSGSRQAKGRITRTGNAHLRHVLGEAAWHARHRPWLNVRLKKTLPTLPPGVSEIAWKAQERLHRKFTKLTYHRKPAAKVATAVARELVGFIWAIGRLVENRAAADGTK

SEQ ID NO: 405838 - protein, 387 aa, unidentified
METATPAGQSQSFASGEAIPLFVSLELSRARWLVTSLSPGRDKISRHSVVGGNITDLLHLLADLRMKAEQRTGSTVKIVTIQEIGFDGFWIHRVLASNAIESQVVEASSIAVPRRRRRAKTDVIDGELLLRTLMAFKRGEPRVCAMLVVPTPEEEDRRRLSRERKTMIKERIEHINRIKGLMACQGIAGFEPMRANAREKLEELRTGDGRAIPERMKAEIRRELDRLDLLRRQIAEVEAERDTLLQAEDAPKASPGAQLLKLRGIGPEFASVLWHEGLYRRFANRRQLAAYAGLAPSSWRSGDMKKEQGIAKSGNARLRTTMIEAAWLWLRHQPGSALSQWFQERVRSDRGRLRRVSIVALARKLLVALWRFTMRGEIPEGASLKAA

SEQ ID NO: 405839 - protein, 377 aa, unidentified
MTIISATTSNEQSIYAALELSKNSWLLAIQDPCRDNPSLHPLPGGDADGLMAKLSAARDRVTKDTGQTPAVTLCYEAGYDGFWLARYLEQRGVTCQVMEPASLQVNRRARRVKTDRIDVESILHTLIAWCRGERHVCSMVVIPSVEEEDLRRCHRERDRLIRERTAHINRIKGLLFGQGIRGINVKSRYKTLKPAELVTADGRPLPDHLGREIAREIERLAQVQAQIVTVEHERDHPVTTCAVTEHKRHDLLRLKGIGPSLSSTLTREVYYRRFANRRQVASYIGIAPSAYDSGDGHRSQGISKAGNRLARVAIVEAAWLWLRHQPDSALSQWFHDRTQGQKGRIRRIMIVALARKLAIALWRYLETGLIPEGAVVK

SEQ ID NO: 405840 - protein, 346 aa, unidentified
MTIVETRAITGGVDTHADVHVAAALDPVGGLLGVREFPASPAGYAGLLSWLGGFGTIALVGIEGTGSYGAGLARHIAAAGVRVVEVDRADRQDRRRQGKSDPLDAVSAARAAQSGRARGAPKGRDGAVEAIRALMVAKRSAAGERTRTINQARALILTGPDDLRARFAQQAPAALVAGIASLRPRPGDVAGHATRVALREPGRRAAFLDGQLERLDELIVPLVSARAPGLLALYGIGPNTAALLLIAAGDHPGRLRSEAARGHLCAAAPIPASSGKVTRHRLNPGGDRQANHALWRIVFTPMGSDPATRAYVERRTKEGKSKAEIIRCLKRYVARQVYPHLRPAAD

SEQ ID NO: 405841 - protein, 336 aa, unidentified
MPHYCGIDLHSNNHVVVVIDEEDKRMCEKRLGNDLSLTLKALSPYRESLQGIAVESTFNWYWLVDGLQEHGYDLQLVNTAAVVQYDGLKYSGDHHDAFHLAHLMRLGILPTGYIYPKEQRAIRDLLRRRLSLVRTASAQLISVQSQLWRSTGLRIKSGELRKLEFAPPLVDDYTLQAVQAGLAVYQAIQREIDALEQTAHQAVRLTEAFKILQTITGIGKILGLTIMLETGTIDRFAGAGNFASYCRCVDSKRTSNGKKKGEGNAKAGNKYLSWAFSEAAHFAVRFEPLAQRFYERKKAKTNGIIAIRAVARKLARASWMMLRHQVPYDARRMFPG

SEQ ID NO: 405842 - protein, 385 aa, unidentified
MSQLNDLSRSLTSLEQDNTIIAVIEMSQSSWLVAGIVPGIERHPLKKLEPNEGELLRLLMRWRAEAIKMGCTITRIAVAYEAGRDGFWLARWLRAHDIETYVIHPTSVAVSREHRRAKTDRLDTGLLKRVFIGWLRGEPDHCHMVTIPTLAEEDAKRPNREREGLVRERTRIVNRMKSCLARFGVRSFKPTLRKAPERLATLVTPEGVPLPANTLLELRRDMVRLRFIMDQIKEVEETRAQRLEQAPQEKSHAMVRLLARVIGVGIETADMLVHEILSRSLRDRRAVARYAGLTGAPDESGSRRQEKGLAKAGNARVRRGMIQLAWRFLLFQKDSALAQWYRTRTESAGKKRKTMIVALARKLLIALWRLATIGEVPVGVVLRAA

SEQ ID NO: 405843 - protein, 383 aa, unidentified
MRKIQETLQAQSTTTQDIMYIAFELSNSTWRLAFSDSNKKRHVTIKARDLKQLEIEITKAKRRFGLKDNVQIKSCYEAGRDGFWLHRYLLSKGIDNLVVDSSSIEVNRRKRRVKSDRLDAGNLLRLLMRYHGNERQVWKVVTAPTVKEEDARHLHREIETLLRERTRYRNRIRALLVQHGLDVKNPSRKNFLKVLNTLRTWDGQVLPESMKARVVREHERLRMIEDHIKLLKKEREQRVKSKETASFQQVAQLRELCGIGVNSSWVFVMEFFGWRKFRNRREVAALAGLTPTPYDSGGSQREQGISKAGNKRIRTMAVEIAWCWLRFQPHSKFSRWFNERFASGGSRMRRIGIVALARKLLISLWRYLEHGVIPEGAIIKSAS

SEQ ID NO: 405844 - protein, 359 aa, unidentified
MLKYALGMDVSKKDIHVCLSVIDAKQQVKVKASSKFANNVQGFKALLVWVNRHKKESDIPLVNVIEATGVYYEACALFLFKAELDVAVVLPNKAKKYLQALGLRTKNDKIDAVGLARMGAEQCLELWQPMDEFFYTLRAMTRHHQSLQELKTNINNQLHADEHSIYSSKAVIKQLKKLITTIEKQLTETDQAIHAHLYSNDEVAERLDHIIGIKGLSYMTVATVLAETNGFVLFRSAAQLVRYSGYDVIENQSGNHKGKTKISKKGNSHIRRAMHMPAFNVVRYNEGNFKAFFERILERHHQKMKAYVAVQKKLLVLIYTLWKKNETFKPNATVNTSGNEKTVHSFALTKGQINEVAPA

SEQ ID NO: 405845 - protein, 348 aa, unidentified
MTIVAEKYEYVIGIDTHARTHTYAIINTRTGSKEACQAFPTNPAGMKRSVAWITKRTTGTLLAAVEGTRSYGATITHALTENGIPVVEVKPPRKQARAGVGKTDEIDATAAAMSVLHQDTERLLTPRADGVRSALNVLVAARERIDAERTRNRNALNALAREVTLGIDARKALTDKQIKEISARREHSTDAVSQRYARAEAIRLAGAVLEADKLLAENKEQMAQLDEQMAPGLIHEFGYGPVTVAWILIEYSHPGRVRSEASFASMAGVAPLQASSGNTTRHRLNRHGDRMLNRAVDVIAKVKMRTDTKLKEYVDRRTAEGLNYREIKRILKRYIVRKVFRQLQVLMA

SEQ ID NO: 405846 - protein, 315 aa, unidentified
MTDTPTYAGIDVAKDRLDVVLRPSGEYVEATNDERGIGSVVRRLRKEDMALAVLEATGGLEQPAAASLAVAGVPVAIVNPRQVRDFAKATGKLAKTDRIDAAVLAHFAEAVRPEPRPLADEHARELSAVVLRRRQILAMTTAEANRARTAPKAVRKRIEAHLRWLRKELARVDGELERVVKESLVWKERAALLMSVPGVGPTLSATLLAELPELEHLDRRRLAALVGVAPLNRDSGTLRGIRTVWGGRSEVRTTLYMATLCATRHNLAIREFYGRLVASGKPKKVALTACMRKLLTILAAILRNRTPWQPRLLPA

SEQ ID NO: 405847 - protein, 375 aa, unidentified
MHGGRTIGEYSEIFVAFDVAKRKHAVAVAESGRRGEVRFLGEIENSGTAIERTLKKLSGRHGRLHVCFEAGPTGYGLYRQVQALGHACTVVAPALIPRRAGERVKTNRRDAVTLARLHRAGELTGVWVPDAVHEAVRDLVRARQAAADDLRRKRQQLLSFLLRQGRIYGAGGHWTLAHRRWLARQSFEHPAQQIVFQEGVDAIEDAAQRLHRLEKQLAIIVPSWSMAPVVAAFQAMRGASFLVAVTFAAEIGDVRRFDTPRQLMSFLGLVPAESSTGDTIRRKGLTLAGNRRARRALVEAAWTYRFPARVSEALRARLDGLPKGIRDIAWKAQIRLCARYRRLSAAGKKLPVVVAAIAREIAAFLWAIGREVAPM

SEQ ID NO: 405848 - protein, 406 aa, unidentified
MGAVEVRYPYCAGLDVHKKSVVACVITPEGEETRTFGTMTKDLISLSDWLIQHQVTHVAMESTGVYWKPIWNILEGNFELLLANARHIKAVPGHKTDVRDCEWIADLLRHGLVPSSFVPDRPQRELRELTRYRVSLVQEKNREVNRLQHTLEGGNIKLSSVATDVMGKSGREILEALLTDKADPDVMTEMAKGRLRTKLPALREALAGRFGPHQRFLVARHLAHIDYLDEAIAEVMAEIEERMRPFEEEVAILDTIPGINKVAAQGILAEIGTDMSRFRTHAHFASWAKVCPGNNESAGKRKSTSIGQGNRWLRRLLVQAARAAARTKDTYLAAQYRRIAARRGGNRAAIAVAHSILIIIYYLLQRRCTYSELGGNYFDEREREATVRRLKSRLERLGYSVTKKVA

SEQ ID NO: 405849 - protein, 339 aa, unidentified
MNKTNTIGVDLAKNVFHLHIQDSKGHVLQKLKFGRSQFQHFLATTPISQIVFESCSTSHYWYRRATHHGHQARLIHPAYVKPYLKTNKNDFNDAEAICEADSRPTMRYVNAKTVAQQDIQLLHRIRQRVVQQRTALVNQMRGQLLEYGIAIPNGISQVRSRLAGILEDGENELTPFARVLFSSLSQELYGVDDRVKTLDKEVKQLANEHPICQRLMEIPGIGPMIATAVISAIGNASNFKNGRELSAWLGLVPKQYSTGGQQRLLGISKRGDGYVRALLVQGAISAITRCKGRCDSQLVWARQLQATKGLQKAAIALANKMARIIWSIMARDRDYVMAM

SEQ ID NO: 405850 - protein, 435 aa, unidentified
MNFIGVDLHKKSITVCVMDEKRKVLARKTFACTQTDEIVEFCRQFRPFKVVVEATASYVWFVELVEPLAEKVVLANPKKLRVIAESTKKTDRLDAQVLTEFLVLDMIPESYQPTPRQRQHRALVRHRQYLQGRITSVRSKIRHILSNYNADRKDLFSANCGPAYLKEVRLSDVDRFVIKQLWAEWQDHLAQRLAVSKKLKAFVAKAPQREAEAREILKTAPGVGPVTAEVVLSELGDISRFRNAKAVCAYAGLVPVVRQSGERKSKDMKITKEGSGLLRWALVEAAWRLVGNSPKWAALFARLTHRSGKKRAIVAVARKLLCVLYAMLRTSTPYKIVTTPTAAPPTTGKKLVRTSTPDQTTTTETTAPRTTRKRLVRTSTPDQTTTMETTAPRTTRKKLLGTSTPDQTTTTGATAPRTTGKKLVRPSTPDQTTTP

SEQ ID NO: 405851 - protein, 368 aa, unidentified
MILRMGIDIAVRAPHQASLADARGELVWSGHRFGTTAADLERLWDRLPADHRPEDLTVVMEPTRNAWVPLAAWFRRKGAQVVLVSAERSADLRSYYAKHTKSDRSDSVLLARLPLLHPEGLHPERGIGPGDPLRRATKLHSTLVKRRTTSLARLDALLEILGPDWHAAFDGHLGNQTPLRFLAAGYADPHTVRRLGRARLTRFFYRHSHGAFGETLTEQILAAAGASLQLWQDDISFPDLAEDIAIEARLALALTEEIKELDERITVLVHDRDPDGIITSASGVGAVTGAVILGRLGDASRFSSLAAARAFSGLIPSLNASGVSGSQIPEQIRKARTTTKGTGRRSKESQRAPSTGPSSHHARRPGAA

SEQ ID NO: 405852 - protein, 358 aa, unidentified
MAGKVTETAVVGGVDTHKDLHVAAVVDQNNKVLGTQFFSTTRQGYRQMLAWMTSFGALKRIGVECTGTYGSGLLRYLQNAGLEVLEVTAPDRMERCKRGKSDTIDSECAAHAAFSGIRTVTPKTRNGMIESLRVLKTCRKTAISARRVALQIIHSNIISAPDELREQLRNMTRMQLIRTLGSWRTDASEYRNVTNVYRISLKSLARRYLELHDEIADLDVMIAAIVDELAPELIKRNAIGYESASQLLITAGDNPQRLRSESGFAALCGVSPVPVSSGKMNRYRLNRGGDRAANSALHIIAIGRLRTDDKTKEYVARRVAEGHTKMEAIRCLKRYISREVYTLLRNQNRQINSIPITA

SEQ ID NO: 405853 - protein, 322 aa, unidentified
MYKSKEFIGIDVSKDTFDVWSPSFGHTCLDNTRKGFRKLKKQLKENSWCVMEATGSYHQLLARYLYDSQIIVSVVNPMVIKRFIQMKLQHNKTDKSDAKMIALYAREQPLKVWEPDPQYIEQCKILNTNIALFFKQSTALKNKLHSLISKGVKGFVLQSLKRQIKHLQKEITVLESHVETLIKDHESEMLTNISSISGIGKKTAMMLISNTYAFKSFDNYKQVTAFFGLSPIERTSGSSIRGRSRISKKGNPMVRNHLFLCSFTACEYNPQCRALYQRIVDKGKSKKLALIAVSNKLLKQAFAIAKSGVPYDPNYRSRLTIQ

SEQ ID NO: 405854 - protein, 351 aa, unidentified
MMIIGVDYHPSSQTIAFLNQETGECGERQLNHSDGEAEKFYRELKQRGVSVRVGMEATGHSRWFERLLAELGFELWIGDAAEIKTKRVRKQKTDREDARLMLKLLLENRFPRIWVPSPENRDLRQLLWHRHRLVQMRTRIMNQLQAVAMNEGYRWKKKLFSEKGRGLLEKLPLAPWASRRRKELLELLDQLDPKIAELTAAVEQEAKKRPEVLLLMTHPGVGPITGLVYVLVIGTPKRFPCGKQIGSYTGLIPCEDSSAGRQRLGHISKQGNTLLRFLLVEAAQAAARCNPDWRRKYLHLMIRREKRIAKVAMARKLGVRLYWMWRNHWQYSQLVEFGSNAGKLVLVHGVK

SEQ ID NO: 405855 - protein, 430 aa, unidentified
MIRKTALAAALEKLAQDPQERLIVGVDLTKKCIQVCYREPDTSKIINHQLARKKFWDFLKNPPFPALTVAMEACGSSNYWAQVCVRFGHLPMIIPAETVYGYHAGNKDDANDAKCIWRVAFMPEIKTIRPRDQDNQMMMALLRRREETTRTLTREANSVRSMLYEMGVACPEGPYAVMNELQKFSKETDKEAPNSTRSAALRVMSSDACNRIKTLISSLQTMDNFIISYAENDPDCRLLMTIPYIGPLTAVTILIAMGDPDNFPNGRALAAYFGFAPCHTGTGGNVAILGIPTKGNRCVKRMLYEPALAMYTWVMKPFKKEEGDDAKDNEDKVPEPISQWIFDLAIKKPAKKVVCAIVNKLCRICWAVLKHQTAYVQSKSSLVPPSVTSPEGKVKRCRATRKANASRILNIIECFESYLDASSASEAAAA

SEQ ID NO: 405856 - protein, 414 aa, unidentified
MESGYRLIVGIDWATETHQVCVLNSQGRLLEQRRVEHRAEAIAAMIDRLIGLAGGDPASIAVAIEVPRGAVVEALVERGLHVFAINPKQLDRFRDRHTVAGAKDDRRDAFVLADSLRTDLSAFRRVHLDDAWTIQIRELTRIEENLNTEITRLANQLRDLLLRFYPQLLRLCPAADQPWLWALLKLAPTPAKAQKLRRSTIQRLLHQYRIRKWTADQVRTELRTAPLSVAPGVTEATSAHISLLLPRMELLRAQYKLCSKAVQTALNERVSAEEQRREHRDAEIILSLPGVGRVVAATMLAEASQLLAQRNYHALRTLGGVAPVTRQSGKRWAVRRRYGCNRRLSNAFYHWARVSSQCDPRAKHHYQSLRQIGHSHGRALRGVADRLLALLVAMLRDQTLYDTTRAHAPKPVAA

SEQ ID NO: 405857 - protein, 328 aa, unidentified
MTNAATRELAPLDFVGVDMAEEAFEWALHGVRGTHSASNNETGFQALLEALTDRRIGLIVLEATGGLERALAGFLLRHGLPVAVVNPRAAREFARSMGHLAKTDAIDAVALAHLAQTLAAKADQAGVAFVAPSVEVEALQAMVARRVQLLNMRTAEKNRLGGAMRVLHKSIEAVIKTLDKEIAKLERDIDAHLERHFKAQAQHFEAIKSLGPITCATLLAYMPELGTVSNARAAKLAGVAPLNRDSGKERGKRHIWGGRRVVRCALHMAVLSAVRFNPVIKVFYERLIAAGKPKKVALTACSHKLLRILNAMARTGQPWNDEFHAVTP

SEQ ID NO: 405858 - protein, 339 aa, unidentified
MDKSDFAGIEVSKDELLVALRRDEQTLPLKTFPNTGEGHRTLARYLARKGRRVRVCLESTGVYGLDLALLLHKRPGVEVMVANPRAVRHFAQALMQRSKTDPLDARMLLEFAARMPFQPFQPPSATALHLRALARRIEAVTDLCAAERNRLHAASAAEALPAAVRQDIQRSIAFQERALVRLARQARQLIARDPLWQERFEQLDSIPGIAPTSAIAILAELALLSPDREVRQWVAAAGIDPREHSSGTSVHQKTRISKAGNRHLRRALYMPALVAVQHDPHLGAFYQHLLDRGKEKLQALVAVMRKLLHAIFGMFKHRQSYDGSKLFALPAEPCIAEVA

SEQ ID NO: 405859 - protein, 356 aa, unidentified
MIAISQPKVPGIIIGVDTHKDEHVAVAVDRLGVRIGQRNVPTTDTGYAGLEHWARSLGEIDAFGVEGTGSYGAGLARFLRGQNHRVIEVNRPDRSTRRRLGKSDPTDAEMAARAVLSGVARDRPKSGVDKVEMIRMLKSTKDSAMKGRTQAINQMKALVVTAPVELRAELRDMNASKLVACCVKWRHGYLETTTSAAKYTLWSLARRHVQLTREIEALNAELARLTAEFAPALMESLGIGPDTAAALLITSGSNPERLKSEAAFAALCGVSPIPASSGKTNRHRLNRGGDRQANAAIHRVVIVRLRYDHRSKAYLQRRMEEGKSKTEIIRCLKRYVAREVFGILNDIGKRHALQNA

SEQ ID NO: 405860 - protein, 405 aa, unidentified
MERKQKDWFGPHRLYLGIDVGKSFHWAVGLDPDGSIRISRRLDNRQEDVDALLGEAGEGALVIVDQKNNIGSLVVRRCRAKGVDVGYLPGKAMKNAREMFPGTAKNDRIDAEAIAQTGIGLRTAIRPIAETDDLGASVSLVSSQLSYATRRATMARNRLHAVLLESDPAFEAAADLSSAWQLEAMAGFGGAKGLAAAGRRRYCTLCARQGVPAQARDAFWKAAMRSASSAFHPDAEDMLARSLAREILEADSERTELSAELGRLLQDDETYRCLLTIPGIGPKTASALATSIDISLFPGDSKLAAYCGLAPADHDSGSSIRSQRDAHGGNKALKNLLIFSCNSLVGTKNRFGRYYDACVARGMRHNKALKAVARKRLRVIYAVMRDRVPYVEPPADNVEKSPATA

SEQ ID NO: 405861 - protein, 341 aa, unidentified
MTAIIGIDPHKTTHMAVAIDGDERAVARLEVRADRAQTQRLLAWAAPLGAERMWAIESAGGLGKLLSQELVAAGEHVVDVPPTLAARVRLLGAQKAAKNDGNDALSTAIAGLRHCGLRVVRCDGHSSVFRLLAGRYDALIGLRTQAACRLHAVLRELVAGGAPRRLSADRAAKLLRSVRPGGLVEGERKRLAGDLLADVRRLDRELAAIKTRIRDAVDASGTALVELHGVGPIVAGLILAHVGDPARFATPERFASYNGTAPIEASSGPHKRHRLNPRGNRKLNHAMHLIAVTQIAHDTPGRVYYQRKLVEGKTNKEALRALKRRISDAVWRQLQLDVTTR

SEQ ID NO: 405862 - protein, 343 aa, unidentified
MKYYVGLDVSLKQTSICVVNETGSVVREGVVDSDPEMIAAFVRSKAPDAIRVGLETGPTATWLWTELKRLGLPVICIDARHAKAVLKMQINKSDRNDAAGIARIMQTGWFKEVRVKDIDSHALKALLAGRALLVKIKRDLENHIRGLLKNLGLVIGRAKFNVFSVRAGELIEGRPELMAVVGPLLKAREAIEQQIDDLDGKVLKLARHDAQVRRFMTVPGVGPITALCFKATIDDPTRFKRSRSVGAYIGLTSRRHASGEVDWSGRISKCGDAMLRSYLFEAAGVLLTRVPKWSVLKAWGMRLAKRNGLSKAKVAVARKLAVILHRMWIDGTEFNWSKKQAAA

SEQ ID NO: 405863 - protein, 341 aa, unidentified
MSDYSYFCGIDLAKNHFSLHAVDQNGKVILHKSVTRSKLLTTIANMPLMRIGVEACGGAHYWARTLNKLGHDARIMAVKYVVPYRTKGKNDLNDAVAICEAVQRPSTRFVPVKSPEQQAILSVHRMREHWVRERTALMNRMRALLPEFGLIIPVGRSSLMKQIPLMLEDAENELSHLARTVIADAYHHLGELNQRIADTEQVFDSFAKVSANVQRVMKVRGIGPQTATAILVSIGNGSQFDKSRDFSAWLGLVPKQYSTGGKPRLGRITKHGDKYLRTLLVHGARTVIANLGDKQDKLSQWCRGVLERRGMNRAIVALAAKNARIIWSLLHNQTEYENYAA

SEQ ID NO: 405864 - protein, 428 aa, unidentified
MKSNTQNAKIAAITEKTLIIGIDVGSETHYARAFDWRNYEYSRKPLEFNNDEEGFETFLTWIKEMKTKHGKTEVIPGMEPTGHYWFNLGRFLQDNGMKPVHVNPHHVKKSKELDDNNPSKNDRKDPKVIAGLVNEGRYIHPYIPDGIYAEIRSLSEMRRQAQSEVTRLKNRISRWFSIYFPNYKDVYGDTWAISGIMILKQAPLPEDIAALGIEGVNKIWRDAKLRAVGLKRAKTLVEAAKHSVGSREAKEAARIEIRLLLADYEMYVEREAELMKLIEAAIAKIPYIDNVLAIKGVGMKTVAGFIAEVGDIRRFDDPRQIQKLAGYAIVKNESGKHKGESHISYRGRKHLRYVLYEAAVSVVAHNPEFKGIHHYYTTREQNPLKKMQSMIAIACKLVRLFYMLLTTGREYDPSKMMSDIKRPALMGA

SEQ ID NO: 405865 - protein, 400 aa, unidentified
MSHYVGVDISKDNFHFCILTEDSKILSSGEFPMSSQGFSDFFNLLKSLTDTIVVMESSGRFHIPLYCFLVEKSIQTFILNPKIIHRFFEFISANNPSKQDKKDAKILALFALNNPQMLKSYPVAPELRALSRLIQKLKNELAEAKTQIKYYLTVLFPEAERFFNIYSHSFLHILHKYPSAKALKKTKPEWLSEIIKNSISRGKPASFTPQEVIQTAKNSIGVDNPYLSETLIFYIDKLFFLEPRINKLEEILMDKIDKDQQEQMKLISSIKVISQRLAGLFLAEIKDIRNFPNAKKLIKYAGTDPVVKQSGKYKLRMSISKQESSFLRNILFQMAVGVVKWNSYFRDYFVRKKKDFGSYKKTMIPVVNKLIRVIHALCMKRTFFVHSFSKSILPLKVSHV

SEQ ID NO: 405866 - protein, 315 aa, unidentified
MSQNNLSIVTVYAGVDVAKDSLVLHFQGVCVSIPNEPKGIAKLLRTVAARAPVGSKVHVVLEATGGFERTLVNALHGAGVALSVVEPARVRAFAKAKGIRAKTDPIDAEVICAFGHAIKPLPTMPPTALQQRLGELVLRRRQLLDYVVMELNRCPGYADPLSRKQVAAHLKMLRRQIGECDQAIAALIAEDKAMAAKAARLQEVPGVGAVTATVLMAEMPELGTLRDEGAAALAGVAPFNCDSGPYAGTRRISGGSGAGALRSAHGGAFGHPSRPDPKAVLPTPFGRRQKEDGRLGGGHAKVDRAAQPHPQEPQF

SEQ ID NO: 405867 - protein, 412 aa, unidentified
MRVVHPICAGMDVHKQDVKVCLVWRDDKGERCEEVRTFSTMTRPLMSMREWLESRKCKVIAIESTGVYWKPIFNLLEGDFEVMLVNPGHLKYVQGFKTDPKDARWLAGLLEYGLLQGSFIPPREIRDVRDMTRYRRRLIEEHTAEVNRVQKILEDANIKLASVATDIFGVSGRAILDALLNGEMTPEEMAELSKGRLRNKREELAESLVGRFRPHHALLLSRMLEHIDFLDGAIEDCDTVIEDMLRPFALKIENMDTVTGVDVRAAQDIIAEVGADMSVFPTHRHLCSWAGICPGNNESGGKRRSGKTRKGNKWLKAMVTQCAHAAGHSRKTYLGTQFGRFASRKGKQRAAIAVGHSILEAIYFILRDDVPYQELGPEYFDKLNKDHIIRNYKKRLEALGLVVEISEAPVAA

SEQ ID NO: 405868 - protein, 361 aa, unidentified
MTKYTQEQLRKLDTIGCDLGDKKSELFVIGAKEATWRPDPIATTRDGFRKFFEDRKRAHVVLEVGTHSRWTSALLEELGHMVTVANPRNVKLISESNRKDDDVDAEILARLGRADVKLLSPIKHRGEGVQADLAIPKGRDALVRCRTKLINQARGLVKSFGCRLPKCDAAYFHRQTKEFVPEALKPALLPLYEVLEELAKRIAAFDKTIEELVRTRYPDAEHVSQMKGVGLLTGLVFILTLEDKSRFARSRDVGPFVGLNPRRRKSGNSDPQLHITKAGDEFLRRLLVQDANYILGPLCRQDSDLRRWALKLCERGGKAARKRAKVALARKLAVLMHRLWVSGEVYEPLGYRQDKKKAHAA

SEQ ID NO: 405869 - protein, 439 aa, unidentified
MILISEVADAPDIMGISKPAGLKSHHRGGENMNPLFVGIDVSSKNNVTYLMKPDGSKYSSFSVQNNLGGAKLMSEKIVSALEAMQLSDVVIGLEATSIYGDGLVCALREDGRLGQYQRKIHVLNPKQVKKFKDSYPDLPKNDWVDAFVIADHLRFGRIGKEVYMDDYRYKSLQTLTRARFDIVQSLTREKQHFANYLFLKCSGMAQDKDIANSSATTIALMERFETVDELVYADLDELTDFIAESGRGRFADPAEKAKAIQAAARNSYRLPVPVNNSVNQAMAVSIATMRALEKQIKVLDKAIEQQFQIIPNTLTSIPGIGKVYSAGIIAEIGDVRRFNSQASVAKYAGLVWTQHQSGDFEAQHTKLIKSGNRYLRYYLLEAANSVRRCDSEFRRYYDLKFKEVNQFQHKRALALTARKLVRLIYRLLMDNRLYIPPES

SEQ ID NO: 405870 - protein, 394 aa, unidentified
MILVGIDVAKDKHDCCIINSDGKFPEEVFSILNNREGYETLYKRICSLAVDFTKVKVGLESTGHYSSNLLAFLLDKHLTAYVINPLRVNLFRKGQSLRRTKTDKIDSRNIAHLLMADSSLKPYSLSSYHMEELKSLTRYRGTKVRERTKLKTSIARLVTILFPELEQLVSSIHIHSIYAMLEKFPGSAYIAAAHLTRLTALLLKASRGRFGRETAIRIRDTARRSIGAVSPAKSMELQHTIAHLRVYDQEIGEIESEIEKIMDDVNSPITSVPGIGMQMGAVILAEIGSFRRFDSPDKILAYAGMSPSMYQSGKLTGSYSRMEKRESRYLRYALFNVTRYVCHYDPGFTAYLSKKRKEGKHYYVYTVAGSAKFLRVYYARVTEFLRSQPSYDAY

SEQ ID NO: 405871 - protein, 339 aa, unidentified
MSKRSLQVQKTMYCGIDVSAKSLTVAIQHVHQPVEQRSFPNTLIGHKALIVWLRKTKSPVRVSLEATGIYSLDLAFALDAAEGIEVAVLNPKVANRFAQTIRRSKTDAADAEVLAEYARRMPFTAWVAPSPGSMRLRSIVRHVESLSVQSAQNQNRLHAAHGSTSTPSCIVQDLKRSVASLELRIHKLRREAMTLVRQDDLLRKRFELLVSIPGIAQVSGMQLLAELSTLPPDLTVREWVAHSGLDPAHEISGSSVRKASRISRAGNRHLRRALYMPALVASRCDPHAKAFFDSLLARNKARLQALIAVARKLLHAIYGIFRSGLKYEGTKLFPRITLS

SEQ ID NO: 405872 - protein, 341 aa, unidentified
MEKSKMKPMPVGIDIAKNVMQVHFVNTDTGEIFNKAIKRAKFIEFFTNRSPCLIGMEACGGAHHWARQLSRLGHQVKLMPGEFVKAFNIRNKNDTADAQAIWRAVQQPGKAVAVKTEDQQAMLALHRIRSQLMKFRLMQTNALHGLLSEYGEVMRKGHVSLVRNVPEILARLSGRLPAVLIDSLREQLGEVKRTDTRITDIERRIRELNKNDPGVKAISEIPGVGLLTATAAVASMGDADTFRSGREFASWVGLVPRQTGTGGKIQLLGIRKRGDKYLRKLLVNGAHSVIQNAREPGPWVTDLLKRRPINVVSVALANKMARIIWAVLAHGRPYRKEAAHN

SEQ ID NO: 405873 - protein, 391 aa, unidentified
MIYVGIDVAKDKHDCFITNSDGEVLFKAFTITNNLDGFNDLYQKIESVMDDVTKVKVGLEATGHYSYNLLGYLIDKGLPTYVINPLHTNLYRKSLSLRQTKTDKVDARTIASMLMSDVNLKSYSDTSYHNEELKSLTRYRFDKVKERAKLKSSVSRLICILFPELEKLVPTLHMASVYALLSEFPGAKQVANAHLTRLTNLLSEASKGRYSKDTAITFRDAARTSIGSNMPAKSLELKHTIKLIKELDSEIDEIENEIKIIMDEINSPILSIPGINYRMGAMIIAEIGDFSRFDSPDKILAYAGFSPSTYQSGHLYGAYAHMEKRGSRYLRYALYNAAKYVCHWDPTFTAYLAKKRAEGKHYNVAISHAVKKLIRVIYHLEKTNQQYIKAS

SEQ ID NO: 405874 - protein, 383 aa, unidentified
MSIVKKYIGLDVSKAKVAVAIADEGRGEPRFWGIIEHTKERILKLLQQLQGSGESRVELEVCYEAGPTGYMLHRWLLESGISCTVVAPSLIPQRAGDRIKTDKRDALRLAQLFRAGELTGVYIPSPEEEALRDLVRAREDAKEDMNRHKQRMGKFLLRLQLAPPSKVKAWTFAYEEWLDTLRFESSCHRMVFQEYRESIRETAERLRRYEKEIELLSHTHAQAPLIEALEALRGVATLTATTLVSEMVSVTRFANAPSFMSYCGLVPSEHSSGVSRSQGKLTKAGNAHLRRVLVEAAHHYRHSPGVRRKLRERISGLPPEVQRIAWEAQNRLHRKYMTMLGKGKHHSKIIAAIARELAGFVWAIARALEIDDRNSNPDSRLAG

SEQ ID NO: 405875 - protein, 346 aa, unidentified
MLYAGLDLSRQRLDVHVLDEEGRTVEVLAIHPDADALRTLANRILCHGQEVSAVIESMTGSRFVHDQLERWGWDVAIADPVKAKGLAPLAAKTDKIDAHVLAELARRDLVPEIWLPTPGVRAERERARFRLHLVHHRSALKCRIHATLMSFGHTVPVTDLFGTSGRELLAGFELPEPWATTLATSLAMLDELDERIDECGRELARLGADHPYIPLLLTVPGVGPLLAYTIASEIGDIGRFASPKKLTGYTGLCPIVRQSGNRDVRGPLAKNGPKYLRWALVEAATHAARDVRYRERYERNKRRLGRQRGAKVARVDIARLLAEAVWHVLTKNEPFAPAGPAMQLVA

SEQ ID NO: 405876 - protein, 415 aa, unidentified
MSVLSGIVAGIDVHKTFLVVAVLDSHRPDEPLDSVKFGTTFHQLKDLEQFLLEHGVSQVAMESTAQYWRPVWDTLEGKFVLKLAQARSTAAPRGRKTDAADALRIAKRLLAGDLTVSYVPPREQRDWRLLSRERVCFQEEIVRHRNRIEVLLEQAHLKLSCVVSDVLGLSGRRILRALLDGETNPERLSLLAHRTVQASKEDIAEALRGELTKAQQVALRIHLDTIESIEAGIDTLEKELGSQQSEHREVLERLSTIPGVGVCAAQQILSEIGPTAEAFASPGKLASWVGACPGASESGGVSMSSRSAKGNHYLRRLFCQIAWAATMAKGSEAKRKYHKLKARLGPQKAICAIAHYLVRLVWSILRSGKPFRQQNDPELDRTTLLKRASALRRQLARIGYTMNLAPSDAPPAPAN

SEQ ID NO: 405877 - protein, 408 aa, unidentified
MKTLHKRCAGLDVHKVEVVACLRLISKRKVEREVRRFPTSTQGLLTLAEWLESAGCTHVAMEATGVYWKPIWHILEGRFSLILANAAHVKTVPGRKSDVNDATWLADLLAHGLIRASFVPPPVIQELRDLTRTRKQLTREIVQHVQRIQAVLEEANVKLCSVITDIMGASGRRILKAMIAGETDAAKLAALGHERLGCTRAELVQVLTGCVREHHRFLLGQHLRTIEQLEDSIAAFDARIESALLPFHDVVERLHEVPGLGATAVETVIAEIGIDMSQFPSAGHLLSWAGFVPALDESAGKRRSTRIKKGAPWLKPVLLQSAWGAARKKNSYLQAQFLRLKARRGAKKAAIAVAASILTIVYHMLRDGTYYQDLGPEYFARRNPAKTAARLANRIRNLGYQVEIRAAA

SEQ ID NO: 405878 - protein, 341 aa, unidentified
MRTFIRIGIDLAKNFFQVHAIEREGEPAVTRKLSRGKVLAFFAQAAPCRVGMEACGSSHYWAREIRALGHDVVLIPPAYTKPYVKRGKNDANDAAAICEAMSRPDMRFVPIKSADQQAVLMLHKTRELLVKQRTMAVNALRGHLSEFGLIAPKGIHRVKELLALAQADETLPEEAKQATAMLASHSDGLDEKIGDLEKTIARASGKNQTIRLLDEIPAFGPLIASAMVAFNPDPSVFRSGSDFSASLGITPSQHSSGGKDKLGGITKRGNRYLRKMLVVGCTSVLRVAHKYKGALAEWIVAMRARKPERVVAVALANKLARIAWAMMSTGEAFRTELYTKA

SEQ ID NO: 405879 - protein, 362 aa, unidentified
MKDTTIAVDLAKSVFQVAVSHKPGRVDAERRLSRDRFLEYLAKQPPATVLLEACGSAHHWARQLQPFGHTVRLLPAHDVHRYVRRNKTDRTDAKALLEADRNEEIHAVPVKPIEPQSIAALHRMRSTWLATRTARINTVRGLLREFGMVIPVGAPHVVPHVRELLATSSHVPDVMRTSLSSACDEIETLEQHMGAVERQLAALARSRDDVKLLQTIPGVGLLTATALVALVGDVRRFHSSREFASFLGLTPKEDSSALRRRLGAISKQGDAYLRMLLIHGARSVLLRAHGAGDATAFQIWARTTQQRRGHNVAAVAVANKLARIVWAVWRHQRPFAADYRSTMITTQTATISTHQEDCTELT

SEQ ID NO: 405880 - protein, 370 aa, unidentified
MKEPTTSYIGLDIHKESIAMAIADADRAAPRFIGTINPVPAELCKAMRRVCTKESTLVVYEAGPCGYGWVRYLRKQGWACDVIAPSRITRKPSEKRIKTDRRDALLLARESRSGNLTSIVVPDERDEAIRDLSRAREDACAARLRVRLQIHAMMLRHGRHYQGKRSWTQAHDRHLSTIRFEHPAQELAFNEYRLASKEACERVERFTQALRVQCEDWRMNPVVKALMCLKGFDFVAAVTFVAEMGDLTRFAHPRALMAYLGLVPSEFTSGPNRRQGEITKSGNKHARRILVEAAWNNRFKAQVSRGLEVRQEGQPKIIRDISWKAQLRLSKRWRSLSMGRKLAQNKICVAIARELSGFIWDVARHVKVSP

SEQ ID NO: 405881 - protein, 390 aa, unidentified
MSQPNDTKKSVTPLEQDNTMIAVIEMGQASWLVAGIVPGLERQPLKKLGSGEQALFQLLQRWRNEAVHAGRTIRRLVVAYEAGRDGFWLARWLRARDIEAYVIHPNSVAVSREHRRAKTDRLDTELLKRAFLGWLRGEAGHCSMAAIPTIEEEDARRPNRERENLVGERTRIMNRMKSTLARFGIRSFKFTLRHADEWLNDLRTAEAASLPANTHAELRRDIARLRVVREQIREIEQQRLQRIEQAAPSEKGPHAMVRLLARVIGIGVETADMLVNEILSRQLRDRKWVARYAGLTGSPDESGKRRRDKGLSRAGNARVRRGMIQLAWRFLMFQKNSALAQWYRARTADGRGGARKTMIVALARKLLIALWRMVTTGEIPEGVSLRPAVA

SEQ ID NO: 405882 - protein, 423 aa, unidentified
MKYYTSTTEYNCGIDLHAHQMYVCLMDRQGKKLVHTNIRHNDFNYFLKLVTPYRHDLTVCCECMFGWYWLSDACQAAGLTFVLAHALYVKAIHGGKNKNDHIDSEKLTHLLRSNLIPPAYVYPADKRPLRALLRQRIFYVWRRSELLARIQSHQLAHNRTLVKQTRRNRDPWEETLLKSEDNPLRQIALKNDFAMIRHFDHQIFHLEEELQRQTKKVASRDFALLQTIPGIGQNLGLTILYEIGDIDRFPSVKDFLSYCRLVKGTVASAGKIKGLRGAKLGNPYLRWAFGQAAVIAKRDHYVIGPLSKRLEAQMHGNKFKSNTVVAIKLARAAYFILKNKTAFDPERLVASMQKCFSPGRRQPARLTEGAQSARPQPAADDYSCAASTPLCVGQASEPLKSIGTCGQRLVQEAFTSSQNASPI

SEQ ID NO: 405883 - protein, 465 aa, unidentified
MSRCDKLKSSQSGNTQKRIASHLEKINLFAAGIDIGSESHFVAVPEDLDDTPVRSFSCFTSGIESMAEWLVQLGITTAVMESTGIYWIPAFEILESRGIDVKLVNARHVKNVAGRKSDVLDCQWLLQLHTYGLLNGAFRPDEQICALRSYRRQRDTLISYRASHIQHMQKALRQMNLLLDNVVNDITGKTGMAIIRDILKGQRNPLKLAKHRDNRCQKSESEIAKSLKGHYRDEHVFALQQSVELYDTYDEKIKACDKAMEQKLASFDSKDDQGSQPPSDTGRLIKKRKSPRAPDFDIRGELKRMSGVDLTDIDGIDENTALKIVSEIGLDMNRWPSSKHFASWLGLCPGTKISGGKVLNRQTKRLPSAAATALRLAAFALSRSKSALGAYYRRMRAKLGAPKAITATAHKLARLVYSMLKYGSQYVDEGQDYYEKKYKERVLKTLKQKAKDMGFTLTLAETAMS

SEQ ID NO: 405884 - protein, 347 aa, unidentified
MNSVGIDLHRNRSHVAVIDGQGELSLSRRIVNSRETFLELLGELKGESRIAVEATYGWEWLAELLEDAGYEIHLAHPLRTRAIAAARVKTDAVDARTLAHLLRADLLPEAYVAPRELRDLRELLRHRIALTGMRSALKNRVHAILAKHGITRRHSDLFGPGGRRFLSEVRLREAPRRRLDSLLALIDDFDREIGTTTAEIEQRAKADARVDVLTQIRGVGRYTAMLIIAEVGEIERFPDARHLCAWAGLTPTVRSSDGRARLGHISRQGSPALRWALVEAAQKCTTGGGPLRERFERIAKRRGRKIAKVAVARQILTLSYYGLRDGEIRCLARRSRASAKEKLAVAR

SEQ ID NO: 405885 - protein, 416 aa, unidentified
MPLALPEAQVFTGVDWATENHAVCVMNAAGKIVAQFTIEHSAAGIAMLIRRLAKFGDPGDVPVAIERPDGRLVDLLLEAGHPVVPVKPNAIKAWRDGEVLSGAKSDAGDAAVIAEYLRLRYHRLAPAVPYSGETKALRTVVRTRDDLVDMRVAAANQLAALLDAHWPGAKAVFADVESPISLAFLARYPTPASARHLGEQRMAAFLVKHGYCGRRTPAQLLHRLRSAPPGTTAEALTEALRDAVLALAAVLTALNASVKDLDRSVAAHLGEHPDGPIFTSLPRSGQINAAQVLAEWGDARPAYEHPDAVAALAGVTPITRQSGKHRSVEFRWACSKRFRRAITIFADNSRHASPWAASIYTNARAAGKDHPHAVRILARAWIRVIWRCWIDQAPYDPAKHAAAAALTKQPAGEFAA

SEQ ID NO: 405886 - protein, 360 aa, unidentified
MQISDVSEGTTTIGIDVSDKYSRLCVLDGTGTVVEEGRVATTGAAFRRRFSTVPRARVALEAGAHSHWISRLLAEAGHEVVVANPRRLRLIYENDKKSDRVDAEWLARVARLDATLLAPIRHRESPSQAALAVLRARDALVRSRTQLVNHVRGTVKIAGVRLPPCSTQSFVKHVTPSLPANLSSLLAPVLAVIDTLSREIRGYDRQIGAMADASYPETKRLRQVPGVGPVTALTYILTLEDPRRFASSRAVGSYLGLRPRQQDSGGDEPQLPITKAGDGAVRRLLVGSAHYILGPFGPDCDLRRWGLALAQRGGKSAKKRAVVAVARKLAVLLHRLWVTGATYEPLRKATATPSAALGTS

SEQ ID NO: 405887 - protein, 339 aa, unidentified
MLYAGVDTHKKYSRVVVTDGKGNKVAQASLSNDQASFSDFFLGLKEPAKAVVEAGRNWGIIYDMLGNIGVEPTLANPLKTRAIAEAKIKTDSIDARTLADLLRADLIPRVYVPSREVRAQKDLLRQRLWLISIRTMVKNRIHHILDRNHVVLSFHSDIFGKAGREELGRVVLPSPDDRLLKAHLDILDHLQGQVGDSEQWIREAVVSNPSVAILRTIPGLGKILSALVALEIDDIHRFINPGKLCAYAGLVPTTYASGGKVRHGRLLPCCNRWLRWAFVEAAWIAQRTSPYCQAYFERIKLRKGANSAATALARRLCEITWHCLIETRNYEERSAPAAF

SEQ ID NO: 405888 - protein, 348 aa, unidentified
MRFYTTQHAFYCGVDLHARTMYVCVLDQAGELRFHRNLPCRTDAFLQAIAPFREDLVVGVECVFCWYWLADLCAAEQIEFVLGHAYYMKAVHGGKSKNDRIDSRKIAALLRGGTFPVAYVYPREMRATRDLLRRRLHFVHKRAELLAHIQNTSTQYNLPPLEGRLAYASHREGLLEHFGDQEPVQMSVAADIALIDTYDQTIHELELFLRHAVRDHDGSSYHLLRTVPGIGNILALTMVYEIHTIERFPAAGKFLSYARLVKGDRESAGKKSKPGGAKMGNVHLKWAFSEAAALFQIANPKGQKLVARLRKKHGKGKAMGVLAAKLGRAVYFMLKRKEPFNLNRFVAA

SEQ ID NO: 405889 - protein, 432 aa, unidentified
MRQTSIPSRALSATRSEYRGVSRSRIVGVAIDPAKTFHKVLIFDFNLDILEGPFDIDVLRSGLEHLLAAIERARRLRGAKRVVIGLEASGAFSWTLSRELATRFEHVYMFNPLTVFTARKGKLLLGQKTDAIDVAVIGDLLVRGQGYPLRRLEPVYVMLQELAYWRHHKVNLMVKLKQQIADRFEKLYPGITITSNGTKRLIAEVNRSSFSAAVVQAGLTPQAILRLSPAQLHAHLRPYRWLRAKPSAVRIHASMAQVIPPPESIAELELALLQRDFRTLKVLQQEIDPVEQQMTALVAQTPGRWLLGQLRGLTETLVATYIGMVGNPADFPSAKHVYSMAGLVPREQQSGKSRRRVGGVTKAGRKLLRTDLFQIASSVVLHEPGFRMYFQRLRREQKKPYKTALIATCNKLNRTLIALMRNQQPFRRGETA

SEQ ID NO: 405890 - protein, 339 aa, unidentified
MKKRYVGVDLHRDCFTACVRYDNGREMMQDWKLDKLGDFVKTLRATDEVAVEVSGNTRFFYDAVAPRVSRLVVVNTTQFRVISESMKKTDDNDARALALFLSKGLLPEVRLKDKNRLEIASLAQTRENLVRLRTALKNKINNMLSARGMNLKREALASDRRLEAILKMNWEPMRQAELEVIIEQIRALNASIKKLEKIIDEHGQKLAGYRNIRSIKGTGALNGPVLLSVIGDVHDFPDEGKLASYFGIVPRVDQSNQTRRVGSITRRGNKLARTALIQSALIAKRYSTYLDAYYQRIKKRRGAGRAIVALARKYLGVIYRTLKNGWVFEDFTTFTLASS

SEQ ID NO: 405891 - protein, 356 aa, unidentified
MIVIGIDPHMRMHTAVALERGTGELVAERTVTARERGHGELVLWARALDAERVWALEDCRHVSGSLERFLLARGERVVRVPPKLMAGARKGGRARGKSDAIDALAVARAFLREPDLPSASLAGAEREIRLLTDHREHLVSERTRIGNRLRWHLHDLDPSLEIPPGALDRYCWLDRLQTWLAGRDDGSALVAIARELVGRCRELTRRINGLERELEALLASEAEELLELVGCGTLTAAKLVGEVAGVSRFAGESKLAKHTGTAPLEASSGERQRHRLNRSGNRQLNCALHRIAVTQARMHPPARAYLERKQAEGKSRREALRCLKRHLARTVYRTLKEIERRKMTSASAPVLEPALT

SEQ ID NO: 405892 - protein, 471 aa, unidentified
MAKRQKSTYTRLRIGSLNRKERRALERQLNAEHPGLAVVHPDAAGIDIGNESHFVSVLADRDQQPVREFGSWSAELRDMVAWLQACQIRTVVMQSTGVYWIAVLEALEQGGLEVYLVNARATKNVPGRKNDKEESRWLMKLHTYGLLNNSFRPPEAIRGIRTLWRQRQRLVGQAAETIQQMQKALTTMNVQLANSVSDISGVTGMAIIRAIVKGERDPWALAKLRDRRIVASEAEIAHSLEGNWKAEVLWELKQVLETYDHFQRQMVECDLEVARRMAALPDAPQQGDGGEAKQKSGTRRKNQPRFDLAGELKRILGVDGTTIDGMDVLSWQMILTEVGPDLRAFSTENHFAAWLGLVPRPEISGGKVIRYVRGEGSQRLAQAFRMAAQSLSRSDSYLGARYRSLRGRLGGPKANKAMARYLACIVYRLLTKGKEYVDRGAAHYETKQRERELASLTRRAAAQGMKLVPAL

SEQ ID NO: 405893 - protein, 583 aa, unidentified
MLHHALASQPLADANLVRIGVGIDTSRYGHYAAFLRHDLQPAVGELQFVESADGYAQLRSRLEQIVAKLGAVHFAVRLDVANQYADNLLNFLHRLPARLANATFTISCGDPKRNKDYRAALFGAKKSDPVEARAAARYALSEQPAPIKMLPLELRALRQLASRLQAVVRHRTRLINQFHLLLSLTFPELALLVKDVASNWVLTLCERYPTAKLLAAASAQDLGQIPYLPDRLINTLLERARDSIASLDHDTSAELVRDQVRQLRDVRARQLRLENTLVDAYRQLPDPNHLDSIDGIGAITAAILTAFICDIDRFQTPNQLVAYFGVMPIEIGSGVDRNGKPRLAKRYVMSRRGNDLVRRYLWMAALGAVRYNPAVRALYARVVAKHPDHKAIAIGHAMRKLLHLTFAIWKTKKPFDRSFYPWDAPAHVTQEKGWEPTAAQDQAAGLKDSAEPASQEVTAACSGTLAHPEPGHNAFVDFAHIKAQLPIARVLEHLDLTRKLHGIGAQKRCACPIHCPRSNGRTFSVNLEANVFQCFGVRCQKKGDVIDLWAALHHQDLRQAALDLARTFALELAATPTTEKRSG

SEQ ID NO: 405894 - protein, 371 aa, unidentified
MVWTAPYGIECARMRLSRSQTREPSVNEIIRIGMDTSKHIFQLHGVDAQEQPVLRKRLSRSAMLAFFGNLAPTIVVIEACGASHYWARELAKLGHQVKLIAPQLVKPYVTRNKNDGRDAEGLCEAGSRPRMRFVPVKTVEQQAGLMLLGVREQLIVRRTQLSNMIRSHAAEFGLIAAKGIDKLASLLAAVAQDASLPDLVRDLFSLLERQYEQLQVELKTIEIKLRALHRADAMSRRLAEVPGIGPVTAAALVMKAPDPHAFRSGRLFAAWLGLTPKDHSTGGKLRLGKITRAGDETLRSLLVTGATSVVKLAKGPKGRGSQWLIALLKRKSPKQAAVALANKMARIAWKLMTTGENYDNARLNAAASRAA

SEQ ID NO: 405895 - protein, 350 aa, unidentified
MNRIYIGVDFHARQQTICYLTTEGGEIQLHELKHQHKQEVRAFYAQFQGQVIVGLEASGYSPWFERLLEELGCEVWLGHATEIRRRARWRQKNDRRDAELILDLMLHDEFPRLYLPPLQSREVLRMLRYRQKLVKIRTMGKNSLQALALQSGLAKGSHLFSKAGLQELRTAVMSPAMQWQREQWLQLLEPLNQRLLETMFWLKQQSQDDQRIIRLRTHPGIGLLTSLCLVHSLEPVTRFRNQRKVVAYAGLEPLERSSAERIRFLGISKAGSRILRYLLVEAAHVAVRKDEELKRFYQRLAARRGRAKAKTAAARKLLIRAYIMLRDEIDYAEFRRRAVAARLARQITKA

SEQ ID NO: 405896 - protein, 364 aa, unidentified
MFTERTSVGLDVHARSVAAAAIDGVTGELFQAKLTPSYDHVRSWLGDLPGPVAVAYEAGPTGFGLYRYLSSVGIRCEVVAPSKLQRPAGDRVKTDAKDAVHLARLLRLDEVTSVAIPTVEQEAARDLVRAREDCRSDLMRARHRLSKLLLRHGIVYYGGDAWTGKHDQWLRTEALPQLTSRSTRLTFDADYETVLATKARRDWLDVAIEEMAADSEFTPVVRRLGCLRGISTLTGFALAVEIGDWHRFTGNSIGSFVGLIPAEYSSGSSRTLGPITKTGNGHARRLLVEAAWHHRPRYRVGKVMRDRWDLAPAAARARGDEGNRRLHQRWVKFIERRKRSTVADVAIARELAGWCWSLAVLDDM

SEQ ID NO: 405897 - protein, 360 aa, unidentified
MKVQRTSIGLDVHARSVVACGLDGDTGEVFRRRLCPDHGEILDWVQGLPGPVAVTYEAGPTGFGLARVLIAAGIDCRVAAPSKLQRPPGDRVKTDARDAAHLARLLHLGQIVEVTVPSPAQEAARDLVRAREDCRGDLMTVRHRISKLLLRQGIVYYGGQAWTGKHELWLRSQRFDALGLQLAYDTAMDAMIAGVHRRDRLDKAIVAMAADSEFTPVVQRLGCLRGVSTLTAFGLAVEIGDWHRLTGRSIGAYLGLVPCEYSSGDTRVQGGVTKTGNGHARRLLVEAAWHHRAPYRPSRDLRARWTAAPAAAQARGHAANHRLHDRWTGFDARKKRSVVANAAIARELAGWCWSLAVLDD

SEQ ID NO: 405898 - protein, 349 aa, unidentified
MVVLGADVHKRTHTFVAVDEVGRELGHKTFPATTTGHHQALRWARAQFGAELRWAIEDCRHLSARLERDLLTAGQSVVRVPPKMMAEHRRTARTRGKSDPIDALAVARAAQREPDLPVASHDEVSRELKLLTDRRDDLVKYRTATINRLLWRVHELEPAWAPPTASLDLPKHQRILAGRLADVPGIVAELAREELADVVELTARINDLQRRISGVVTTAAPSLLAMPGVGVLTAAKIVGEAAGVGRFKSEAAFARHAGIAPIPVWSGNTAGRVRLTRSGNRQLNAAVHRVAVTQIRLDGLGKAYYAKKKSEGMSTPEALRCLKRRLARVVYNHLITDQAPVAATFTTAA

SEQ ID NO: 405899 - protein, 488 aa, unidentified
MRKKKTYAIANDEGMPIDTLDLADGEIIQPLYPYGIGIDCHRSFIEVCVFVKTSDSIRKYENTYSTDWKTLGGAKDWAERIIRIKSSPTIDPEVLRYTIESTSTYHMPVIKAWGGNPCVVNPLLASPTRRKTDKLDARLMAYQSMTGLWPASFIADPEVQAFRLLMKQRQDAGRAAVAITNRINNYLLRFGHTIGATGSVRGYTARAIIEDMCKDGFEYTDGKYAGLTEGDYICPAGLPDDVKTLINGMWKEFDRQKAIETEYHKMALDKAKGMLWQSQGGEIKGDTLIKNLCTVPSVGEITALIWLAEVVTPLRFSVKEKLIAFCGCDPSLKISAGKVTSQMRRGGNTRLHYQLVKVAGSCINHHSEPFGQWGYALLQRHAKGGYKKACGAVARRIATAMYFIHLNGETFSYDKYNFHKIDVPDISLEDMQLSTRTRNIFNSYNLASSQTLTSLFIKGELHRMRGIGNKSIAEVDSWIQSNKFKRRG

SEQ ID NO: 405900 - protein, 351 aa, unidentified
MNNATARKRTQITIGLDLGDRRHTYYVLDGAGKMAREGSLGNTRQPLATMARSYPGATVVMEAGTHSPWVSRFLQELGLRVIVANPRKTRAIYQNERKSDRRDAMMLARLARMDPTLLHPVEHGSQEAQQDMLQLKLRDSLVRARVALINAVRFTLKSLGYPVSNPSSERFHKLVLSEVPESIGEMIAHNVAAIAELTQRIKALDVSISRLAAERYPETIYLQQVSGVGPITSLYFVLKVGTPGRFQRTRDIGAFLGLCPRRDQSGETDKELRISKCGDQYLRGLLVNAAQYILGPFGTDSALREHGLRLAQEGTARAKKRAVVAVARKLAVLLLTLWKSREPYESFPTMA

SEQ ID NO: 405901 - protein, 335 aa, unidentified
MEREYVGIDFHRRRSVIVRKSAAGEKLSSVRVVNDPWAIAAAVADAGPEPEVVIEATYGWYWIVDWLQAQGATVHLANPSGLNWGTRRVKNDEGDATDLVDMLRLGRLPEARIAPPATRELRELVRYRAKLVALRSGLKAQVHAVMAKEGVLPSVADMFGAAGNLQLDEMELGEAYATRVESLRKLIEVYDGEVAILERQIRERLRGDRGYRAIQAINGIGPTMAAILVAEIGDVSRFRSAAALCSWAGLTPKHRESDTTVRRGGVTKQGSRLVRWAVIEGTVRYHGGGKLAADFHKIAERRGKNKATVAIARKVLTLVYYGLRDGEIRCLANAA

SEQ ID NO: 405902 - protein, 330 aa, unidentified
MFFIGADIDKRKVHCVLLLDPATGKQRSKVVANTPEGMHQLLAWAQKQTGQPASELQVIMEATGPYHETAAYTLYEAGATVSVVNPKQLKDYAKGIGHKAKNDGQDALALADYGANRRPRPWQPPPPEFRQLHALLQRLEALEKDLQRERNRQEKATVSAASATVLASLVRSIAFLEQEKKRLLSEIDGHIDRYPHLRADQDRLRSIPGIGPVLSRWALTLLQQGQRFSSAAQFTAYLGLIPSEHRSGETVYQRPQLSKTGPGHLRAKFYMAAMVAVRYNPVIRAHYERLLQRGKSKMSALGGAMRKLAHICFGVIKNQTNFQTQTPQEV

SEQ ID NO: 405903 - protein, 345 aa, unidentified
MEQISRIGMDTSKHIFQLHGVNAAEVPVLRKKLRRAQMVAFFEKLAPTVIAIEACGASHHWARLLQSFGHSVKLIAPQLVKPYVKRGKNDVADAEALCEAMSRPTMRFVPVKTAEQQAALMLVGVRDRLIRNRTQLANTIRGYAVEFGLAAAKGMAHLVPLFERIQADESLPALARELCAIQAKEYAQLQAQIDEVDAKLMAWHRADECSRRLAKIPGVGPIGAVLLKMKTPAPELFRSGRQFAAWIGLTPKDHSTAGKVRLGVITRAGDEGLRSVLVVGATAVIQQVRRGGRTSAWLAELLKRKSPKLAAVALANKIARVAWKLMLTGETYTTKSVPAALAVAV

SEQ ID NO: 405904 - protein, 412 aa, unidentified
MKLFVGIDVSSKDLKVCMMNGEGDTLQSFTVDNNLEGASHLRDQIVAVADKLPSKEIHIGLEATSVYSWHLAMFLHEDEALQKRKAKVFTINPKLITKFKEAYVDLDKNDHIDAWLIADRLRFGRLPMTMVMQEQYIALQRLTRMRFHLVHNLTREKQYFLTNLFYKCSAFTSEVDSSVFGHAITELLLEKYSLDEIVAMDVADLADYLKDHGKNRFPDPERVAKCIQKAARASYRLSKVVEDSIDLILGTSIQSIRSIQAQIKELDQAIERILSGIPNTLQTIPGIGPVYAAGILSEIGDITRFDDQAAVAKYAGLVWRKHQSGAFDAEDTKRIKSGNRFLRYYLVEAANSVKNRDPEFGDYYRKKYKEVPKHQHKRALVLTARKLVRLVDVLLRNDQIYTPRRKVNAAKD

SEQ ID NO: 405905 - protein, 400 aa, unidentified
MISVGIDVSKGKSTVCILKPYGEIVSKPFNITHTHKDLSELSSMLFRLNDEVKIVMEATGIYHLPILTYLQEKGFFVSVINPYLMKSYRNESLRKAKTDKIDSRIIANYGIDHWFKMKEFQTSGEIYEELKLLGQQYRHYMKLHLLSLAELTHLLDLTMPGIKNLLASWNETNRKDKRSDFVERFWHYDVITSMSEQEFTEKYILWAKEKKYVPSQEKAKVIYTLAQESIPTLPSETSSVKMLVTEAVRVLKEVDATLGLILSRMQEIAKTLPEYSVVREMGGVGNTLAPKLIAEIGDVRRFRNGKALVAFAGIDPPPYESGQFVGCNRKISKRGSASLRKVGYETMRSLKMRSRPEDPVYRYVVKKESEGKSKKSAKIAGLNKFLRIYYARVTELYKNI

SEQ ID NO: 405906 - protein, 323 aa, unidentified
MGRKASPDAQGREWNPMFIGIDVSKDRLDVHARPGAEAFAVPRNGEGLCALVERLGGLAVELVVIEATGGFETVVAAALAAAGLPLAVVNPRQIRDFARATGRLAKTDALDAAVIARFAEAVRPEPRPVPDAQARALGEMVARRRQIVETMVAEQNRRRTLTQPRLLKGVDRVVALLQAQLSEIERDIDGAIRQTPAWRERENLLKSIPGIGPATSRVLIAELPELGSLDRRKIASLVGVAPMNRDSGAMRGRRTITGGRSTVRTALYMSIMVALRHKLPLSATYQRLRQAGKPAKVAIVACMRKLLTIANAIIRDRAPWQNA

SEQ ID NO: 405907 - protein, 349 aa, unidentified
MTEQRRSYAGECVYVGVDVHKETYTVTCVCHKQIVKTATVQAEPASLAASLRRWFPGATLASAYEAGFSAFVLHRALTQAGISNIVVNPASLAVAANDKVKTDRRDSKRLAVDLADGRLRGIYVPTEEEELARLLPRTRAQLVEHRATLARQIKAKLHQFGLIAPSSQRLLSHRYLREIEAWTLPPELRASLKMLAEQWRFVTRQLIEMRRLLRAQAAAQAELETVYRSVPGIGEVVARTLATELGDMSRFANERALFSYTGLTPSEYSSGAAVRRGPISRQGSSRVRHLLVETAWRALPYDAVLQTMFVRIAATRGKKRAIVAIARRLIGRMRACFRQGTLYAVGTLA

SEQ ID NO: 405908 - protein, 352 aa, unidentified
MIVSYLGKKVYIGMDVHKKTYSITAICEGVVVKKATIAANPEVLRTFLTRHFQGAEVACGYEAGFSGFHLQRKIESWGCDCLVINPGPLEVASRDRVKTDKRDSLKIAEHLSQNRVKGIRIPDEETEDRRFLSRSRAQFVEERTRIGVQIKSKLHQLRLMDPTDDRVMSRKYITEIEELKVSAGVKFALQEFCVFWKRVDEQISAFNKKLEEQAQTDSKIDAVYRSVPGIGPISSRVLANELGDMSQFKNEDGLFSFIGLTPTENSSGESSKKGHISRQGNSVIRHILTEISWRAIGKDEALRHIYERISARTGPRRAIIAIARRIIGRIRACFRKGELWQLNFEQKLASAA

SEQ ID NO: 405909 - protein, 389 aa, unidentified
MKIYVGIDIAKLNHFAAAISSDGEIILEPFKFTNDADGFQLLVSKLESFDKNSIIIGLESTAHYGDNLVRYLVAEFYQVCVLNPIKTCQMRKNNIRKTKTDKVDTFVIAKTLMMQDDLRFVSFYDLDMMDLKALGRFRQKTIKQRTRLKIQLTTYVDQVFPKIQYFFKSGLHQHAVYALLKEAPSPKEIASMHMTHLANLLKVNSHGHFTKELAKELRVLAQKSVGANDSAISIQITQTIQQIELLDSQLEKIEAEMTDIMKFNDSVIMTIPGIGYINGGMILGEIGDIHRFSNPNKLLAFAGLDPSVYQSGNFQAKRTRMSKRGSRVLRYALVNAAWNVVRNNATFKAYYDAKRAEGRSHYNALGRCAGKLVRVIWKMLTDEVEFNLE

SEQ ID NO: 405910 - protein, 445 aa, unidentified
MTSRTIGIDLAIRGDHVAQIYDGGRPTGRPMRFRHDLGSLDAFVTRAFTGIGPGDSVLTVMEPTGMSWFPVAHRLVDNGAAVTRVKGKRVKALRRYLSEHAKTDLADAHVLAAIPSFGGAKLDPVHISTPKSHALQRLTKQRSRFQDVIALAKRWLLDLVRWASPALEKVLPDFSTRLALALLQHWVDPQAVLKARRSTIARFIALHASGNHPHSGPFADALVEGLRQAAHEALALHRGHVDFSELQAELVIEVDVINTHIAARAELDRRTETLYTELQPAEVLRTIPGVGRRLAPVLFGVFHSVDRFRSERHIRGFCGLFPHRADSGGVERLGQRITQGGNDRIKRALILAADTARKIDPDLAEVYWRMMTDKGHHHKQALCAVANRLVNRIFSVLRSGRPYVLRDHVGREIALADAKAFIAEHYCVPEAVRATRRANRLHITS

SEQ ID NO: 405911 - protein, 424 aa, unidentified
MKVTYPTCCGVDVHKSFLVATIIKTTGSIEPSYQKKRFSTFNNSILEFKSWLLENDCHDVCMESTGKYWVPVFNLLEDQINVTIANPKWVKAVKGNKDDTKDSKWIGDLFRLGLVKGSYIPCKAIRILREYTRYRYKLVSCRSSEKNRYQNALTVCNVALDSVVSDIFGKSSTSIIDYLLEQSDTSINHEEISAKLLKRLKSKEDAVIESIEGYQMTDAQKYRMRLVRAHMDYITAEINDVDKQIDSLISSDTDYDKAIQLLTTIPGVKRDSAITIISEIGIDMSHFCNSKRLCCWAGLTPGNNESAGKKKSVRITRAGVYLKPALVQCAHAAVKSDKSPYYKKKYESLVKRRGKKRAVIAIARMILTAIYQMLSTGEVWNPSDLYKIDMPAPLIEKQKAKAIKQAKKLLQMEGFLPPDEPLAS

SEQ ID NO: 405912 - protein, 343 aa, unidentified
MDHFAGLDVSVKETSVCIVDDTGKIVREVKVASEPEALLAVLTNPAYHFKRIGLEAGPLSQWLYSALAEAGLPVICVETRHMRAVLKAQINKTDRNDARGMAQMMRVGLYRPVHVKTLRSQKLRMLLTHRKLLQSKAIAIDNDLRGTLRNFGVKVGIVGSARFEARVKELIENLPDLAVLVEPLLVVRRVLREQLGILHRRLLAVVRDDDVCRRLMTVPGVGPVVALTYRATVDVPARFRKSKSVGAVFGLTCAKYQSGESERTGAISRCGDEMMRTMLYEAAQSMLFHSTKWSWLKAWAMKIARHRGMKKAIVALARRLAVIMHRIWVDGTEFRWTREVAAA

SEQ ID NO: 405913 - protein, 342 aa, unidentified
MSVYVGIDVHRKRSQVAVINAKGEVLANRNVPNGAEPILKVIGGLPPATPAAFEAAYGTTWLVELLEDYGFDPHLVHPSRCKAIASARLKNDKVDAAILGQLLRADLLPEAWIAPPPVRQLRALLRHRVALVRLRTRLRNRIHAIVADYGYDRPAGEYWTGPGRAWLASLDLPAVSRELVGDDLGLIDALQERIDRLDGEIRQQARSDPRVKVLTQLPGVGPFTALVILAEAGDISRFASARQLASWAGLTPTVRGSDRVAHYGHISKEGSVWLRWVLCEAAQTAKRHPQFAAAFQRIAQRRGKKIATTAIARKLLTRAWHLLTDAEHAAAPQPAAPQTAAR

SEQ ID NO: 405914 - protein, 351 aa, unidentified
MENSITETIGCDLGDKASEICVLKADGSKQRATVRTTRAGMRLFFTRAPAHVVIEVGGHSRWASALLADLGHRGTVANARRIQLISQSNNKTDQNDAELLARLGRADIGLLSPVVHRKPETQADLAVAKARDVLVATRTRLVNHVRGTMKSFGDRIPKCRAETFVRHTRDLVSELLKPALDPIYEALEAIEKKIREYDKTIDRVAERYPDVAAVSQPAGIGTLTGLVYVLTLEDKQRFPKSRMVGAYLGLRPRKRTSGNDDPQLRITKAGDPFLRRLLVNGAHYVMGPFGPDTDLRRWGLELAKRGGKNAKKRAVVAVARKLAVLLHRLWVTGEVYEPTGYHVRQLEARAA

SEQ ID NO: 405915 - protein, 342 aa, unidentified
MTIVAGFDVHRTQITFDALDTDTGELTRGRIDATPAAVERWVGRFAGREVHVALEACTGWLFVSRALEHAGATPHLAEPVETHALRGRKRRAKTDREDARWLRQLLCEGRLPESWMPPEHVREWRSRARLRKTLVDERTQWLQRIQATLFHHGIGGVPEKLNGSGGREFLGRLELPADARERIEISLAMIDSLEDQLRPLEAELRKLARRQTGCRALMELYGMGELTSLVTLTELGDVERLSASRKAVRMAGIDIGVHRSDRRSRVGKLNRQGSPDLRWALYEAALSACRTTSPDHQDYLALKARGLSHTRASLTIARKLARRSFHILRELGPAALEPLPTT

SEQ ID NO: 405916 - protein, 449 aa, unidentified
MTADKDLACTKGLLVTWLPARRSGWPASAPKGLKLSTTTNTGAAREGSSFGVFCGLDVGKGDHHAVALDPAGGRLADRPLPNDERALRSLFGELQAHGEVLAVVDQVASIGALAVAVARSMGIVVAYLPGLTMRRFADLHPGEAKTDARDAFVIADAARALPHTLRRIASDEQTVAELTILAGYDDDLAAEVTRLANRLHDALAHVHPALERLLGKHLNRSGVLELLAASPTPIQLRSLGQSGIQSALAPRSRKLAVRLPEQILSALDEQTVVIPGTETFGRVIAGLARQLLSARDERDSIAEQLTARLEAHPLAEVLTSMPGVGVRTATTVLIHVGDGTAFRSAAHLAAYAGLAPVTRRSGSSIRGESASRRGNKQLKRALFLSAFASLRDPVSRTYYDRKRAQGKTHTAALLCLARRRTDVLHAMIRTGKTYQPPALQPAEDPSVAA

SEQ ID NO: 405917 - protein, 351 aa, unidentified
MIIVGVDYHPSVQQVAFLDTETGETGERRLNHSDGEAERFYRDLQRRQVKVRVGIEATGHARWFERLLAELKFELWIGDPARIKAARVRKQKTDRQDAQLLLRLLIEGRFPQIWVPSPENRDLRQLIWHRHRLVQMRTRAMNQIQAAAMNEGVRRKKTLWSKTGRRQLEALPLAPWATRRRQDLLELVDRLNTTIDELTAAAEQEARKRPEVLRLMTHPGVGPITALAFVLVLGSPDRFGCGHQIGSYLGLIPCEDSSADRQRLGHITKQGSSLLRFLLVEAAQAAVRWDPDWRRRFVHLAMRRDRRIAKVAMARKLDVSLYWMWRKGFDYPQTLQFGSHAGEPGFVHGVK

SEQ ID NO: 405918 - protein, 355 aa, unidentified
MAARSWRFKMEYYVGLDVSLKLTAVCIVDRIGAIKREAMLPSDPETIAAFIKGHATNVVRIGFESGATSTWLWTELDRMGLPVVCIDARHAKAALKMQINKSDRNDAAGIARIMQTGWYREVRIKALDSHAIKALLVSRALLVKIKRDLENQIRGLLKNLGLVIGRAKMNVFATCARELIEGKPALVAAVEPLLAAREAIEQQIAELDRKVMRLARNDAQVRRFMTTPGVGPITALCYLATIDDPTRFKKSRNVGAYLGLTTRRFASGEIDWTGRISKCGDKMLRSYLYEAANVLLTRIVKWSGLKAWGMRIAKRSGIRKAKVAVARKLAVILHRMWSDGTEFEWSPKEAINQPA

SEQ ID NO: 405919 - protein, 349 aa, unidentified
MKILAIDLGKFKSVACLFDTQTHQSQYETIPTLVFAIEQLLQTMQPDKVVIETCTISGWVYDLCKGHGFEVIVANPSSEAWQWRNVKRKTDKDDALKLAKLEALGQIVPVYMPAQEMRQYRRLVKYRKVLVGRINQVKNSIRSLLDAQGKQMGSRAKAWTIEGMQVLEEWRKPVGECELEELWRGELDVELILLDKLWEQQERVEKQLEAIAKQEQRVQRLMTIPGIGRRTAEVIVTIIDDPHRFENGRQVSAYAGLIPEQRQSGQTNRLGAITKRGSRLLRGALVEIAWMLLRFNPWALEVYNRIYAGQKTRKKTAIVAVARKLLVCCWAMLKHNQPWNPPQPQSVAA

SEQ ID NO: 405920 - protein, 535 aa, unidentified
MSTSFASSRSARGNSHAARRAAILHKPNGQIATRVQAVGPERFGIVSIDGAKARSLYMLCDFYGRVLVPPTVVAHTQGDLGAAIDRIRQAWSQHNLGDGLVALERTGEYHRPAQRAFQQAGFETRVVHPLATKHFRQPVEPGNKTDATDLAAIHRATVNGFGLFEPLWPDVFAQLRLLVRHRRDLVRKAAKLQCQIREHLHALMPGYAECFSDLWQSHVALPLACQTGSADAVRQHGLNGLAALVQQTPWRCQRTTLAKILAWAETAPPAHPQTLWLSQILSQLHHDWLQKNQQIHGCEQASPALLAQTSYLLLLALPGINVVSAAELAGEMGPIRHYANANAITGRAGLFPARYQSDRVDLHGSLVLRGQRQLRAALLGIADNLKKCNHHFQARALLWQAAGKEPKQLRIKIAKSFSRLAFAIVMGQSIFRHPCCQPPDYILEKLLAFHREHQTPMPQTLADLHAAVDQLPRSARAAEAKPLQEELARIRRPRSRGPQPIGDILAIVLARLGVGAIQSTASGDQDPGSSPGGNR

SEQ ID NO: 405921 - protein, 313 aa, unidentified
MSQNNTSILYVGVDIAKFTLAIDLAGKAHTFENNPQGRAQLLKRLRAYPQAQVVCEATGGYEQALVRSLQAAGIPISVIEAGRVRHFARAQGRRAKTDPIDAAVLSAYGQACQPVASRAPSPQQQQLAELTQRRRQLVQLLGQERNHLEHYPDRFRQRQNRQLCRLLERQIKECEHAIAALIQSDPPSQHKAERLQTIPGVGPVVASTMLAEMPELGTLTPQTAAALAGVAPYNQDSGNQQGGRSIAGGRRAVRCALYMATLSAVRHDPILKAFFHRLLSAGKKPKVALTACMRKLVILMNRLLKNNQFQLAT

SEQ ID NO: 405922 - protein, 318 aa, unidentified
MNVLGIDVGKRDLHATLLQNDRTASKSVPNSQAGIAQLQTWLKNRNAERVHVCLEATGGWSEQVAISLGEAGHVISIVNPARIKAFAQSEMVRTKTDRVDAALIARFCRLHQPEPWTPPAPEIRILQGLVRRQHSLIQMRVEEENRRSAPMVSPAVTASIEATLEHLARELERVDREIEQLFDDYPPLRRQRELLISIPGIAESTAARILGEMPNIAEFRDVKTIAAYAGLPPRHYQSGSIEHRSRLAKSGNAHLRRALYFPAISAIRFNPPIRALAKRLSARGKTKMTIVAAAMRKLLTLAYGVLKSGAFDPVYRNA

SEQ ID NO: 405923 - protein, 410 aa, unidentified
MTKEDFIYVGIDLHKETHTAVMIDCYNNKLGEITFPNRPADFPKLVTKVKKCNTDAKEVVYGLENAYGYGRALAVWLIDKGYFVKDVNTAISHRQAKHRGAMYRKSDSDDAEAIALATLNMLDKLPDACPNDAYWSLVQLVHRRDNIMKQRTRLVNQLHEQLCIAYPSYKSFFNDISRPTALYFWEHYPSKKYLKGKSVEDLRAELVPVSHNKCSTKTCEKILDAVASDKVKNNAYQDARDMVTLSIVSDLQHYGSQLTEVDKMLEQMYKMLGCTLTTIPGVNVITAVKILAEIGDIKRFANANKLAQFAGIAPLHLSSSGKGKDVATKQGNRRLQATIYFLAIQMVQVSSKGTPRNSVVRAYYEKRKAEGKTSQQALICISRRLISIIYGMLKHGTEYRMPVVESAGEK

SEQ ID NO: 405924 - protein, 405 aa, unidentified
MNSVGIDISKGKSMIAAITMTKEVAIKPREFEHTELGLEQLLDVLAPLTLEGETRVIMEATGRYHEIVASTLYEAGIYVSVVNPLLIHDYGNNSIRCVKTDRKDTLKIARYGVDNWGELREYTPVDSARQLLKLLSRQYNQYMKVLVSQQSNLIALLEKTFPGANDLFKSPRRDDGHQKWVDFVQVFWHSDCVIRLKERVFVERYQKWCKRKGYNFSEDKAFDIYVYAACCGYTLPKNSSTKALVTIAVEQVIACSKSVATIKAEMLKISAQMPEHKVVLSMFGVGDITAAQLIAEIGDVRRFNNRGALVAFAGVDPSTFQSGKYASKSGKATKRGSAHLRKTLFQVVGAYLKRSPADEAVFQFLDRKRAEGKHFYVYMTAAANKFLRIYYARVKVFMESIDHSS

SEQ ID NO: 405925 - protein, 342 aa, unidentified
MQITTIGLDIAKNVFQVHGIDAKEKVVVRKQLRRSQVIAFFKALPPCLIGMEACATAHYWARELTKLGHEVRLMPAKDVKAYVKRNKNDAADAEAICEAVRRPTMRFVRIKSAEQQGQLMQHRTRDVLIRQRTQIINALRAHLAELGIVAAQGNAGVNELRAIVTDEQDTRLPIDARASVIVLAAQLEALESVIGAIEKRIKMQHRSSEASQRVEAIPGIGVIGATAIVATVADPTIFRSGRDFAAWIGLVPRQDSTGGKQKLGPISKQGDRYLRRILVVGAIAVLRRAKENPGKYPWLTQLLARRPFKVVAVALANKMARTAWALLAHGGTYRAPELAETA

SEQ ID NO: 405926 - protein, 340 aa, unidentified
MALYGGIDLHANNSVIVLLNEQDKVIYRKRLSNDLPTILEQLAPYHTEIKGLVVESTYNWYWLVDGLMEAEYRVHLANPAAMQQYSGLKYTDDDSDACWLAHLLRLGVLPQGYIYPKAERAVRDLLRKRAHLVRQHTANVLSVQNILARNTGARFSGKRIHELTKQELTTLLAEETQVLAVTSSLVVLDCLQHQIKMLEQSVHKRLHHTPSYEQVLTVPGIGPILAQTITLETGAISRFPTVGNYASYCRCVDSTKLSNGKRKGTGNVKNGNPYLAWAYMEAAQFALRFQPAAQRFYQRKLAKNRHNTILARKAVAHKLSRACYYMMRDRVPFEATKAFG

SEQ ID NO: 405927 - protein, 328 aa, unidentified
MEQMYIGVDLHSRFFQACAVAPDGVRQWEDRFLRSEAGLQAFRAKCPRTAAVAVEASGPTWHFVDHVSDAVSRVVVVDAFRTRLKAGFAAKTDRLDARRLADALRRDSVVGIYVPPPVVREWRELCRHRQTLVRTRRALVQRLRALLLRQGIVEAKRLTTAAGLATLDRYAIAGRAGDALGQLRALIGAVREQLDIVDVAVCDEAARDPVTQALMTIVGIGPTLGLMIRAEIGSIARFRTAPEIASYAGLVPRVEASAGRAYYGRITRRGSPWLRWAFVEAALHRVKQPDGRGQWARRLAVRKGGLKARIAMARRLSEEVFVVWRRIG

SEQ ID NO: 405928 - protein, 343 aa, unidentified
MEYYVGLDVSLKQTSICVVDRTGSVVREGVVDSDPEAISVYVRSKAPAAVRIGLETGPTSTWLWTELKRLGLPVICIDARHAKAVLKMQVNKSDRNDAIGIARIMQTGWFKEVHVKDIDSHSVRALLASRALLVKIKRDLENHVRGLLKNLGLVIGRAKFNVFAVRAEELIEGRPELIAAIRPLLEARNAVEQQVSELDRKVMKLARHDAQVRRFMTAPGVGPITALAFKATIDDPARFARSRSVGAYVGLTSRRHASGEVDWTGRISKCGDAMLRSYLFEAAGVLLTRVPKWSAVKAWGVRLAKRNGLRKAKVAVARKLAVILHRMWIEGTEFNWSKMEIAA

SEQ ID NO: 405929 - protein, 356 aa, unidentified
MSRDIKYIGMDVHKEAVVIAVLNSSGKLVMESIVETKASSILQFIHGLRGELHVTWEEGTWASWLYDLLQPQVKQVLVCNPRRNALLKEGSKSDKVDAQKLAELLRTGMLRPVYHGENGLRTLRELARSYQTISKDLNRVMNRLKALYRGWGIACAGTQVYSSRYREEWLNKIPHAGVRRRAELLYQQLDGLQGLRRTLRLELLAESRKHKAVKLLRQIPCIGPIRAARLLALMQTPHRFRSKRQLWTYSGLGIETHDSAQFRFVGGQLQRSKKPQQLRGLNRNHNHDMKEIFKGAATRASCGRGPLHDFYAALLTKGMKPEMARLTLARKIAAIALTLWKKEERFDAEHLKPQAA

SEQ ID NO: 405930 - protein, 378 aa, unidentified
MIVIGADRHKRAHALAAVDAGTGRVCGAREIKAEEPGHLAAVRWARGLDGERVWAIEDCRHVSRRLEQALIAAGERVVRVPPRRMGASRRAEREPGKSDQIDALAIARAVVKDGVESFPAAHLDERAMEIRLLSDHRKDLVAERTRAQNRLRWHLLDLSPELERSLKRGSLEKPRQLDRIDRRLRRMVGCARVRVARDEVRQIRTLTSQVDALRQELLVLVEAHRPELLAEIGCGALTAALLIGRTAGAERFASDASFARLAGTAPIPCSSGQRQQHRLDRGGDRQLNTALHIIAITRARYDPATKTYLARKEAEGKTKKGALRCLKRHLARRFHHLLSLPAQRPPQDHSDGAELLARPQHEPTTITATAPTPMPCPT

SEQ ID NO: 405931 - protein, 467 aa, unidentified
MAADEGMTGGTGVPGGEGAEVAEDSTQVVEYAAAIDVAKGSGMVCTRVPGSRADRRRQQTWAVAATFAAVTALMDRLRCEGIQRLVLESTSDYWRVWYYLAEAAGLEVWLVNARDVKHLPGRGKSDKADCVWLCKLNERGMLRRSFVPPQPVRDLRALTRTRARLAQDQARHQARVEKILEDALLKISVVISDLFGASGRRFLDALVAGERSPAALAALGDKRLRATRAELAQALTGRFRDIHAFEIAVHLRLIDAINTEITALDEQIGQQLALVPGTAPACAACGLAGGGHAPGCADGGAEVLGLAGRLDEITGVGAVNGRAIIAELGTDPSQFPTPGHAAGWARLTPRSRQSGESAKPGRTGKGNRYLRGALGQAAMTAARTDTRLGAMYRRIARKRGKQKAIVAVARVICEIAWTLICDPSARYTELGPDYYSPRSPARQTRDKIREIERLNPGKKVILADAAA

SEQ ID NO: 405932 - protein, 357 aa, unidentified
MATQLTAQPKLYIGMDIHKKSWSIHMRTDISDHKSMTIPADEEVLINYVETNFAEHHVSLVYEAGCCGFGSARYFLAQGWEVLVVNPADVPTMDKQYYQKTDKIDCQNLSKQLKAGHLKGIYIPDMEQDQLKSLLRQKAEVARQLRNVKSEIKSLLLYHNIVVPDNFDNPNWTKDFITWIKQLQWDFTSGKACIESKLRVLQLFHNEDLHIANELRAYCRKHFKKDYYLLKSIPGIGGYLASAILSEIGDLRRFNTEAQFASYVGIIPTMRNSGGTEHVTGVTPRCRALLRTYIIESAWVAYRLDPQMQKYYRKHIGKNPKSIIVKIARKLLNRMLSVIKNETPYKLNTSLQNNQSK

SEQ ID NO: 405933 - protein, 464 aa, unidentified
MSRKAQNQQERRSARPKVDWKALEVVHPDAAGIDIGGSEHWVAISPDRDEHPVRCFDCFTADLEQMADWLKARGVRSVAMQSTGVYWIPVFEILQQRGMEVYLVNARHTKNLPGRKSDIAECQWLLKLHTFGLLQNSFQPSDEIRAVRTLWRYRSGLVAQASSTIQRMQKALIEMNIQLTNVLSDLSGVSGMAIVQAVLDGKRNPEELASLADPQVKASKEVIAKSLRGNWRPELLFVLGQEMDSYRAYRKRIADCDREVQQQLQRMESKVDLSTQPIGPRPKGKRARGNAPQVFDLRSELYRLTGVDWSQVDGIDVQVAQTVIAEVGADLKAFPSEKHFANWLGLCPTNETSGGRVLKRRTPKVVNRAKAAFRQAASTLIRSNSYLGAQYRRLRTRLGAPKAITAMARKLSCLFYRLLTKGQKYVDRGAQYYESRYREQQIRSVIKRAQRLGLQVLSPEVKPA

SEQ ID NO: 405934 - protein, 433 aa, unidentified
MREMTDEPLYRDRVCGIDIGKAGMAATIRVPSDQNPARRMAETREFGTTKREVLALADWLRSWQVPAVVMEATGDYWKPVFYRLEAEGFECVLADPRQVKNLPGRPKRDPSDSAWLAVCFERGAVRPCFVVTPEFRLIREHTRYRRDLTGERTREKQRAEKLLESAAIKLSSVLSDLHGVTGRDIMNHLIAGERNPKVLAQLARASARRKIPQLEHALEGTEFFTPEHAALLKVMLDRIDRLAAEIGELTEVIERLLAPWEEQLQQAESMPGWERRTAQDALAETGPDMTRFPTGAHLASWAGRTPVDNQSGQKTGRPKSKKGNRYLGAVTGQAAAAAGKTQTREGERYRRLARRRGKLKAIVAVGNTQLNVSCKLLSNPGMRYQDLGPDYYERRADQRRQIAYHVSKLSALGLEVTLARIPEPEQETGTQAA

SEQ ID NO: 405935 - protein, 316 aa, unidentified
MSETILGIDVAKKKLDACLMTDGKVLTKKFANDTKGIKLLEGWLRSMKIERAHVCLEATGTYSEMVAEFLYEHGHRVSVVNPSRIEAFARSDLKRNKTDTADARTIAEFCLEKDPDDWHPLPPEIKQLQALSRRLEVLEKMLAAEHNRLDTAPKTVTSSVKRVITDLEKEIDNVQRLIKDHINNNPDLKQQSELLQTIPGIGEKTANLLLSEIEFRSFSSARAVAAHAGVTPRRSQSGTSLNRTRLSKIGNSRIRKALYFPAITAIRYNQVISVFARRLRKSGKRPMQVVGAAMRKLIHIAYGVIKNSRPFEPTPA

SEQ ID NO: 405936 - protein, 414 aa, unidentified
MVEETIAWFAGVDWGSAKHHACLLGAQGAIVGEREFPHSGKGLSELADWILSMTGIASAVAVAIEVPHGPVVDVLLDRGFIVHAINPKQLDRLRDRFSVAGAKDDRRDAYVSADGLRTDRHLFRRLQIADPRLIELRAWSRLAEELQEERVRLSNRLHQQLWRYYPQMLELTDDLTATWLLELWLKAPTPAKAARLRVSAVERLLKQHRIRRVNAEVILRTLRQPAIKVPDGVAVAAGIHIHSLIVRLQVVSRELNDAKRKLDELCTAIGETGAASEERAEHRDVAILRSLPGIGRINLATLLSEASGPLSRRDYQALRTLSGVAPVTKRSGKSHVVVMRYASHVRLRNTVYHWARVATQHDHESRTRYAALRRRGHSHGRAIRGVADRLLAVACVLLQRQTLFDPHFRQPTAS

SEQ ID NO: 405937 - protein, 328 aa, unidentified
MKATHDLAPYRWVGIDVSKAKLDVYDLSSQRYAQYDNREVGIAHLVQSLLTVEDVAVVCESTGGYESLMARRLHHQGLRISVVNPRAVRDLAKGFNQLAKTDRIDAKMIATYGAVIRPQAVALASATDEELKGWLMRRRQLVEMLSAEKHRRQQLSHGPIRAAVSAHIDELESRIQEADQQSKNLSESNAHSSELKTMLLSVKGMGPLISSSLLVLLPELGQLNRKPITALVGLAPFNRDRGQFRGKWRIWGGRDSVRTLLYLAAMSACRYNPPIRADYEHLRAQGKAKKVALIACARKLLVCLNAMVRTQSGWDETKVTAVFQPSCS

SEQ ID NO: 405938 - protein, 430 aa, unidentified
MENSTSKRIRAITATTLIVGIDAAKDVHWARITDYRGIDLCKPVKVNNNINGFESLLQRIEKLKNKHGCDKVIIGMEPSGHYWRALGWYLMLHESKPVLVGVNPYHTKQARELDDNSQTKSDPKDALIVAHLIRDGRYFDTYLPEGEYAELRILNGERQRLMKQVSRANNTTVAVMDEFFPELGKIWERVTCPTSRDIMKVFAFPNEILAADKNELLTLIKKASGGTEGEKLANELIGAAEVSVGVREGRKSAKQKLLRLIEELEFYETRVDTLEVALETIMDTLELGEILQSMKGIGPVISSAFVGEVGNASRFDNWKQIRKLAGMNLVEQSSGKHIGKTKVSKRGRPYLRHMLFMAGQSCCKSNPEMRQYYQYLRRRPNNPLGGYQAIVAVGLKVMRILFYMAKNKEKYDPDKALGDVRRQQILSLAM

SEQ ID NO: 405939 - protein, 390 aa, unidentified
MANIIYIGLDVHKEKIQACAFLATYGFGEDRVLANIELGGNYQEIIKFASTLKKKFGKETRFVCGYEAGCLGYSLCRHLQRCDIECHIMAPTTMSKEPGVRIKTDRRDAEMIARCLAYNTYKGVHLLDEEDESVRDYIRMRDDFKQMLKVVKQKILALLLRLGIRCDTCKTPWTQKHLQWLKNVDMGKGLNRETLDEYLKELDHLKDRIDNFDTRIHELCDTERYKENVKKLICFPGIKEHTALSFISEIGDFTRFGKAKNFAAFLGLVPGEQSSGSKVHRTALTKSGNIHLRRLATEAAQAAIRSSPSYKSKALKARQEGAPEEVIAYADRARDRIIRKYKKMIRGEDLLGGHKAHNVVVAAVAREMSCFICGMMNGWYDGADSDKLQT

SEQ ID NO: 405940 - protein, 324 aa, unidentified
MDVAVNVVGIDVSKATLAVCYPVQARLQHTEVSNSAAGFQQLVRSCGADCLYVMEATGTYYLALAYYLVEQGAQVAVVNPLVVRRFIQMHLGKGKSDRKDAQWLLRYGQQQALPRWQPDAGILVECRQLEQVSEQLIRQKTMLLNSLEALQQHPLVSTIAQHHLHQALDQLEAQLQVLEAEMLRLLEQHYAREMPLLCSIPGIGRKTAAALLLFAKGFTQVDNYRQLIAKAGLCPREYSSGTSVRGKARITRMGGGLIRRKLFMCSFSAKKANAACKALYDRLVAKGKNGKLALIAVCNKLLKQACAIVKSGIPYQADFAKISA

SEQ ID NO: 405941 - protein, 404 aa, unidentified
MKITSTFAGIDWSWQHHALCIVDDDGKRISETTVTHSKAGLTKITSLLRSHHVERVGIERGDGPVVEHLIRDQFEVVVISPRQVKSLRARYGSAGNKDDRFDAFVLADALRTDPHRWAVVRPDSDATVALRALVRARQDLVGHRIAVHNQLLATLQHHFPGAIGLFYQLDIPISLAFLRRFPSEAKAAWLSPIRLGHWLEANGYCGRATPADLIRHLHEAAAGHTGGAVSDAEELIVLSLVDLLTSLRQRQSALEARIKEALLAHPDGPIVQSLPRSGVVRAATLLAEIGDCRARFPDAQSLAAAAGVAPSTRQSGKHRNVTYRRGCNKQLRAALVDWAQDTPRANAWAHDTYYRARARGCRHPHAARILAQGWTRILWRCWHDNTPYNPELHGRLSTLAMEAA

SEQ ID NO: 405942 - protein, 467 aa, unidentified
MKLLYRCCAGLDVHRDTVSACIRRRVRGQAEATIEEQVFGTFTQDLECLRTWLKKNKVRQVAMESTGVYWIPIGNVLERHSRFTLTLANPATVRALQGQKTDRIDARRIAEYLQYGLLRGSFIPPKPIRELRELTRMRVHIQQDRNRVINRIARLLETVNLKLASVASNIAGTSGMAMLRLLASGMRDPERLAQCAQGQMRIKIPALLLALDGRPDAHFRWMLSEFLTQLARLDEQRARVDARIEQLALPDEDRLRRLSTIPGVDRTTALVLLAEFGTDMTQFPTPGHLASWAGLCPGNAESAGKRFSGRTRKGDRYVRRILVQSAWAASRCHDCFLAALFFRTAQRRGMKKAAVAVAHRILIIAWHILAEAGVEYYERGGDHFDRRHPERTARKLTRRLEAIGYKVTLIAPPKPPRPCSKPRVGTPPTPPVHPSVCARCARWGMPRCICLVKRNRTPSPPQSERPL

SEQ ID NO: 405943 - protein, 367 aa, unidentified
MKKVSTVAAKPSKKISQQKLTVGLDLGDRNSWYCVLDESGQIQLEQRVRTSAKALQEVFGAMPRSRIALEIGTHSPWISRLLSELGHEVIVANARKVRLIGESRKKDDRLDAQTLARLARMDPELLSPVKHRSAQAQADLMMIRARAGLVRARTALVNTARGLAKSYGERLRGCNVRNMNPEKAQGLSPELQSALEPLLAGIEAVSERICEYNERIEQLAQQSYPQVALLRQIKGVGTLIALTFLLTLEDPHRFRKSRDVGCYLGLQPGRRNSGQSEPQLHISKEGDPYLRTLLVQGAQHILGPFGPDCDLRRWGLRLAERGGKSGKKRAIVATARKLAVLLHRLWVSGEVYEPLHNSNRTTLAAAA

SEQ ID NO: 405944 - protein, 438 aa, unidentified
MSNKVIFNLDELFISVGIDVGADFSWMSIALPTQQFVGKPYKILHNSIDSLTTAVSKIKEAEELYSLESRIFLESTGIYHYPLFCYLRDKGFNCSVINPIITKNSTNINIRKVHNDRFDSKKVALVGLKPDLKVSLMPSDLALNCRNLCREYYDLMDNRSAYVNKLQGELRMAFPQYLGIFSKVTTNTSLTLLDKYTSPNAFLEADMQEIIDTIKSTARFGLTYAHNKYNAIIQAAHDANEFGHIIDSNIKRIRLYISFIRKYDEEIESILDAMHELVDTNEDTDFVKQIHLIESFKGAGFLSAISLMGEIGDFSAFSKPKQLFAYFGLDPAVKQSGKFEGTKIQMSKRGSSIARRVIHTLTLQSISVSRTGEAKNPVLRDYYLEKCKSKAKLVAMGAVSHKVCNIIFAILRDNKPFEIITPQEHIKQYNAAKCDMAA

SEQ ID NO: 405945 - protein, 343 aa, unidentified
MSSINRVGVDLAKNIFHIHAVDERDKIVWQGKYKRDTWIKAIAKRVPPSAVIAFEACASAHFWARELTALGYQVKLIAPQYVKPYVKTNKNDKVDAEAICEASGRPQMRFVRVKTVEQQDDQALHRVREDLVRQRTAKVNQIRGLVGEYGIVASWGIGNLRQAIPFWLEDGENALTCEFRHLLALLYEDLSCLDERIETLTNMIKQRISSKPESKRLLAVTGIGPLVCSALLLEIDGKQFKNGRDFAASLGLTPRQHSTGGKDTLLGISKRGDGYIRKILVHGARSAYRHSKKKSDSLSLWIQRLSEKKHANVVIVALANKLARIAWALVAKNETYDEKLASA

SEQ ID NO: 405946 - protein, 454 aa, unidentified
MAKKRVKGKTLGGFAETNHDAAGIDVGDAQHWVAVPAGRDTVSVRMFGCFTADLHALANWLMKCGIKTVAMESTGVYWIALYEILESRGFQVCVVNARQAKNLPGRKTDVKDCQWLQQLHTYGLLTASFRPQAEIIILRRYLRHRETLVQEAATCIQRIQKALTEMNLQLANVISDISGATGLRILHAIVEGERDPQRLATLRDWRIKATPEEVANSLLGNWRDELIFVVEENLTLYGVYQEKIERCDQRIEQHLKSMPAQIEGDTNPLPEPRKGKRSHGNAPAFDLRSELYRVTGTDLTQIDGINVVTAQAILADTGTDMSAWRTEKHFVSWLGLCPDHRISGGKVLQRGTRRVVSRAATAFRLAANSLRRSQSALGAKYRRLQSRLGPPKAITAMAHHLARLFYRMVKYGSQYIDHGMAAYEARFKEQQLKWLSRKAAELHFRLAPIPNLAV

SEQ ID NO: 405947 - protein, 407 aa, unidentified
MDVVLSKCAGLDVHQRTVVACARVVAGSSVKHDVRTFGTTTAELLALSDWLSTYGCTHVAMESTGVYWRPVWHVLEGGFELVLANALHIRNIPGRKSDVNDATWIADLLAHGLIRSSFVPPEPVQELRDLTRTRKQLVREIAQHILRIQKTLENANLKLTGVLTDILGVSGRAILQALVAGESNPERLAKLVRGPVKASQADLMAALHGRVTAHHRFLLKLHLTQIEALEAAVVEVEARLGMALAPFHSALARLTTMPGVSETVARVIVAEIGFDMTRFPTAGHLVSWAGLCPRLHESAGKRLSNRTRHSNPWLKTSLVQAAWAAARTKKTYLRAQFLRLKSRRGPKKAILAVAASMLTAAYYMLKHDVDYRDLGADYFDRRDKAKLAKRLVARLHDLGFTVELRAA

SEQ ID NO: 405948 - protein, 388 aa, unidentified
MEARTVNNLPPTASHDETVRCLLAIELSKKSWIIAVNTPLSDKISRYRLEGCDWKGLLELIERIRARVARELNRAVEVISCYEAGYDGFWLHRLLEAHGVRNLVIDPASLQVDRRARRAKTDKIDAERLLRSLMGYLRGEPKVWSVVRVPSVAEEDDRRLHRERDRLINERVQHVNRIKGLCAVHGIYDYEPLQSNRLARLKQLRTGDGRELPQRLKAEVVRELQRLELVLKMIKTIEAERDAIAASKISTHTHAKKIQDLVKLKSIGPEIATALVGEVFYRRFNGRHQVASYVGLTPSPFQSGSLNHDQGISKAGNPKARTIMIELAWLWLRHQRNSPLSVWFRERVGTARGRIRRISIVAVARKLLIALWRYLETGMVPTDAVLKG

SEQ ID NO: 405949 - protein, 336 aa, unidentified
MKKHQVFIGIDVSKSKFDVCVLESINYSTIFQETYPNDRKGIQQMHRHLLKQVKVDVSAWLFCLEHTGIYTMPLSCFLSEQKLDYSLLSGLQIHRSLGLKRGKSDKADAHDIARYACLHEPEIELYELPEKILLKLRLLLTHRERLLRARKMFADAEEVKEFMDKSLSPEVFRESNSLVRQFDKKIKQANEQIQQLIESDEKLKTAYQLTTSVPGIGPQISCYLLIYTRCFTSFDNARQLACFAGVAPFEYSSGSSIRGKTKVSHLANKKLKTLLNMGALTAKKIDPELGLYYQRKTAEGKNGMLVMNAIRNKLIARIFATVKRGTPYVPLMQFAS

SEQ ID NO: 405950 - protein, 366 aa, unidentified
MRLAGEPANRGGREPVTPWAENRVGAGAAVAFFMNPNSCRGQDPVRKAGSQKMRERSTVGIDVSKLRLDVGVVPGGEVLQFSNDVAGRASLIEWLKAKGVKAIGLEASGGYERDLIKALRQAGLPVRMVNPYRLRQYAKALGVLAKNDRIDARLIAQFVAELPTREPRHDPLTEQMAELVVARRQLSDDKVRLSNQLEHVRDPALRRMTTQRLRRIAADIVLLDKRLAEIVASNTELRTRDRLIQSICGAGPIYSYTLIALVPELADPTLDRRQLAALIGVAPYDDDSGRRNGKRAIWGGRAAVREVAYMAALSACIHNPVLRAHRQRLQANGTAPKQAIIAVARRMLGIVLALLRTGKEWDPKYA

SEQ ID NO: 405951 - protein, 470 aa, unidentified
MKSTAKNNNTQLNTELSSEEIIAIGKKAYEEATAITWRQAEVGRTLTQNDKIALVDDKTLVIGADVGSVKHDIRAFDNRGREFSKKALEFDNNEAGFAQAKAWILMIRDKQHLEKIMVGMEPTGHYWINLASWLMNEGITVVLVNPHHVKKSKELDDNLNRKTDRKDPKVIAGLVHEGRYSMPYLPDGVYANLRNLNNLRLMNTEEKTRCMNRLNRWLSIYFPEYGTVFKDVSGAGSLLLLEQAALPGDIIKLGADGVNKIWRAAKLRGVGYAKALKIVSVAEHSIGSTEGSDIARAEIQWILENLRTLIKWDNDLLERIEGLAREIPYMDNMLEIKGLGVRTLVGIFAEIGDFTRFCGVKPIQKLAGLALVEDSSGKHEGKTVISKRGRKRLRYHLYQAALVLIGQNDEFREVYDYYRTREENPLKKMQALMAVACKLLRVLYAMVTKGTRYDPEKLLSDIRRPQKKTA

SEQ ID NO: 405952 - protein, 314 aa, unidentified
MSENLEIFVGIDIAKDTLDMGFQPSGQTVRLPHDAQGITEATKRLGEAALCLVVLEATGGLETPLAATLVAAGVPVAVVNPRQVRDYAKATGQLAKTDRVDALVLADFARAIRPELRPMKDALTRELDALVTRRRQLVEMRVQEALRLGRASKVQEKSLKRHIAWLDKRIEEIETDLRQRLRASPAWRAKDDLLRSIPGVGDTTSATLLAKLPELGTLDRKGIAALAGLAPLANDSGKQRGRRVIWGGRADVRCVLYMSTVAAIRCNPVLRAFADRLKAAGKPAKVVIVACMRKLLSIMNAMLKSNLPWNPKIA

SEQ ID NO: 405953 - protein, 404 aa, unidentified
MRYVGIDIAKKDHQIAAVDEFGNVILKSFSAGNNESGFAKIAEKLEAARIESDECLVGMEATGHYWISLWEFLDANGYEVVVINPIQTDAFRKVDSLRKTNAIDSVLIAEYLRFANPESSKMANPDVEQLRELARFRSFLVEQATQLKNKAIRVLDQAFPEYGKLFSNTFGEASKALLKQCPTPEEVLATDIRTLTRILKENSGGNCGRAKAEAVKDAARSSIGAKFGARALSFEIKLLVKRLSFTQVQIEELEDEISELLHRSDGHWLTTIPGIGDSLAASIAGEIGDPDRFETPKKLIAYAGMDASKYQSGANQDTNGHMSKRGSSELRRALMLAADKVRIYDPYFGEYYDSMKARGKHHYVALSGVARKLAGVCLSLMREQRPYESEPPEHHLPGHLQRQA

SEQ ID NO: 405954 - protein, 396 aa, unidentified
MYAVGIDVSKGKSAISIITTEGEIIEEPFEINHNQEGFDILLSKIKNIKKEEIKFLMEATGHYHLPILNSLIEKDYFVCVENALVIKKYCDMDLRKVKNDRKDSLKLASYCSDKWFKLRKFELSDKTREQLQFLSRQYCQYTKIKTSLKIQLTNMIDKTFPGIKKIIDEENRYDLLLDIYEKYSYPSLVLEKSKEEFVDEINNMAKKYRHKVGKAIGENIYTKAPTVITSCPYNESLQLSINSCILLLRDTIKVTNDIIAKMDELAMQLKEFDTVNNMKGVGPKTRSRLIAEIGDIRRFKNANCLIAFCGIDVPSYQSGNFNSTNRHISKRGNKYLRKVGYEITKSIKSCRPKTDNAVYLFMLRKETEGKNKTAAKIAGLNKFLRIYYARVKALYN

SEQ ID NO: 405955 - protein, 370 aa, unidentified
MERLIAVIELSLSSWLVAGMVPGVERQPLKKLAVDENALLKLLNRWREEAAKAGHRIKRIAVAFEAGRDGFWLARWLRARDIEAHVIHASSVAVSREHRRAKTDRLDTELLKRSFLGWLRGERDHCKMVAIPTTQDEDAKRPNREHESLVGEQSRIVNRMKATLIRLGIRGFNPKLKKAAERLDGLRTPEGEPIPPNTLAELRRDMVRRRLVSDQIRQIEDARLERLKQAPSDGPHAMVRLLARVIGVGVETADMLVQEVLSRSMRDRRAIARYAGLTGSPDESGRKRREKGLTRSGNARVRRGMIQLAWRFLMFQKDSTLAQWFRTRTENARGTRKTMIVALARKLLIALWRLVREGVVPDGVVLRPAP

SEQ ID NO: 405956 - protein, 313 aa, unidentified
MDDSTTIPTSFVGCDVGKAEIVAFDSRTGRTTSVRNDSEALAAFASGLDPAALVICEATGGYEAALLGAVVCAGCSVHRADARKVKAFIRSFGTLGKTDKIDARALAQYGRERHDRLTRWEPRQQQRDQLHLLVTARRELVRQRVACRNRLQAPGMAGIAPRLQRILVALDTEIAGLDADIKALIESSEPLARTVKVLRSIAGIGPATAAQLVALMPELGTLGRRQAAALAGLAPHPKQSGTNDAYRRTRGGRPDVKHALFMAGLAAARHDPTLRAFYKRLCANGKKPIVALVAVMRKLLVIANARVRDLAII

SEQ ID NO: 405957 - protein, 366 aa, unidentified
MRSVPHDAEAVYVGLDVHKDSITAGVLQPGRQTPELERFFHDEVSVRRFLDRLGDRRRLRVCYEAGPTGFELARLLEALRVDYLVAAPSLIPRAPGDRVKTDRRDARRLTRLFQGGQLTAIHVPTRQEEAVRDLCRTRTDMVIDLGRARHRLSKFLLRHDHPYRGGTEWTDRHSRWLTGIRFQDPALRATFGHYRGVVTTRTAELRAVETDLVPWCDREPFADAVHRLGAYRGITHLGALSIAAEVTDWRRFPKAGTFMGFCGLVPSEYSSGTHTTRGHITRTGNTNLRTHFLESAWSYRHQPAIGLTLARRHQGVEPHTLARAWQTQLRLCARFQRLAHRKNAAKLVAVAVARELAGFCWAEMTA

SEQ ID NO: 405958 - protein, 365 aa, unidentified
MQHCISVGVDLHDRSMVLRWALDRDEAQADSFCNDAEGRERMIEMFRQVCAALPGARVVFAYEASCRGFGLYDQLSEAGFECAVLAPTRLPRSVQGRRRKDDGRDAARILEVLRAHVLAGCQLPSVWVPDRRTWDDRELVRARLGLSDKLVALKNQVRTLLKRNQVRPAADLGKGWPKAYRAWLRGLAGQASPLGPGARAALATLLVQIETIEEQTAVLNRQMRSLSGKERYEKPAGALMRLRGVGLLTAMVYLTEMGQMSRFSNRRQIGSYLGLAPASYESGEADDRKGRITRHGPSRVRRVLCQATWSRVRTDAAERAAYERICARNPKHKKKAVVAVMRRLAVRMWHVALEAQQEEPAQAAA

SEQ ID NO: 405959 - protein, 361 aa, unidentified
MCPPTLGLEVSQRMLADQLDYMIGVDPHRDSHALAVVHVISGAIVFEATVAANSAGYGQALEFADQHAAARRAFAVEGTGSFGAGLTRFLSGRGERVLEVGRLRRDRRSGGKTDALDAVRAARSVLTQKRPATPRAGGERQALQALVAAREGSVNAKRAALCQLRDLLITTPEPLRSQLRPLSRARLLQQLAATRPDGRRDPELRGSMLALRSIARRVLQLTAEERQLAREIETITRKLAPQLLDQPGVGPHAAAQLVLSWSHRGRIGSEAAFARLAGAAPIPASSGQTIRYRLDRSGDRKLNRALHMILVTRKRSHPATIAYIERRLQEGKTKREANRCLKRYLARSLYRLLEHGAPLAT

SEQ ID NO: 405960 - protein, 355 aa, unidentified
MKRTTKYVALDVHQATMSASVREDGGRVIARTVLPTTAPTIVEFFRSMRGAIHVAFEEGTQAQWLHDLLVPLVDRVIVADRRGTSPRGNKGDQADADELSELLRCGALRAVYHSRSPHRETLRELARAYTNLVEDSTRVMQRLKALFRARGIPTPGKQVYHPAQQAQWVGLLTGSGVRFRATALYAELEVLRELRPRAKATLLAEARKDPAWRTLRTIPFLGPVRVALLLATMQTPWRFRTKRHLWAYAGLAVVSRSSADYQLVRGRPVRRRRAPMTRGLNRNHNRVLKNVFKGAATAATARPGAFQTFYQTMVARGMREDLARVTLTRKLAALTLRLWKTGDHYDSTKLTTQAP

SEQ ID NO: 405961 - protein, 337 aa, unidentified
MKYCGIDLHSDNSVVIVSDEEDRMVFQKRLPNDLGQIRAALETHQEELAGVVIESTYNWYWLVDGLMDAGYQVHLAHPAAIKKYEGLKHSGDFADAAYLGQLLRLGLLAEGYIYPREERGARDLSRKRMQLVRYRTAQILAIEGILMRQTGARMKGEAVKRLTAEQVDEFAFAPDVALAVEANRAVSQALGQQIEALERRLKERVSLRPEYRLLKTVPGIGQTLATTIMLETGTIGRFAKVGNFSSYCRCVDSLRESNGKKKGEGNTKNGNKYLAWAFVEAANFAVRYCPQAKSFYDRKKSRTNRVLAIKALAHKLARACYHMLRDQKPFDVHLCFG

SEQ ID NO: 405962 - protein, 356 aa, unidentified
MDQLTTVGIDLAKDVFAVCVLDVTGSVVERRVLRRDAFLRWAEHLCPCRVAMEACGSSHHWGRWFAARGHTARLIPAEFVKPFRLSGKNDAADAEAIAVAARQPTMRFVAIKSVEQQAILAWHSVRAGWHEERTALLNRTRGLLAEFGVVVARSADRFLDALPTLIEDARLPYPVRSMLLEVREQLAALNLRLARCDQQIATHARTSDVARRASELLGVGPVTASALGATVPDAKIFRNGRQFGAWLGLTPRQHSSGGRTRLGHISLRGNVYLRTLLVQGARSTLQSALRADPAHASRLQRWIRQLHDRKGYHKTLIAIANKHARMLWAMLAKGERYDADAWQRHPLHPPLPPAAA

SEQ ID NO: 405963 - protein, 412 aa, unidentified
MDATYYVAGIDVHKKMLAAVVANVGDRELRFECRRFGTTVSELKNLSAWLREHTVQEVVMESTAQYWKPVWLALEGQCQLWLAQARSNRGPRGRKTDFRDAKRSVSRLLSDDLRLSYVPDAEQRCWRTLTRTKYQLTRDRARLQSQLESLLEECQIKLSSVVSDLLGASGQRILRAIATGETDPARLRALGDKRLHATDAQLRDALSGQPQPTHRALLTLYLQRLDLIETQIAELERMIAEAMKAHEAAIVRLSELPGLGVDSAQQIIAEIGPSAAAFPSAGQLASWVGVCPGSEESAGETNSNRSAKGNRAMRRLLNQLAHAAVRKRDCYLQILFKRLSVRLGYAKAVWAVAHRLCRLIWKVLHEEVRYVERGPTVSALTLKRQKQRLVTQLKKLGYSVQLTPVTASETGL

SEQ ID NO: 405964 - protein, 318 aa, unidentified
MPSSKTGIIGIDVSKAQLDVAVVPAGETTQFANTDVGIEELVAWAQTCQPQLIVLEATGGLELLATGRLTASGLAVAVVNPRQVRDFAKATGRLAKTDRIDAQLIAQFGEAIKPVPRTLKDEATQQLSALLVRRRQLVDMLTAEKNRLSRAPQARIQKDVQQHIAWLEKRIAKTEKELGAAIKASPIWRVKEEILTSAGGVGPVLATTLLCRLPELGGLNRRQISALVGVCPFNRDSGTMRGKRSIFGGRADVRAALYMSTLAATRFNPPIKLFYDRLIRAGKLPKVALTACMRKLLTILNAMVKHQQKWDPQLSQST

SEQ ID NO: 405965 - protein, 480 aa, unidentified
MSVKCNVPSGKNQAAKYTKSLEVVNPRCAGLDIHKEKIWACTSPFRDGVVPEVSTFGTDTGSLEKLAAHLQERGITTVAMESTGVYWLPAFLMLRQANLNPILVNPCDIKNIKGRPKSDRADCVWICRLHSYGFLRASFVPPDTVLDLRSFYYAHEKLTVESAKIIQRMNDELVKMNIRVDLVLTDLTGASGVRLVEAILQGEHSPENLYQLLDKQIVKKGRDAILPHLHGNYRAGNISILRSWYRLYLAIRGEISCINEQIYGILQSLPKKADARDIPRAKKNYREDKLDFPYKLRPVFFEIYGVDLTQLPGIGAGTLLALVCMVGTDLSPWPSAKHFVSWLGLAPINKESAGYCKSSSTRRINNLLGNAFKMAAMAARRTTTYIGRTARQLASRILPKKAKVAMARKLAELVYHILQDGMELKVKTEEEYEQRRKQRDIRFFVKGLCKYIVNGKLLPEVEEAYHEYRRGTKAAPLANA

SEQ ID NO: 405966 - protein, 344 aa, unidentified
MKYPQFYLGIDISNRDFAASIFTAPGAPILSLTQISNDISGFERFEFWLNSNKVKSDNSIICMEATGVYGEALSYWLTAKGYKVAVEPPLKVKRSFSDKSHKNDKADSKKISEYAFRYFDELNIWRPKPAIVEKINVLLMTREQLVEQKTAMQNTFTALQKKTVQASLANGIYKKNIEQFQVQIKKIEKEIKKTIEADPDLNRTFQHLILIPGVALLLAANFLVVTNGFENELAVNYRKAAAYIGICPYQHSSGTSVYKKPGIPNYGPPRMRKLLHLASRSVVTHSKRFSGYYKQKVAQGKPGKLVLNNVSNKILKIMCAIVRTDSPYVDNYVSINPNSMKFNT

SEQ ID NO: 405967 - protein, 336 aa, unidentified
MFQLGIDVSKKTLDLCLLREGVKGRVKTRKLQNDINAVSAVIAWLSKQHCKPEDVHIIMEATGVYHESLAYGLHKAGGRISLANPHRAREFARGMGMLTKNDRVDAYMLACYGVLKAPEPWLPPPEEVRHLSALLRRRDALVADSTREKNRLEKYLATDTPSVIAESVEAMIGQLNAEIKRLDRLIRSHLNQHPELKKDFDLLTSIKSVGYQLGLNMLVILRSHDFATAELAAAFLGVVPVEKYSGTSVRGCPKLSKIGPPGIRAKLYLASLCGLRFNPLMKAMYERLCLRGKAKMCAIGALMRKLVHWCYGVLKTQKPFDVGYLPSYARSACKAA

SEQ ID NO: 405968 - protein, 348 aa, unidentified
MTLTIVETRAVTGGVDTHADTHVAAALDSIGGMLGVREFPATPVGYAGLLGWLGGFGTVHLVGVEGTGSYGAGLTRHLGAAGIRVVEVDRCDRQDRRRQGKSDPLDAVSAARAALSGRALGVPKGRDGAVEAIRALMVAKRSARGERTQTINQARALIVTGPDELRAKFARHSPAALVAELAALRPRAGDVPGYATQIALRELARRVEFFDAQLQRLDALIVPLVTTHAPGLLAVYGVGPDTAAMLLVAAGDEPARLRSEAAWAHLCAVAPIPASSGKVTRRRFNPGGDRQANHALWRIVITRMSAHPPTRAYVARRTAEGLSKKEIIRCLKRYIAREVYPHLRPAGG

SEQ ID NO: 405969 - protein, 311 aa, unidentified
MATSSETYVGIDVAKERLDVAVLGERQGKQVSNTKDGIAQLLEQMQALQPELIVVEASGGYQRAVVDVLFHAGLAVAVVNPARVRQFARASGLLAKTDKLDAQVLAEFGRKMQPKRYEGKSEAEKQLSALLVRRKQLEEMLKAEQNRLRTISPSLRGSVERIIALLKEEKKRLEEQIQEFLKEQKAWQEQAQILSSAPGVGMVTTATLLADLPELGKMDRKKIAALVGVAPMNYDSGKRRGYRKTKGGRTDVRSVLYMSTLVATRYNPVIQSQYQQMLKRGKEKKVALTACMRKFLTILNAMQRDQQPFRM

SEQ ID NO: 405970 - protein, 349 aa, unidentified
MRFYNQQHRFYCGVDLHARTLSLCILDGAGQTVLARTIAASPDDFLQAVAPFRDGLAVACECMFAWYWLADLCHEQQIPFVLGHALYMKAIHGGKAKTDKIDAHKIAVLLRGGMLPQAYVYPKGMRETRDLLRRRTFLVRRRAEALVHLTNTNSQYNLPPFARKLAYAANRAELDVAQRFTDPSVRKNVEVDLALIGAYDRHIGALELYLVRTAKVDDPQAFHRLRSVPGIGKVLALILLYEIHDVRRFAEVGQFLSYARLVRCAHESAGKKQGTGGNKIGNAHLKWAFGEAACLFLRESEQAKKWLARREKKHGKARALGTLAARLGRTVYHLLCKQEVFDARRFFAT

SEQ ID NO: 405971 - protein, 459 aa, unidentified
MQPSPPIKLNLGYLICTTICPAACGRRTYSKIIIDRVPCRKFYFGGNHMDKVYDKCCGIDVHKKLIVACFRKGSKQELRNFGATTRELLELANWLQNGGCEMVAMESTASYWKPLYNILESSELKAMVVNASHMKAVPGRKTDTKDAEWIAELLQHGLLKASYIPDKQQRELRELVRYRKSLVSERTRELNRLQKMLEGANIKLSGTVSDINCMSARNILEYLLTGEFFDEAKYDEMYKQKIIAHNLKASKEQIIDDLNGVMTPLQRRMMKELLSHLDELNVHINNLEDEIDNFMKPEEKQATQAIQDVTGIGKNSSQAIISVIGTDMSRFPTAGHLAAWAGLCPGNNESAQKRKTGKMRKGNALLRSTLVVCAHSATRNKNSYFYAQFMRISSHRGKKRAYVAVAHSMLIAIYHILKDGVVFKDLGADYYNQFIMERKINAYLKKLKALGWEVPVVAA

SEQ ID NO: 405972 - protein, 357 aa, unidentified
MVHKHTILDWLGQHVFVGLDVHKRSWIVAIMTEQADFKTFTQPPDVKVLVSYLHRHFPNATYHCVYEAGYCGYWICEQLRAHGIECIVINPADVPTTNKEKKHKTNKVDARKLARSLRNGELMPIYIPSRTALEDRTLVRSRHMFVSKQTRCKNQIKALLSFYGITLPEDIADRHWSARYVAWLESLSLQSPSGTYALKTLLKELAYLRKSILDTTRAICALAHTEPYASNVVYLTTISGISTLVAMILLTEIITLDRFHSLDHLACFVGLVPGESSSGDERTMTGMTERKNRYLRWVLTESAWVAIRHDESLALAFNTLSRRMPKNQAIVRIARKLLNRVHFVLKHQQPCIVLKAA

SEQ ID NO: 405973 - protein, 416 aa, unidentified
MSNSSTSKKLKQVPSGTLHVGVDLALEKNLVVVINERAERIDRFNFATEWGGYQYFLERVVKVCQKQQASGVVVAMEPTNYFWKLLARALEEKEIPYRLVNAYTVKKHREGDRLDRSKDDPRDAEQIAELSRTGHFTETRLQNGAYEELRQYATLYTQTVQAIRREEQVVWGLAGQAFPELIQVFKDLEGSTSRALLLSCACARSIRQMTESDFVARVQAAYSGKKFRRSKVIQAYHLAATTIGASEGLQALQLAIQLHFSNLQALQSNLKQITQDMTTCLATLPEAPYLLSVKSWKAISVALFLAEVGDPKHYQSAAQWVKLAGIQPAPNTSGKKQRSKTPMSHQGRARLRTLLYFTCLRLIQYDPHFAQLYAHLQRRSNNPLTKMQAIGVLMNKLLHIVWALIHNHTYYQSSFA

SEQ ID NO: 405974 - protein, 347 aa, unidentified
MPVYIGVDFHARKQTISYLTTEDGEIHQLELQHEKQNEIRAFYAQFSGRVVVGFESSGYAAWFEEMLEELGCEIWIGHAAEIRRFARRRQKNDRRDADLILDLMVRGDFPRIHRYSPESRQVLQQLRYRQRLVKMRTMVLNSLMFMASSRGVSLRSKLLTKRGQARLNQLVLPPHLQQQREEMCQLLAELTRKIESVEDWLEQQAEQDPRVKRLRTHHGIGPLTGLCLAHTLECVERFANPRKVTGYVGFDPVEDSSGERQRIGAISKQGSRLLRFFLVEAGQVAVRRDEDLRRFYYRVQLRRGHATAKVAVGRRLLVRAFIMLRDEIDYEEFQRRGVAARSSRGTA

SEQ ID NO: 405975 - protein, 372 aa, unidentified
MNYNTVYVGMDVHKESFSLCAYTIEAEKASHYQRTEADYKKVLNYLEFLRTIYGDDANFICGYEAGCFGYTLYHQLTANNVKCIILAPTTMLEQRSKKRIKTDRRDAEIIAKCLAQHNYSPVHIPTAKDEETKEFLRMRDDHKLALKKVKQQILAFCLRHNYRYDGKSHWTAAHLKWLKALTPEALYKEILDEYLLTYQTLSDKIERLDKRIEELATQDEYKEAVKKLCCFIGEKTHTALSVLVEVGDFKRFASAQHFASYLGLVPGEDSSGDDQNRLGITKAGNRHVRLLLTEASQCYARGQVGFKSKELKSRQSGNTPAVIAYADKANERLRRRYYKMVLNKYKKHNVAKTAIARELACFMWGMMTDNIA

SEQ ID NO: 405976 - protein, 415 aa, unidentified
MDTTYASVAGLDVHHKTIQCAVRRQESGKLFAQSRSFGTMTCELRALADYLEALGITHVALESTGVLWKPIWNILEGRFTLLLVNPRHLKKVPGRKTDVSDAQWIAQLLQFGLLKGSFVPPRAVRDLRDLTRHRAQLTAEHTRVANRIHKLLEDANIKLGAVASNILGVSGRAMLEALLDGETDTIKMADLALSSLRRKIPQLRLALEGKFTEHHRHVLRRLMAHLEFLETETCLANESISRVEEQLLPRSDFKRLDAIPGLNRVSLQAILAEIGPDMSAFPDEHHLCSWAGICPGNEESAGKRLRSAIRRGNRWLRRALGEAAWAASRSKNSYFAAQYHRISPRRGKKRALIAVAHSLLIVIYHVLKGHKEYKDLGRDYFDRHGSERLERYLIHRLEALGHEVILRPQTADQSA

SEQ ID NO: 405977 - protein, 356 aa, unidentified
MNSTKYIGMDVHKEATVIAVMNAAGKLVMESIVETKAATIRQFIEGLRGELYVTFEEGTWAAWLYDLLKPHVTKVVVCNPRKNALLKTGNKSDRIDARKLAELLRAGLLSAVYHGETGLRTLKELCRSYLAISKDLARTMNRIKALYRSWSIPCGGASVYAPRHRAEWLNNITEPGVCRRAELYYQQLDGLQKLRQEARRDLLAESRKHGAAELLQGIPYIGAIRAALLIALIQTPHRFRTKRQLWAYSGLALETHSSGEYHYVQGQLHRSKKPMALRGLNQNHNHDLKSIFKGAATKAGSAKGPFHDFYTALLAKGMKPTMARLTLARKIATITLLVWKKGVCFDAQQLKRQVSV

SEQ ID NO: 405978 - protein, 390 aa, unidentified
MFFVGIDVSSAKHDCCILDSSRKTIRSFMILNNREGFSGLSAVLTELAAPENIKIGLEATGIYGDNLANFLRRKGFNVCTINPLLCKKYQSATTLRKTKNDRSDAKNIALIVASEDLQPDQTLSYHIVELKSLSRARFLTVKDRSSLKNKVKRLVTVLFPELLDVFTDLFGASGMALMTRYPSAKALAACNLDTLTELLKTASRGRFGREKAEALHKLAKESIGTFSESSVFQLRLLLKRIELLNTQVELYDDEIRRLMDLLNSPILSVPGIGYTLGAMILSEIGDIKRFSSPAKLLAFAGLEPSVYQSGKFNPASGKMVKRGSPFLRWALLQVATYAPASSVAFADYYAKKRSEGKSPSVARSHVAKKLVRVIFSLLSRNVSFVDSFAA

SEQ ID NO: 405979 - protein, 373 aa, unidentified
MSQSNTKLFVGLDVHKDSIAVAYAPQGRGAEIISIGSFGTRQCDINKFLKKLLAHSRNIVFAYEAGPCGYWLYRYLTKKGHTCLVVAPSLIPKRPGDRVKTDRRDAIMLARTLRAGDLTTVYVPNVVDEAIRDLSRAREDAKKDLKSAKHRLKSFLLRHDIRFEGKAGWGLKYLRWLGNVACETPAQQIVFQEYVRAITERHERVERLEAELRDQVDGWRLKPVVIAIQALRGIQFITAATLIAELGDITRFDNPKQLMGFLGLTPSEYSSGRKRKLGGITKAGNSHARRVLVEGAWSYRFPARVSRHLQYRLERVPQEIQDVSWKAQVRLCKRYHRMIAGGKNTNKVVVAIAREMAAFVWSIAMRTPLEDVN

SEQ ID NO: 405980 - protein, 355 aa, unidentified
MTVKTVGIDVAKSVFHLVGLNRAGKIVLRRRLSRTQLLRLTAQLKPCLIGMEPCCGAHHLGRRFVEQGHEARLIPAQFVRPFVKSNKNDYNDAEAIAEAVGRPRMRFAPLKTVEQLDLQALHRVRDRLVGRRTGVINQLRAFLLERGLAVRQGRLHLQRRMPELLEDAEVMLSARMRALLDSLWQEWRQLEAEIAVLTQQIRQVAHGSPDCQRLMQIPGIGPLVATALVAAIGSGHGFRCGRDLGAWLGLVPRQHTTGGKQKLLGISKRGNSYLRRLLLHGARAARLHAHREQHLFGAWLSRLEQRVHANVAVTALANKLARIAWAVLYHKQDYRQKAPASIAAAAGGLPSPCSG

SEQ ID NO: 405981 - protein, 347 aa, unidentified
MNITRVGIDIAKSVFHVHGVDRHDQTEWQAKLKRNQWLDALFDRVVPGAEIGMEACASAHYWGRELQKRGYVVKLIAAQFVKPYVKSNKNDRVDAEAICEAMSRPGMRFVAVKTVEQQDIQAAHRIRDELVGQRTAKANQIRGLVGEYGIIAPVGINKLRQALPQWLEDAENGLTDAFRALLIDLAEDLRHFDRRIADLDDRITQAVKADPVARRLLELRGVGPLTASALAGALGDGKAFGKGRDFAASLGLTPRQHSTGGKDRLLGISKRGDSYLRKLLVHGARAVIRYSKDRDDGLSQWLNELVVRKHLNVATVALANKTARIAWAIVHNETAYDPMLAAGIKAA

SEQ ID NO: 405982 - protein, 382 aa, unidentified
MSGTEPHAWETGRMNSITYVGLDVHKATVSVALAERGRGGEIRQLGVFENRPEVLSKLVRRLSNGDRRLSFCYEAGPCGYGLHRLLTGCGHDCVVVAPSLIPMKAGDRIKTDRRDAMMLAKLHRAGELTPIWIPDAAHEAMRDLVRARATAGRVLSKARQHLQSFLLRHDRIYRGIRAWTLAYRRWLTTVCFDHPAQQIVLQDYIHAVEDAEARRDRLTRQIDELLPSWSMAPVAMALQAMRGVALVVAATVVAEVGDFRRFANPRQLMAYLGLVPSEHSSGSSIRRGGITKAGNTLARRVLIEGAWTYRMPARVSRKLHDRLEPLPAAIRDIAWKAQIRLCARYRRLAAGKPKVVVTTAIAREMVGFIWAIAQIAQPPLPA

SEQ ID NO: 405983 - protein, 410 aa, unidentified
MELLHRRCCGLDVHKETVVACLRLVADGKVPTEVRTFQTTTADLLRLSEWLAANECTHVAMEATGVYWKPVWHILDDGDFVLVLANAAHVKNVPGRKTDVNDAMWLAELLAHGLIRASFVPDTQTQEMRNLLRTRKQLVREQSSHVLRVQKTLEDANIKLDSVLSDVMSKSGRAMLEALIAGETNPTKLASLASRRVKASPEELREALRGRVTKHHRFLLRLHLNQIDALAAAMVTIDAQVEESLEPFRTAVELITSIPGIQSLSAHVIVSEIGIDMSRFPSATHLISWACLCPRNDESAGKRRSNRSRKGATWLKTTLVQCAWAAVKKKDSYHQAQFYRIKARRGPKKAIMAVAASMLTAIYHMLKDGTMYQDLGRNYFDRRSTEQQKKKLIKRLADLGYAAALTPLAA

SEQ ID NO: 405984 - protein, 387 aa, unidentified
MAQVNDLSRSLTAFDPISTLVVVVEMSKASWLVSGVVPGVERQPLKKLEPDATALLRLIERWRNEAVRAGRPISRIALAYEAGRDGFWLARWLIVRGIEAHVIHSASVAVSRERKRAKTDRLDAAMLMRVFLGWLRGERGHCGMVAIPTMEEEDARRPSRERESLVDERSRITNRMKSALARLGIRGFKPHLRKAPERLAGLQTAEGTGLPANIIEEFRRDMARLALVREQISSIEKTRAERLERAPDTGPHAMVRLLARVIGIGIETADMLVREILSRKLRDRRAVARYAGLTGSPDESGLKRREKGLAKAGNARVRRGLIQLAWRFLMFQKDSALAQWYRTRTEGPSGARKTTMIVALARKLLIALWRLVTTGEVPDGVELRPAA

SEQ ID NO: 405985 - protein, 353 aa, unidentified
MTYCAGLDVSLEQTSVCVVDAAGAVVLERRVATAPEAIATALAALPERPARVLLETGGLTPWLWHACLAPRVDRGGRPGAASGARGLVMHCIDARRAKAQLALRPCKTDHNDARGLAEIARMGWYANIRVKSLDHHALRAKLAARAELVATARDLGNQVRGFLRSFGLLVGKGKGQFESRVVTLLASCPALEPVADALLAARRAVLAEVEHLDRVLLREARDNATCRRLMTVPGVGPITALAYQSTIEDPLRFGRARDVGAYLGLVPRRHRSGEVDRSGRISKQGDALLRGYLYEAATVLISRLQRPCALRAWARALAERIGVKKARVALARKLAVLLHHLWRHQEDFRWASA

SEQ ID NO: 405986 - protein, 446 aa, unidentified
MGNGSGLSRGDRRRNERLGGLREVVSADRAVIGIDLADEVQSVVVTDHDSRVVARRRVRVRAWELGPVLDWALGQACRAGFEGAVVACEPTGHRWRIVEQLAVERSMVLVCVQPLLVGRAREGEDFTKDKTDDKDAVLIARLVTELRCYRPEQADETWARLRQLGARRQRLITESTACVQQLRDLLECVWPAALTAAAQPFDSKSWQASISVVLDRCDGDLGRVRRLGWSRFAAAVRRELPRWGATRWCSRIVRAVFDALDDPTGVAVQRPAGLERAWFVLDDWHACRERLVTVEARMVGVLDELDLTDLVTSIPGLSAVGAAQILAEAGDLNRFASPRSLVKHAGLCPRENTSGKHQGVSRLSGRGRPGLRLAAWRAVWGAMHANPTYQARFAHLTTRATNPLTPGQARAAIAAALLRQLHVVVTRRVRWNPTLAGTPTPHDLAA

SEQ ID NO: 405987 - protein, 427 aa, unidentified
MSEIGLIKPEPEFAAFIGIDWADQKHVWCLQAAGSAKRETGELEHTPEAVESWVAHLYQRFAQRPIAVAVEQSRGALVFMLSKYELLHLFPVAPHMASSMRQALYPSGAKDDPRDADLLLDLLLQHRNKLRRLSPDSEATRRVQNLVEERRKLVDEKTAQINRLTDHLKVYFPQMLEWFGRLDSDVVCALLERWPALEELQKAPPASLRAFFRKHRCRDREQIEHRMEAIRQGVPAIHDRAVIEAKSAAVRVIVRVVRVLGEGIEDLDGQIEEAAAAHPDFFIFNSLPGAGPVMAPRLLAAFGSQRERYRSADEVQSFSGIAPLTETSGKRKWVHFRWACPKFLRQSFHEWAGHSIAQSEWARAYYQQQRSKGNTHHEAVRALAFKWIRIVFRCWQDRVAYDENTYLAALVKRGSPLGAIVATGKTL

SEQ ID NO: 405988 - protein, 442 aa, unidentified
MLWPSIDIEGPFISQAIWVRSLQGGDLLRVMTQKKGERTMFHLGIDVSKKSCRYLLLNEEGQKLKSFSLDNTHEAFQNLLERLKGLSIPKENLLIGLEASGGFWENLYSHLKENGFSVVLLNPYHTNKFREALAKKAKTDDIDALVIAQLLRTGEYVQSQVAEETIQSLREVTKLRYELMIERKNFQRQVFSLLSIIFPEHEKTALKNPFSIASSAILQKFPTAKDLAQAKPKQIEKIVRSIQGNNFNIKEIDTLIQTAQTSIYSGRAKEARATSLRILLDHIQNLSSSIEKLEVEIQQILSPQESNDSSPGENLFTIPGVGDKTIAAVLSYLGANGSNFSTSTEAIGYVGYFPKIYQSGQTHRENSICKRGPKLLRWALYMAAVASLKHNPEMRTLYHKKLSQGKTEKQALICVGKKLLQIMLAMLKSGEPYNPLRVYVNG

SEQ ID NO: 405989 - protein, 433 aa, unidentified
MKFKAQDKQNQLIENITVHHLVVGVDIAQETHVARAVSFRGIALGNPLQFGNHREGFELFKRWIQDLLKTHQLNKILVGMEPTGHYWFSLARWLSDQGVEAVLVNPHLVKKNKENRDNTPSKSDHKDALVIADMIKNGYYSPVRFHSETYEELRILMANRETVTKHLNSAVNQIHRWVDIVFPELRQVFKILTCTSAIATLRLFPLPSEIGQLTTDQVISGWKQYVKRHAGVKRAELLISLAKSSVGTTQALRSYKLHLSQLLEEYDLAQRQLEQIEHELHTTLKSIPYAQKLLEIRGIHVTNLAGILGEAGDLSGYSHGNALLRHAGLNLAEASSGKWRGKMVLSKRGRPRLRHFLYLMTMSMVMTNPEIRALHHYNVEEKKLKKMKSIMKLCGKVARMLVGLAKNNEPYDLTKVFPQAVIKSFDPHQLMHS

SEQ ID NO: 405990 - protein, 430 aa, unidentified
MKSNTQNAKIEAITEKTLVLGIDVGSKTHYARAFDYRGIEYSKKPFKFSNTEVGFATFKEWILDLKERHEKDKVVPGMEPTGHYWFNLGKFLQDNEMKPVLVNPHHVKKSKELDDNNPTKNDRKDPKVIAGLVREGRYMIPYLPDGVYADLRTASNIRFQLQAELTRIQNRISRWFNIYFPEYKTVYGKPDAKSGMLILKAAPLPEDILTLGIDGVNQIWRDAKLRAVGKARAKTLIKAAEHSIGSKEGTMSARMEIRMLLEDYESRNTRLQEVMVLIEELVKEIPMAEKLLEIKGVGIRTVSGFLAEVGDISRFNNPKELQKLAGLALVENSSGKHKGKTTISRRGRKRLRYLLFEVAMSLVAKNPEFRELHNYYTTRRLNPLKKMQSLMAIAAKLIRVFYAMLTKGVDYDPKKMISDIKRPTVYLQAA

SEQ ID NO: 405991 - protein, 416 aa, unidentified
MTATRKQHSTKRRTERKQAAVQPKPVEALYMALELSWTEWKLAFAAGPADNPRLKSIGARDTQALLQEIAKAKRRFGLADDAPVRSCYEAGRDGFWLHRFLESNGINNQVVGSSSIEVKRQGRRRKTDRLDAGKLLSMLIRWHQGERKVWNVVQVPSVADEDRRQLHRDLLELKAERTRHTNRIKGLLASCGLDVATIDARFPEVLAKLRTWDGQAVPAELQRRLQREHERWKLVERQIRDLENERVRTVRRSKEPVMDKVRQLLRLRGIGFNSAWMYVMEFFGWRRIRNRKQLAALAGLTPTPYQSGDDCHEQGISKAGNRRLRTMAVEIAWCWLRYQPNSALTEWYNKRFAKGSSRQRRIGIVALARKLLVALWRYLETGELPAGAETASWKKGLSMRTEEGSAGVTCQRDMPA

SEQ ID NO: 405992 - protein, 443 aa, unidentified
MIRRNVAGIDLGSERHWVCAPTADESGREIASFGATTAELIRMAEWLKARRVESVAMESTGVYWIAPHEVLEAQGLQVLLVDTRQLARVPGRDKKTDPTDCEWIQRLHSCGLLQGSFRPEEAVCMLRTLVRDKANLVAERGDWLRRMQKSLDQMNVRVHRAVSDLDGVTGMAILRAIAGGERDSQKLAKLRDPRCSKTEQEIAEQLRGHWREDHLFSLLQALQMYDAVEERIAAYEKEILRKLGDMEREEQRGQTAPPLQNANKTKAIKKRGQEPKRQALYRMSGVDITHIDAIGVETVEVVLSEYGPDLSRFPTEKQFLSHVTLAPHVPTSGGKPLRKRKRNSASTRVAAALRMTALSLRHSQTALGAYYRKMAQRPGGDIAVFATARKLATLIYRLLRWGQLYVDEEAEAHETRYRQQRIGRLAATAKALGYELAPMLESA

SEQ ID NO: 405993 - protein, 343 aa, unidentified
MEIIRIGLDLAKSVFEVCGVDMRDHVVLRKTLRREAVPQFFAELPPCLISMEACSSSHYWAKVLTDLGHQVRLIAPQFVTPYVKSNKNDRNDAEAICEAISRPSMRFVPPKSSEQLEIQAVHRIRQRLVSSRTRLVNQIRGLLAEHGVVIGRDISRLRRALSQIVEGADRNLGDLIQELASDIHQELAALDERISSYDRRIRNLFRTNEMCQRIGKIEGIGPITATALVAAVGDQSCFENGRQFAAWLGLVPKQRSSGGKSRLFGISKRGDRYLRTLLIHGARAVLGKAGGKQDARSVWINRMRERRHPNVVAVALANKNARIVWSILSKNEDYRGPETPQAA

SEQ ID NO: 405994 - protein, 412 aa, unidentified
MDVVNTRCCGLDVHLKTVVACVLLTQDDGTVMRKTHTFKTMTEELLALRDWLDRWGVTHVAMESTGVYWRPVYNVLEDEGRTLLLVNAQHIKAVPGRKTDVKDAEWLADLLRHGLLAPSFIPPQPIRELRELTRYRATLLRERTAEINRLQKTLEGANIKLGVVASDVLGASGRDMLQALVAGERDPEVLADLARGRLRAKLPELRQALTGRMQPHHATLLGHILAHIDFLEETIAALQEEIAQRLGPYAEEVALAQTLPGIKATAAATILAEIGTDMTRFPTHRHFTSWAGVCPGNKQSGGRRLSGKTTPGNVWLRAVLGEVAWAAIRTKDSYFRAQYYRLARRRGKNKALMAVAHSMLVALYHVLREKRPFQDLGADYFDRLDTTRIERHHVRRLEQLGFKVDLTPVAAA

SEQ ID NO: 405995 - protein, 388 aa, unidentified
MIQQESEESNGGRTVVGIDPCREFLQLAILAPNQETKFLKLPLAPSITAEIVKSTNPHTTQIAIESYGSYGKLFIYDLLKKGYDIREVNPHLSKKLSGLYSEEHSDRKDAESLAKALLLIPNLPKVAITDKQQWLAKLTRTRRKLVKDLNGYLNRLHIALTESYGAVYKKLFKILSMKKALKFFEDYPTINDSVSDKGMKERLGEEKWELLRQAGKWEDNTYLETLRTEIRGYIGIIRSITSTKVAIETKIRDAANVVEEMKLLGTFPGIGGVAGATLLSEIGDIERFGTESHLSAYCGVSPVIWQSGTGQIRTKRRRRYSRRLKGILYFIALSQIRINPESRAYYDRKRNEGKTHWQAMNALSRQLIKIIYYILKDKMPYQRTPLVN

SEQ ID NO: 405996 - protein, 317 aa, unidentified
MLEAPAIFIGIDISKARLDIAMRPSGECESVAHEEGALQSLVKRWSQMRPTLIVLEATGGLERSISRALASAQLPFVVVNPRQVRDFAKATGQLAKTDRIDALVLARFGEAVRPAVRPLADEASQELKALSARRRQIIEMMVAERNRASRAPKSVGKRIDAHIRWLEAELDRADKDLDQSIRQSPIWQENEDLLRSVPGIGPIVSRTLLAELPELGQLNRKQIAALVGVAPLNRDSGQFKGRRTIWGGRAAARACLYMAALVASRHNSVIGAFYTRLRSAGKKPKVVLVACMRKLLTIINALIKHRTHWSEFNSQTT

SEQ ID NO: 405997 - protein, 317 aa, unidentified
MKTVPFEQVILRGCGIDVHKDMVVATISGEGLKTETRSYKTFSSSLTELKEWLLSSGITHVAMESTGVYWKPVYKILECPDMKVWIVNARHIKYVPGHKTDKKDSAWICKLLLAGLLKPSYIPEREQRELRDLTRYRNKLIQHVSSEKNRIVRILEDCNIKLSSVVCSLDGVVANKLIDMLIDKGHVTMDDITCIYHKKLEASPELLYQACEGFIEPHHIYMLQTIRKDMEQTKAIIADLPCRIKEVLSPYENVMELLQKIPGLSRKTVEDLIAEIGVDMEAFPTEKHLASWAGVCPGNNENAGKKKVVEPPMATNS

SEQ ID NO: 405998 - protein, 397 aa, unidentified
MTYVGIDISKSKHCIAAIDQTAKVLLKPTFVSQDSEGFENIVQQLRLLGTPEEVKIGMEATGHYWVHFFNFLTEQGWQVELFNPVLSSAQGRAHLRGRKTDKDDAITIAKTLRDGGSSPWAIPSGQHAQMKLLCRQRSFVVSELSNAKRRLTGLLDLAFPEFSAHFSDAYGKAPIAVLKRAPSAKALLALPIKELTKTLHDNSAGRHNEAMAKKLREAAKNSIALSHKSEALSFSILSMLEQLEFFHRQLEACDQQIKMIFSALDDPIEKIPGIGPKNGPVILSEFGDLSRFKGGYKKLLAFAGLEPRIRQSGQWQGSVKMSKRGSPTLRTALFQAASMGCLHNADLQTIYHHHKHTKGKHHRIAISHVARKLVQIIWATCRNGKAFDPDEICANST

SEQ ID NO: 405999 - protein, 339 aa, unidentified
MDHVAIDLGSRKSQICVRNSEGEILEEKRWETLDLKRYLEGRPKSRVIVETCAEAFGVAEAARELGHETRVVPATLVRTLGVGARRTKTDQRDARVLSEVSCRIDLPSVHIPKAQSRERKTVCGMRDALVGARTKVINTVRGWLRGQGRRLGKGSRVTFTARVRTACGPELPDYVERQLRVVEALTVEIDDADKAVETQADGDDTCRRLMTVPGVGPLTALRFVAALDEVGRFANAHQVESYLGLVPGESSSSERQQRLSITKAGPPELRWVLVQAAWALRTRCRQPAAVPLQLWAHRIELRRGKRTATVALARKLAGILYAIWRDGTDYDGGRGAQMI

SEQ ID NO: 406000 - protein, 371 aa, unidentified
MNSILYVGMDVHKENYTLCCYSFDRDKVEYRQTVPSDYRLILKYLEQVRRKYPEEVEFICGYEAGCLGYSLYHQLTDHGVKCIILAPTTMGITNTNRVKTDRKDAANIARCLAFHTYSAVYVPDGEDNAVKEYLRMRDDQKLALKKIKQQITAFVLRLGKQYTGGKSLWTENHLKWLRGLDLTLLEKETLQEYLITYDYLTDKLERLDARIEELAGNERYGERVRRLGCFVGIKPHTALSLLVEVGDFRRFEKAPNFAGFLGLVPGEDSSGGGRNRLAITKAGNSHLRRLLVESSQSYSRGTIGFKSKELKKRQEGNPPEVVAYADRANERLRRRYYRMTLKNGAKRNVAIVAVARELACFIWGMMTDEIA

SEQ ID NO: 406001 - protein, 325 aa, unidentified
MQNQTIVGIDVSSATLDICVINDQGQQSFAIKNEVKTISKFFKAYSDPLIIGMENTGRYNWFLYEALKESIHRIFVVSPLHLKKSMGLVRGKNDKIDAVRVAAFIQKNHVDLPQWKPSSQAIQQLKVLLSERNCRVKSRKQLVSRNHDYSRMKHLDIDKELKMLNQQQLKLIDKQIAIIEKKIESVISSDEQMQHQAKLIRSIPGVGKVLSWIMLAKTESFQLITEPRKLACYSGVVPFANQSGSSLKGKNRVSSYADKAIKTVLHLAAMSAIRLNNDLQTFYLKKVAEGKNKMSVLNAVRNKIIHRIFAVIKNERSYQSHLVLS

SEQ ID NO: 406002 - protein, 349 aa, unidentified
MRFYNQQHRFYCGVDLHARTMYLCILDQAGEVVFDRNLTANPDAFLRAVAPFRDGLVVAVECLFCWYWLADLCAREQIAFVLGHALYMRAIHGGKSKNDQIDAGKIARLLRGGNIPVAYVYPAGMRATRDLLRRRMDLVHKRAEAIAHIQNTNSQYNYAPFSKKLGYAANREQLRIAERFTEPSVRRMIDIDLALIDRYEELLGDVELYLTRTAKIDDVNTFQRLRSVPGIGKILALVLLYEIHDVRRFPTVGDFLSYARLVRCVHESAGKQLGSGGKKIGNAHLRWAFAEAACLFVRQSERAKKWLARQEHKRGKGKALGILAAKLGRAVYHLLTKKVAFEEQRFWND

SEQ ID NO: 406003 - protein, 429 aa, unidentified
MKIIYPRVCGIDVHKKFIVAVICISESVEPIYLKKRFSTFHNDLIRFRDWLIQNDCQNVCMESTGKYYIPVYNILESHISNIVVANPKWVRAVKGEKDDDKDAKWIADLFKLGIVKSSFIPQKDFRILRELTRYKYKLVNMRSSEKNRYQNALTSGNCKLDMVFTDVFGKSASNIIDLILSDNPYTDEDILSKVHKNCKASPDMILNSINGTDLTPVQKSRIELVNNHIKQLSSNIQRLDKLIDLMIEPYEDYISFLCQIPGVSRNSAITILSEIGVDMNQFTSTRRLTSWAGLTPSSNQSAGKKKSVRISRAGVYLKPCLVEVAHAAVKDTNHPYYANKFNKISKRRGKKRAYIAIARKILVAAYHMLLTGEIWNPADLAEVETPVEQRIKYVKNNLKSDIKQLLDIGLTVEELTLMIQQNANIIATQ

SEQ ID NO: 406004 - protein, 299 aa, unidentified
MGKTNLDIVIHEKQIHWQEDNTEQGIKRILKRLSYYQVERLVMEATGRYEFDLAEAAYNKGLPVCIAKPLSVRRYAGAVEQLAKTDKIDAAIIAEYGAVCKPRVSPRRSKNLIAIKNLLVRRRQLVNLRTQEMNRRSIMGKKLEASYKRIIRQIDTEIERMEKQLSRYVEQQAQWSEKQTILKSAPGVGDTLTYTLLADLPELGTLTNNEISKLVGVAPINRDSGRKRGKRRIQGGRAAIRTVLYMATLSATQCNPVIKAFYKKLVAQGKHKKVALTACMRKFITILNTMVKNQTEWAV

SEQ ID NO: 406005 - protein, 419 aa, unidentified
MSFKIFKFNCCGLDVHKTWIYACIGITDSNNRTEYKQARFSSFSKGLHQLCVWLAKYNCNDVCMESTGKYWIPVFNILEQHKIRVTLSHPKYTKPMKGNKTDRKDAKWIGDLYMCGMVKLSFIPPADIRELRDLVRYRFKLTCMITGEKNRAQNCLTVSNLKLDDVFSDVFGKSSRSITEQILQHPGEKFDVSPFVDSRCKTPIEEIQAAVDGNISKEQAVKLRQCLDHIDELQKHISEVEQEILRFSDKYEAALNLIRTVPGFDKNPMTAIQVLSEIGGDMPVFPTAKHLVSCAGCCSRNDKSDRKIKSTRISCAGSYFKPVLVQIANALIKSKKHFEFTTRYKRIKTRRGHKKAIIARCRMILTAIWHILTDLKPYTSDGFLESRPVKKEKVLTTSQALNLLRQRGYLIKDEPSPVS

SEQ ID NO: 406006 - protein, 390 aa, unidentified
MDTAYFCGIDVSKDSFSVAIKNGSFILKDKLFSMDSKGFKEFECILSEFKRGLFIGMESTGIYHKNLFNFLCFRGYNTIEIDPYKMWRFFRFTNSKPSTTDKKSAKTIAQFLEFNKDELKDNKNHLKDERYSLRYFVREKERITQSIAKTKTEIKRILSLVFPEIEKNTFLFSKEILNILAKFPSANKIRNTPFGEFIKQINLPKKGRNTKFSLENIYQLACDSVAFDYPLYEELLKIKIDRLFSLLKEKENISKLIEEIADKSFRREIEILTSIPGIGKESAIYFMAEIVDIKRFANKRKLIGFCGLDPVVKQSGNYKASFKISKRGNSHARRIAFIMAGSVKRNCPYFREYYLKKRKEGKSYTEGVIATSTKLLRTIYTLLKENRLFK

SEQ ID NO: 406007 - protein, 303 aa, unidentified
MLYVGIDLHRQWSQLAVVDGDGELVRSRRVRSRPDEMWRVFGELPRDEPVEAAFEATFGYGWLADLLADAGVPAHMAHPLATKAIAAGRVKNDKVDAAMLAQLLRANLLPEAWIAPLEAREARRLVRTRASLVRMRSRLKSQIHAVLADFALRPEASISIPTPRSQAPALFSKAGRRWLTEQVLPEASRQRIEISLRVIDGLDGEIREVSQAMRQRFADDERVWRLLPIPGIGLFTAATVVGEIWDVRRFPSPRPLASWAGLTPKEHSSGDHHHLGHISKQGSHWVRWVLVEAATNHAMRHSD

SEQ ID NO: 406008 - protein, 320 aa, unidentified
MSESSVVIGIDVAKAQLDVAVVGTAAKPAQFTNEVDGHTALLAWIQPLAPQLVVMEATGGHESLIACALQAAGLAVAVVNPRQAHAFAKAIGHLAKTDRIDAAALAELGRTLLARDELARYLRPLASPEQQDLAALVTRRRQLVTMLHMERQRLALARPAVRSSVQTLIAAIERQLDEVDGDLTRHVSQHFAELDQLLRSMGGIGPVASATLIAELPELGRLGRRQIAALVGVAPMACDSGTMHRRRHIRGGRFELRRTLYMATLAATRHNPIIRDHYRRLVDAGKFKKVALIACMRKLVTILNAMARSHTEFNQNHARA

SEQ ID NO: 406009 - protein, 365 aa, unidentified
MFTERTSVGLDVHARSVAAAAIDGVTGELFQTKLTPAYEHVESWIGGLPGPVAVTYEAGPTGFGLCRHLTAAGIRCEVVAPSKLQKPAGDRVKTDMKDAIHLARLLRLDEITSVAIPSVDQEAARDLVRGREDCRADLMRARHRLSKLLLRHGLVYYGGHAWTGKHDIWLRHEALPQLTSQATRLTFDNDYEAVLAVKARRDRLDATIEEMAAGSEFTPVVRRLGCLRGVSTLTGFGLAVEIGDWHRFTGNSIGTFVGLTPSEHSSGESKARGSITKTGNGHARRLLVEAAWHHRARYRVGKTMRDRWDLAPAAARIRGDEGNRRLHHRWVRFIDRKKRNTVANTAIARELAGWCWSLAVLDDMD

SEQ ID NO: 406010 - protein, 337 aa, unidentified
MLADEVDAVIGGDTHRDSHALEMAAPNGGTIGTLAIGNDETGYADAIAWITQNSPGPRVIVGLEGTRSYGVGLTRALQAAGFLVLEVEQPRRADRRRGKSDPIDAHLAALQVLRMPADRKALPRSDGDREALRILLIARREMTTVKTQQINRLRALLLTGDDADRELCRIARRRGRLDDTKEQQIRRGEARRLALAIRQATSELAANKKQLAELVASFAAGLLDKFGVGPVSAAQAIVSFSHPGRCRNEAAFAALAGVSPLQASSGRTVRHRLNRGGDRQLNRALHDIVKTRWRDCPRTHAYIAARRAEGKSDPEIRRCLKRYVARELFRALTAARG

SEQ ID NO: 406011 - protein, 407 aa, unidentified
MGATTREGYHRCLAKQVMERPMKRNDLSQSLVVFEQHSTLVAVIEMGLKSWLVAGLVPGLVRQPLKRQAADEKLLVKQLYRWRDEAIKADSTIKRIAVAFEAGRDGFWLARWLRAHGIEAHVIHPNSVPVPREHRRAKSDRLDTALLMRAFLGWLRGEAKHCSMVAIPSLAEEDARRPNREHEHLVGERTSIINRMKAALVRLGVRGFNVKLRKAAEQLEKLRTAEGEALPPNTLAELRRDMARLKLVHEQIAAIEKERLARLRRAPRQDTHPMVLLLARVMGIGVETADMLVHEALTRPLRDGRAVGRYAGLTGAPDESGQRRREKGLAKAGNARVRRGMIQLAWRWLMFQKGSALAKWFTARTAHAPREVRKTMVVALARKLLIALWRYVTTGEVPAGARLRPAV

SEQ ID NO: 406012 - protein, 433 aa, unidentified
MKKIRKNAAGIDIGAKQLFVGLEGKKVKVFDTFTQDIEMLCLYLQSNNITSVAMEATGVYWVILYDILTVNGLDVWLVDGRSTKQVPGRKTDVKDCQWIQQLHSYGLLSRCFVTEDLVQELRTYQRLREDHIRSSAMHINHMQKYLVLMNIRLKEVISQIHGASGMRIIRAILSGERDPKVLTEMCHTNILKTKENLVLKSLEGHYNESSLFGLQQAVSCYDFYQKQIVKCDKKLGAVLKKMSFGKRKKKAEEKRKPIRHHKPNINKLDQYLLTIFEGVDATVLPGLTDYNWTQLLSEIGTDLKKWKTEKHFTSWLGLAPKQHNSGKRNRNYKSKGTPKAGLIFKQAAVGILNSKKIALGVFGRKIRSRKGGLVAIKAVARKLAVLYWKLFVKGFSYVEKGIENYNKQIIKNKQRAVTRMAKELGMEVSVLSS

SEQ ID NO: 406013 - protein, 332 aa, unidentified
MSHYVGVDISKDNFHFCILTEDSKILSSGEFPMSFQGFSEFFNLLKSLTDTIVVMESSGRFHIPLYCFLVEKSIQTFILNPKIIHRFFEFISANNPSKQDKKDAKILAVFALNNPQMLKSYPEDPELRSLARLIQKLKTELAEAKTQIKYCLTVLFPEAERFFNIYSHSFLHILHKYPSAKALKKAKPEWLSEIIKNSISRGKPASFTPQEVIQTAKNSIGVDNPYLSETLIFYIDKLFFLEPRINKLEEILMDKIDKDQQEQMKLISSIKGISQRLAGLFLAEIKDIRNFPNAKKLIKYAGTDPVVKQSGKYKLRMSISKQGSSFLRNILF

SEQ ID NO: 406014 - protein, 410 aa, unidentified
MEIIVARQSALDVHKAQVTACVRVPGANGERVEEVEQFVTTVPGLLVLGDWLKAHGVTHVVMEATGDYWKPVWHLLEADFELMLVNARDVKQVPGRKTDVSDASWLCRLAEAGLLRASFVPPKPIRDLRLLTRYRRTQIAERRREAQRLHKALEDTGIKLDCVATDILGKSGRAMLDALIGGTTDPEVLAELARGKLRKKIPALREALQGRFESLHALLIGAILAHLDFLDEQITSLSEAIEEQIAPFAGARDLLMSIPGVGQRTAEIIIAEIGTDMSVFPTAGHLASWAGQCPGNDQSAGKRRSGRTRRGSKHLNAALKDAAMAALRTNDSYLQALYRRKKPQAGHGRAIGAVKHSMICACWHMLQTGEVYNDLGGDHFARRNPERQTKRLVAQLERLGHTVTLTEVAA

SEQ ID NO: 406015 - protein, 336 aa, unidentified
MEQAQSVVGIDVSKKKIDIALLRNGKTKSKALNNTPEGHVELLAWLVDSKVDMATVHICMEATGVYYEALALAMHDAGLKVSVVNPSCIKGFGRSENIRNKNDTIDSALIARYCAAMKPEPWVPQPLEQRQLRAWSLRVQSLKDIRQQEENRHEAHVISGMTDVAAHVAEHIKWIDDQIKKLEKDIDDHIDRHPGLKHDAELLASIPGIGATTVARILGHLGDVRRFKNAKALSAFLGVTPKHNTSGTSVKGRSVICRTGSTSMRAALFMPSMVAYRYNPIVKQFAERLLETGHSKKAVICAIMHKMTHLIYGVIRTGKPFDANYFSKQLAIQDGI

SEQ ID NO: 406016 - protein, 320 aa, unidentified
MEKEKEYVGIDVAKSSMDIAVHATEQRWSFPNDDYGISKTVSLLRKLAPVLVVMEASGGIELTLTAALASAGLPLAVVNPRQVRDFAKATGKLAKTDTLDARVMAHFAATVRPVPRPLPNAQAEKFSSILARRRQVIEMLTAEKNRFGTANKAVRQGIEAHIKWLEQELSNIDDELRQSIQRSPVWREKGNLLRSVPGVGPVLSTTLLAELPELGILNRRQIAALVGVAPLNRDSGTMRGKRTVWGGRAPVRATLYMATLVATRYNPVIRGFYQHLCIAGKAKKVAITACMRKLLVILNAMLKHRAPWCYVNAQMFGLCH

SEQ ID NO: 406017 - protein, 356 aa, unidentified
MSQKLDTSPAVIGIDIGKNSFHIVGQNQRGAVVLRQKWSRGQVEARLANLPPCRIGMEACVGAHHLSRTLRGLGHDARLMPAKYVRPYSKGQKNDYRDAEAIAEAVQRPTMKFVATKTADQLDLQALHRVRERFVGQRTGIINQIRAFMLERGIAVRQGLRFLRAELPGILATRTNALSPRMLRILEDLSADWRRLDARIADLSGEIEALARQDKGCERLMSVPGIGPIISSAMVAAIGTGDAFSKGRDFGAWLGLVPKQLSTGDRTILGSISKRGNRYLRSLFVQAAWVVLVKIGPKRWDRYGLKSWIEAAKKRLHHNVLAVALANKLARIAWAVLHKGRAFECVKTNEAAYQPA

SEQ ID NO: 406018 - protein, 340 aa, unidentified
MTITTVGIDLAKNVFAVHCVDQHGKTVLVKPKVPRAALPELIASLPPCVIGMEACSGAHYWARLFRQYGHEPRLMAAKFVSPYRMAGKSGKNDTADAQAICEAVRRPHMRFVPVKDESQQAMQCLHRTRQGFIEEKTATYNRLRGLISEFGVIAPQSTDALRHMVSEQKKSLPLQVQQCVDNLLEHIDRIENNVTEYDRFLSRMAKADHRSQRLMELKGIGPTTACALVASIGNAHDFKNGRQLAAWLGLTPSQYSSGGKSKLGRITKAGDSYLRTLLVQGARSALIGAEKKTDSFSRWGCSLVERRGYWRAVVAIAAKNARLCWASLHYGDDFRLYSVS

SEQ ID NO: 406019 - protein, 338 aa, unidentified
MKIVTVGLDIAKQIFQAHGVGPTGKVVLRKRLRRSEVSSFFAGVEPCLIGLEASGGAHYWFRVLSRLGHTVRLIAPQFVKPYVKSQKNDANDAEAICEAVSRPSMRFVPAKRVEQQDLQCLHRVRSRLIGCRTQLVNQIRGLLAEYGIVLPQHVAQLRRHLPALLEDDGNELTISTRHLFHSLYEELVELEAKIGSADQRIERAFRENAECRRIAAVEGIGPVTATAVVAAISDGHAFRNGRQFAAWLGLVPRQHSSGGKTQLLGISKRGDPYLRTLLVHGARSVVYRAKAKTDCRSRWINDKQQRLGTARACVALANKNARILWSLIAKQQVYRPAV

SEQ ID NO: 406020 - protein, 317 aa, unidentified
MEQMEFSRKTAGVDVGKHHLDVAVHGLEDLARVSNTAAGHDELTDWLKARGVGRVGLEATGGYERAARLALEAAGFEVVVHQPLEVRRFAQLKRRRAKNDRLDAQLIAAATAQVEAVRAAQDPRLAELAERMTAYEQITDQLVELKTFLEHVTLKDIGSALRTQVRALEALKLRLASQILTAIKAHPDLLARYRLLVSLPGIGPIVAATLLIRMPELGGMRRGQAAALIGVAPFDRDSGQWKGMRFISGGRARPRRMLYLAALVAKRFDPGLKAFGETLRARGKPPKVVTVAVMRKLIEAANLVLQRGQPWVKTQLA

SEQ ID NO: 406021 - protein, 429 aa, unidentified
MPYRIAGIDVHKKMLAVVVSDVEIDSEYEFERKKFSSNPEQLRSLAAWLLEQEVEEVVMESTAQYWKPVWEALERYWKPIREKREGARRKSGTLHLAQALSNRGRRGRKRDFPDAERLVKRLVAQELTLSFVPDVEQRLWRTVTRKKYQLRCDRIRLQNQLESLLEEAHIKLSSLVSDLLGFSAQRMLKAIAEGETNPATLAALADKHLRATPEQLCDALGACTQLNPVYRRLLNLALEELRLIDDQIGRLDREMASLLGEHQDAVQRLAEVPGLGVDSAQQIIAEVGPSAATFPSQKCLSSWVGACPGDDETAGVNYSHRSPKGNRHMRRLLNQAANAAARTKGSIFEIVYRRSVPRLGHNQAIGAIAHRQCRLIWLILHQGVRYEERGPAVTKRSKQLRTWKMIRQLRSLGYRIEPPNPQPSQAQAQ

SEQ ID NO: 406022 - protein, 343 aa, unidentified
MQAITTLGLDIAKSVFQVHGIDAAGNVIIRRQLKRRYVLVFFQKLPPCLIGIEACASSHHWSRELQALGHTVRLMPPAYVKPYVKRHKNDATDAEAICEAVTRPNMRFVATKTPEQQSCLTLHRTRHLFIRQQTSVINAIRAHLAEFGIVAPIGRLGVEQLLGVVSDEGDKRLPDVARACVAALGAHLQRLKVQILEFDRMIRAWHRSSEASRRLDDIPGVGPALATALVASVADPKMFRSGRDFSAWIGLVPKQSSSGGKDRLGNISKRGDRYLRSLFTTGALAVIRYAKIHGTKHRPWLTALLTRRPTKVAAIALANKIARIAWAMMARGERYKEPAALAA

SEQ ID NO: 406023 - protein, 339 aa, unidentified
MKKSYSPTYLGIDVSKGSLDCCLYNGTEHKTRSFNSNKLSTVQKIISHFKISPDSCRVVLEATGVYHSAAFIGFTSQGFDVAVENPLRIRSFATMKNLLRTKTDPVDAKTIAEYGFINKPVSTKPKEAYQCKVVARLKLIGFFKKLIAQNRNYIEALNNNSFECNATSLITHVKNEINHLNVTINEIKSDIEKILTKHCPELYKQYKSIPGIGPTVAGAIICFYGDFSEFSNSKKAAAFAGLCPKVCKSGSSVDKKGSISKKGNSMLRTLFYMAALSAARCNDTCQEAYLRLRQAGKPAKVALIAIANKLLRQAMALARKGESFIENYKEISPCAAKTT

SEQ ID NO: 406024 - protein, 411 aa, unidentified
MTTSTTELVDSSPELEVVAGVDTHADTHHVAVVSITGARLGDLQVPTTTAGYERLLNFIRSFGSTRLVGVEGTSSYGAGLTRYLMAQGVEIREIVRPRRAQRRHGKSDPIDAYAAAAQALAEPETLPMAKTGEGVIEQIRVLLSVRRSAIKARVAVIRQIKSLLITAPEAIRTRWEGLNERCLIESLASTRPGPATGSVATATGQALRRLARRHQYLTVEITELEDDLRVLVGQAAPAMIATKGYGVITTATLLITAGANPERLRSEASFAALCGASPIPASSGKTNRYRLNRGGDRQANWALHQIALVRLSNEERTRSYAGRLRASGKSKKDVLRCLKRAIAREAFHLIVHPHPVPATEDLRDLRHQRGATLLQAAMSIGAEPARLSELERGKRPNADLATTYRAWLTTL

SEQ ID NO: 406025 - protein, 345 aa, unidentified
MTIVGGLDVHRQQLTFDYVDTETGRVRWGQIRPATRDRLREWLGEHCPGGAAFAVEGCTGWRYVAEEVAAAGGVPHLADPAETSAARGPKKRAKTDRADAQLLRTLLLESRLPESWIPPEHVLEVRTMARLYCALSEERQAWQQRVHAQLFHQGCPPITALRTETGREALAEAELSPAGRRYVDTAMRRIDALTAELVSVKQQLEVFAHRQPGCRELQRRIYGVGWLCAAIIWAELGDARRFRNSGQVVRFAGLDVTVYSSDGKRSPGHLSRQGSPELRWAAYEAAVSATRRGSPDHDYYHTVADRAGGKNPALAVARKLLRRCYHILRELGDAAMDPIEEPEAA

SEQ ID NO: 406026 - protein, 399 aa, unidentified
MKTPTAGIDVASTSAYCCLLSPEGQKLHEGKFAATAEDAARLLALLPPQTAVFLESTGRYHLFWARLLAAAGHTVYVLNPLLAKRLQGPGQVLRRHKTDPIDAHSLAQIGRLHGDELRTSIWREDVTNDAVRALCRARVSQRRQLTNTLKRAADLLGRMLPEATMIKLNKNLGWTTLFLAITSLAKLRSLRQSTLEGHIGGHAEELHGLLRGPLNAGAVFDPLLPALQAELRLCQAHRDEQERLERDIIEAVIAAGRAEDVRLARTVPAIGPLTAPILVAALPRDLHLFGSKRQAESKALAFLGCDPRVRESGKWKGGSHMTKRGDRMARTALFQSASCALKHVPELKAYYDRKREEGKSHAVAISHVMRRQLRRLVAVLYDRKAFIHLTQEELPQPSN

SEQ ID NO: 406027 - protein, 398 aa, unidentified
MTESSDYESVQVFIGVDVGKDTHHAVAVNRSGNRLFDKALPNDENKLRSLISDLKQHGQILLVVDQPATIGALPVAVARSEGILVGYLPGLAMRRIADLHAGEAKTDARDAAIIAEAARTLPHALRTLKLADEQIAELSMLCGFDDDLAAQTTQASNRIRGLLTQIHPALERVLGPRLDHPAVLDLLQQYPSPEKLASLGEKKLAIQLCKLAPRLGKRLAADITQALTEQTVVVPGTNAAVVVLPRLALQLITLRKQRDEVALEVEQRVLAHPLYPVLTSMPGVGVRTAARLLTEVACRAFASAAHLAAYAGLAPVTRRSGSSIRGEHPSRRGNKTLKRAMFLSAFAALRDPISRAYYTRKMSQGKRHNQALIALARRRCDVLFAMMRDGTFYTPTAS

SEQ ID NO: 406028 - protein, 333 aa, unidentified
MVKYIGMDAHSSSCTLCVTDAVGREIDNVTLSTNGKVIKNYLRSIDGIKKITFEECELSRWLFGIISPEVNELIICNPVANREYKKAKTDKLDAHKLAKLLRGGFLTPVFHDGSEREQFRNLMSSYQDVIEEGVRIKNRYKSLFRKNGQRIKGESLYNDENLLDGLERSQDRFICGHLYKLLSTLEQSRQAYIKEICQYSKKFKELKYIKSVPGIGNIQAAKIISQVVNPHRFETKYRYYSYCGLVRHTCTSGDRNYGTSKIWGNRVLKCVYKMAGHSVLNGTSQLRTLYDNLRKRGVSHDNAYNSVCRKIAAITLSLWKHSKRYDDNLIRAI

SEQ ID NO: 406029 - protein, 346 aa, unidentified
MMIIGCDFHPSWQQVSWLDTETGETGEGKLVQASGDAERFYRRLPAPALIGMEATGNCHWLVDLLAELGHELWVGDAAQIRASCVRRQKTDRRDAEHIRVLLQEGRFPRIWMPSSEIRDLRQLLLHRYKLVTIRARVKNELQHLCLNRGVQRKHKLWSRAGQKVLRELPLKPWAARRREDLLGLLSLLDQQIEPLDRAVKEEAQRDKMALLLQTQPGVGAVTSLAYVLTMGDVSRFQRGKQVASYLGLIPREHSSGGRQKLGAITKQGNRMLRMLLVEAAQIAVRFDPGLRKEYLHRCHQKPKAVAKVAAARKLAVRLYWMLRTQKPYPEVVRIESSPRVPLVGAS

SEQ ID NO: 406030 - protein, 344 aa, unidentified
MVEYVGFDVSKEETAFCVKDKEGKVLARGKAASDPQALFEALKEHCLCPERIVMETGTLSHWLVRRLRLLGMPVEMIDARQAHAVMKLQHNKTDANDATLLAEIARTGFCRPVAVKSADAQGDRIALKARQHLVGQRRDTENAIRGLLASLGHRFPKGVGKFAGRVQAILEEHPELGAAIEPLLGARAALAACLEELDREVTARARDNPACRLLMTAPGVGPVTALAFASTIDDAGRFAKSRAVGAYVGLTTRRNQSGEMDYSGRISKHGDALLRALLYEAANSMLTVVRRAHPLKDWARRIKKRSSHKKACVALARKLAVILHRMLSSGEAFHWPVKEEKKAA

SEQ ID NO: 406031 - protein, 405 aa, unidentified
MLPNPSVPLRFIGLDIHKAYFVAVGVDAQKRVIFGPQSVPNHQLEAWAVKHLMSTDAVVVEMTVNTYLFHDIITPHVHSIIAVHPPNVALVTGVKVKTDKKAALALAQLHAVGMLEGVWIPPEPVRYLRAAIAQRDKMVRLATQAKNRLSSLMHRRHFEYSNDGNKFNPDQAEWWLALPLSNLEKMIVQSDLDTLAFARQQIEAIELVLKQEAAKDERVPLLIQLPGVAMLTALTVLAAIGTIERFEDASHLVGYAGLGTRVHDSGQVHQNGRITKAGRKDLRGAMVDAANAAVRHHPFWKKEFEKLEPRLGRSKTIVAIARKLLVAVWHILQKEVADCHADEKSIATSFIKLAYKIGVKNLPEGKSAKVFTRQQLDRLGIGAELKIIPWGNNQVILPPSKQQKK

SEQ ID NO: 406032 - protein, 378 aa, unidentified
MTFRAAEARRDRCERVAALSTVARVGSGTRGPFEGSRDSWIGPRLFLWPERIPGGEPRMTSRGAEKMQNDTIGVDVSKDHLDVHRLYDGASRRFANDKRGHKALIKWLAETPVSRVVFEPTGPYHRAFERALGAAGVPFVKVNPRQARRFAEATGKLAKTDRLDAAMLARMGAMLELEARPARNETLLELKELYIAREALMKDRTAAKNRGKVLMLSLLKRQNAQRLEQIERQIMTIEAAIFQIVEADVGLADRLAILTSIPGVSNITAFALLIEMPELGVLEAGQAASLVGLAPIARQSGRWTGRAFIRGGRASARRALYMPALVATRFNPDLKAKYRQLVEAGKPAKVALIAIMRKLIVLANALLKANRKWAPKSA

SEQ ID NO: 406033 - protein, 341 aa, unidentified
MSNAGTYIGVDLHKKTCFITVMNQAGKIKKQMEISTDTDKVAKFFAKHTEASVAVESTMNWIPFYENLESLGCSVVLSNPLQTKAIASARIKNDKVDSRVLADLLRTNLLPTAYIQPREIRDLKELVRQRVNYVEWRTRVKNKIHSVLFKNNLKHDFTCLYGKAGIIWLKELKLRDIYRQEMDRYLTTLALLDKQINEMSDQIMATAKTDYDCKLLMTIPGVSYFTALVIKSEIGDIGRFASAGKLCAYAGLIPSTYASAEKTRFGRITKRGSKWLRRALVDAVTSGSKHPSRLCYFYRKLKKNKGTGKAKVATARKLATIIFAMLTDKQPFREFAPVKQR

SEQ ID NO: 406034 - protein, 350 aa, unidentified
MMIIGCDFHTRFQQIAMLDVTTGEVIERRLEHENGDVEKFYGTLPGPARVGVEATINAQWFERMLARYQHELWIGDAAEIRAARVRKQKTDARDALHILDLLLGNRFPRIWIPSAAERDVRQLLRHRHKLVRMRTSVMNQLHALAIGQGLCRKQKLWSKVGRRELEALLLDPWAHRRRQELLQLLDQLNPWIADLDRAVLQEGQSRPEAMRLMNTPGVGPVTALAFVLTIGPVGRFQRSKQVVSYLGLNPIEESSGGKQRLGSISKQGNAMLRHLLIEAAQTASRLDPELRRDYQRLKFRRGSGVAKVAIARKLAVRLYWRLREAVPPNAATRMQGSPANPVVDESPSPK

SEQ ID NO: 406035 - protein, 372 aa, unidentified
MRDDSEVYIGLDTSKLKISVALAAAGRDGEVRFFGDIDSTPEAVERLVCKLAKRHQRLCFAYEAGPTGYGLQRQITALGHDCAVVAPSLIPKRPGERVKTNRRDALTLAKLHRAGELTPVWVPDPGHEAIRELVRAREATMEDLRVKRQHLQSFLLRHGRVFTGRSAWSRAHTRWLCELRFEHPAQYLVLAEYRQAIADAETRLERLSEQVAELVPSWSLAPVIAAYQAMRGVAFLTAVTLVAEIGDVRRFDNPRQLMAYLGLVPSENSTGEQVRRGGITKAGNSRARRVLIEGAWTYRFPARKSRLLEERQAGLPKTVCDIAWKAQLRLCGRYRKLMARGKRQGVVVTAIAREMAAFLWAIGREVQPQRAC

SEQ ID NO: 406036 - protein, 440 aa, unidentified
MSIDTTLTQTLGGTPTMKFKMQDKQNQLIERISDKHLVVGVDIAQQFHVARAVNFRGIVVGDPLTFENNEDGFTILLHWINKLKRTNNLVTTIVGMEPTGHYWINLSKWLFEQNIDVVTVNPYHVKRNKENRDNTQSKSDKKDALVIADMVKNGYYSIVHPTSESFEELRVLMSNRDVIVKRLVSSINQLNRWVDVVFPELRQVFKDVKGKGAIAPLRLFPTPMELRSMQPQNVVIGWKSLMKRQPGLKKAQLLIHLANRSIGTKQALDAYKFHLQQLLEEYDLATTQLERVEQQVTEALKQIPYAQQLLTIKGISEISLAGILGEAGDLSGFAHGNSLLRHAGLHLAEASSGKWKGQIVISKRGRSRLRRFLYLATMSLVMNNPEFKAIHAHNVKVKKMKKMKSIMKLVGKLARIFVGIAKRNESYCPEKVQPLTTLAA

SEQ ID NO: 406037 - protein, 428 aa, unidentified
MAYRIAGIDVHKRMLTVVVCDVEGASECEFERGQYGSTPGQLRLLAAWLVEQQVEEVVMESTAQYWKPVWATLERYWKPLRQAREGGAGPMSGTLHLAQAQSNRGPRGRKNDFADPERLVKRLVAGELILSFVPSAEQRLWRTVMRSKHQLRCNQVQLQNRLEALLEEAHLKLSSLVSDLLGLSGRRMLTAIAEGETDPAAVAARADYRLRATPEQLCDALGACGELHPVYRRLLKVALEEWQRTEAQIIQLGQEMATLLGAHQEQVQRLAEVPGLGVDSGQQIIAEVGTSAATFPSAQALSSWVGVCPGEEESAGVNHNRRSPKGNRHLRRILNQAAHAAVKLKGSVFAVLYRRYVVRFGHNQTIAVIAHRLCRLIWKILHQGVRYEERGPAVSQKSKQKRTARMIRQLRDLGYRVELLKPAAGAPA

SEQ ID NO: 406038 - protein, 382 aa, unidentified
MITMTRPTEFTAPACGLLLAFELGQRSWKLGFTVSMGQRPRIRQIPAGAVGALATEIERAKTRLGLSSDAPVMSCYEAGRDGFWLHRYLVAHGVTNYVVDSSSIEVNRRARRAKTDRLDLAGLLNLLARYVLGDRRAWRVVRVPTVAEEDARHLSRTLEALTQDRTRLMSRLKSLLATQGMSLSIDAQFLHRLEAAHLWDGTPLPPGLQERLTRTWTQLQEVDGQIRNIKALRLTRPEHLTPATSRALAQLMTMRAIGPIGASVLATEIFGWRRIRNRRELGALVGLVPAPYQSGETDYDQGITRAGNAHVRRVIVQLAWGWIRHQPDSALTHWYQQRFGGSGKRLRKIGIVALARKLVIALWRYLETGVVPDGARLKPMEV

SEQ ID NO: 406039 - protein, 390 aa, unidentified
MIYVGIDVASQKHDCFLLKDTGEVFSKTSFTIKNDFEGYKKLHNSILQFVESTKDSNVRIGLESTGHYSKNILLYLIKQGYQTTLINPILTNMDRKASTVRKTKTDKIDAEAICKFLDKNRFDFKPYTLLSYHIDALKSLTRQRFSLVKQMTQQKLIFQRLVNVIFPEFLGHFSNDYGESVLNILYSYPTPKKLAKAHKESITKLLHGKCKITSSEILELAKNSIGQSEEYLGFELKHTIDMIRFYQSQIEIYNKQIEIELNETEYGKIITSIPGVGIITGAMIISEIGDINNFTTSDQLLAYAGLDPSVYESGQFESSHNKPSKRGSKYLRWAIHQASFIIWQHDNTFKDYYLKKIKEGKHHYVAIGHIDKKLIRVSLLKNKSMFIPQK

SEQ ID NO: 406040 - protein, 345 aa, unidentified
MKHYAGLDVSVKETSVCIVDEAGQICREVKVASHPEDLVAALNDPAWRLERIGLEAGPLSQWLFSGLAEAGLPAVCIETRHTKAFLKAQVNKSDRNDARGIAQMMRVNLFRPVHVKTLTSQKRRALLTARKILQDKAVAIENDIRGLLRNFGLKVAVVGVGKFDERIRELVEGMPELVEIMEPLLTARQKLREMFTTLHRKLLSTVRDDDVCRRLMTIPGVGPVVSLAFSATIDIPARFKNSKAVGPSLGLTPVLNQSGESLRVGRVSLCGDDMMRALLYEAAQVMITRVQKWSWLKAWAVNVAKRRGLKKAIVALARRLAVIMHRIWVDGTVFRWTKEAAPVTA

SEQ ID NO: 406041 - protein, 430 aa, unidentified
MGRLKIVYPVCCGMDVHRDFVIACIASTNSQGITEYQSKRFSTYTGDLRKLAVWLKENRCFDVCMESTGKYWFPVHNILEKDFHVVVSHPKFVKAIKGKKTDKKDAMWIADLFKHDLVRGSFIPPEDIRQLRDLCRYYQKLVWNTTGEKNRAQNCLTVSNFKLDDVFSNVFGKSASAIISQLLDNPGESFDVAPFLDKHCKASPQEVQNAVDGIFSPWQAEKFKIIRKHISNLDDLRDALQKLIFKLAEPYSRQIELLLTVPGISDPLTAVRVIAEIGADMNQFESSKHLCSWAGLTPQNNESANKKKTTRIGKAGQYLKPLLIQCAIAASNPRSKLHPEILAKYQILKKRRGTRKARVAIARRLLTAIFHILLNDTPYQPADSSSLESTPKQRVISMSQAFALLARKGYVISELIDSSELMPLESAPSS

SEQ ID NO: 406042 - protein, 317 aa, unidentified
MRMPKQFFVGIDVSKAMLDVCILPTGESFQVSNDAAGIIELLNRLRPLSPERVVMEATGGYETEAAVTLFLARIKVCVVNPLQVRSFARADGQFAKTDRIDAGVIAKFGERMLPEVRPLADVALRELDALVTRQRQVQQMLTAEKNRMGLTAKALRPRIQAHIEWLQQEMESIGSELEEAIRKSPVWQEKVALYTTAPGIGEKTAQKLVATLPELGLLNGKKITALVGAAPFARDSGVFKGQRRIRGGRADVRCALYMATVTAVRWNPAIKALYERLRARGKPYKVAMIACLRKLLVILNTMARTNTPWNPALAVTV

SEQ ID NO: 406043 - protein, 319 aa, unidentified
MDGSIALFAGIDVSKRSLDLCLLPDDRRQSFSYDEQGLAQLSEALPAPGTCRIAVEATGGYQRQVVAELVNAGHQVAVVNPRQVRDFARGLGILAKTDRIDAYVLARYSQQAEPRTVAQISEKAVELEQLVVRRRQLIQLHTAETNRKHKSPSKAVRSSTQQVIAMLGKQIKQLEAAIFALVESDDDWKDKMDRLGSVPGVGRVTAASLLAELPELGQINRQEIAALVGVAPFNRDSGRFRGKRSIWGGRASVRSVLYMAALTARTHNPILRDFAKRLEGAGKPFKVVITACMRKLLIILNTILKDGTSWQLEKSLVNA

SEQ ID NO: 406044 - protein, 365 aa, unidentified
MFKNSMLFIGLDLGDRHSHLVILDQGGEVVEEARLPTTQASLTRKFSGIPACRVAIEVGAHSRWVSALLTRLGHEVLVADARKLRLIYNNPRKHDRADAEYLARLARLDPGLLSPIHHRSPQAQAHLAVIRARDSLVRARTQLINHARGLVKTTGARLPSCSAASFHHKTATAIPQELLPALSPILATIASLTQSIQAYDRQIQQLAQDHYPETRLLRNVPGVGPVTSLAFILTLEDPNRFRKSRELGACLGLVPRTDQSGGQDPQLRITKTGDSYLRRLLVQSAQFILGPFGPDCDLRRWGLKLAERGGKSAKKRAIVAVARKLAVLLHHLWKNGEIYDPFYQSAQPPTQLPQPSAKEAAIAPA

SEQ ID NO: 406045 - protein, 374 aa, unidentified
MYVGIDIGKTALDVSAPGLSLRVQNNASGFRTLLQQSCALSSAPHFICESSSYARRLAAFLNAERYSITLVNPFRARQFASATGRLAKTDRIDAAMLAEMGRCLNPAPTPHPDKTQALLLHVSRRRGQLMAIQRTLKIQHNHLWNPKLRNGSRAIIAAVEQQIRNLDLQLSAIVSRSPALRARIARFCMVPGIGRTTAIRLLAEVPELGTLDRKRIASLAGVAPYTSESGENAVRRHIHGGRLHLRETLFMPAMVALVRNPVLRPFYRKLRERGKPHRVALVAVMRKLLIYLNHLARETTHQAPLIRTAAGAKKFTDRGAEWATAELDRLGQLVAEGVPYKLIAEQLGRSLKSVSSMASRNGIRHIYLPVTVSQ

SEQ ID NO: 406046 - protein, 394 aa, unidentified
MNGDSMFYLGIDIGKNTHVASLIDEKGKAYFKAFSFSNSTDGADSLISKLTPYVEDLAIGMEATGHYWLSLYSFLFEKGFKIHVINPIQTDGWRHGIEIRKRKTDKIDSLLIADLLRYGDFVETTLSSEDFMSLRNLSRFRSYLVSSIGDLKRKAIAVLDQVFLEYASSFSDIFGKTSKEILLSFSTSADFEDISASQLNKVLDNIHHKKFAKNKIDELSLKAKDSFGITFCLDSFSLQIKLLIEQIIFIEEQISTVEEEISILMEKMDSPITTIPGIGKVNGATILGEIGDINRFSNASKLVAYAGLDASVSQSGEYESTTNKMSKRGSPYLRKALFQSALRAEFYDPVFSEYYQKKISEGKHHLVATNAVARKLCHTIYAILTKNTPYEVQP

SEQ ID NO: 406047 - protein, 340 aa, unidentified
MQQLLKHKDMKYKEVVGIDVSKLTIDAHHHQSNVHARFDNNSKGFRKLSTWMKKYSVDSVNELLVCFEVTGLYSLNLASFLSQKSIDYVMENAIQIKRSMGLTRGKADKVDAKRIAEYAYMRKDALKLTVLPTSEIIKLQNLLALRERMIKQKAGYQASLGEYKRVFIQKHEKDFFQMLNSLIVALKKQIQKAEKALLEIIESSSTLKKQYDLLTSITGIGIILASNVLVTTVCFNKFDNSRKYACYCGTAPFEYSSGTSIRGRTKVSQMANKKMKALFNLAARSAIQHDPELKLYFRKRMDNGANGMSTINIIRNKIIHRVFAVIKRGTPYVTLTHNGI

SEQ ID NO: 406048 - protein, 356 aa, unidentified
MASITPDDTTIEVVGGVDTHQDTHTAAMIDMVGRVLGTEQFPATAAGYTALLAWMRGHGRLNRVGVEGTGAYGAGLGRLLRDEHVDVIEVDRPDRKTRRFQGKSDPIDAIQAARAALAGERTGTPKQRDGRVEALRNLRVARRSAVEQRADTQRQMKALVVTAPDELRTRLRGLSVKQLTTTCANLRPDPTDAASPATAVKLALRSLARRHQQLSTEITDLDEVLQPLVTAINPRLLAANGVGAEVAGQLLVSAGENHDRLASEAAFAMLCGVAPIPASSGKTTRHRLNRGGDRQANAALYRVVLCRLRWDPRTRDYMQRRTKEGLSKKEIIRCLKRYIARELYQIITVNDLELAA

SEQ ID NO: 406049 - protein, 369 aa, unidentified
MPHVTSIGLDVHARSVAAAAFNPFTGEVVHRDFGTDAAEIAEWALGFEEPRACYESGPTGFHMARELRALGLDCAVAAVSKMQRPAADARRKNDRRDAEFIARMLATHNIVEVPLPDMAVEAARDLDRALDDATAEYRRARQRLNMFLIRLGHVWDERNADGTRKGSWTRAHWRWISGIRLEGPQRDVLEYYVTAARCAESDRRQLEKKVLALARTDRWRPAVEALSCIKGIDTLTAFRLAAEAGSFTRFRTAPAFASWCGLVPSERSSGETERRGGITKTGNRLARTALVESAWHYLTCTPRPKPPAPGADVPAAIRARADACTARLCRRREALAAAGKSSCKANAAVARELACWVWEIGRRAEGTLG

SEQ ID NO: 406050 - protein, 408 aa, unidentified
MTSPDPVPKRFIGLDIHKHYLVAAGVDADLQPVLGPQRVEFLNLDTWMAKTLRRDDALVIEMTTNTWQLYDDLSPHVALVTVVHPPHVALITRAQVMNDKIAATTLARLLAKGLLVGIWVPPKDVQELRALLAQRAKLMRLSTQAKNRLHASLHRHHLLPPAGDPFLPKHRAWWLGLELGVAEQASLRCNLDTLEFATEQIDDLQATLKALAAPDERVTRLIHLPGISLINALTILGAIGTIERFPSAKKLVGYAGLGGRFHDSGQTHRGGKITKAGRRDLRTALVEAAQTASHSHPHWKAELERLKPRTGRNKAIVAIARKLLVAVWHILAKHEVDRFAEPAIVARKLMQYTYLLGKANRPAGQKAAAFVRQELDALGIGMELTEIPWGMKNPPIRLPPSQRAGEKG

SEQ ID NO: 406051 - protein, 505 aa, unidentified
MERLCKGRRPGRAELNSPWKISMKPKQQEKNKKAICRPTQNNWHAMNRKQRRELTRKLQSEDLSLEVVHPDAAGIDIGNESHYVAVPPTRDSQSVRRFGCTTSELKEMAVWLKQCAIRTIALQSTGVYWIAVYDILEESGFEVYLVNARETKNLPGRKSDVQESQWLMKLHTYGLLRNSFRPSQAIRTMRTYWRQRNDLVRAAGRHIQRMQKALTQMNIQLANVLSDVSGMTGQAIVKAILAGERDPYELAALRNWRVKASEEEIARSLEGNWQEDLLFVLQQEQDGYEFCQRQMAECDQRLQQYLQQLEDRSHGAGLPEEKRKERLRKKKKGNAPQFDLRAELFRMTGTDLTQIDGIDVTTTMTILSEAGWDMSKWKTEHHFVSWLRLCPDNRISGDKIIGKGRLPTNNRVTNALRMAASTLRLSNTYLGAQFRRLRTKLGAPVAIKAMAAKLARLVYRMLRYGMTFIDRGAQFYDAQHRKLQINYLKRKAANFGFQIIEVPAA

SEQ ID NO: 406052 - protein, 344 aa, unidentified
MEHFAGLDVSVKETSVCIVDDTGKIVREVKVASEPAALLAVLTNSTYHFKRIGLEAGPLSQWLFSALAEAGLPAICVETRHMKAVLKAQINKTDRNDARGIAQMMRAGLYRPVHVKTLRSQKLRMLLTHRKLLQSKAIAIENDLRATLRNFGLKVGVVATRKFEARIKELVESIPDLAELVEPLLVVRRVLREQIGILHRRLLAIVRDDDVCRRLMTVPGVGPVVALTYRATVDMPIRFRNSKAVGAVFGLTPSKHQSGESDRTGGISRCGDEMMRVMLYEAAQIMLVRSVKWSWLKAWAVKIARRRGLKKAIVALARRLAVIMHRIWVDGTEFRWTREEAAAA

SEQ ID NO: 406053 - protein, 417 aa, unidentified
MNSPPETTVIERYIGVDIHKHYVMVGGQNRSREWTLHPRQVQIGRFRDWAEKNFRKTDAVVIEATGSVWDIYDIIVPHVGKILVADARSMRQIAEARVKTDKRDIERMITQLLGGIVPEVWVPPVPVRELRSLISFRWRLTKQITMSKNRLHSVVQRFNLNAPEGGLLTEKNRSWWEEQQFSELTGFEVEHDLEIVETLEGQKEALDQKLAELSNSEPWASDMVFLMQIPGMGLILSMVVLSAIGDISRFSHPKELVSYAGLSPGVHISGETNRSKSITKEGRKELRWAMVEAAWRTKESDPYWKAQFKRLEKRMHRNQAIVVVARRMLVSIWHILTKRETYRHFDEEDIAYKMLIWAWAMDKRSRKGMTPQQFAKYGLLRLGIGQDLERIVRGGAPRRIAPTEEILALKPELVPPI

SEQ ID NO: 406054 - protein, 362 aa, unidentified
MAITHVALDDSKRVIVAGILRPEATQPELREIPNDPRHIRRLFERLLHAGPVHACYEAGVSGYDLYRQLTALGVNCVVVAPALTPRRPGERVKTDRRDAAKLVRLFRAGELTTIHVPTEDQEGLRDLTRCRDDVRADVIRWRHRVLKLLARHGRVYHAGKNWSQAHWSWIRAQHFADAALARTLEASLEALDQALRRRAELDQAIETFAAEPAYRTAVGALRCFRGISTLSAMILVTEIVDFQRFHRPRALMGYLGLVPSEYSSGERQRRGALIDMKYRDDGSVHYVYKVPTRGLLGFRQAVQATKIAAVGNADPQVAHDSTERIVQEAGLDHLGAGGMGGGPFGAALIFAPPSFLISTSRL

SEQ ID NO: 406055 - protein, 340 aa, unidentified
MFTNFVGIDVSKSKFDLALIKGQEKEHVIQGVFDNTHKGIKTMSKFLEKEHNVQLSETIFCMEFTGVYCRPLTSFFVEQDCHVWIEMPVNIIRSLGLQRGKNDRVDAHRIALYAYKNRDDIKLWKPQRDVILKLRDLLALRERLITAQKSLTMPINELISMGDKKGAEMVRRSCQKSLSSLENEIGQIDKNLDDIIKDDPQLKELFKLATSVPGVGKLTALFMICFTNEFSMYTNPKQLACYCGVAPFEHSSGSSVRGRTRVSHMANKVLKRMLHMGAMSVISRDPELRDYYQRKVAQGKNKMLVINAVRNKIIHRLCAVIKRGYGYQSEIIFKERLVLS

SEQ ID NO: 406056 - protein, 322 aa, unidentified
MINQPESQWVGIDVSQAKLDMALRPSNVTGQVSNQESGWIELVKQFKVQKIELIVIESTGGMERGVVQKLQKEGFNVAVINPKRARDFAKASGRLAKTDRIDAEVLAHFGQALQPVPKSLASESEEALSDLVNRRGQLVEMLNSEQKRLHSVRNSSAKADIQTHIEWLKQRMKGMDEQIDQLRQESEEWNQQYKLLTSVPGVGRVTAVTLLSMLPELGELSLKKLSSLVGIAPMNCDSGKMRGKRRIIGGRAMVRSALYMSALVAVQHNPVIRDFYQRLLRVGKAKKVALIACAHKLLGFLHAIVKNQTPWLNPGDIAVTTP

SEQ ID NO: 406057 - protein, 383 aa, unidentified
MRIVCGLDVHKDSIYLCILRSTGEIFEKVFGVLTSLLEEMRDLMLTHHVQEVGMESTSIYWIPVWRILEPHFKLKLINPYFIKQLPEHKSDVKDAQWIAECMIKDLVRGSFVPPERIQQLRLYDRRIYDLDDEIIRKLAKLDAAVQRCNIRLSNYVSNTDSVSYKSVIDKICDGVTDPKILVQEIHGRIINRHGKETIMASLKGCVTEADIDIMAQLKAEIDLAEAHKQKCMDKMQEICEKEYASQLANLQTIRGIKIRTATSLIAEIGTDMDHFETANHLASWAGLKPRNDQSNKTIKSRRITHGNRYLRRTIIQCTWGASRTKDCFFSRFSYHQTQIRKKNKMKVQVAIARKMLVCVWHILSKNVVYKDFNNKILTSETNG

SEQ ID NO: 406058 - protein, 344 aa, unidentified
MDNHTQYSGFAGVDLAKKVMQIHFVTGDGEITDKQVKRAEFLDFFRNRTKCLIGMEACGASQDWARKLEAMGHEVHLMSPKAVKPFVSGQKNDYNDAIGIYKAMFNGVRRVPVKSTEIRDLQTLRRIRSQVTKDKVKEINHVRGLLAEYGIVMGKSITAFNKGISSALESLKERGDVSPLVAEELQTTVESIKTKIERQKRLDREIEQLARGCKNYENFLKTPGVGPFTAAMLCVLLCDPAIFANGRQFAAYIGLAPRSRGSGGKNFIIGIPSKFNCDRESRAVFVECAQALARYKNKSPWVDGILRRKPKKVAVIAIANKLARQVWAMANKGESFKQMTILTA

SEQ ID NO: 406059 - protein, 404 aa, unidentified
MSGRGLEPRFRWQYWRFKAKYYDNFFGKSRRRGYLPWSDNHLAALPPAGAGVDKVKVRTETLFMEGDVKYCGIDLHGNNNWVVIIDDHDRVVYSRRHANDLSRLLPVLAVHRSELSGIVVESTFNWYWLVDGLQEAGYRVLLANTAAIKQYEGLKQRGDESDARQLAHLLRLGLLAEGYIMPKAMRAIRDLARKRMQLVQQRTAQILSIESSLSRHCGWKLSSNRIKCLYQADLDEMKLEALPLRGVQANVAVLQALQTQIENLEEVLADYCRGEAGYPLLRTVSGIGEVLATVILLETGNVERFADAGHYASYCRCVGSVYLSNGKKKGEGNSKNGNRYLAWAFVEAANFAVRHCEPARRFYQRKKAKRNSIVAIKAVAHKLARACYHMLKTQQPFCVERCFT

SEQ ID NO: 406060 - protein, 413 aa, unidentified
MALMIGIDPHKGSHTAVAVDVTETALAQIRVRTGPAQLERLLAWAREFPERSWAVENATGLGYLIAQQLVGAGEVVYDVQPKLGARVRLLDTESTNKNDPHDARSVAIAALRSKRPNQVQAEDHAAVAKLWSKRHRDLARNVNKVACRLHSLLCDLVAGGVPEEMTVTKAAQLLAKVRPAGAVAAARVELAQELLEDLRRLNVQMKESKKRLAAVVAASRTSVIKVFGVGPVNGAAVIGLTGDVARFPNRAHFAAFNGTAPIDVSSGGKKIFRLSLRGNRYLNNAIHMAAIVQIRHRTSPGRAYYDRKVAEGKTHKEALRCLKRRVSDAIYDRLIEDARRAGRSLPEGPGGQAGNDSVSSATGSRPATPALRTSHSRTRTNPTSRPARQPTKPAAARARTPSSVAKKVTRKAS

SEQ ID NO: 406061 - protein, 367 aa, unidentified
MEITTIGIDLAKSVFAVSCADRRGKVVMRKQLRRTQVLEFMGELGPCVVGMEACGGAHHWARAIGALGHEVRLMSPALVKPYRKGPNKHDRNDADAICEAVRRPQMRYVAVKSVAQQDLLALHRVRAQLMKHRIALSNQLRALLHERGVVARLGAKGLRIALAQALTDERNEVSGAMGELLLELSGWLRESEQRIAAITRRIERAVKDDERCLRLLEVPGVGPLIASALVATVGNAREFKRGRELSAYLGLTPRQHSSGGKTVLLGISKHGDRYLRTLLIHGARSLLYRNRRGGAHPRAAWAARLCARRGPNVAAVALANHNARMLWALLSRGSSYRPPPTRAVFPRVPPPVVKRAREGKLLLTKGT

SEQ ID NO: 406062 - protein, 318 aa, unidentified
MANQIAVGIDISKKTMDIAMGHEQPTAIFSNDGAGHQALIEELKNHQVSLIVMEATGQYQLACACALQAAGFAVVVINPRQARDFAKAMGRLVKTDSVDARMLAELAQVLNLRPDRDRFIKPMPDQAQQYLHALVLRRRQLVRLLVSERQRKHMAHAEVVQDIVELMDVLSRQLEALDRRIAEHLAYHQPDLAALLKSVKGVGPATAATLMSELPELGRLKARQISALVGVAPMNRDSGQARGKRFICGGRAAVRSALYMAAIVAMRHNAVIRRCYERLLAAGKPKKVAIVACMRKLLIILNAMVKSGRPWNDQLAQA

SEQ ID NO: 406063 - protein, 394 aa, unidentified
MGWTPPFCWRSLCAAEAHWTWVSAPINSEGESKMHATTVAVDLAKSVFQLAVADATWKVVESHRLTRAQFERWFQNRDVTLVIMEACGSAHHWARWINGLGIEVKLLPAAYVRAYVKRNKTDAADACALLEAARASDIVPVRVKSVEQQALQGLHRTRSLWMSTRTSRINALRGFCREFGLAIPQGARTGVEAISRVLADPNSPVPGLIRGSMKLLVEEIRLLEARIAQLERELSVVAKHSPACTTLLTIPGVGLLTATAMVATTGGQVSHFKDARHFASWFGLTPREFSSGSRQVLGRISKRGDRYLRMLLTHGARSVLRAATVARRAGKKIDGLRTWATTVEGRTNHNKAACALANKLARICYATLRDATPYGQPAPRQQRKIARKAFAVAV

SEQ ID NO: 406064 - protein, 348 aa, unidentified
MSKGNQYVGLDVSLKQTSICVIDDADKIVWRGQVDTTPEAIVSAVTQHAPHAVRIGLESGQLSNWLLHGLKQAGLPVICVDARHAKAALSLKVNKTDTNDALGLAQIMRVGWYREVTVKGLDCQAVRALLVARAQIVSQITTLKNCVRGILKTFGRVLPKGLRSQFPARVRAAIEGHPVLGAIIEPTLQVLEAARAQLLVYDRAVIQRARSDDTARQLMSAPGVGTVVALAYMTGVEDPARFKRSSSVAAYFGMTPRRYQSGEVDHAGRISKCGDGMVRGLLFEAAKVLLGRSSRPNALKTWGEALGKRIGLKKATMAVARKLAVILHRMWTTGATFQWNAGTTSSVA

SEQ ID NO: 406065 - protein, 344 aa, unidentified
MTVKLMAGIDLHSNNLFCGIVDLAGQRVFEKKLPCDLESVLKALKPFKKRLQSIAVESTYNWYWLVDGLQDHGYPVVLANPGAMKQYDGLKHGDDKSDAFFLAEMLRLRILPTGLICDRAVRPVRDLLRRRMGLVHKRTSLMLSLKSLHTRLTGRDLSTGRIKAMDPQEAETLFEHPADQLITRLDLQLVAQLGRSIEQIEAAILADVKGTADYRVLQTMPGVGKILGLTITLETVDPQRFEGPGQYASYCRCVDSRRLSNGKKKGENNGKCGNKYLAWAFVEAANFAQRHDAACRKFYDRKKAQVNGIVATKALACKLAKAAWHMMSRNTDYDAGRIFPGVKK

SEQ ID NO: 406066 - protein, 471 aa, unidentified
MPAGQQVEVDEHEQIVERVAAIDVAKASGMVCTRVPHATKAGKRTTTVWQVRSTTNQILELADQLVGEGIERVVVESTSDYWRPFVYLLEARGLVVWLVNARDVKHLPGRPKTDKLDAVWLCKLNERGMLRPSFVPPVQIRRLRDYTRLRADLTQERSRHKQRLEKLLEDALIKLSTVATDIFGVSGRAMLEALITGERDPKVLAELARGRLRVKHAALVEALTGQFSDHHAFVARMLLDQIDTLGGQIDQLTGRIEETITAIPTATPPALGPGGDPGAAVHDGIGPARSVPSPAERVDPQTGEVLAAALPVVDRLDEVAGIGRHAAQVIIAEVGLDMGQFPTPGQLVSWARLSPRTIQSGAKHRGGATGKGNPYLKAALGEAAAAAAKTDTFLGERYRRLVRRIGKLKALVAIARSVLVIVWHLLADPTARFHDLGADYYASRIDKGRKTRNLIRQLEALGHRVTLQPAA

SEQ ID NO: 406067 - protein, 342 aa, unidentified
MLIIGCDYHPGMQQIAWFDGQSGECGEQRLEHGTGEAEKFYRELKRRGVRVRVGIEASGHTRWFERLLAELEMELWIGNPAKIAAQRVRKQKTDRGDAQLLLQLLREDRFPRVWVPSPENRDLRQLLWHRHRLVQMRTRIKNQLHAIALNEGVQRRARLWSKAGRAQLESFALDRWTARRRHDLLALFDQLAPQIAELSQAIEQEAERRPEVQRLMTHPGVGPITALAFVLVLGTPHRFRCGKQVGSYLGLIPCEDSSADKHRWGHLSKQGNTLLRYLLVEAAQAAVRCDPQWRRRFLHLAMRRQRNIAIAAMARKLAVSLYWLWRNAEDPPAAPQPGSHVG

SEQ ID NO: 406068 - protein, 415 aa, unidentified
MKKHNYRAKKVNDINWPQLREQFAGQALVFAVDVAKEQQFALLSNTELSESVLIQWNQLEQTTWLINELKQLNALITVVMESTSTYGDAMRYQFRQAGFTIHQASAKRVHDAKEIYDGVPSLHDAKAAWLIAHLYQDGLTKPWHELGDIERELNAYRREYELHESQHKRNQNRLEAFLSRHWPEVLPLLALDSVTLESLLIDYGSPEQIAAGAEQAAKDMRRWGKHCLSTEKIDAVIHSAATTLGQPCIEAERRYLQALAEELRHSRTQAKNAKLALEAVVKAEPELKEMGMTVGMVTTAILIGLHLDPRHFGCARSYLKALGLNLKEKSSGQDHGKLKLTKRGSALARKYLYFAALRLINSDPVISAWYQNKVDPRAKLKTVIALMRKLAKALWHVARGQRFDARKLVMTTVVN

SEQ ID NO: 406069 - protein, 331 aa, unidentified
MKETAVSIRREGKRVWRGKCASDPKIIAELIRKRAPAAKRVVFETGPLSVWFYHALRAERLPAICIDARHAKAALDMAPNKTDANDADGLAHLAEAGFFREVRVKGFDSMLTRTLVAARTRLVRITTELSNQVRGIMKTFGLLVPAGKGTTFEKNVRRLLIDHEELALIVLPMLEAWRGIRIRAAELGRQLVADARQSQACRILMSIPGVGAITATSFATAIEDPGNFKTSRSVGAWIGLTTRRYQSGEVDYDGHISRRGDRHLRGLLYEAASVILTRSSTESTLRTWGLQLRERIGFKRAAVAVARKLAVIMHTMLKTGELFNPNAGATA

SEQ ID NO: 406070 - protein, 416 aa, unidentified
MEQVTWYVGIDWGSERHAVSVVDAAGHRREERRVDHTADAVQACLDWIMTFTGATPAQIAVAIETPRGALVDACLARRLLVFAVNPKQLDRFRDRHTVAGAKDDRRDAWVLADSLRTDPAAFQHVHSEDPIVVQLRELSRAEEDLDAECRRLANQLRSQVHRLVPEMLALCPGADEPWFWALLQIAPTPAAQRRLTRARVDHLLRAHRIRRWRGTDVVARLQAPLFPHAPGVVEATEAQIHLILPRLEVVHTQQLACGRQLEQLLQQLRDRPREADQRGEHRDIAILESLPGVGRKVAVTMLAEAAEPLAQRDYARLRAHLGTAPVTTASGKRRLVSMRRACNRRLRWAAYHWGRASVQHDAPSAAYYRDLRARGHRHGRALRSVVDRWLRILIAMLRQNTLYDASRFAVAVDNGA

SEQ ID NO: 406071 - protein, 328 aa, unidentified
MIVGMDVHRNRTQVCVIDGKGMEVRNRNVCNDRRVLAKELSGLRRGTKVAFEAAYGVGWVAELCRELGLEPHLAHAAGCRAIADAKLKYDRLDARTLANLLRGGWLAEAWLAPAEVREQRLLLRERSWLVRLRTAAKNRIRAQLAEEGIPVGVSLWTAAGAEWLEGVELSVMHRWAVSDCQALITLLDERIAALESEIRRQAKPDKRVEVLQAIPGIGLLSAMTIVAEIGDISRFPSARKLTKWAGLTPAMRNSDRKLRHGHITKAGPAAVRHVLGEAAHVARKSEPYASDFAATKARRGTGIALVRISRKLMVQVFFALKALEQQGN

SEQ ID NO: 406072 - protein, 367 aa, unidentified
MKKVSTRAAAPSGNILQPKLTVGLDLGDRNSWYCVLDEFGQIQLEQRVRTNAKTLREVFGEMPHSRIALEIGTHSPWISRLLRELGHEVIVANARKVRLIGESRKKDDRLDAQTLARLARIDPELLSPVKHRSAQAQADLMMIRARAGLVRARTGLVNTARGLAKSYGERLRGCNVRNMNPEKAEGLSPELQRALEPLLAGIESVSERIAEYNERIEKLAQQSYPQVALLKQIKGVGTLIALTYMLTLEDPHRFRKSRDVGCYLGLQPGRRNSGQSEPQMHISKEGDPYLRTLLVQGAQHILGPFGVDCDLRRWGLKLAERGGRNGKKRAIVATARKLAVLLHRLWVSGEVYEPLHNSSRTTVRAAA

SEQ ID NO: 406073 - protein, 348 aa, unidentified
MEHITRIGMDTSKQLFQLHGVSAAEEPVLRKKMRRKEMVAFFEKLAPTVIAIEACGASHHWARLLRSFGHEVKLIAPQLVKPYVKRGKNDAADAEALCEAMSRPTMRFVPVKTAEQQAALMLVGLRDRLIRNRTQLSNAIRGYAAEFGLTAAKGMAHLDPLLDRIQADESLPSLARELFAAQAKEYAQLHAQIVEVEAKLMAWHKADECSRRLAQIPGVGPIGAALLMMKTPAPEMFRSGRQFAAWIGLTPKDHSTAGKVRLGVITRAGDEALRAVLVTGATALLRFVRNGKGKSALSPWLEQLLKRKPPKLAAVALANKMARIAWKLMVTGQRYAAKSAPAVLASAA

SEQ ID NO: 406074 - protein, 308 aa, unidentified
MIHYNYIGCDVAKDQLDVFDAGTGRFQRVANTAAAVLAFAAGLDRSRDFVVFEATGSHDRVLRYALAAAGIAYSRRNPVQTRRFAQARGLLAKTDRVDARMLAEYGRRFTPAPDPQPCSARERIAALARRRDQLVEAKACEAKRLSEAFDADVIADIEHMQAVLSERIERLEALMEQAIAQADADTVATCNILLSAPGVGKVTALTLIAHLPELGSRSPKTIASLAGLAPLNNDSGKRSGRRAIRGGRSRVRQALYMAALSASRSRRFKGFYKALVARAASKKLALIAVARKLLTALNAMVRDRKCFA

SEQ ID NO: 406075 - protein, 387 aa, unidentified
MPQLNDLSRSLIALDQNSTIIAVVELSHSSWLVGGVVPGIERQPHKKLEPSPERLLALLHRWRDEAVRAGSTITRIALAFEAGRDGFWLARWLAARGVEAHVIHASSLAVSREHRRAKTDRLDTELLKRGFLGWLRGERGHCSMARVPTIAEEDAKRPNRERDCLVGERTRIVNRIKSTLARLGIRNFKPTLRKAADRLATVHTPEGMPLPPNTLAELQRDMARLGCVVSQIREIEQARQKRLEQQPETGPHAMVRLLARIVGVGVETAHMLVHEVLSRPMRDRRAVARYAGLTGSPDESGAQRREQGLARAGNARVRRGMIQLAWRFLMFQKESALALWYRARTADSRSGTRKTMVVALARNLIIALWRFVPTGEPLEGVVLRPAS

SEQ ID NO: 406076 - protein, 339 aa, unidentified
MKLYTGFDLHSSNNYLAIIDEKGKRVYKKRLRNDPESILTALMPHKGKISGIVVESTYNWYWLVDLLMEEGYKVHLANPSGIQQYKGLKYSDDKHDAFWLAEMLRLGILPEGYIYPKEDRPIRDLLRKRGHLVRLRTSLILSLQNIISRNNGFKMTVNDMKALKTDRVAPLLQHNEDLALVGKVSKESIDFFTRKIKDIESVVGKRMTLEKPYTYLLSIYGVGKILSLTIKLESGPMERFKKAGNYVSYCRKVSSKWISNKKKKGKGNAKSGNKYLAWAFSEAAEIARRSYPEARAYYNRKMQKTNFMVAHNALSHKLSKAAYYIMKDGVSFIPEKIFV

SEQ ID NO: 406077 - protein, 401 aa, unidentified
MDSKKYVGMDVHQATISIAVRDSVGKLVMESIIETKASTILEFLQGLRGSLWVTFEESTSAAWLYNLLKPHVTKVVVCDPRKNALLKAGNKNDRMDARKLAELLRAGLLSPVYHGESGVRMLKELARSYLTITKDLTRVMNRIKGLYRSWAIPCAGQQVYAARHRIAWLEKLTEAGVRRRAERLYQQLDHLQPLRHEARRELLAESRKHPACPLLRQIPWLGPVRVALLIALIQTPHRFRTKRQLWAYSGLALQTRISGEYRFHEGQLQRSKKLLSLRGLNCNHNHDLKNLFKGTATTAAASAGPFKDFYTVLLAQGMKPAMARLTLARKIAAITLTIWKKVVPPAARIEQTVTVGVPIAAVCCERTRLQLRPFLHWCVCPKESMAPGGRLNIGEALGALP

SEQ ID NO: 406078 - protein, 530 aa, unidentified
MAGKTATNRRRQRKSKSRSKQRKTLNLQKPSGVIGPRVAKVGGEKFVIVCVDPAKHRSEWMMADYFGNLLIEQQTLEHNAAFFKLAVAQIREAQQEHNIQDMIVVVERTGNYHLAPKRAFAKAGFETRVVHPFATKQYRTPADPGIKTDGTDLNAQHRAAAAGFGLCELELESPYRELQLRARHRRNLVERAASMSCQIREHLHLALPGFSALFDHLFDTKSAMAIARRCTSPAVALELGSVGLGQYLRENMVRSQQRTIDKVLAWASQADDDTVQDGTLHHAIWTDLEELYQRFQRRIRLHERELAGDLVRTPYIRLLAIPGINVVSAAELAGEMGPITRYANANAITGRCGLYPSRYQSDQTDKDRGPIIRQANRRIRCALMRIADNLVSHCAYYRGLAEVDRARKVDERAIRVKIAKKFSRLAYACVAGDEPMKHPAIRQPDSILEKLREFHRVHETPMNRVLADLKASVEQLPYHTRNREAEVVAEVLRQNATRHCGVVSVGMLLPAVLAQLEIKTSEETENRGRS

SEQ ID NO: 406079 - protein, 338 aa, unidentified
MELYGGIDLHSTNCVIVIQDQDDKVVLRKRLPNVLECILACVEPFRDRLVGLVVESTYNWYWLVDGLKEHGYGVHLANTSAIQQYEGLKHGDDESDARWLATLLRLGLLPEGHIYPKEKRAVRDLMRKRAQLVRLQTQNMLSVENLIARNTGRRISANAVRKLTSEAADELLDDPDLALAVKSNLAVLECLREQIHVLEHTLKARVRLRRAFKGLLTVDGIGLVLALTIMLETGDIRRFARVGNYVSYCRCVRSTRLSNGKQKGKGNAKNGNKYLCWAFIEAAHYAIQYNERIKRFYERKAARTKRVVAIKAVAHKLARACYHILRDEVTFDQTRAFA

SEQ ID NO: 406080 - protein, 436 aa, unidentified
MTSPCLSYNYKYQEVNLLSFKIIKKNCCGLDVHKTWIYACIGIADANDRVEYVQARFSSFTKGLQELCNWLAKYHCKDICMESTGKYWIPVFNILEKNNLWVTLSHPKYTKPMKGNKTDRKDAKWICDLYMCGMVKPSFIPPADIRHLRDLVRYRFKLSCMITGEKNRAQNCLTVSNLKLDDVFSDVFGKSSRSITEHILQHPGETFDVTPFVDKRCKTPIEEIQAAVDGAVSPEQAVKLRQCLDHIDELEKHISEVAQEIYRLSEKYEAALELIRTVPGFDKNNLTAIQILSEIGGDMSVFPTAKNLVSWAGCCPRNDQSDRKIKSTRISRAGSYIKPVLVQIANASIKSKKHPEFTDRYRRIKARRGHKKAIIAICRMLLTAIWHILSDLKPYTADGFLEPRPVNESRVLTTSQALNLLKQRGYTIKDDPAIAS

SEQ ID NO: 406081 - protein, 358 aa, unidentified
METGKAKKIDFSNTDIYVGIDNHKKNWKVNILVGEIDHKTFTQNSDPKILSSYLCKNFPNGNYYSAYEAGYSGFWAHEQLESLGIKSIIVNPADVPTMDKERRTKNDRVDCRKIARSLRNGDLKGIYTPSREVQEDRTLLRLHIQLTKEQTRIKNQIKAILGFYGIEIPEEKVKSHWSREFIRWLGTVKFSTESGKLALSIQTERLLSLRNRIAALIKQIRLLSKTDRYKESIELLSSISGIGLLTAMHLIVEIVDINRFKNLDELASYIGLSPGEHSSADKISNGKMTKRGKGHIRYLLIEAAWVTIRKDPALMMAYTEYKKKMIAQKAIIKIARKLLNRIRFVLRNKQRYVISVVN

SEQ ID NO: 406082 - protein, 412 aa, unidentified
MDVIVERCAGLDVHRDSVVATVRVPGKGKSRRRRAQQTRTFGTTIAQLEQLGNWLEGFAVTLVGMEATGVYWKPVFFVLERRFECWLINAEHLHNVPGRKSDVIDSRWLCELLEFGLVRPSFVPPPEIRRLRDLTRLRSTQAEERTRAIQRLEKVLQDAGIKLTSVAAGTYSVSARAMLEALLGGVSDPACLAELAKGRLRAKIPQLQEALANRFDIAHHGVLVAGLLAHIDALDQAVAALDARIAAATDAELIERLSTIPGVKRHIAEVLIAECGVDMSVFGSAQRLVSWAAICPGTNQSGHRRRSGKTRRGNPWLRTALTQAARAAARSKNTYLASHYWQIRGRRGEAKAIGATRHDILIAYYHIVHERVPFRELGPDWLARRHSPEHRTRRLVKQLEALGHNVTLEAAA

SEQ ID NO: 406083 - protein, 422 aa, unidentified
MKLTYPICCGVDVHKTFLVATIIKTDGLVLKYHKKRFSTFSRDLLAFKQWLLDNNCKDVCMESTGKYWIPVWNILEDVVHVVVANPKWVSAVKGNKDDTKDSRWIGDLFRMGLVPGSFVPNKKIRVLREFTRYRYKLISMRSSERNRFQNAFTVCNSTLDAVLSDMFGKSATAIQNYLLDTDVVNPAYCASLLQRTAKKKSADVMAAVEGFKMSAEQKERVRIIQEHFSDINARVARLDAEINKMVSEYESQISLLCTIPGVDRNLAITIISEIGTDMSEFGSSKRLCRWAGLTPGNNESAGKKKSVRITRAGVYLKPALVQAAHAAVKSTKSVYFKSKYERISKRRGKKRAIIAIARMILTAVFAMLKTGEVFNPCDLQKYDMPEQLKRKQIVSSAKDAVKFLVSLGVLQEDTVSLAALTG

SEQ ID NO: 406084 - protein, 355 aa, unidentified
MERYIGMDVHAASCTLAVISENGRKLKDFPVETNGQALVEAVRMIPGHKHLVFEEGLQSAWLYETLSPHVDELVVAGITQSRGSKSDKRDAYGLAEKLRVGNLDKYVFKSPRQFTQLREFSRTHMTLVGDVVRAQARIKSVYRSRGVLVTGVDVYSSRRREEWLKQLPSSTKIRATRLYDQLDFLLDQKKQAEADLLREAKKHPIVKTLETAPGFGPIRAARLVPIVITPHRFRTKRQFWSYCGLGLVTRSSSDWIQTAEGAWIKSRVPQTRGLSRQHNHFLKAIFKGAATTVITQRNKDPIHARYERLVDGGTKPTLAKLSLARMIAATVLRMWKNEEEYDPGRAGLPTQTRKG

SEQ ID NO: 406085 - protein, 339 aa, unidentified
MELYAGLDLHSRNTYIGIMDNAFNRVFKKRVPNHLERILQTLDPFRDQIKGFVVESTYNWYWLVDGLMDAGYSSAHLANPSAIKQYEGLKYSDDQHDAFFLAQLLILGILPQGYIYPKKDRPVRDLVRKRMFLVRHKTAHILSLQSLLQRCCARKVRANDMRHLTVKELEMWLEEEHLILSAQANLDSINFLKQKIKQLEKAIIQKVKLNKAFKYLLTVPGIGNILAMTIMLEVGDINRFSKVGNFTSYCRCVPSRRLSDGKSKGYGNRKNGNRYLSWAFTEAAQLGRRHNERFRRYYNRKVAQANTSLATKALGNKLARICYYIMRDQVPFREELFCH

SEQ ID NO: 406086 - protein, 462 aa, unidentified
MGTIIRKKDKAGAASKGFLTLRPNVAGIDIGSRQMHVCGPTDENGQARLAVFDTTTADIQACAKWLRELGVGSVAMESTGVYWIPVLELLESSGLEVLLVDTRPLSRVPGRKTDVTDCEWIQSLHSCGLLQSCYRPSDAISELRSIVRMKATLVSNQSDWQRRMQKCLDQMNVRVHHAVSDVSGTTGLAIIRAIVAGERDPMKLAELRDPRCRNSKEQIAEYLTGHWRQAHLFNLANCLKMYEFLAAEIERYEEEIKLRLKDLTPPGSQDKKAPPLPSKERMKGIKKRGQEDKRQELFRMVGADLTTIDGVGVETAEAIVSEYGTDLSKFGQEKQFLAHLQLAPRQAISGGKPIKKAKRKTTGTRAGRALRMAATGLRNSATALGAYYRRISRSKGANVAVFATARKIGTLVYRLLRWGQAYVDEGQYAYEARFQAARLRCLTATAHQLGLQLIPKPEAATC

SEQ ID NO: 406087 - protein, 445 aa, unidentified
MSDALTATPSEPEWAAFAAIDWADQKNFCRLLPTGSRRSEAGELENTPEAVEAWAVDLQQRFGGRPIAVILEQSRGALVYMLTKYPHLVLFPVHPTTAARYRETFAPSGAKSDPSDTESLLDLLLRHRERLRPLHPDTVETRLLHFLVEERRQTVDDKTRQGHRLTDCLKLYFPQILSWFDDVTSALVGDLLERWPNLEQLQRAHPGTLRKFFQQHNCRSAEKTEERIAAIYRATSATQDAAVLEACALIARVLVAQLATLRGNIVVFEVRIAELVAAHPETAIFASLPGAGAALVPRLIVAFGTRRERYQDAYEMQCYSGIAPVTEASGNSEWVHFRFTCPKFLRQTFHEFATHSIRQSEWAKAYYDHQRNDKNKEHHSAVRSLAFKWIRIIFRCWKDGKPYDEEIYMQSLRRRGSLLADALGLATSAGWKSVAGFQKLSENNT

SEQ ID NO: 406088 - protein, 378 aa, unidentified
MHCIGVDVSKQELVTFDGTRERIFPNTHGLAEFGRFLRQSTDALIVFEPTSTYSRRLETLCRTQRISCCQLNPRVVPHLRLVGRGRSKTDSSDAELLYRYGIERGYNEAVELKNDSLAESIQARLACYRVAQKARVARQGFVEALIQDPATPRELLAELKEEIADLKAKERHHLLAAERLVEGDAQAAQQLAGLLSIPGVGPITALTLLALFRKYADANRRQIVALAGLDPIQFQSGTSVHGKSRISKRGNREVRKRLYEATLSAARYNPNVRAMYRRLKEQGRPEKVARIAAARKLLLIAYAIYTSGEPFKEPNQKEARHSIQHLILALTRIQLVIWSSWLFVILLVQEEAMDSESGFEGIHCKMRSTRNLRAVSLR

SEQ ID NO: 406089 - protein, 500 aa, unidentified
MKTKGSKAKIRTGRKSISVACSEPAQELRILRPDAAGIDCGAQEHYVAVPPDRVSAGQPTVRRFSAFTEGLDAVVDWLKDCRVTTVAMESTGVYWIPLHQKLETAGIEVYLVNARHVRHVPGRKTDVQDSQWLRQLHRFGLLNASFRPEDIICRLRSLHRHRDNLVSSSASEIQHMQKALQQMNLHLHHVVSDITGLTGLRIIDAILAGQRDPEQLVRLRDRRVYKSTPQEMQAALVGDYRGEHLFVLSQSLQAYRFYQARIEECDREMEPLLEKLAQQIEAASANLMLDALQPSGLKGESNRPEQLPEPKPTSGSKSKKKRKPRANEPKIQLAGLLERICGIDLTQVVGLNVLNVLLIVSEIGVDMSKWRSAKAFCSWLGLCPGNKISGGKLLDSRTRQVVNRVADALRLAAQSAGRTQTCLGIFYRRKQAHLGAPKATTATARKLACLIYHLLKNKQPYQEPDSASYQLRLQKSALSKLQRQAIALGYTLLPTASVPA

SEQ ID NO: 406090 - protein, 386 aa, unidentified
MSRPSNILVRAINYDHTLVLAVELSNKSWVLAAQAPGLPRTKAQRTIEPNKNALLAAIDGYRARAVAVGYTVDRVITTYEAGWSGFWLARWLVAQGVEVHVVQPSSVPVDRRLRRAKSDGIDAELLLRTLLAWLRGEPRVCSMVPIPDEADEDARRCVRERTELLSDRVGLTNRIGAVLATLGVNDYNPLPQSRRRRLAELRTGLDEPIPPNALAKIERLLARLELGLAQIAELERERDEVAAADAPDRAGKMIQQLASLRGIGVQSATVLVREAFVRHFPNGKALGSYAGLTSTPYSSGGIDREQGIGKAGNRRLRTVMVELAWLWQRYQPGAAQVAWFRDRVGSTGRRIRKVMVVALARKLLIALWRFVIDGVMPEGAVMKPSI

SEQ ID NO: 406091 - protein, 340 aa, unidentified
MTITTVGIDLAKNVFAVHCVDQNGRTVLVKPKVSRAALPELIAGLPPCVIGMEACSGAHYWARLFRQYGHEPRLMAAKFVSPYRMAGKSGKNDAADAQAICEAVRRPHMRFVPVKDESQQAMQCLHRTRQGFIEEKTATYNRLRGLISEFGIIAPQSTDALRHIVSEQKNSLPLQVQQCADDLLEHINRIEDKIAEYDRILSRMAKADHRSQRLMELKGIGPTTACALVASIGNAHDFKNGRQLAAWLGLTPSQYSSGGKSKLGRITKAGDSYLRTLLVQGARSVLIGAEKRTDSFSRWVCSLIERRGYWRAVVAIAAKNARLCWASLHYGDDFRLYSAS

SEQ ID NO: 406092 - protein, 357 aa, unidentified
MERYIGLDAHGTSCTFGVIGPSGRKLRSDVVETNGAALVSYLRGIPGRKHLCLEEGAQSAWLYEILSPHVEEIVVAGVRESRGQKNDALDAFQRAEELRTGTIKTRVFKAPRLYSRLRELARVHSMLVRDVVRVQLRLKVMYRARGIATPGAGVYSPKERDRWLAQLPASSRWATQKLHEEYDQLLGLKQEAEQELVAEARKHRISRVLATAPGLGPIRVAQLLPIVITPHRFRTRSQFWAYCGLGIVMRSSSDWVQTRAGTWARAQVQQTRGLNRNHNSTLKGIFKGAATTIITQLTEDPLYGHYLRLTSAGTKPNLAKLTVARQVAAIVLRMWKDEKEYDPSKVQQQTALAAAVN

SEQ ID NO: 406093 - protein, 384 aa, unidentified
MRTDQTDMTNAGEVVLAVSLELATAKWKVALHDGRRDSPAIHTVTQLQSAARLQAVLSLIEQHRQKWALPASTRVVVSYEAGQDAFWICRALQARGIECYVVDPASIPVERHKRRAKTDRLDVIKLVINLRAWLRGERDRMHVVHVPLPQDEASRHLMRDRGQLQKEVLQHRDRMRKLLATLGCQDEVDSRKFAGRLARSEVRCHDGAPLPAELHERLLRECERLALAEAQLAALEKARPTSLPEPARERIDHLTRLNGIGPVGGSRLALELFWRQFSNRRQVGACVGLVPQPYDSGESQVDQGISKQGNRRVRALLIEMAWSWLRYQPGSTLTKWFKERTQGTGPNRRARRIAIVAVARRLAIALWRYLKDGVIPEGARLKSA

SEQ ID NO: 406094 - protein, 346 aa, unidentified
MEKQCIGIDISKDYLDCCFGTSDSSQNQKFGKSKRFSNDYCGFKELLQWSDEQNASASRQVYYIMEATGIYYEHLAYFLNEHDCKLSVLLPNMVKHYSLSLNVKTKTDQKDSEVLCRLGLERKLSTWNMPTKIMRDLKFLSREYREAKAKITQAKNQLHAKQYSHDCPATTQKRLEKQVSLLELQVLEIEAELRLLAISDAGFYDKVEKICSIPGISFITTICIIAETNAFALITNVRQLASYAGLDIQHNQSGNKQGKTRISKKGNSFIRHALYMPALCATRFNPLMKEFYNNLKDRKPAKKIAVIAVARKLLILIYKLWKSNMEFDPNYKENKKVDRIAPAYTG

SEQ ID NO: 406095 - protein, 367 aa, unidentified
MQSTPLIAFDQHAATTVAAVLLPGERTPALHTLASDSPTILRFVKRLQRQGPVQCCYEAGPCGYGLYRQLTALGHQCDVVAPSMIPIRPGDRIKTNRRDAITLARLHRAGELTPVWVPDEAHEAVRDLVRAREGAMLDLRMKRQQLTAFLLRHDRIFPGRKTWSRAHVRWLCEQRFEHPAHQIVMQEYRHTIDDAETRLDRLEGQLAEVVPQWSMAPVVEAFQAMRGVGFLAAVIFVAEVGDVRRFESPSQLMGYLGLVPSERSTGDRVRRGGITKAGNRRARWVLIEGAWTYRLPARVGRTLQARLDGLPKAVRDIAWKAQTRLCGRYRRLTAAGKKPCLVTTAVAREMAAFLWAIGQQVAPRLAG

SEQ ID NO: 406096 - protein, 367 aa, unidentified
MKDSITVVGLDVHKNSIEIVTADADGAMEVRRFGRIAGTMDALDRAVRKLVSRGSTLRFVYEAGPCGYEIYRHLTEKGFSCKVVAPSKTPKKSGDRIKNDRRDAETLARLERAGELTEIYVPREEDEAMRDLTRSREDAVKSLKTARHQLNAFLLRYGKRYPGKGSWTPAHMRWLSDIAFPHPSQQIVLQEYIATVRVGTERTTRLTDQIAKLLPEWRLYPVVKALQSLRGVAPIVAATTVAEIGDLSRFENPRQLMAYLGLVPSEDSSGENTHRGSITKTGNGHVRRALVEAAHAYGFPARVSRHLLKRQEGLPEPVRAIAWKAQVRLCGKFRRLMVRGKLKNKIVTAIARELSGFMWAIAREVKV

SEQ ID NO: 406097 - protein, 351 aa, unidentified
MIIIGCDFHTRYQQIAMADDETGELLLERRLDHESGEAHAFYRGLQGPVRVGIEATGPIHWFERLLAELGHELWIGNSAKIRASEVRKQKTDERDARLILDLLLAKRFPKIWVPTPAERDLRQLLWHRHKLVCLRTMLGNQLHFLAMSQGLCRKRKLFTKKGRTELTGLALGPWTRRRREELLKLLDQLDPAIAELDRAVLEEAQRRDDAVLLMTHPGIGPVTSLAFVLAIGPITRFPRSKKIASYLGLNPSEESSGQRRRTGAISKQGNTMVRWLLIEAVYPAVRKDLALRQDYQRLKFRRGHAVAKVAIARKLAVRMYWMLRSGAEYAQLVRRQGSPAATLVDANPSLG

SEQ ID NO: 406098 - protein, 320 aa, unidentified
MMAQNEVIVVGIDVAKDKVDACIRSLSLRQTCPSTAQGHRKLMAWLRKHKVTKAVMEASGGYERAWAKVLREAGIEVRIVDPRRVRSFAQSAGRLAKNDAIDAEMIAWFAETFSEAPSQVHDAAREELQILVKARLGLIDYRMRLVSQSEHAAPGLVQKAHAHILKSLASEIAKLAAAICAKVRSTPDFAERAEIIESVPGLAGTSAANLVAGMPELGQVSDGIAAALIGAAPYDDDSGKRRGERHIKGGRRWVRNALYMPCVGAATQNNPVLKAYYQRLLAKGKEPKVALVACMRKLIVILNTMIARRQKWDSSRDAVS

SEQ ID NO: 406099 - protein, 387 aa, unidentified
MPQPNDLSRSLVAVDQNSTIIAVVELSQSSWLVGGVLPGIERQLCKKLEPSPERLLAVLHRWRDEAVRAGRTITRIALAFEAGRDGFWLARWLERRGVEAHVIHPSSVPVSREHRRAKTDRLDTELLKRGFLGWLRGERGHCSMARVPTIAEEDAKRPNRERESLVGERTRIVNRIKSTLARLGIRNFKPTLRKAAERLASVHTPEGMPLPPNALAELQRDMARLGFVVSQIREIEDARQKRLEQQPETGAHAMVRLLARIVGVGVETADMLVHEVLSRPMRDRRAVARYAGLTGAPDESGGQRREQGLARAGNARVRRGMIQLAWRFLLFQKESALAHWYRARTADSRIGTRKTMIVALARKLIIALWRFVTTGEPIEGVVLRPAS

SEQ ID NO: 406100 - protein, 365 aa, unidentified
MKTTKTNPQRKQFRTIIGVDLGDKKHHVCVTDKDGNILCEKTVANNKEQLAALAREHEGALFAIEVGSHSPWISRLIESNGCSCLVANARKLRAIYQNERKCDEFDARMLAKLARVDPELLSPIQHGSEAQQLHRLNLTLRDSLVRRRADMITTIRFSLKSLGIRISACSTPYFALRCREELEGTAVLETAEAFLQALDALNSQIKVLDKQIARIAAEHYPQTKLLEQIAGVGPITSLGFVLTIGEPGRFDDPRDVGAYLGLVPRRDQSGQSDKQLPISKTGNREMRRLLVQCAQYILGRFGPDCDLRRFGLNLAAKGGKSAKRKAVVAVARKLAVIMLMLWKTGEPYDPLRNAPVEDPEEKEAA

SEQ ID NO: 406101 - protein, 342 aa, unidentified
MSEIITVGLDLAKNVFQAHGADGAGQPVLRKKLRRGQVLAFFSELQPCVVAMEACGGAHFWGREIGKLGHDVRLIPPAYVKPFVKRQKNDAADAEAICEAALRPTMRFVPVKSEETQGAAMVFRVRELLIRQRTQAINALRGHLSEFGQVAPQGAGNASKLIAIVEDPESGLPADAIPTLKVLIAALTQLEAEIVKLDAEIARRAKENDVARRLMTVPGIGPLIATAIATPAPPPETFHKARDFAAWLGLTPRQHSTGGKQRLGATTKMGERSLRRLLIIGANSVIIKRHVHTEARLGTWLAGMLSRKPPMLVRVALANKIARIVWALMARGGVYQSPATAA

SEQ ID NO: 406102 - protein, 348 aa, unidentified
MDTIGLDLHKRESQLCSIANDGTVTERRIVTSRERLTAVLGARAGARALVEASTESEWVARHLESLGLTVIVADPNYAPMYATRRRRVKTDKRDARTLAEALRLGAYRVAHRVSAERRHVRAELAVREALVRTRTRYVSLAKALVRRDGLRVASSESEHVPARIAALPLGDTLTAELAPLFTVLGPITDQIAAADRRITALMHADPAAALLATAPSIGALTASAIVATIDDVTRFASAHQFAAFLGLVPSERSSGEQRRVGRITKTGNARARYLLVEAAWRILRSKSADTAALRAWALTIAARRGKRIAVVALARRLAGILYAMWRDGHAYDATKLRMPRAPREAPSA

SEQ ID NO: 406103 - protein, 310 aa, unidentified
MIESTTVTVGLDVHARSIRLAAVRADELLEERTLPYDEEAVARLLARWPLVRCCYEAGPTGFGLYRYLVERGIECAVVAPGLVPQRPGDRVKTDPRDARKLARLHAGGLLEPIHVPPPELEAARDLVRAREDARLDRMRDRHRLSKFCLRHGRLLPTSGWTVLRRKWLGEQRFEHAAEQTTFGTYLHAVDLVDARVEQLERAIRELAEQGPWRELVARLRCLRGVDTLTAMGLVAEIGDFNRFKTAEEFMAFVGLVPSERSSGETRRQGAITKVGNSHVRRLLVESAWHARRRPTVGYELSAANADKTRP

SEQ ID NO: 406104 - protein, 319 aa, unidentified
MTQDQLVVAGIDVAKDKIDACIRTVTERKTCPATAAGRRSLIVWLRKHRVGKAVMEASGGYERIWAKALRQAGLEVRIVDPKRVRHFAESAGRLAKNDKIDAEMICWFAETFSEAPSQVDNPAQEEIKALVKGRQSLIDVRARLEMQKEHDAPALLRKARARLLRKLADEIAAIETVIAAMIKAMPDFARRAEIIQSVPGFAEGTAMALLGGLPELGQVSDEVAAALMGVAPYDDDSGKRRGERCIKGGRRWVRNALYMPCVGAATLNNPVFKAFYERLTAKGKPPKVAIVACMRKLIIILNTMIARDETWDPKKYRVA

SEQ ID NO: 406105 - protein, 353 aa, unidentified
MRKMQEFIAKGKKIFVGLEDSKRTWRVCARCDKMPVDEASMPAKYEVLKAYFQRNFPECDIKVMYEAGLQGFWLHDMLEEDGIDCVVTPPNKLTCAKDNRVKTDKRDARRLAQNLENGDYVSCKVPDRERREDRQILRTLNQVQKNIKSTKNRIRKLLDYHGLNDGLKIGAWYDKDYLELRNMNLSKSLKISLDVLLSFLELQLKSEKELMAELHELCEKERYKQGVISKKSAPGIGWLTAIRLTLEWGDMSRFKTGKHIASFAGLTSSEYSSGDTIRRGRITAQSNDQVRSWLIESSWTAIRKDPILREKFLNVLKNTGSKKKAIVAVARKLAVRLWALETTGYPYCIGVIE

SEQ ID NO: 406106 - protein, 359 aa, unidentified
MKEYISFDSHKHYTLAEREDVETGRTRQCRIGHARGAIREYLSRCEPGTPVAVEATANWYWIVEEIEEARMHPLLVHPRKAKLMMGMINKTDQLDVHGLNRLQRNKTLPTVWIPPAPLRDLRELTRVRMVLARHRTQLKNRIQATLSKHGLVVEGFSDPHGKRARAEMSRQIARLPEQTRYVTEMLRKQLDFTEQQIHEQEQRLKALVRITPEIELLMSLPGIGVILGSVCALEIGDVGRFPSAEHLAAYAGTTPRVHSSGDKTRYGGLRPDVNRYLRWAFIEAGHSTALNCERRPERHVSRLYRRLRARRGHYKAVGAVARHLAEASYYLLSKKEPYRDPALRTEGAQPLAQGRTREV

SEQ ID NO: 406107 - protein, 473 aa, unidentified
MSKGSGNGTTRGDRRRNARRERLRGLLPRDGAVIGIDLAEDKQALAVVDHDVRVLARKTVKVKAFRLGEALDWAVAQAKVKGFKQVAVACEPTGPRWMQVQRLCAERGLPLVCIQPLVSHIAREQQDYTPHKTDESDCVLIGRLAAELHCYIPEELDETWAQLRHLGRRRAQLITAATASVQRIGDFLSVTWPVVTEVCAQPFKSVTWLAALQVVTSRCGGDPARLAAMGPEEFTAVVRAAVPAWGGKKGWGTICGRVFAALTDTEGVVAWSRRGLLRRVADELGDLARTRAQLRAVAADMVMVLSELGLSRLGDIPGLTAVGAAAILAETGDPRRYDSSSSLVKHAGLSPSENASGAFEGQARISRRGRPGLRLTAWRAVWPMLRLNPVMAAKYAAMTQAADAAVASDAGSQPARAAASAARARRAKARVACAASLLRWIYSMVVHGTSWDAAVASGAAACQHAPRCQPEAA

SEQ ID NO: 406108 - protein, 346 aa, unidentified
MTQYKRIGIDTSKAVFTLHGIDQRDQPTLRINLRRSQMITFFRKLPPTEVAMEACCGAHYWARELTALGHAVLLIPPQYVKPYVKRGKNDRNDAAAICEAAGRPGMHFVPAKSLSQQAQGMVLKVRDTLIGQRTLLVNTLRGHASEFGVVAGKGVGRVGSLLAAIEQDATIPAEARDMIALLGQQIEHLNKKIKALEARLNATHKTNAVSQRLATIPGLGPVTALTLATEIDPAAFASGRHMAAWIGLTPKEHSTGGKQRLVGISRAGNERLRSLLVVCATSVIKAATMPASKQMTGWLRGLLQRKPRKVAAVALANKIARVAWAVMTYGTVYRRSPTNVEVSYAA

SEQ ID NO: 406109 - protein, 341 aa, unidentified
MTIVGGIDIHRAQLTYDYVDLATGEFHTGRVAPANRDQLRAWLERFHGLKEVAFALEGCTGWRYVVEELILAGITAHVAEPAETAALRGRKSRAKTDRADARHLRQLLMDGRLPDSWIPPPHVLDARVLVRLYKDLVDERTGWLQRVHATLFHHGVPAAAGSLVTAASQKLLASAWLPPAGRYAVDAGMRQVERLTEEMLPLRKQLVDIGSHQPGCKALQRHYGIGALLAVAIWEELGDCRRFTSSDDAVRHTGLDVTVWSSDGKRTKGHLAKQGPPVLRWALYEASVYSARPSSPDYAYYQKLRERLDAHIALITIARKLARRCYHTLREVGEVAFEAAA

SEQ ID NO: 406110 - protein, 433 aa, unidentified
MNTSPPYDLIIGLDRSDRKADLHFIGTANGQRHSQTIDTSPEALWEWLLQLRQQYPQSRLALCLEQPAANLIAYLEAYEWITLYPINPITLQKYREAFVTSRAKDDSKDARYLAELLLSHHDKLKPWAPEDSQTRAIQQLVFHRRSVVNERVGLTNRLKALLKQYFPQALLLCGEDLWRPLAGRFLLKWPSLQAVQKTKPEKLKEFYHLNGSRSAKLMEQRLALIEKAVPVTDEPAILDSFILRVQLICRQLQDVVQTIKTFDLQIAQAFEAHEDYGIFSSFPGAGPTLAPRLLATMGSQRERFESSANLQHYTGIAPVTKQSGGKCHIHRRYLCPKFHRQSFHEYAKESILWSRWAAAFYLQQRTKGSYHHAAVRALAYKWQRIIWRCWQCRKPYEEKTYEAALRKANSPLIALLNKVQLGKSPYKNKMHKN

SEQ ID NO: 406111 - protein, 363 aa, unidentified
MLASPWLSELRTDPVLVFLMPERLVERPRAGSHAQARDTKTMSGSSVMVGIDVASAHVDVVAIGAELPAALGQVSNDADGHSALADGLAQLKPDLVLMEATGGYEAALACALQAAGLRVAVVNPRMARDFARAMQRLAKTDRIDAATLAEFAGVLAHRPDCERFIRPVSVPEQQDLAALVTRRRQLVTMQLSERQRLRLARPVTRPSIEALLEAIARQLDEVEAEMARHVEQHHAHMAQLLQSVAGVGRVAAATLIAELPELGRLNRRQICALVGVAPYANDSGASRGRRRIVGGRFEVRRALYMATLTATRYNAAIRAFYERLLAAGKLKKVALIACMRKLVTHLNAIARDHLNAQHRSAIA

SEQ ID NO: 406112 - protein, 359 aa, unidentified
MDKAIEFPQVVDRCCGLDVHKKVIVATVDGTGIKRETREFSSTTRSLTELKEWLLELGVTHVAMESTGVYWKPVINILEDGGFTLLVVNAQHIKYVPGHKTDKKDSAWICKLLRAGLLKGSFIPDKAQRDLRDLTRYRRKKVESVTAEKNRMLKVLEDANLKLSSVFSNVSGVTCTKVIDAILDGHTDPDYLTSLCTHGKLQSTKEQIHDAVEGRFTEHHKFMLKSIRRSIASLEEEIAELEAEIDRRCEPVREEIERLCTIPGIDQTGAKELIAEIGVNMEVFPTASNLASWAGVSPGNNESAGKKKLALQPREQGHQSDNHGMCLGGKPHQKHVYRRKIQETGSTSGQEESPRSHRT

SEQ ID NO: 406113 - protein, 311 aa, unidentified
MSGYIGIDVSKTYLDLAEGKKGKVTRFVNEESGISQIVVQLQEIQPDLIVVESTGGLERALITELFFAHLPVSLVNPGRVREFAKSTGQEAKTDNLDACLLAHFAEAVQPAKLILPTEQEQYLSALMTRRRQIIDMLIAEKNHLLSTPTRLRELVERNIAWLEKQLQELNAQIDDFIDHDPTFHSKNEILRTTPGVGPVLANILLSDLPELGHLDRKEIASLVGVAPFNRDSGLYKGKRRIKGGRANIRTVLYMATVAAIRWNPILKTFYNRLVSKGKVKKVALVACMRKLLIILNAMIRDMKPFHVDLAY

SEQ ID NO: 406114 - protein, 384 aa, unidentified
MKKTKGTLSKDDNRKGIILHLAFDLGHSKWKLAFSDGEKKRTVNIEARDLEAFQEEIRKARIRFGLERDAKILSCYEAGRDGFWLHRYLLSCGIENVVVDSASIEVSRRKRRAKTDRIDAMNLLKMLLRYHGGEKGLWSVVHVPSVEDEAGRHLHREMDCLKKERTMHRNRIKSLLIQQGIAVKNPSRMKFLEDLKTFKMWDGHALPGDLITRIMREHGRLRMVEDQLYSLTREQATRLEEADTVSLRKVSQLMTLRGIGMNSSWKFVMEFFGWRNFKNRREVGSLAGLTPTPYDSGGKRREQGISKVGNKRIRTLAIEMGWVWLRYQPQSKLSRWFLKRFASGGSRMRRIGIVAVARRLLVDLWRYLQYGLIPEGAVLKAAGS

SEQ ID NO: 406115 - protein, 432 aa, unidentified
MPKHLEHINPHAAGIDVGSRSHFVAVPPGSCEHPVREFTGFTDDLHRMADWLLECGVTTVAMESTGVYWIPVFEILESRGLEVRLVNARHVKNVPGRKSDVLDCQWLQQLHSYGLLEGAFRPSEEVCALRGYVRQRGNLVRYAAAHIQHMQKALSQMNLQLSTVIKDISGVSGMRIIRAIVGGERDPVSLARLRDGRCKSSESIVARSLHGNWRREHLFSLKQALELYEVYQAQIAACDREILEQLARFEGSSGSGGAPPVDLNEALLRISGADLTAIDGIDTLNALKIIAEVGTDMSRWKSAKHFASWLGLCPGTKISGGKRLSTKTKRIVNRAAVALRISAVSLKRSKSALGAYLRRQWARLGGAKAVTATAHKLARLVYSMLKHGSAYVDLGQSYYEERYRDRVVKNLKRKANTLGYQLVRNADQPASI

SEQ ID NO: 406116 - protein, 412 aa, unidentified
MADIAAYIGLDWGDERHSVHLQMADGTLEHVELEQKPDVLHAWVTQLKERFAGGQVAIAIEQRKGAVVNALMLYDFLVLYPINPKALARYREAFRTSRAKDDPADSQLLLDLVVRHRDHLRAWIPDTTEARKLQLLCEQRRKLVNHRVALTNRLTSLLKQYFPQALEWVGDLASLQGCDFLAQWPNLDAVQSARPSAVRKFYQAHNCRMASVIDARLAAIKIAQPLTIDPAIVEPLSLSVQTYATQVHGLIRAIQAFDVRIAHVFADHADHDVFASFPGAGDVCAPRLAAAFGTDRSRWDSAAELQSYSGIGPVTERSGKTRWVHHRLACPKFVKQTFHEFADQSIRFSRWARAYYDQQRRRGNDHHAALRALAYKWIRILFRCWKDRTPYNEGRYIDALCRRGSPLVKNFA

SEQ ID NO: 406117 - protein, 341 aa, unidentified
MEKTLFIGIDFSKKTFDVSVMHQKNLQNVDYQQFENSKKGCSALLKWIKTVTKEPQENWLFCGEHTGLYSLCLSEFLIKKGLFMWLENPLQIKMSSGIKREKNDKVDSKEIARYARCHQDEARAYQLPSKTLKSLELLLAHRERLKSNKHRLLVSASEIRRVLTHDATARSIYEDSQSDIEHINKRIKKLEKQMLELIASDEQLQENYLLVSSIKGIALINTVSILVATQNFTRFENSRQFACYAGMAPFGKQSGTSVKGNPHVSHLANKKIKVLLTQAAKSAIVHDKNIKHYYERMITKGKKEWVVINNVRNKLIHRIFAVVKNKQLYQVDYSFQSDKIA

SEQ ID NO: 406118 - protein, 416 aa, unidentified
MNAVGIDVSSRKSTVAVLRPLGEVVCLPFDVSHDADGLASLAEKLKALDGETRVVMEHTGRYYEAVAKALHEAGFFVCAVNPLLIKEYGANSLRRVKTDKADAIKIARYALDNWADLRDFTPMDAIRYDLKTLNRQFQLASKQRTASANNLIALLEQSFPGIRKCFDSPVRSDGTQKWVDFAHSFWHVDCVRKQPFAAFCERYRKWCKRHAYFFKLSNAEEVYALAKRAVVLTPKSKVVKVLVQEAANQLSSISRSVEVYRAEMDRLAAMLPEYPVVMAMYGVGKSYGPQLMAEIGDVRRFERKQALVAFAGIDPMPNQSGDKNVRSNKSSKRGSPYLRKTLFNVIRTYLQCAPQDEPVFQFLNRKQAEGKPFYVYMLAAANKFLRRYYAKLRDYFASLDTFQSVDPIPTTLKASL

SEQ ID NO: 406119 - protein, 375 aa, unidentified
MSVKHFGGIDLHSNNVVLVIIDQYKRWVFKRRMKNDLSVILEGLGDFRDSLVGIVVESTYNWYWVVDGLMDNSYKMHLAHPVETSPKSRKKYSDDYRDAFNLADLLRQGELHEGYIYPKEDRPLRDLLRKRGMLVKSRAKYLQNLGNFVNQQLGIQFKGYDVKTLGLVEFDQMFVDELLRLSGRSNLAVIKTLNLEISKLEKAILEKGKLKEEFHALLAIPGIGNIIALAISLETGAINRFPDGGDYVSYSRCAPGGMWSNEKKKGEGNRKNGNKYLDWAYTEAANFTIRRCPYAKAYFDKKLKRTGERIVAIKSVAGKLARGVYCILTRGVKYDPEKLFGVHKVATPVRKPKKTYKGVASGSKPKRGLGKKPTV

SEQ ID NO: 406120 - protein, 418 aa, unidentified
MTGVTIGIDPHKSSHTAVAISAGEEPLGEVRVCASPSQAEQLLGWAAAWPERAWAVEGAAGLGHLLARQLVAAGEQVLDVPSKLAARVRLLQAGDTNKNDPNDAYSVAVAALRSPAQRPVLAEDHAAVLKVWARRHRDLARARNQAACRLHAVLCDLVPGGHPKEISTAQAARILERVTPAGAAARARCELAAEFLTDIRRLDAQRRDTSKKLAAAVKASSTSLTGIFGVGPVIAGTVIGDVRHVSRFPSRDHFAAYNGTAPVEVSSGGRKVYRLSLRGNRRLNHAIHMAAITQIRHKHSQGRAYYDKKISEGKTHKEALRSLKRRISDAIYAALVTDARHAAAACPQGPGGQPGNHSVSRAASSHPAHQLFGQATPGPATTIRPATTAGPVPAQPNRALRRRAAHSPAASKKPRTTT

SEQ ID NO: 406121 - protein, 410 aa, unidentified
MRYYLGVDWADQTHAVWVVNESGTKTAARTVPHTAEGLSEWGRELDEWRAQGIERWAAIERREGRVVDVLLDHGVVVYPVNPKALDRARDRFRQSGAKSDPFDARVLADFLRTDHPHLQALQPSSEAAQELKLLTEDYQQQIRQQTRLINQLTATLKAYYPRALEIAELSTPLAREFLQAYPTPEAVAALTERQWQRWARAHRLSETRTQALWNLLQQPQLSVPAHVVRAKARLMRSLVAQLTLVVAAVAEYREAIEDFFARMPAAQWARTLPIGKHGITAPTLWARLGDAPGRWESFRHLQAHAGAVPVTKRSGKQPRTIQFRFACDKALRYVIDHVAFLSLHSSVWARAYYDQQRARGHAHRQALRALAAKWLKIIFVMWQHQAPYDEQYHLATMTRQQLRHGQKQIA

SEQ ID NO: 406122 - protein, 351 aa, unidentified
MNNLQHHPIEETERPLYGGIDLHANNSVVVLPDEQDQMIYHQRLSNHLPTILDRLAPYHTEIKGVVVESTYNWYWLVDGLMEADYRVHLANPAAMQQYNGLKYTDDYSAAHWLAHLLRLGVLPEGSIYPKAERAVRDVLRKRSYLVRQQTATVLSLQNIIVRNTGVRFSAKQIHALPLEELERLLSEPDQILAVTSSLAVLHCLGQQIKTLEKAVSKRLKHTPAYEQLQTVDGIGTILAQTIVLETGDIGRFPSVGHYASYCRCVGSTKISNGKRKGQGNVKNGHPYLGWAYMEAAQFAIRFSPTVQRFYQRKQAKSHLMIARKAVAHKLARACYYMMRDLVPFDVHKAFG

SEQ ID NO: 406123 - protein, 411 aa, unidentified
MRIIRKRCLGLDLHKKQITAHLRVHRGSDLEPETVDVQFGTMPEELERMRKWIRAREVTDVVMESTGVYWMHVYELLEGITTPAVVNASHVKKVPGRKTDVNDAQWLAELHAHGLLRLSFIPPKPIRELRALTRYRTKLVANRTAIKNRTIKLLEMAGIKLSSVVSSVFGKTGRAILDGLSQARTIDLTKAAKGTLREKLPQLEAALRCPLTDAQRELLQMHLRAYDSVDAQVAEVELQLLTRAKPYATMVEQLDPIPGINPLAAITLLAETGMDMSVYRNERHLTALAGLAPGNAISSDKRRRIAVRKGNRYLKRICVQIAWAASRKKDSFQRMRFLRLQSRIGRNKAIVAVARQILVLVFQVLSTGQPYQDLGACFYDARDKQRAVERYTKRLTALGFLVQLQTKNLDA

SEQ ID NO: 406124 - protein, 403 aa, unidentified
MGNSAHYAAVRPDRDPEPVRRFECFTADLYRLAEWLQSCGVKTVALQSTGVYWIPLYEILEDRGFEVYLVNARHTKNLPGRKSDVQESQWLLKLHTYGLLNNSFQPPAEIRVLRTYWRQRAEHVSGAATCIQRMQKALTQMNLQLANVISDLSGWTGQAIVRAIIAGERNPQKLAELSHPRIEASREEIAKSLEGNWRPELVFVLRQEVEMYDTYQRRIAECDQQLQKHLASFGDTVLPQSPEAEPRERKAKPTKNAPRFDLGSELKRITGVDLTRIDGIDVMVAQTLLSEVGMDMSRWNTEAHFSSWLGLCPDNRISGDKLLGKGTRRVVNRAATALRLAARNLIRSRSYLGAQYRRLRTKLGAPKAITAMAHRLARLVYRMLKYGQRYVDKGTEYYESRYR

SEQ ID NO: 406125 - protein, 329 aa, unidentified
MDRQYVGIDFHAAGEKLASVRVANDPMVIAAAIAEAGPEPEVVIEATYGWYWIVDLLQAHGASVHLANPSGLNWGQRRVKNDERDAIDLIDMLRLGRLPEAWIAPPATRELRELVRYRAKLVALRSGLKAQVHAVMAKEGVLPTVTDMFGPRGNVQLDAMPLGDAYTVRVESLRDLIEIYDREVAMLERHIRQRVRSDPGYKAIQAINGIGPTMAAILVAEIGDVARFRSAAALCSWAGLTPKHHESDTTVRRGAVTKQGSRLVRWAVIEGAARYHGGPKLAGDFRRIAERRGKNKATVAVAHKILTLVYYGLRDGEIRCLAPADPEAA

SEQ ID NO: 406126 - protein, 347 aa, unidentified
MLAELVEIVIGVDTHKHTHTAAVVVAATGAAVGTVTVATDPDGYDQLVVLADQHSGRRVWAIEGTGGYGAGLVRFLAGRGETVVELDRPNRPARRRGAKSDPLDAVRAARDALAREHLGQPRAAGERAALSVLLAARRSAVDAATVAQRQLHALITAAPEVLRARFRGHTTRQIVTTAATLRVASGWDLETATTARTLRTLARRSQTLHAEAADHTHQIRTIIRTWRPDLLPLLGVGPIVAATVLCAWSHPGRCRSDAAFANLAGAAPIPASSGQTTRHRLNRGGDRQLNRALHVIVLHRLRHDPTTRAYAERRRAEGKNDREIRRYLKRYIARQLYRQLEQPLDAL

SEQ ID NO: 406127 - protein, 343 aa, unidentified
MEHFAGLDVSVKESSVCIVDDTGRIVREVKVASEPEALLQVLRNPSYHFKRIGLEAGPLSQWLFSALAEAGLPAICVETRHMRAVLQAQINKTDRNDARGIAQMMRAGLYRPVHVKTLRSQKLRMLLTHRKLLQSKAIAIDNDLRGTLRNFGLKVGMVGKVKFEARIKELVENQPDLAVLVEPLLVVRRVLREQLGILHRRLLAIVRDDDVCRRLMTVPGVGPVVALTYRATVDVPARFKNSKAVGAVFGLTPSKYQSGEIDRTGGISRCGDEMMRVMLYEAAQILLVRSTKWSWLKAWAMQIARRRGMKKAIVALARRLAIIMHRIWVDGTEFRWTRDVAVA

SEQ ID NO: 406128 - protein, 349 aa, unidentified
MRFYTKQHQFYCGIDLHARLLAVCIVDQAGAVVLQTQIAADKQLLLKTLAPFRPDVVVAVECLFAWYWVADLCRDEKIPFVLGHALYMKAIHGGKAKNDDIDAEKIARLLKGGNIPVAYVYPKGLRETRDLLRRRMYFVHQRAALITHVQIVNAQYNLPEFSKKLIYAKNRAELKIAERFENPQLRKSVEVDLALIDALDERIAEVELHLERTAKVEDPQTFHLLKTIGGVGKILGLTLLYEIHDIRRFPDVGEFLSYARLVRCRHESAGKKLGSGGHKIGNAHLKWAFSEAVCLLVRHFPVVKIWQARHEKKHGKKKTLGILAARLGRTVYHMLRKREAFDVKRFLGQ

SEQ ID NO: 406129 - protein, 411 aa, unidentified
MLFVGDDWAEAHHDIELQDAQGRRLVRQRLPEGVDGVSALHALVADHLADSDEPEDVVVGIETDRGPWVQALLAAGYTVYAINPLQAARYRERLGTSGAKSDPGDAHVLAELVRTDRDHHRPIAGDSELAEGVKVLARSHQSLIWDRQRQANLLRSMLREFYPAALQAFGTDLAGRDALAVLALAPTPQQGKTLRVGQVERALRAAGRQRNLTSKAEQFCTALRTEQLTAQPLVALAYGASVSAHVAVITELARQVERLAEQVESSFGRHPDAEIYRSLPGLATILGARVLAEFGDDPDRYTDAKARKNYSGMSPITRASGTRRVVLARYARNRRLADALYPQAFAALTSSPGARAYYDTHRARGATHHQALRALANRLVGILHGCLRHRSAYDEATAWPNNVNKAQATAA

SEQ ID NO: 406130 - protein, 411 aa, unidentified
MEAAVITAVGIDVSKSKSTVAVRRPGGEIALRPFEVHHTNSDLKKLASTLKKLGGDIRIVMEHTSTYWRPIALTLKEAGFFVSIVNAMLIHDFSDNTIRKLKTDRADALKIANYALTFWDTLPPFNNEEETRLLLKMQSRANERITATATALRNGLIALADQTFPGVNIAFDPNTKNANGHEKWVDFFLRYWHKDCVCQYSMEAFTESYRGWRKQKNYKFRTDTAHKIYLLAQEGVATLPKCESTKMLITQACKSLNAVCEAKQSTQLEMQRLAAMLPEYEVVMQMEGAGPITGPALMAEIGDVRRFKNKKALVAFAGIDAPPFQSGAFESKSRHVSKRGSPHLRRTIFIVSNIILTRSNPENAVYCFMDKKRSEGKHYYVYTVAGSAKFLRVYYARVTEFLRSQPSPGAC

SEQ ID NO: 406131 - protein, 407 aa, unidentified
MGITCGIDWSESHHDVALIDEHGTVVARTRIDTGAIGFHILLALIAEHGGSVDDTPIALETDKNLLVVALAEAGFTVYPINPRAVARYRERYGQAGGKSDPGDAAVLAHILRTDRHLHRPLPAVSEEGRAVKALARQHQEAIWALHQTVSRLRSVLLEFYPQALQAFPNLKHKAALTVLADAPTPAAGQRLTRGRVVALLRRSGRGNHPALVEQILTDLHTPALGQPPRVEEAYGHTVRGLVAIVIAMGQAVDDLETELAREFDQHPQAAILRSVPGLGPVLAARVLGEIGDDPARFDNPQGLRAYAGTAPVTIASGRLRYVKARKVRNKRFGDACHWWAYTMLTKSAGARAHYDRRRAAGDHHNAALRNLANKLLGRLWWCLVNNQPWDEHGAWPDHGHTENPTAA

SEQ ID NO: 406132 - protein, 339 aa, unidentified
MVSIGLDVHARSSVLHALDTNGNTVAKERVRGTIDKVLPHLRRIKEKFHEPLTVCYEASCGYGYVFETLGRVADRVVPAHPGKLRLIFANRRKNDHQDARHLALLLKLDAVPTVYVPDVEVRDWRMLITHRESVLRRRVAVKNQIRALLRTYAMVAPKGLYSKKGLAWLAEAPFETRGSRLRRDMLLVDLEGLTLHLKRVEKELDAIGHAHAGVALLMTIPGVGIRTAEAVMAWIDRPQRFARNKAIGSYFGMVPCQDQSADKNRLGHITKQGPAVVRRLLTEASWQGIRHSARMRAYFEKVMRGNPERRKIALVATGHFLLRAMLSILQTGEVWRAEA

SEQ ID NO: 406133 - protein, 339 aa, unidentified
MQVTTIGVDLAKNIFQVHGIARDEEVVFNRPLRRAQLLPFFTKLEPCLIGMEACSSAHHWAREFTALGHIVRLIPPKYVKPYVKRGKSDAIDAEAICEAVTRPTMRFVAIKTVEQQALLSLHRARALLVRQRTQLINGLRGMVAEFGVYIAKGLARVIGFAEDILVGEVLDLPEIANEVIHNLCEHLVALYARIRWYEERLKLVAKEDARVRLLRTIPGVGVVTASAIIASIGDGHQFRNGREFAAWLGLTPANKSSGGKEKLGRITKMGDQYLRCLLVVGMTSLVRQTKSHPERASKWLTSLLERKPARVATVAMANKTARIVWAVLTRNEPYTPHTV

SEQ ID NO: 406134 - protein, 434 aa, unidentified
MLVIGLDLGRKSKHQAVGVDMAHQEVFSRKVKSSRDDLERLLELADRYRGGGEIHVVMEATGMSWFLPAVFFANAGCRVYRVKADQAADFRGYLSKHTKTDQVDAASLARMRFVQPHSLEEVHLRDRQHFALKQLIKQREDFLADAVRYKNRLKSLFDGHIPGLCGLSNRLVEKRKLRSVLPKLIDLNWVNNMGRTRFRRYIQRRDGDLTEEVIDRIYHACIDALAMHDEAHVDFEILSDQVHRYVEMLAFVEAKVDELTGEIEEAYQVTDADRLLCSIPGVGQLTAAYAEAYLAPADRFPNHSSADSWAGVIPKTSASGQLEKKGLKMSKAGPPAFRRVLYLAADVARRYDPQLAGVYHREMVEKGNPHTKAVVACMRRLLHRILRIMKDRREYQLRDLEDNPIDSSTAKQLIIQLQVPREVRYRLRQRKQAV

SEQ ID NO: 406135 - protein, 400 aa, unidentified
MPCHGGLDWGGAAHAVCVVNATGRIVARIEARHDAAGLADMLARLKRVAPPAELPVAIERPSGLIVNALVEAGHPVIPIHPNVVKACRPRYRAAGGKSDPGDAYMLADILRTDGHRFRPLMPLSDDIRALRALVRARDDLVSQRVTLANQLRSLLEGFWPGAAAVFAAIDSPIALAFVSRYPTPDSASRLGEKRMASFMAQHAYSGRRTPAELLARLRAAPTGLASNAEAKAKGEVVRALASLLERLVGEIAKLSSRVEHAVAELPDGKIVMSFPRTGRINAAQILAELGDVRERFPTENQFAAEAGVAPVTHASGKSRGVVFRWACNKNLRQAITCFADNSRHASSWAADIYARARQRGCKHAHAVRILARAWVLVLWRAWQDGTDYDPAKHRAATRIA

SEQ ID NO: 406136 - protein, 338 aa, unidentified
MIHVGADLHQRFCYFTALDARGRQLRAGAVVNEAEALRQWLRQLPGQVQVAVEACSFWPGFREAIESEVAHLRLVHPQRVKAIAAAKLKNDKVDSATLAHLLRCDLLPEAWMADAATRELRQQVRLRATLVRQRTRLKNQVHAILHQQGLRSAVSDVFGVRGRQWLTQLKLPTAARVAVDTYCGLIDHFSQQIATQDRALRQQVKRDQRARWLTTIPGIGQFSALLLVAEIGNIERFADKHALCSYAGLVPWVRESAGHKKARASITRCGSTWLRWIMVEAACTAVRTSPAARAWFQRLARRKHKHVARVALARKLLVAVWAMLKHGEVFDEAVFAAM

SEQ ID NO: 406137 - protein, 354 aa, unidentified
MQTKEHKIWVGIDVGSKSFHAALDFPMLFEKQEETSVSDLPNREFKLTSAGVKSFFNWIYLQQSDFFARYSDDEQDDLPIIFIMEATGICSTKLTKLIYTSAPDSKIIVANPEPIKSFRISLNIKNKTDKSDAQVIARYGRERKPSTKQKMPEEFVQLRELSRTRSFLKDQRTAINNHHDNIDSSLAKRMCSNTVNAINNEIDGLDREIEKIVLNTPEIKHEVDIMTSMPGIGIATAVALLGELGTLKNYPTRQKITAMCGLNPVRKQSGTSVNSTHLSKKGSPVVRRFLYMCSKTAVPSIPVLQDLYDRLLVKGNTRMQARCAVMRKMLLILRGMVIADKKYDKNFKKIKKNI

SEQ ID NO: 406138 - protein, 405 aa, unidentified
MAGCLEQERMVENAVCRRRFVHRSVGGPAVADYTFVGCDAHNKTLLLKVAMDREASVQRSFANTRPGRKALARWLLGVAGEAGCSTIYFAYEASGLGFTLHDELTAAGVTSWVLAPTKIARSPQHRRRKCDAKDAERLLDIVRAHVLAGSELPAVWVPGHEVRDAREVVRGRLAVAKRLTAAKTEVRSLLTRRGVERPKRLGKGWSKAFRAWLSGLVEGHGPLLWGARVLLASLMAQVEFLEGELHYFDEQVMVLAHQERHAAAVEAMTSVKGVGELTALAVLTELGDVRRFSRRGQVAAYAGLVPRTDESGEAADHKGHITKQGPSRLRGVLSQAAHSWVRWDPAAKAAYERLVARNPKHKKIALVAMMRRLLIRLWHRGVDALRASPCPGSAAEPDGAAGVRR

SEQ ID NO: 406139 - protein, 342 aa, unidentified
MEQYVALDVSLKEISVCIVDSNGDVVFEGKTAAEPATLVELIRCKAPQVKRVGLETGATSPWLFHALVAAGLPVVCMDARHAHAALSMRPTKSDRSDARGLADMLRMGWYREVHAKSVTSHEHRTILGARHQLVTMRSELDAQIRGILKTFGLILGTGNKDTLIQRAEKLAAGHPVLRGVVAKLAEVRRHVTSQIVAIDRDIRHLVHTEPTLKRLISVPGVGPITALAFLSAVDDPSRFKHARDVGPYLGLTPTRYQSGETDRQGRISKCGDTFTRTCLYEAAHVLLTRVQRFSPLKAWGMRLAKRIGGRKARIAVARKIAVILHCIWTDGTEFWWTREKAA

SEQ ID NO: 406140 - protein, 424 aa, unidentified
MREEGLSMAEEIEWFVGIDWASQSHQVCLVDARGECLGERAVAHGGLGIEELCDWLIARTGATPEVIGVAIEMTQGPVVEALLERGFCVYGINPKQLDRFRDRFTVAGAKDDRRDAHVLGDSLRTDRHAFRRLSNDEPVIVKLREWSRMADDLQQERARLASRMREQLWRYYPQMLELADDLAADWFLDLWNQAPTPAKAARLRQTTIERFVKAHRLRRWQAPEVLRILKQKPLSVAPGVVEAASDHIRTLTVRIRLVNQQLKAAHRKLDEFCAQLVPSEEDEPGQQCEQRDVVILRSMPGLGRTILAVLLAEVWQPLRRRDYHALRSLSGVAPVTRRSGKTCVVVRRYACNKRLANALYHWARVATQHDALSRRRYAALRQRGHSHGRALRTVADRLLSVACTLLEQQTLFDPTYEVREAAGA

SEQ ID NO: 406141 - protein, 364 aa, unidentified
MNDTYYIGLDVHKKSISYCVKTASGEIVQEGRVVARREELRAWAATQAQPWRGAMEATLFSAWIYDTLKPYAQQLDMAHPARMKAITAGKKKSDRLDARTIADLLRCNLLPACYVLSPEMRDLRRLLRYRQLVVGESVRMQNKMAGLLMETGTPFVKSKLHGKKYFNQLIQTLEEVPESVKDLLQMSRGAMEMFESTQKRLVQRLLLEPALAARVERLCTIPGVGPITALTWALEIADPQRFSSIGDAVSYCGLTAAFRTSGGKEQRGPISKQRNAWLQTALIEAAKLAPRWNPQLAAVHEHELTRGHRNRATLQVARKLVAYLMAVDKSGQPFQMRSSPQKLECKSTGKKERKKMPEPALAPA

SEQ ID NO: 406142 - protein, 338 aa, unidentified
MIGVDLAKTVFQLHGASMTGELKFRKKLSRGSFAKFMAEQPPAVIVMEACGSAHYWAREMSRYGHEVKLIAPHYVKPFVKRQKNDAADAEAIVVAAQRPEMRFVDPKTAEQQSRAILFRARERLVHQRTELANALRGCLYEYGHAIPKGMHQLKRINEILNNPNSDLPDLMREECRDLMDQIAEKTVRIDARTVKIKALAAEADTARRLQTIPGVGPLTALAVEAFAPPMESFRCGRDFAAWLGLVPRQFSSGGKERLGRISKAGQADIRRLLIIGAMSRLTWLTRKSITEGSWLARMAARKPRMLVAIALANKMARTIWAVLTKNEDYRVPTRAAVA

SEQ ID NO: 406143 - protein, 332 aa, unidentified
MVYVGVDYHKRFSVATKMNRDGEVLEQVKLANTPECLRGYVDTLPPHAKIALEATGSWYWFYELLEDKSPEIYLANTLKTRAIAEARIKTDKVDSAMLAHLLRTDLLPFSYIPPREMRDIREILRYRASLISQRTQVKNKVRALLSKNGITVEYSDIFGKKAFEYLSGLELRPAYCEELRGYLALAETLNSLVSEVDGSIERIAKDNPQAMLLTTIPGISYYSALLIVSEIGDVARFSTARRLCSYAGLVPRVHSSGGKTRCGPITKQGSKYLRWIMVERSQQFIAGSRRMEGLYKRVRSRHGANTARVAVAREMLKVIYYMLRDERPFYED

SEQ ID NO: 406144 - protein, 384 aa, unidentified
MTKHNILFIGLDTHKTFTEVAYIEDQRGAKSIHLGKILSNKTAFKKLARQLQSKYPDATLHFVYEAGPCGYWIYRLLTSLNHCCYVIAPSLIPKKPGERIKTDKRDALKLAKLLKSEDLTPIYVPEPEDEAVRDLSRARETGMKDLKDGKYQLKALLLRNNINSKVKDNWSLQHLRWLTELILPHPCQQIVLQEAVSTITERLKRLKRLDNELTHQVKKWRFYPVVKAIQALRGVRLLVATGVIAELGDLSRFDHPRKLMSYLGLVPSEHSSGGKRHLGAITKCGNSRARRLLVEGAHSYKHNANISKEMQLRQEGLSKEVIDMAWQAQLRLCRRYNRLMHKGKHRNVVVTAIAREMIAYIWAISREVVLPKVDVKLRISRMPA

SEQ ID NO: 406145 - protein, 405 aa, unidentified
MNSVGIDISKGKSMVAVMRPLGELLVKPYEVIHTAGELEKLAYSLKKLDGETRVIMECTGRYHESMAEELYDAGIFVSTVNPILIHGYGNNSVRRAKTDKKDALKIAKYGLDNWADLREYTPIDAVRQNLKTFSRQYNLYIKTKTALKNNLISLLDMTFSGVNTFFDSPARADGHQKWVDFVMEFWHCECITCLTEKTFTERYRKWCKKHGYHFSAKKAFDVYASSAGHIVYMPKTEHTKLLITGAAAQLTAVSKMVEMFRAEMLRLAQELPEYPVVMAMYGVGDALGPQLMAEIGDVRRFERKQSLVAFAGVDPVPNQSGTHNPTSRPASKRGSPALRKSLYLVMSALLRKSPADDPVYQFIDKKRSEGKPYYVYMTAGATKFLRVYYGRVKEYLNSLDDNDGA

SEQ ID NO: 406146 - protein, 425 aa, unidentified
MTTKDDANPSKTLVAIDIAKRSHAVLIETPDGKQKRFRMASSFDDHARLVELLRASPQPVRVAMEPTGDCHRTLAFRLLKEGFEVCLVSSIAGARYREALFNSWDKNDPKDASVILALLKQGITQKYVDPLVAGHHGLQELSKTYYQISIARTRLQHSVMTHYLPLYFPEFERYFHASRAEWFARFLLRFPTAESIRHMEFKAFEADAWEIVGRKVNKAIWIRELYDTALQSIGLPIADDSLEVESFRLQLRRYQELNSQREALSERAHALLAGRADYEALRSIPGFGPILALTVLAEGGDLRRFPHHRQFLKYCGLDLAKSQSGESRGREKLSKRGNARLRFAFWFAATIAIRMRENSFRAKYERYIKPDPGSADRKRKALTAVSAKMARVAYSIVKQQSVYRGYFESALPSGSIPLRAAVGAT

SEQ ID NO: 406147 - protein, 341 aa, unidentified
MIYIGLDVHKENTTACFISPGGKVLKNFEVPSSADGLAAIREHAKNREYCVMMESSTYSYPVYRYFDDLGVETCVVHAASLKVVTQSDKKTDKKDAELIGRYLRLWKKKEIELSMSFIPTREQCALKDICRYREEISKKTGDETRRIRAHLKRNCQELPEEFDNLATKKTKNHIRKMWPDDMTLMHRLDMYEELLKEGKRIEKEVISHMRNDPNVSILADILGIGRQTAVQIMSMIIDIKRFPTPEKLCAYFGMVPRVHDSGGKQHHGKMTKTGDKMMRMIMERVTQLHIQFCDSFIREYHNRKLKEMGKKKAPITTSRKMLTGIHALLTKQESFRAQIRM

SEQ ID NO: 406148 - protein, 428 aa, unidentified
MSNKKFNNKKYFPADTLFVGIDMAKKDCYAVGLTSRGESISSIYKFNITMDSLEKFIAKIEKWKNDFNCGQIVIGLEPTGSFCYPVEKFLEQNNYEVKYVNPMHVKRTKEMYDNCPSKNDRKDAFLIARLLDEGKFLQKVKRTPEYESLKILVEEREFFLNQSVALKNHLISQLSCYFPEYSKLFSDLTGKACVKLLKTAPLPEDILKLGQEKLTKLLHESSKGCVGAEKAAQLIEAAQISLSCICDSDSVRFILKINIKELVRLNSIVTSFEEKMNKILETLEEYNFLKTIPRAGIVSISALLGYSGGLNNFKNTRELLKYLGMNTYEISSGVHKGKRKLSKRGPSIVRAKFYLLACNNLTSPKSIYSKIFNDMKSAGKESMVILVAFACKFIKIAYAVVKNKTEYNESLVWGKAEKTSPSIKRGAA

SEQ ID NO: 406149 - protein, 402 aa, unidentified
MNCVGIDVSKGKSMIAVMRPFGEVVISPFEVLHTANELSELAGLLKSLDGETRVVMESTGNYHAPVAWLLHDAGLYVSVVNAMLVHDYGNNSLRRAKTDKKDAVKLANYGLDHWLTLPRYVPEENTRLMLKSCYRQYQQYSKVQTMLKNNLISLLDTAFPDANRLFTSPPRADGSEKWVDFVAAFWHCECVCGLSEKAFTAKYQKWCRKHGYNFSKDKALDIYASACGHFGVMPKTDTAKLLVEQAISQLQTTSAALAALKQEMQSLAASLPEYPIVMGMFGVGPTLGPQLMAEIGDVRRFHSKKALVAFAGIDSPPYQSGQMDVHSRSISKRGSASLRRTLFLVMGVLLQCAPMDEPVYQFMNKKRSEGKPYRVYMMASANKFLRIYYASVKTYLDSLEHD

SEQ ID NO: 406150 - protein, 394 aa, unidentified
MKLVGIDIGKHKHFVSIVDKLTGEIILQPVAFSNNAQGFEFLISQIALYPVDSVLIGMEDTGHYHFALLRFLLQKNYNVALINPKTTDLNRRMDGGITKNDKLDTLNICDILSSNKLKKPYRLTSSKKFDLYEQKQLTRLHHSLKEQINVLSNRLQKCIDLVFPEYNSLFKSKYGKVYMSILKQFGSAKAIAQADIRTLRKCFDITGRGNRISLTAEKLKESAKTSVGISSLADEMQIKHLIAHIELLNDQLKEIDKKIEEFSTDLNSPIISVPGISHFSGTSILAEYGDIFNYSKPSKIIKAAGVAPFHYESSQYEAKHSAITKQGSSYLRKTLYQVIVPVIRYNKVFKDYYDLKRSQGKSHRCAQGHCIRKLLRVIYHLVTTNQQFDASLLR

SEQ ID NO: 406151 - protein, 315 aa, unidentified
MENNSLIRVVGVDVSQDFLDVFCSDGGASRVGYDAEGLRKLIVSYGKSRPDLVLCEATGGVERRLVAALVSAGIATAVVNPRQVRDFAKATGRLAKTDRIDAQVIAEFGLAVQPPARLPKAELAQQLDDQLRRREQLLEMLIAERHRLARASRAVVKNIRLHIAWLERQIDQADHDIDTTIKESPAWQAKHDLLKNFKGIGPMTRAGLFAWLPELGMLNRKQIAALAGVAPFACDSGTMRGQRHIWGGRRNVRRAVYMATLVAVRHNPTLRAHYTQLRDRGKAAKVALVACMRKLLVILNAVFRSGVPYVERTAS

SEQ ID NO: 406152 - protein, 408 aa, unidentified
MQVLYPRCAGLDVHKDVIVACVRCVSTPVHQEVRSFHSTTNGLQSLDEWLSSHACTHVAMEATGVYWKPVWHILEADFELVLANAAHIKNVPGRKTDVNDATWIADLLAHGLIRSSFVPPAPIQELRDLTRTRKQLVREISQHSSRIQKILEDANLKLGSVLSNVLGKSGRAILHALIAGETDPEKLADLAEGTARKKRAELMEALHGRIRDHHRGLLRVHLELIAALEQALADIDATVGKTLAPIRDSARLLMTLPGVGDLTAQVMVAEIGVDMSRFPTAAHLISWTGLCPRSDESAGKRRSSRVRKGAPWLKTALVTAAWAAVRVKDSYLQAQFHRLRSRRGAKKAILAVAASMLTAAYHMLKNGLPYRDLGADHFSSRDRSKAILRLVRRLNDLGCEVHVTPQAA

SEQ ID NO: 406153 - protein, 418 aa, unidentified
MAHESEWYVGFDWASEKHRVCLLDRAGRVVGERDVAHDGAALTDLCEWLIDKSCAEPARIAIAIEMPHGPIVEMLLERGFAVYAINPKQMDRFRDRFTVAGAKDDSRDSRVLGDSLRTDRRAFRRLCPDEPLVVELREWSRMADDLKQERNRLANRVREQLWRYYPQMLKLADDLAADWFLALWECVPTPAKAAEARGAAIARILKAHRIRRFNAAEVLRILREKPLAVAPGAVEAATAHIGAVAERIELVNRQLNTAQRQLDELCARLEQPSEGEPGQKSEQRDVAILRSFPGIGRINLATLLAEAWQPLQRREYSVLRAMSGTAPVTRRSGKACIVLRRLACNKRLERAVYHWARVAVQHDPRSRAKYAELRRRGHSHGRALRSVGDRLLFLACTLLQRQILFDPDYKHADVAAAA

SEQ ID NO: 406154 - protein, 290 aa, unidentified
MTHSLLPDSSYFVGIDVAQATLDMARSDTGEILTVNNDSEGIRRIVDSLRSTPPQMIVIESTGGLERPMLDALLDADLPVALVNPRNVRHFAVGIGILAKTDPIDARVLFEFAKLASPRLAEKRSANQVELDALTTCRRQLTQLRAIQINRRGTTTSKAAIKTIDAVLKALGREIQKLDKKIRALVESDDDFDSSDKLLRSVPGVGAVVSATLLAELKELGSTDRRRVSALVGVAPYNHDSGTMKGHRSIYGGRASVRSVLYMATVTNAIRLVRMLFQDQGVELLSRLGH

SEQ ID NO: 406155 - protein, 391 aa, unidentified
MFLLGIDIAKLNHVASCIDSSTNEVVFSNFKFKNDFKGFSALLNKIKSFDAKNLIIGLESTSHYGENLINFLFIRDFKVALINPLQTSHLRKANIRDAKNDNLDSLNIAKSLIFTNLNFVSKKNIECFFLKKLTRFRSNLIKQRSKAKIQLTSLLDLLFPELQYLFKSKIHSKAIYSLLKKYPSAEEIAALKDDEISNLLYASSKGHFKKEKSIELKSLAKTTVGIKDTSISLHLIQLIELIELYTKQIKDIEIKITDIVNNLDTTLLSVPGISVIACAIILGETNNFENFSSSKKLLAFAGLDPKIRQSGNFNASSCRMSKKGSPYLRYALIFTAWNIVRHSEKFNKYYSLKRSQGKSHYNALGHVAHKLVRILFTLIKKNISYQEEKLE

SEQ ID NO: 406156 - protein, 352 aa, unidentified
MQRYIGIDVHSKSCTVAVVDGTGKHVGQHVVETNGAALVECLKMIPGERHVCLEEGTQSAWLHEILTPHAKDLAVVNVTESRGPKSDERDAFGLAERLRQGKLERRVFKDLGPYRKLRELGRVHGMVVRDVVRVQNRIKSFMRSRGVEVAGKTVYSSEGREAYVKKLPAGTREAVMTLYALYDAEKEVRKRAEKELVEEARNHRMASVLETCPGIGPVRAAQILPIVVTPLRFRTARQFWSYAGLGIVMRSSADWVRDQAGNWQRSHVEKTRGLNAAHNHQLKAIFKGAATTVVTQVHDDPLYQDYERLTAAGTKPNLAKLTLARKIAAIVLVMWKNEEVYDPDKHRKPATE

SEQ ID NO: 406157 - protein, 410 aa, unidentified
MELIVERPGALDVHKESVTACVRVPDAGGKRGEYVETFSTTVRGLLTLHDWLAAHGVTQVAMEATGVYWKPVWAILEDDFDCLLVNARHVKQVPGRKTDVKDAAWLCQLLEAGLLKRSFVPPKPIRTLRNLTRYRKSQIGERQREANRLHKILEDTGIKLDCVATDILGVSGRAMLDALCKGTTDPAVLADLAKGALRKKIPALQEALEGRFSIEHALVVSAILAHIDFLDAQIERLSQAVEEQLVPFAAAVRLLCTIPGVKQRTAEVIIAEIGTDMTVFPTAGHLVSWAGLCPGHDESAGKRRSGHTRKGSKWLRIALLEAALAATHSNDTYLAAQYRRLKGRRGHRRASIAVCHTILAATWHMLQTGEIYHDAGGDYFTRLNPELQTRRLIKQLEALGHHVTLEEVAA

SEQ ID NO: 406158 - protein, 315 aa, unidentified
MNNKERVVGIDVSKATLDVALLPSGEVLQFANDANGIEELGKKLKLAAADLVVMEATGGYETAVATALVGSGLRVAVVNPRQIRDFAKATGRLAKNDRLDAQVIAAFGQAIEPEIVRLPDEDARALEALLVRRRQLVAMRVQEVNRLGLMQGAMRKRIKAHIDWLEKEIDKLDIDLTAGLRSSPAWRAKDELLRSFKGVGPITSGTLMVALPELGQLDRRAIAALVGLAPFNRDSGVMRGRRSIYGGRSQVRTLLYMAATTAIRSNPVIRPFYERLKSRGKPHKVAMVACMRKMLTILNAMVRQSTPWTPEIKPV

SEQ ID NO: 406159 - protein, 337 aa, unidentified
MKLYVGIDLHAKRSVIVVKVENGKRVACKRVTNELELIRLAIEPYREKVAGVAVESTFNWYWLVDGLMDAGFKVHLANPARMKQYEGLKHVDDVTDAEWIAEMLRLGILPEGHIYPREERPLRDLARRRMRFVRQRTGSINSMLGIMSNNTGHRPKTNELKAWTDVDVDELFADADLTLAARANIEVIRCLTKQIETIEKSILSRARLRPEYKVLKTVPGIGDILALTIMYETGDLGRFSSVGNYASYCRLVDSKWLSDEKRKGSGNTRCGNGYLHWAFIEAAHFAMSNERINRFHQRKARKRKQKMIATGAVAHKLARASYHMLKKQEDFDVERAF

SEQ ID NO: 406160 - protein, 362 aa, unidentified
MTIMPTDTRSGRVIIGVDTHKQFHAAAVLDERGALLGTATFAADSAGYRALISWAGQFGVPRRFGIEGTGSYGRGLTSAVRRAGHDVVEVMRPNRQDRHRRGKSDLLDAENAARAVLAGTAEAIPKNAEGIVEMIRHIKVAKDAAVKARTAAMQSLKAVLVTAPAELRQALEPLPNMALIRRCAGLRPGELTSVSDAVKHTLRAIAQRWLILNDEISGHEKLLGALVDQLAPQLTAAFGVGPDHASELLLALGDNAERLSSEAAFAKLCGACPIPASSGKTRRYRLNRGGNRRANAALHGIVVVRMKYHQPTRAYVTRRITEGKTKPEIIRCLKRHITREIWSRTKHLRQQPKTHQTASCHL

SEQ ID NO: 406161 - protein, 424 aa, unidentified
MKNTLARKLKQVPEGYLIIGIDPHKKRHAAVAISQDFTTRDKFKFDNTREGLETMLRRARTEMVKYGCRGVMFAIETGGHYWRNIAYFLDERGLPFRLINAFTLKRRREGKELNRRKNDYRDGEVAAQLLCTGEFTESKLPQGVYAELRTAHNAYRRLVKESTRITNLVKGLLDGLFPEFTQVFKDPCGLTALSVLSTCAIPRVIAGMTEDEFVAIIEAQYKGRRLMRKKLRALHFIAGTSIGIDAGARSVSSEIAFLVDKLELIRQHICIIERTLVRLVDETEEGKYLLSIRGLNYIAVAGLLAELGCFKSYQSAKQMIKMAGSNPTESESAGKRSTNTPMSKKGRPVLRYCAWTSVIPMLRFNPDFRAWAKQRRERPVHANPLGGREVVGAALNRLLRLVFVLVKKQTFYQLPRTDLVEIAT

SEQ ID NO: 406162 - protein, 337 aa, unidentified
MNNVPLLLGLDYSDGFVQVCAMDEQANVVMNRACGNDWRELVEAVAGKGVVKRVAIEACSGAADLAEELVTQAGWHVELAHPHYVAKLKGSPDKSDFSDSRLLADLTRVGYLPVTWLPPAAVRELRQLVNYRQQLADQRRASKLRVGALLREQRVKVPRELSRWSKGWIAFVRITPQLSEHARWIVNQVLEQLQELNQRIDQAEQRLRQATAGDPIVERLLEQEGVGEVTAWVMRAFIGVFERFKSGKQLSRYCGMSPKNASSGSRQADGGLIKSSNKILRATIVQAAHRLIRTRPRWAALAQSLRGRGKPPCVIAAAVGNRWMRRMFHEMKQLKAG

SEQ ID NO: 406163 - protein, 342 aa, unidentified
MQVTTIGLDIAKNVFQVHGIDAKEKVVVRKQLRRSQVIAFFAALPPCLIGMEACATAHYWARELRKLGHEVRLMPAKDVKAYVKRNKNDAADAEAICEAVRRPTMRFVQIKSAEQQGQLMQHRTRDVLIRQRTQIINALRAHLAELGIVAAQGDAGVNELRAIVADDRDERLPIDARASVIVLAAQLEALQTLIGSIEKRIKMQHRSNETSQRVETIPGIGVLGATAIVATAADPKIFRSGRDFAAWIGLVPRQDSTGGKQKLGPISKQGDRYLRRILIVGAISVLRRAKQNPGKYPWLTQLLARRPFKVVAVALANKMARTAWALMVHGGTYRAPELAETA

SEQ ID NO: 406164 - protein, 370 aa, unidentified
MSVRRILAKTIDTDLEYEAIGIDLAKNCVSAALLTTDGEVVCIDRLDYSELEKSAQALSPTTFAMEPCTEMNYLVQKLEAWGHRCLVIGGKNVQNYVENHYSGQKTDLNDAQALAFLAQDTQLRTIKAKDVEQQKYASLTTLREQYIKQYRQTIVSLKGICQAWGLNISKGISGKARLKDLIENHAAFPEELKESLVDMVTHAQTAQKALNKITKTLEELAKSDKVCQLIQTIPGLGSICSCRLRATVGDIKRFKSPKDFPAYYGLVPRSIATGHNERKGKITHRGDRTMRSLMVQAAGSLVNMATKGKLKSKQLTKWILKKQKEKMPWGKLVCAVAAKLLRIVRAVLISRKAYDPKLAGVAKCSLPKAT

SEQ ID NO: 406165 - protein, 360 aa, unidentified
MSSMTQSGMDVERAVIGGVDCHDQTHRFAALDALGRRLGDAEFPATAAGYVRAEQWLRGWGTVRMVGVESTGSYGAGLTRHLQAAGLTVVEVNQPHPHARSRRGKSDAIDAEMAARKVLSGEVTTVPKDTTGVVESIRQLTVARAGAVKARTAALVQLGQLLVTAPAPLREQVDAKTLLGRAAQCTRLRPDLTRLGDPVQASKLALRSVARRITDLNHSIDELDEGLSPLVAKTAPRTLQRLGVGTQHAAQLLITAGANISRLRNEAAFAHLCGVDPIPASSGKTVRHRLNHGGDRAANSSLHMITVVRLRYCEQTPHLPATPHERRQDETGSHALPQALPGSRALPHHHSRPKDHVRTP

SEQ ID NO: 406166 - protein, 317 aa, unidentified
MDVETKADRFVGIDVSKARVDVHVRPDGIAFGCATDPEGLGALGARLKPLLPCLVVLEASGGYEGAVAAALVEAGLPVAIVNPRQVRKFAGAIGRLAKTDAIDAAVIAHFAQAVRPPARPLPDDLSVRLAELMARRRQLVVMINAEKQRLAKARDPIAQSSFKAVLKRLQAERARIDKAIDRLIEVSPLGCAKQDLLKSVPGIGDVVARTLIAELPELGRVDRHQIAALAGVAPINRDSGRYRGKRKIQGGRVEVRAPLYMACLVAIQHNPVLKSFYRRLREAGKPARLALVAAMRKLLILLNAILRDQRPWAHAQT

SEQ ID NO: 406167 - protein, 317 aa, unidentified
MAEVTFPQLIQRACGIDVHLKVVVATIDGAGIQRETRSFKTFTSSLNELKEWLLSNGVTHVGMESTGVYWKPVYKVLENSIPNVWIVNARHIKNVPGHKTDKMDSEWICKLLLAGLLKPSYIPPKEQRQLRDLTRYRNKLIQQIASEKNRMMRILEDCNIKLSSVVSNTSGTTATSLIDMLCEGKVLTLDDINSVYHGKLSASPEELLEACTGFVEEHHIYLLQMIRKDIDQTQTLVDDLSERIKRLLSKYENVLELLREIPGFSTKVVEDLVSEIGLDMSHFPSEKHLSSWAGLSPGNNESAGKKKAHESLTETNR

SEQ ID NO: 406168 - protein, 373 aa, unidentified
MSFTSDTILVALELSNSLWLVGTRQAGARSSQMHRVSAGDTATLMRLLDELQASGRDQGTPSPIAVCFEAGRDGFWLHRLLTAQGIPTYVVEPTSILVNRRAKRAKTDRLDAEGMLRVLAAYIGGDTQICSMVQVPTPDEEDGKRVHREREYLVQERTRIENRISALLVTQGIRSRPSLRSWERDMARLETGDGRKLPQHLASELNRLRRRLVLVRELISELDTERDEHLTATSGDAITTKVTALSEIYGVGDNFAAVLTREVFYRHFANRKQLASYVGLAPMPHQSGNVDKDRRIGRAGNARARKTLVQAAWLWLRYQPKSALSSWFHKRVGELKGRARRIAIVAMARKLLIALWRYTENGEIPAGAVFRAA

SEQ ID NO: 406169 - protein, 349 aa, unidentified
MVIIGTDSHKHTHTCVAADELGRRLAERTVAATGAGHLELLAWAARFTDRSWALEDCRHLSRRLERDLLGAGEPVVRVPPKLMAGARRSSREPGKSDPIDALAVARAALREPGLPVARLDGPEREVRLLVDHREDLVAQRTAHENRLRWHLHELAPGGEPAPRTLGRLPVLDALGARLAGIDGPVARIARDLVARIRELTTAVTALERELAALVRPLAPTLLALQGCGVLTAAKLVGEVAGIGRFRSAAAFARWDGTAPVPVWSGDTTHVRLSRGGNRQVNAALHRIAVTQLRLPGPGRDYVARRRAAGDSWTEALRALRRRLSDEVHRRLRADEPVHMSRPAAHQAAA

SEQ ID NO: 406170 - protein, 351 aa, unidentified
MSQKTSVVAVRTIGIDTGKNTFHLIGLDKQGTIVLREKLARGRIARRLANASPCLIGIEAGMATHYVARELLALGHDVRQIPPAYAKPFRQGHKNDFRDAYAIAEAVLRPSTRCVPVKTDDQLDLQALHRVRSRLVGQRTAVINQIRSFLLERGIAIRQGPRFLRQRLPEILAKRIDVLSPRMIAIIEDLSGDWRRLDERVERVTEEIEQLAQGSESCRQLMTVPGIGPLIASAMVAAIANGAAFAKGRDFAAWLGLVPKQMSTGDRTILGHISKRGNRYLRTLFIQGARVILLRPANWARHSFGLWLTAAAKRLHHNVLATALANKLARIAWTVLAQRRNYDARVIPQAA

SEQ ID NO: 406171 - protein, 423 aa, unidentified
MDVIHDRVAGLDVHKDTVVACVRVMSGAKVERTCRTFGTTTVALGQLRDWLDGNGCTEVAMEATGVYWKPVWNILSDGRFELTLANAAHIKAVPGRKTDMNDAMWIADLVACGLIRPSYVPGERQAELRSLLRTRKQLCREQASHVQRIQKTLEEANIKLASVISDILGVNGRRLIEAMIAGVRNPHRLAGLADRRLKASPKQLYDALHGRLTDHHRFLLRLHLGQYDTLGTAIGQIDRQVDTAVATLDAEAAAGQASFRALIALLSTIPGVSTLAATTILAEIGRDMSRFLSAGHLLSWAGLCPGQNESAGKRKSARLRKGAPWLKTMLVQCAWAAKRKKDSYYQAQFYRLSARRGPQKAICAVAAAILTAIYHMLKDGTVHHDLGANHFDRRPAQVRVKHLVAHLTKLGYQVQLQPLPEAA

SEQ ID NO: 406172 - protein, 346 aa, unidentified
MKHFAALDVSLKQTSVCIVDDAGGIVREAKVATEPDDLRTFFRGTGLTFERIGLEAGPLSQWLHAGLTMAGLPAICVETRHAKAVLSGLANKTDRLDARGLAHMMRTGWYRPDHVKTVASQELRLLLTNRKLLVNKRVDIDSEIRGTLRGFGLKVGPVTPRQFEAQVRELVADRPQLLAVVEPVLRVRAVLISQYQVLHRMVLDAVRDDPVCRRLITVPGVGAVVALTYRATIDQPARFAKSKSVGASFGLTPRTYQSGETDRTGRISKAGDALTRAALYEAAHTMLMRVTKWSSLKAWAVRVASRRGRQKAIVALARRLAVVMHAMWRDGTEFRWTSRGDVAPAL

SEQ ID NO: 406173 - protein, 371 aa, unidentified
MLWTAPPPGARECHEGRGAWAPNDSEEPGHADDHDDWSRYREVGFSGSRHRDGNVVVRRQLKRRYVLTFFAKLPPCLIGIEACASSHFWSRELQALGHTVRLMPPAYVKPYVKRHKNDAADAEAICEAVTRPNMRFVPTKTPAQQSCLTLHRTRHLFIHQQTAIINSIRAHLAEFGIVAPVGRRGVEQLLKVVADANDTRLPEIARACVAALGTQLLALKAQILAFDRRIMAWHRSNETSKRLDAIPGVGPALATALVASIGDPKAFRSGRDFSAWIGLVPKQNSSGGKDKLGNISKQGDRYLRSLFTAGALAVIRYAKLHGTEHRPWLTALLARRPTKVAAIALANKIARMAWAIMTKGERYKEPAALAA

SEQ ID NO: 406174 - protein, 467 aa, unidentified
MPRTLRRQIQNTRRAKPPKGRVPQLEQMHFHAAGIDVGATEHWVAVPADRDAQPVRRFGTFTADLYALAAWLTQCGIETVAMESTGVYWITLFEVLEERGFDVQLVNPQHLKQVPGRKTDVSDCRWLQELHTYGLLRGCFRPTDEVCVLRSYLRQRDSLIATAAQAVQHMQKALEQMNVKLTEVVSDITGETGMRIIRSILAGEHDPQVLARHRDRRCKHDVETIAKALNGHWRQEHLFALAQAVAHYDFVQQQMGACDAQIEACLHTMLPSEELEEPPAPPGGRPRRHSKNAPAFNVWAYLYTLTGVDLTRIDGIDAVTALKVISEIGLDMTRWPSAKHFASWLGLCPGNKISGGKRLSSRSKPTANRVATALRLAAQSLARSHSALGAYYRRMRGRLGGPQAITATAHKLARLIYSLLRYGTEYVDAGQHAYEQQYRDRVLSNLQRKAHAFGYKLMRVEEAAAMP

SEQ ID NO: 406175 - protein, 328 aa, unidentified
MDAPAWARIFTSMSQTNKNIIYAGIDVAKRTLALDGPGGRCQLANEPSGHGGVVKLLAKSIEPVHVIVEASGGYEQGLVRALHEGQLRVSVVEPGRVRAFARAKGLRAKTDPIDAGVLRAFGEAIEPEPTLPPSQEQLRLGELVTRRSQLIDSLVAESNRSAHYRDALLRHQATAYRRLLQRQIEQCEETITELIAANPVMQQRSQRLQQVKGVGATTAAVLLADMPELGSLRDETAAALAGVAPYNDDSGPIRGIRRIRGGRASVRRALYMAALSAVRHDPVFQRFYQRLRSVGKKPLVALVAVMRKLIILLNRLLKNPALVLQHAT

SEQ ID NO: 406176 - protein, 420 aa, unidentified
MKYALGPRPGVPSAGLAAGIDWASADHAVCVVDAAGVAVCRFSVEHTAAGLRDLVQRLARAGVAEVAIERGNGPVVDALLVAGLTVVVISPRQVKNLRSRYGSAGNKDDRFDAYVLADVLRTDRARLRPLIPDTPATVALRQACRARKDLVVHRVAVGNQLRAHLLVSFPAAAGLFCKLESAISLAFLARFDCQERADWLSEKRLAGWLKAAGYSGRTNPAELYQRLTSAPRGATGGQGTISTQVTRALAAVLASLNTQIKALEASIAAQLASHADGHIFTSLPRSGTIRAARLLTEIGDCRARFPDPQALICLAGAAPSTRQSGKHKAVTFRWAVSKQLRDAVCDFADGSRHANAWATKIYNDAIARGKDHPHAVRILARAWLYVIWHCWHNGTAYDPARHRALQRLLAAQHTAADQAA

SEQ ID NO: 406177 - protein, 322 aa, unidentified
MKLYLGIDMSKSGFTAALCSEDQVFQIVHPEVRNQIDGWQTIRDWVLKQSKENPVGVHLGVESTGGYEKPLIDWFRSNTEFVVTVLNPVRVKKFAQSELSRTKNDLNDARLIARYLAIRKPEPTPVIVPEIEELKLMARHLEHLIRKQADEKTYLDSVTEAAIRSQTQDIIQTYQKQIEKVQVQIRKHIDSHPNLRNQSGLLQSIPGIGEKTSAILLCECIPALTPKQQVAHAGLAPRHNQSGKMNGKTQLCKTGNKRLRTALYLPTLCAIRCNPVISEFYQRLIARGKPKMVAVGACMRKLVHIIVGVLKNQISFNPNYAL

SEQ ID NO: 406178 - protein, 342 aa, unidentified
MQMTTIGLDIAKNVFQVHGIDASEKVVVRKQLRRGQMLAFFEALPPLLVGMEACATAHYWARELTKLGHQVRLMPAKDVKAYVKRNKNDAADAEAICEAVRRPTMRFVQVKSAEQQSQLMLHRTRDLLMRQRTQVINALRAHLGELGITAAQGKAGLTELLAIIAGSADERLPTEAHASLMVLAAELQAMRTLIASIEKRIIAHHRSDEASKRLRSIPGIGLVGATAIVATITDPKAFRSGRDLAAWIGLVPRQDSTGGKHKLGPISKQGDRYLRRILVVGAHAVLKLVRQKPQKYPWLTQLLARKPFKVVAVALANKMARIAWALLVKGGPYRARALVAAA

SEQ ID NO: 406179 - protein, 414 aa, unidentified
MALKIIYPICCGIDVHKTFVVACIASTNKGVTTYKRHRFSTFTKGLKELSQWLCENNCKDVCMESTGKYWIPVFNVLEDSCKITLAHPKYVKAIRGKKTDKKDAKWIADLFKHDLIAGSFRPPLAIRQLRDLMRYRFKLTNFMSSEKNRLQNCLTVSNIQLGHVVSDTFGKSSMNIIEKLLENPLDTSFDIEPLIHGSMKNKLPELELAIDGFITPEQAEKLKVIKQHFEDLQSRKEDLEKIILSLAKSYSEEIKLILTVPSFKNIFSAIAVVSEIGVDMDVFPTAKHLCSWAGLTPTNNESAGKKKSVRISRAGCYIKPLLVQCATAVVKSEKHPEIRNRYLKLKKRRGHKRAIIAIARMLLTAIYNILKKKEPYNPALYKKSDSVPVTREITVEQAIRFAKSQGFRVLVEPT

SEQ ID NO: 406180 - protein, 447 aa, unidentified
MSTRIIGIDLAVTAAHKAAILDPASNRFVVKQMTFRTSPAELDKLLRRARHGAGDNPEIIVVLEATSLAWHPVSLYLQQHGAKLYRVNGRMTKRMRHVRYPHARSDRLDCQVLATLYNAYPSKLDPLYIPTGEEMTLQRACREFVRYREAITAIDNRLTAYDNWAWLGLTRLVPARALDWMRSEWYDPWDVTAAGIATLRSTWLQQPASKNDDCAWLQPWLQRAEALTQLLPSREAIDYPALVSSTNRALAQRACLSEEQDVLFKTVIAPLYRRLFPDCQLSSLYGVGEQSAAIYMAFIHSIDRFPTVESFRQWTGMVPASDQSGNTQSKGLGITQAGPNIVKATLFLDAHVARRYDPQLAAIYYKQMVLYGKHYTQAICVVASHLANRIYALLKENRAYELRDLDGEPISSSDARALIEERFLVPAEVRRRTSKHVRRDPQPAPAP

SEQ ID NO: 406181 - protein, 323 aa, unidentified
MSDSINKYTMIGVDVAKLKLDIAIDDKKVLTIDNKEESFKKLLKIIPDIDQVCFVMEATGGYERKLVSFLQSKGIAVAVVNAKRVRDYANSMGAYAKNDHIDAQMIRHYAQAAFAKNRLKLRESRTEIAQQLEDLLRRRNQLVGQRAVEKQHLEATINKESVRSITRMIKQFDKEIERIEVKIKAYIDADENLKKSMEQLIQVQGIGEVTVLTLLTQLPELGKLSNKEIVALVGLAPYCKDSGKKTGRRAVFGGRMLIRSTLYMATLSAVRYNKPIREFYQRLLAHGKLKKVALVACMRKLLTILNSMAKTESEWNPDFAKTA

SEQ ID NO: 406182 - protein, 366 aa, unidentified
MGLERTSVGLDVHARSVSAAAIDGVTGELFRQRLVPDSQVVIDWVRGLPGPVAVTYEAGPTGFGLARALTAAGMRCEVAAPSKIPRPAGDRVKTDARDALLLARLLRLDEIVAVRVPTVAQESARDLVRAREDARVDLMRVRHRISKLLLRHGHVYAGGEAWTGKHEAWLRGIGFPGSQRAGTQAAYDADLEALALTLARRQRLDEQIAALAADSEFTAVTRRLGCLRGISTLTGFALAVEIGDWSRFTGAGIGAYLGLVTSETSTGQSRRQGGITKTGNSHVRRLLVEAAWQHAPAYRVGPTLQARWAQAPAAARVRGHVGNQRLHARWTQLMTRRKKHTVACVAIARELAGWCWSLAILPDTDG

SEQ ID NO: 406183 - protein, 429 aa, unidentified
MTRISVGVDVSKNRSTVCIMDQDGKVIMRPFLVWHSTEELDFLADTHKRLNGEVRVIMESTSIYQYPIALHLKEKGIFISIVNAYKVKKFANTDFRGGKTDKKDSRTIASYGISYWYKLVEWQIPKDTYFNLDLLNRTYMNAKKHRQIILQELQHYIDCAMPGMDKELHSLNLNTKKDFMLDFVEKFWHRDEIVNMTEAEFTEVFTAWAKKKGYRPGKGKAAKIYAIAKSCIPYYPANPTVKTILQCIVDKLSGVNRTLVTIVTQMIEEAKKLPEYQIVREMPGVGDPLAARFFGSAGDIRRFKNSKALVAYAGIDSPPDESGDFSSTHRHITKKGSKVFRDTGYEIMMALRAQKRTWEKVRKNPEFYDYMLKKEAEGKPRKVAKIAALNKFLRIVYARIKELYDNMALAERAKTKTRSKTRAKTKATA

SEQ ID NO: 406184 - protein, 425 aa, unidentified
MIDHLHCTSLDNLVAIDVSKDWNVVLVQESGGNRRSFKVANRRPDHDRLIAFLKGLSGRVIAALEPTGDYHRPLAYRLLAEGIEVVGISSVALARMREARYGTWDKNDPKDAQVILSMLSQQMVQLYYDPLIAGTHDIQELANTYFQITLARMRLQHSLMLHYVPLYFPEFARYWNSTRTEWFVRFLLRFPTAQSIRALDFELFSREAWDLIGRKVAKRAWLAEAYAMAGESIGLPVMLESMAIRMFRLQLTRQLDLNAQREELDHTAQQLLANNADFGRLQTLPGIGPIMALTILAEAGDLRRFTHHRQFLSYCGLDLCKTQSGQSRGRETLSKRGNKRLRMVFWMASLRAIHMRENAFRDKYERYLSNTPLDADRKRKALTAVAAKMARVVYAVIKTGSDYQRFFEQRLPSGSIPLTRAVEAN

SEQ ID NO: 406185 - protein, 423 aa, unidentified
MMKLKYSICCGLDVHKNVIVATIVTTNKDGISEYLQKSFSTINSDIQRFHNWLIENNCYHVCMESTGKYWIPIFNYLENDIDVCLTHPKYVKAIKGKKTDKKDSKWIADLYKFDLVRCSFIPPKDFRQLRELSRYRFKLVCMKSSEKNRIQNCMTISNVGIASVLSDPFGKTATEIISYLLEHTADSMDEKAVRKLIKKGAKSKSDEIIEAIKGYTIETDQAKKLELARGHLEYLDDMITQAEVELYVRIKPYYEFVEFVSTMPGMTELSSTIVLAETGVDMDIFDDAKHLCSWCGLSPANNESAGKKKSVRIAKAGDYLKPMMVQCALAAIKSKKQPYFAIKYGRIKKRRGHKKAIIAIARMMMVCIYHMVSEKKPFTPTDYEELMDPQNHVESVVLNENNVFAYLESLGYDSSKLVKRNDN

SEQ ID NO: 406186 - protein, 322 aa, unidentified
MQGKVLPERSATQVYVGIDVCKARLDVYLHPLGAKFAVSNDAHGFRRLKRSLAGHEVALVVMEATGKLHRAAHRSLVAESFAVAVVNPLRARLFAEAAGALAKTDGVDARMLAVLGESMKPSPTAPPSALMQTLRDVLRCRDAAVAARTALLNQLGEASVPVAIAEIKRQIRAVETSLAHLEAEIERLIAADPSLARRLAVLTSIPGIGTTTAVALIVGLAEIGALSDKQAAMIAGLAPIACDSGEQAGARHIRGGRPQLRRALSMAALSATRCNPDLKAVYDRLRAAGKKPKVALVAVMRKLVILANALVTQNRLWQPNHA

SEQ ID NO: 406187 - protein, 348 aa, unidentified
MNRKILYAGLDVHKKTTDVAIAPGRSNGKVRSYGKIDSTVDALNKLIKKLEDGDKQLRFVYEAGPCGYQIYRHLDANGIDCSVVAPSLIPRRSGDRIKTDRRDAVNLARLFRAGELTSIYVPTPEDEAIRDLLRCRDDMKRFERKARQRLLSFLLRHGHQYSGKKNWTKGFYNWLATVKFSHSAQQVTLQEYIDLTNECSERIKRITEQIQVHVEEWSRAPFVKAYQALRGVSHIVTTTVVSEIGDMRRFPTPKQLMAYLGLIPSEHSSGKTVRRGPITKTGNSHVRRALIEAAWTYKMQARVSTILLKRQQGFPRSVQKPESRSCHLYAGRRSDSRQVSSELILEFG

SEQ ID NO: 406188 - protein, 421 aa, unidentified
MKSTIPTILAGVDTHSTTHTLALLDEHGRVTDTETFNADPKGYERLIAMIGDPALCLGVGVEGTNSYGAALSRRLAAAGYTVHEVLRPKRSVRRSDGKSDPIDAIAAARSGLAGDGISTPKASDGWCEALRHLIAAREQLVTSMTAISNCLAGLLTTAPEGIRERYRSLPSKRRIGKLAACRPSGGIVERNVLSSLKTLASSWRELHDRADVLECRMRQILEENARPLLDVYCMGTMSAAQLAVIGGDNPERIRSEAAFAKLCGACPLPASSGKTNRHRLNRSGNRQGNRALYNVALVRMSHHQPTKDYVVRKTKEGKGKLEIMRCLKRYIAREAYRALIAIRNGEAGREPAVERGARLREVRVSLGKTQQQVGDALGVPSSRVSEIERGVRDLPELERQIIEWMDSILGQSQHSNTFDNV

SEQ ID NO: 406189 - protein, 387 aa, unidentified
MSQVDDLSRSLAAFDQNTTLTVVVELSEASWLVAGLVPAIDRQPLKKQEPDPRALLRLLERWRAEAAKTGRMIERIVLAFEAGRDGFWLARWLRARGIEVYVIHSTSVAVSREHRRAKTDRLDTGMLMRVLLGWLRGERGHCRMVAIPTLEEEDAKRPSRERESLVGERTRIINRMKSALARLGIRGFKPALRKAPQRLEALRTPEDTPIPPNMLDEVRRDMIRLAVVREQIDAIERARLVRLEQAPARGSHPMVRLLARVIGVGIETADMLVQEVLSRKLRDRRAVARYVGLTGSPDESGKRRREKGLAKAGNARVRRGLIQLAWRFLRFQKDSALAQWYRARTEGPKGVRKTTMIVALARKLLIALWRLVMTGEIPVGVVLRAAA

SEQ ID NO: 406190 - protein, 392 aa, unidentified
MYIVGIDIGKNHHEASIVSPEGKQIGRSLRFATTHKGADSLMSFIFKNIGNSPCVFGMEATGHYWYPIYSFLKAKGYTIYVINPIQSDSLRKMYIRQTKNDSIDSFLIAEVIRFGQFGTTSMADENILAMRQLCRYRDSVISSRTEIKLRIGTIMEQIFPEYEKQFSSLWVSTSMGILEKYLTPENIKNAPIDELFEIIKDKSHNRLTRAKAISIKEAAADTFGIKIAQDAFSFQLKQLIDRMNFHDKQIEALDIEIMKYYEQFDCYLHTIPGIGIIGAATILAEIGDISRFKNSSALVAFAGIDPTVRQSGEFNSTHNHMSKRGSPYLRHAIFLAATTCSFHNSPLNAYYKKKRDQGKHHLTATGAVARKLTTVIYAVLRDSKPYEPKKFC

SEQ ID NO: 406191 - protein, 376 aa, unidentified
MREKLRFLGLDVHAETIAVAVAEPDGEVRNLGTIANREDSIRKFIKKLGSPEQLRACYEAGPTGFVLYWQLTQLGVDCVVVAPTLVPKKPGDRVKTDRRDALKLARSHRSGDLTAVWVPDEDSEALRDLVRQREAAKQDQLRARHRLTKFLLRTGQRPPLGLKAWTERYMRWLEQVRFTQPAQEVTLRDCLNEVEHMSARVKRLEEAILEVVKLAPQSMQEVIRGLQALRGVAHISAVTIAAELGNISSRFQSARKLMGYSGVFPSEDSSGNRIRRGGITKTGNAHLRRIVVESAWCYRHWPRVGARLRKRQQGIPAEITEIAWKAQNRLHKRYMRLSMAGKDPRKVMTAVARELLGFIWAIAIKAEQAFQQPIAA

SEQ ID NO: 406192 - protein, 312 aa, unidentified
MAHNFIGIDVAKKHLDVHLAPAGVHVQIANDSPGWAELIDSIDAATLELIVIESTGGYEAGIVAELHAADLPVAVVNPRQVRDYARATGRLAKTDRIDAAVLAGFARNVGPRRTPVPDAITRQIKALVTRRRQLRQLHQAEANHREHVVDKTIARSIARTITMLARELARIDDDLQRLIQASPIWQAKLDLLVSVPGIAQVTAAAVLAGLPELGTLNRREVASLVGVAPINRDSGMLRGRRTISGGRTEVRTALYMPTLVAIRHNPIIKAFYERLLANGKAKMTAVVACMRKLVTLLNAILKSNHPWNPKCV

SEQ ID NO: 406193 - protein, 343 aa, unidentified
MKAYVGLDVSQKKTAICVVNEAGEKICQASVDTCPKAIRGYLVSQGHQNAKIGMETGPLAVWLYHSLKVSQLDVDCIHAQHVHAALSMQLNKTDQNDALGIARLVRSGWYRPTHVTSLGCHHQRLMMTAREKLIQIRVTITNQIRGLLKTFGVILPPGKNSVFKRSILESEPTIEAVKPVVLMLLDTWTHITAQIRTLDKILAQQAKNDPVCQLLTSIPGVGMLTAISFKTAVDDPTRFNSVSDVGAFLGLTPKKYQSGEVDRNGGISKHGSRQTRSLLYEAASCLLSRYGTETTLAKWANSLRQRMGYKKAVVALARKLSSLMLSMWKSGEFYHDNQGKLAA

SEQ ID NO: 406194 - protein, 450 aa, unidentified
MTREPQEIEDEEHEQVVERVAAVDVAKASGMVCTRVPHPSRPGRRLSRVWEVAATTGAIIGLAEQLVGQGIEKVTVESTSDYWRPFLYLLQAGGLSVQLVNARDVKNVPGRPKTDRLDAVWLAKLTERGMLRPSFVPPAEIRQLRDYTRLRVDLTHERARYWQRLEKLLEDALIKVSSVASTLDTASTRDMVEALIQGQRDPRVLAGLARGKMKAKHAALVEALTGRFDDHHAELARMLLDQIDALGAQITKLTARIQQLLGAIPAAQGVDADGTTGPGAGSGTDAAVLPAAARLDEITGIGPGAAQVVIAELGLDMGVFPTPGHLVSWAKLCPRTIQSGAKTRAGATGKGNPYLKGVLGEAAAAAAKTDTFLGERYRRLVKRRGKRKALVAVARSILVIVWHLLADPAARYHDLGAGYWADRIDKGKKARNHIRQLEALGFTVTLAPAA

SEQ ID NO: 406195 - protein, 349 aa, unidentified
MDRTTYGLDLAKNVMQLHWVDAETGEIGRKKLARAKLADYFAQLRPVRIVMEACGSAHHWARVLCGLGHQVELLPTRQVKAFVRSNKDDAADARAIWLAAQQSDIRRVPLKTCEQQAVMALHRTRQHWVSVRTATVNALRGHLYEFGVVLRGGRKAGLKALGEQRADIDAQLPAVLHGLVDGQLQTLAQVQQRIEALEHEIAALQEQLDNAPELREVPGIGLLGATALAATLGDGKAWRSGREFSASLGLVPAHSGTGGKTRMGKLSKRGDPYLRTLLIHGARSVIEHTKHKPKWLQQMLQRRPPNVVAVALANKMARTAWALVAHGREYQREWKSTPPKGCAARAAAA

SEQ ID NO: 406196 - protein, 348 aa, unidentified
MRFYTNSHAHYCGIDLHAKTMYLCILDREGQILLHQNVRSRPEAFLAAMAPYREDLVVAVECMFTWYWLADLCRREGIAFVLGHALYMKAIHGAKAKNDKVDAFKIASLLRGGNLPQAYVYPPEMRATRDLLRRRLHLVRRRGNLLAHIQNTHHQYNLPAPTAKVAYRANRAGVAEAFAEPDARKSLEVDLQLIEHYDQILRELELHLVRQAKEHDPQAFHRLRSVPGIGKILALTILYEIHQIERFPRVQDFLSYARLVKCDHTSAGKRLGTGGAKIGNVHLKWAFSEAAALFLRNNPDGQKHLQRLAGRHGKAKALSILAAKLGRAVYFMLSKERAFDRERFLARS

SEQ ID NO: 406197 - protein, 343 aa, unidentified
MQVVTTVGLDIAKSVFQVHGVDAAGQVVIRRQLKRRYVLAFFEKLPACLVGIEACASSHHWSRELKTLGHMVRLMPPAYVKPYVKRQKNDTADAEAICEAVTRANMRFVATKTPVQQSCLTLHRTRHLFIRQQTAVINVIRAHLAEFGIVAPVGRKGIETLLDVVANPTDKRVPVIARACLAALGAQLRRLKEQILEFDRMIMAWHRSNEASKRLDAIPGVGPVLATALVASIADPKAFRSGRNFSAWIGLVPKQHSSGGKDRLGNISKQGDRYLRSLFMAGALAVIRYAKIHGTTHRPWLTALLARRPTKVAAIALANKMARMVWAMMTRGERYKDPIALAA

SEQ ID NO: 406198 - protein, 482 aa, unidentified
MKKRNIYQNQSQELLSLFEEAGSSAKVMCVPMDYAKKDHLVMFCNGHGDIFRKPFSVKNSPEGIEYLIDQVTRSCRRRGIKREHVFLGGEDANSFAENFVSTLRFKGWLVAGVNAHDAKKQRVNLQASTDRIDLMGIATMLLNCRANCCPAATGIYRNLRTLVRHRRKLVVMLTEVKNRAHGIVDRLFPGFLNENKSGIVPFTQSSLYLMENRFSPKQIRRRRRQPLIEILKRFGTSKAQETAFKLQQYAAKVLHTPDEYIDTLQISLAQHVKHIRCLKESIVQLEKEIAVNLAQTQGAFLTSVRGIGIVLAAGVSAEIGDPYEQKPLNNVISYSGIIPRVKQTGGVDGKTYTGHVAKRCNRILKDYVVKSAYHLGLYGPEDLMADYKRRDASGQHADFGIGRRYLRMAMSLMRTSQVYLSPRLRKADTALEERAGHYLTSWPFLRDKWKKAGALEAAFSKDRPLGLWRQIVQKLYDIKLKL

SEQ ID NO: 406199 - protein, 408 aa, unidentified
MNTLYVGIDVSSKSNVVYLMLPNGDKHSNFSVANSHEGSTLLVKKIYSALTSHSLDTVLIGLEATSVYGDNLVYFLREDATLAPFNRKIHVLNPKQVKKFHDTYNDLPKNDYVDSFVIADCLRFGRINKEVYMGEYRYKALQNLTRARFFAVQNLVKEKQRFMNVLFKKYSTMTQEKVFSDAFSTTALAVYDEFESAEALANMDLHELTDFIIEKGKNRFPDPDAVAKAIQKAARSSYRLPKTVNDSVNQVLSISITSMKALESQIKEFDKAIKALMELLPNVLISIPGIGPVYSAGIMAEIGDINRFDNQASLAKYAGLAWKQHQSGGFEAEVTRLIPSGNRFLKYYLCEAAFSLVRCDKEYSDFYRLKYKEVNRCQHKRALALTARKFVRLVFRLLKDNRLYCPAK

SEQ ID NO: 406200 - protein, 445 aa, unidentified
MSERLTPSASEPEWAAFAAIDWADQKHVWRLVPANSPEFEQGELENTPEAVDAWAATLQQRFGGRPIAVCLEQSRGALLYMLSKYAHVVLFPVHPTTSARYRRTFSTAGASDDEGDSAWLLDLLLRHRERLRRLQPDTLETRLLQFLVEERRRTVDEKTRQSNRLTDCLKQYFPQILRWFDDVTSPLVGDLLARWGSLQELQRAHPGTLRKFFHQHNCRSEERLQERLTAIYQALPATQDAAVLEAGVLTARGWTKVLASLREQIALLEQRLAKLVSSHPDGALCASLPGAGPALTPRLIVAFGTRRERYASAQELQCYSGIAPVTEASGKSQGVHFRRAGPKFLRQTFQEFADHSIGQSEWARAYYQHLRQDEKKPHQVAVRALAYKWIRIIFRCWKDGKPYDQQVYWHSIRRRRSLLGAACPALINAGWKEEAGFQKFSANPS

SEQ ID NO: 406201 - protein, 423 aa, unidentified
MNHSTLCIGADVHLDKIVLCMVDKADGHAVMDPFHVTNNLPGAQAAATAIAEIATNLGYTRTEIGWEATGMLWIPFHRYLSCCPQLQSFALELVCFNPQLVTKFKDGLVLRRPKNDKLSALAIAARLRFGELPLSYVPGDFWQGLRRLTRYRFHLSRNLSREKMRFQSYAFLKCSDWKRIKSFSDVFGATSIALLTEFTVAEIKEMTHDQLVDLIIHRGRGHFVDPTGTARKVREALRSSYPIDPQTDEMVTATLATAWEHIRFIKRQMKRLDQHIARVIDPVPNPIITIKGLGAVITAGILAEIVDITRFAEHKHLAQYTGLTWEKRSSGNFVSQNTRLTKAGSKYLRYYLILGANTLRQFNLEYKAFYWRKHGEVAKYQHKRALVLTARKLVRLVHALLTKNVPYVRPRMLANVKEDGALQ

SEQ ID NO: 406202 - protein, 308 aa, unidentified
MIMQNYVGCDISKHWLDFFDEASGRFQRIDNQADAIEAYVAGLQPCQDFVVMEATGVHDRLLRHALAKAGVPFSRHNPAHTHHYAKSTRRRAKTDRLDARMLSDYGRRYQPEAEPAPREDVEQLQSLACHRDHLVDMRATLKKHLAEAFDEIVIADLEETIAHFDTRIKALEGRIANAIRQDQDVARDYTLMVSVPGISKVGALSLLAHLPELGQRSPKSIAALAGLAPFDNKSGKLSRRSQIQGGRSRVRRALYMAALSAIRVCDRFKAFYTDLAVRSGSKKLAIIAVARKLLVVLNAIIRDKTAFA

SEQ ID NO: 406203 - protein, 345 aa, unidentified
MKKGITIGMDLGDKKHQVCILDKSGKIIAEEKVAGTRAAVTKFFKQYRGAVVAMETGTHSRWVSQVAGAEGLDVLVGNARKLRMIWQSRQKSDARDAVMLARIARMDPALLCPIHHRGEQVQMDLEIIRARDLLVRERSRMVNHVRSVVKSMGERLAPSSAVSFGHKAKIPEALNETLKPMLEMIRELTKKIHAYDLMIKEAAASKYPETERLRQVVGVGPLTALAYVLTLEEPERFAKSRMAGAYLGLVPRLDQSGQIDKQLRITKHGDGYLRRLLIGSAHYILGPFGPDCDLRIFGLKLMQRGGKNAKKRAVVAVARKLAVLLHALWRSGQPYEPQRTQPLAA

SEQ ID NO: 406204 - protein, 326 aa, unidentified
MPLYVGLDVHKKTCHATVIDEHGKIVEQRRFVNQRDEYEYFFKHIKDAKVAMEACYCYQPVYELLEGMGIEVKLAHPNRTRAIAEEKLKTDAKDSEVLAKLLAMDWLPTAYVPPQEIRDLRELVRLRTYLVMVRTMFKNKIRAELAKRWIEIGDPWTKKGKLQLSELEIVGIDHCLPVINALDERIAELSRLIQQKAGESEDAKIIMSIPGIGYFSAMAILAEVGEIERFPNEEKLCSYAGIVPSLDQSGDKRRLSNITKQGNVLLRWVLIECVWSHLQHAKNTRLTQFFWRVARRRGEQVAAVATARKLLVAIYWMLKRREKFRP

SEQ ID NO: 406205 - protein, 469 aa, unidentified
MTRGDRRRNARRERLRGLVPRDGAVIGIDLADEKQAIAVIDHDVRVLARKTVRVKAFRLGEALDWAAGQARAKRFTSVTVACEPTGPRWLQVQRLCAERGLPVVCVQPLVSHLARRQQDYTSHKTDEADCVMIARLAAELHCCIPEALDEVWADLRHLGRRRITLITSGTASVLRVRDFLSVAWPVAAEACAQPFGSVTWLAAMQVVTSRCGGQPEELADLGVEAFTALVRSAVPGWGGKRVCGPVCRAVFAALSSTEGVVRAHRRGLLRRIAAELGDLQRARAQQRETEAAMGGCLAGLGLARLGEIPGLTAAGAAAILAETGDPNRYDTSSSLVKHAGLSPSENASGAFDGEARISRRGRPGLRLTVWRAVWPMLIHNPVMAAKYAALTQAAGQAAAEAPAGGGRAGHATSAAEAARRRRAKARVACAAALLRWIYSLVVHGTCWDPAVAAGRKDAQAAASYQPEAA

SEQ ID NO: 406206 - protein, 368 aa, unidentified
MKKINRPVTKVNTPVLGLDVHEKMTAYAHLDRVGDEADCGRIASTREAVTELVQATKGEGVVHVAFEAGGSTWWLFDLLVALLGREYVHVAHAKKVSAISNSSEKNDDNDAWWLAYLTYEGRLPECYIPTGTLRDLRMATRQRFEAVKMHTRAVVRLRALLRQMGRKLPTVKLETVSGWNYVISLCAELDTVLGQALRRCLRTVEFHREAVDDWESTIEEVAAEMPEVAVLRREIPGVGKQLAPVLVAEIWPIERFATPKALGRFTGMTPKDRSSAGNHRKGNMTREGSRHLRWALTQAAMGCLRSRSGSGLAVGNWIRTKQKRMGAKAKARVAAGRKLSESIWRLFHYGECFDMARPFGGIPDHANV

SEQ ID NO: 406207 - protein, 404 aa, unidentified
MNDIEIIFGIDVSKHSSNVAILADDSVIKEFKITNDRVGYKTLDDALNSFKSPKVIFESSGIYSRSVRAFLQRKSWIYIEINPLAAKKDMDDFRHSKNDQLDAVALATAMAQHHYQPTFREAGVYEELHDLERTYQEFNEDLVRAKNRLHQKLQLTFPEVEQFISTTDGALYWHVVQQFPHPSFVLETKLSELAQLILKATLKKMSEKRALGLAEHLKELANKSAPAVSSDACVVSSVVYLAGEIERLNDKKDETINEMSQISVSLNELPILQSIPGFGIKTAVCLLAELGDISRFHSSNAINAYVGIDLIQYQSGDYEMEQHIRKRGNSYARKILFKAVLSMVCAARYHPSNVSILYQRKKQSSSETHNKKIAIAAMGRLIRTIYHLIKNNELYDSRKCLPQH

SEQ ID NO: 406208 - protein, 369 aa, unidentified
MNEITRAPIARVGVDLAKQVIQVHAVDASGRRVVARAFKRDQFLAWCAQLPAGCLVAMEACSSAHYWSRKLRALGLDARLIAAHFVTPYRMEGKNGKNDATDAAAICEAASRPCMRFVPVKTCEQQGVMSLHRVREGLKEERTACINQIRGVLTEFGLVFGKSPKVLRAVLADVIEDASNELSTMARLVMQRAFEHWRELDEHLRWCDRQVGQHVRASPQAKRAVKVFGIGELGASALTAGVGDFKQFKSGHQFGAWLGLAPKQDSSGGKTRLGRITKRGDDYLRTLLIQGAKAAVMSADKRDDPTSRWLAQLTARAGWQKACVAMANKNARILWAVMTREEGFDPNHVSVKPRNPVAVAPSDPAACAA

SEQ ID NO: 406209 - protein, 389 aa, unidentified
MEVQTVNAPSFAASHDEAVRCVLAIELSKKSWMVAVNTPLSDKVSRHTLEACDWKGLLELIARIRTRVIQALNRPVEVVSCYEAGYDGFWLHRLLEAHGVRNYVVDPASVQVDRRARRVKTDRVDVGRLLRSLLAYLRGEPKVWSVVRVPSVAEEDDRRLHRERDRLINERVQHVNRIKGLCAIHGIYDYEPLRSNRLARLEELRAADSRELPPRIKAEIVRELRRLELVLNMIKTIEAERDSLVLAGETSTHANAKKIQDLTRLKSIGLQIGTTLVGEVFYRQFDNRRQLGSYVGLTPSHFQSGASSRDQGISKAGNPKARTVMVELAWLWLRHQPSSPLSIWFRERVGSAKGHVRRIAIVAMARKLLIALWRYLETGVAPTATVLKS

SEQ ID NO: 406210 - protein, 323 aa, unidentified
MSENMTERFVGIDVAKATLDVHVDPAAAAQVPAHLAYDDEGVQALCTALAELEPTLIVMEATGGLETRLACELTACGLSVAVVNPRQARDFARATGELSKTDRIDARMLCAFARAVRPQARPLKDAATRELAEILGRRRQLVDMRAQEATRLAGTASKSMRKSLTQHIAWLDKRIAESDADLAARLRKSTVWAAKDDLLQSTPGVGKVLSLTMLALCPELGRLNRRQSAKLIGVAPLANDSGKYKGRRRIWGGRADVRSVLYMGAISAMRHNPAVRELATRLKAAGKPPKVVITACMRKLLTIMNAILKNNTPWNPDHHAQTA

SEQ ID NO: 406211 - protein, 347 aa, unidentified
MHSENIAAYIGLDVHKETLAVAIAAPERLGEVRYYGTINNEAQAVRRLFQKLQGLYGNILSCYEAGPCGFGLYHQHTAMNIKCQVIAPSRIPKSPTDRIKNDHRDAISLARLLRAGELTPVWIPDLTHEAMRDLIRARAAAKRDSRVARQRILSMLLRTDKRYAGKHWTGKHRTWLANQSFSQPSQQIAFQHYCQSLEQIEDRILQLDQEISRLLPEWSLCNLVCQLQALKGVGQLIAITLVAELGDFSRFSNPKQLMAFLGLVPGEYSSGNSIRPRGITKVGNSELRRLLYEAAWSYRTPAKVGAWLIYYRPDSVPQLPLGLGLRHFAVSMLRRYSRASANVPKRF

SEQ ID NO: 406212 - protein, 453 aa, unidentified
MAKKAKKLHTKKGVELKIVNPNAAGIDIADTEMQVCVPVDRDGDNNRRFGSFTHDLNEICEWLVDCGIDTAAMEATGIYWIPLFFKLKESGIDVILVNAHEVKNISEKKSDEADAEWLMLLHTYGLLKASYQPENEARQVRNLARHRGNILKSAGKEVQHMQKAMEQMNIKLSNVLSDIVGKSGRAIIDAILKGERRPEVLAQLADGRCKRSKEDIALSLEGTWDEDHLFELKQAYDLYKYLQTQMTECDHKIEELLMSYAAVVDTDMSGLVKCNKTICKKNAVDFDVEKYGYAIWGINPMTIPGMSAGSVLQLIGELGHNFVDKFDTPEKFCKWCNIVPNNRISGGKLISSRVPKRKNPVGQVFRLCANALKDAKNPMGFYFRRIRSRGGHMQAIVATAHKIARIFYVMVKNKCTYDETKVGPDEQELLRKKIERTQRALDKLNARLSAAIC

SEQ ID NO: 406213 - protein, 420 aa, unidentified
MRNAGIHANSLLEVRRMYNAVGIDVSKSKSTVAVLQPGGTVIRKPFDISHTSQNLNELADYLSSLDGTTKIVMECTGRYHEPMIKALSEAGLFISIVNPHLIKNFGNNSLRKVKSDPADARKIARYTLDNWTELRQYSGMDNTRTQLKTLNSQFSFFMKQKVAAKANLIALLDNTYPGVNKLFDSPTREDGSEKWVDYAYSFWHADCVRKIGLKAFTERYMSFCKKHHYIFQQDKPEKLFNASKELVAVFPKEKTYKLLIQQSIQQLNLASEHVERLRREMNELASTLPEYSTVMGIYGVGKTYGPQLIAEIGDVSRFTHREALTAFAGVDPGVDESGQHKSKSNRASKVGSARLRKTLFQIMTTLLQNAPEADPVYRFLDKKRSQGKPYYVYMTAGANKFLRIYYGKVKECLRNLEQTE

SEQ ID NO: 406214 - protein, 350 aa, unidentified
MLIIGCDYHPGFEQIAVVDTDSGEFQEQRLPHREEAEKFYRELAAQGRKVRVGMEASGHARWFERLLAELNFELWVGDAAKIRAKRVRKKKTDREDARHILKLLLKDDFPQIWVPSWDNRDLRQLLWHRHRMVQMRTRIMNQLQAVALNEGLRCKKRLWREKGRQQLESIRLAPWATRRRRDLLELLDRLNPTITELTQLIEQEAEKYPAAQRLMTHPGVGALTALAFVLIIGEAERFECGKQIAAYLGLVPEEDSSGESRRLGHISKQGSGLMRFFLVEAAQVTVRSDAEWRNKFFHLAMRRGRKIAKVAMGRRLAVRLYWMWRKQWDYEQLKKIGPHAGQPGTGVGVK

SEQ ID NO: 406215 - protein, 349 aa, unidentified
MKLIACDYHPSFQQIAMLDQNTGELSGGRLAHPAEAEAFYRGLQGPVRVGMEAIGNALWFERLLAELGHELWVGDAARIRAAAVRRQKTDARDAAHLLQLLLQDRFPRIWVPSPAERDLRQLLRHRHKLVQMRTQVKNQLQHLALNEGVRRQHRLWSRAGRQVLEQLALPPWTARRRQDLLRLWKELEQSVAELDAAVEAAAQARPEARLLMTQPGVGPVVALAVVLTLGPAERFRRGKQVASYFGLIPREHSSGGRQRLGAISKQGSPFVRALLVQAAHVAVQHDSELRRQYLRLALRKNRAVATVAMARKLAVRLYGILRQAQATPDTGSMQASPSHSVAEAPRPNA

SEQ ID NO: 406216 - protein, 348 aa, unidentified
MRFYTKQHNYYCGIDLHARSMYICIVDEQGKTVFHRNRKASAEALLKAIEPFREDIVVAVECMFVWYWLADLCAKEKIPFVLGHALYMKAIHGGKSKNDKIDSKKIATLLRGGNIPMAYVYPRKMRSTRDLLRRRNHLMRKRSELLAHIQNTNSQYNLPEFGKKLAYKANREGVAEHFPDPSVSKSIEVDLQLLDFYDQLLNDLELYIVKKAKVDDAYSWYRLRSIPGVGKILGLILLYEIHDIKRFPRVQDFVSYCRLVKCPRESAGKKFGTKNSKIGNAHLKWAFSEAACLFLRGNEQAQHYHARLVSKYGKGKALSILAHKIGRAAYFMLKRKEPFSMKVFFNET

SEQ ID NO: 406217 - protein, 352 aa, unidentified
MCAAYDGSQVVGLDLHRQRTVMVRMTPAGEQLEQVRFMNSRAELTAQIAKAGSAPAVVLEATYGWYWAVDTLIESGAEVHLAHPLGVKGFAYRRVKNDVRDAADLADLLRMGRLPEAWIAPPEVRDLRELVRHRHKLRNVCSGFKAQVHAVLAKNGVDIGCSDIFGVRGRQRLAALQESGRLPVVFTDRIGSQLRIIDVLEAEILAADRAIAQRLRGLPGYEAIQRIGGVGPVFAAVFVAEIGDVTRFPTPGHLAAWCGLTPRHRESDTSVHRGRITKQGSKIVRWAAVEAVQRAPAGTPPRVLMDRIVDRRGKKAKNCARVAAGRALLELVYYGLRDGRIRRLDSPQRIAA

SEQ ID NO: 406218 - protein, 358 aa, unidentified
MVQRKELNFEGQNIYIGIDVHLKTWHVSILTESGCLKKHSQQSSAQALFEHLKKHYPNGNYLSAYEAGFSGFSTYYSLLDFGIECLPVHAADIPTGQYESVMKTDAIDSTKIARALKSGLLRGIYIPKKEVLDDRNVMRLRITLKRQLSGYKSRVKHLLYNNGVIYPECFQNSKSHWSKRYLKWVHEDVQLLSESRNSLDLLLRQVELFRKSLLEITRLVRTLSRNGRYGEAYENIVSIPGIGMITGMCLLTEIGDIHRFRNERQFASYLGLVPTSHSSGEKTSHGEMTFRGNKRLGSLLVESALVAIRQDRALAAAYREYCKRMLPQEAIIRITRKLSNRILIILKSGKKYEHDRCY

SEQ ID NO: 406219 - protein, 408 aa, unidentified
MELKPMHRRVIALDVHQAKITACAVVEHDDGRVEVTKRDFGAFRRDRRALAEWALQIGPEVVVMESTGVYWKSPFAALEAVGIIAWVVNARHVKAVPGRKTDMADAQWLATLARAGLLRASFIPPARMRELRLVARQRQKLVGMCSAEKNRLHKVLVDAGIRINVLVNDIHGQSARAMVKALLQDRPLHEVLDLKGRLRASRVELFEALSTEQLSATHRFVANEILQHIEQIEQRIALMDQYLLQGLQPWQAQLKLLQTIPGIDEQGAAMLLVEIGADMDAFGSAERLASWVGICPGNNESAGKRKSGRIRRGNAWVRRLLCEFAQAAARTRCAFKDKFQALAIRKGHKKSIVALAHKILRTVYAMLANGAHYQDRAVDYEALNVQRNAPRWIKMLRKHGFIATPAAA

SEQ ID NO: 406220 - protein, 344 aa, unidentified
MNQIIRIGMDTSKHFFQLHGVDAAERPVLRRKLRRNQVLAFFAKLAPTVIGMEACGAAHYWARELRKLGHEVKLMAPRHVKAYVKRNKNDGRDAEGLCEAMSRPTMQFVPVKTEEQQAALMLAGVRQQLIARRTQLSNTIRGYAAEFGVTAAKGLDKIEPLLARIAQDETVPAQARELLAIQGQDYAQLQIELKAIEVKLMAWHRANACSRRLTQIPGVGPIGATALVMKTPDPRAFPSGRHFAAWLGLTPKDHSTAGKTRLGKITRAGDEVLRSLLVAGATAVIQQVRNGRGRPSAWLLALLKRKPPKLAAVALANKIARIAWKLMTTGESYDGALGAQAFAA

SEQ ID NO: 406221 - protein, 439 aa, unidentified
MISQPRWFAGIDWASQKHQVCLLDAAGKILGERQFAHSGTGLAELCDWLVATSHGQPADIDVAIEVSHGPIVETLLERGFAVHALNPKQLDRFRDRFTVAGAKDDRRDAYVAADALRTDPQCFRKLALAEPLVVELRAWSRLTNELQHERTRLTNRMRDELWRYYPQALQLTDDFATDWFLALWQLVPTPDKARRLRESSLARLLKNHHVRRIDAATALRLLRQAPLVVAPGTTEAACAHIRSLVGRLALVNRQLRQAQVKLDALSSQLADTGDDAPGQSNEPRDAAILLSLPGVGRIVLATLLAEASEPLKARDYHALRALSGVAPVTRRSGKHTLVVRRLACQHRLRDAVHHWARTATQFDPTIRQRYDALRQRGHSHNRALRTVGDRLLAVACAMLRSATLYDPKHQRQSGEGLNPPSPLRTRAVIGSPACTATPL

SEQ ID NO: 406222 - protein, 408 aa, unidentified
MKFFVGDDWAEAHHDVEVMDPAGRVLAKARLPEGVAGMARLHALLAGQFGDADPDEVEVVIGIETDRGPWVAALVAAGYQVFAVNPLQASQYRKRHTVSGAKSDAADAHMLADMVRTDSHQLRPVAGDSAEAEAIKVVTRIHKTMIWERTRTTQRLRHALREYFPAALEAFEDLDAADTLELLAKAPDPASAARLTTAQISAALKRARRRTISDKTARIQAALRAEHLGQPAVVTAAYAASTRSLVAVLVVLNEQVKTLQGQVEDHFGRHPAAEIVLSQPGLGPIFGARVLAEFGDDPDRYASAKARKNYAATSPITIASGKKKVALARYVHNDRLIDALMGQAFASLNASPGARAYYDKQRARGAEHNPALRQLANRLVGILHGCLKTGTPYDEATAWAHRAETLAA

SEQ ID NO: 406223 - protein, 390 aa, unidentified
MEVRLENTASATTNNDPAHCFVAIELSKSSWVLGFQTPLAKQTSRYQVKACDAKALLELIERVRSRMAREPGRPVEVMSCYEAGYDGFWLHRVLEAHGIHNHVLDPASLQVNRRARRPKTDRIDADRMVRALIRHLRGEPEACSVIRVPSPEQEDARRLHRERDRLIAERVAHVNRVKGLCATQGIYDYEPLRSDRLKRLEKLRTGDGRALAPRLKAEIVREIKRLEVVLEMISTVEAERDAILTEKKSTHLNADKIKMLAKLKAIGAEFSTTLVGEVFYREFANRRQLGSYVGLASSPFCSGSLDRDQGISKAGNPKARVMMIELAWTWLRYQPESALSRWFRERVGNLKGRPRRIAIVAMARKLLVALWRYLQTGVVPTGAELKAQSN

SEQ ID NO: 406224 - protein, 356 aa, unidentified
MSHDVKYIGMDVHQEAIVIAVLNGSGKLVMETIVKTKASSILQFLHGLRGELHVTWEEGTWAAWLYDLLQPQVQEVVVCNPRRNALLKEGSKSDKVDARKLAELLRTGMLRPVYHGENGLRTLRELGRSYQTIGKDLTRVMNRLKALYRGWGIACAGTQVYAPRYREEWLRKIAQAGVRRRAELLYQQLDGLQALRRNLRPEFLAESRKHKAAKLLRQISCIGPIRAARLIALMQTPHRFRSKRQLWTYSGLGIETHDSAQYRYVGGQVQRSKKPQQIRGLNQNHNHEMKEIFKSTATRASCGTGPFHDFYAALLAKGMKPEMARLTLARKIAAITLTLWKKEERFDAEQLKTQAA

SEQ ID NO: 406225 - protein, 388 aa, unidentified
MKKNSKNETMKSKRETKKVAELEAGWTRLDEREANTLVIGIDLGDRTSAYCVRTLGQQIVKEATVATTATAMLEAFQGLRRQRVVIETGTHSRWVAQLLELMGHEVIVANARKLKLISENNQKSDKVDARLLSELGCMNVEWLHPVYQRSQAAHSDLLLARARQALVDARTALINHVRGSVKSFGSRVEKCASERFVEVARGALPEALKPALSGVLATLEELNEQIYGYDCQIEHLCHTKYREAAKCLLQVNGVGPVTTLTFVLTIENKDRFEQSRDVGPYLGLIPKKRQSGQRDPQLGISKEGDEMLRKLLVNCAHHILGAKGQDSDLRRWGLELVRAVERKGKKGARKLAAAAVARKLAVLLHRLWVTGAAYEPLRNRGAQQAPAA

SEQ ID NO: 406226 - protein, 316 aa, unidentified
MYLGIDVSKLTIDCCLISDGQNHEKRFSNNPKGFQLLTDWLKFHQMTSELHCCCEATGTYYEPLAHYLHQHYTVTVENPRRIKGYAIAELQRSKTDKQDARLIAQYCQDRKHKLKAWIPPSQEQKQLQELARYLDHLKQQRATETTKLHEAPDYIAPHIKTTIENLSSQIRAIKKQLLQFYKSHPDYNTQRKRLKTITGIGEQSAAVLLSAYKRHPFSNQKQFTAYLGLDPRKNQSGSSVNGKSRISKIGNADIRKSLYMPAVVAYRCNVFSNFVNRLKAKGKPIKLILIAIMRKLAVIAFNLLQNGQDFESERYK

SEQ ID NO: 406227 - protein, 343 aa, unidentified
MQTITTIGFDIAKSVFQVHCVDAAGQVVIRRQLKRRYVPAFFQKLPPCLIGIEACASSHHWSRELQALGHTVRLMPPAYVKPYVKRHKNDATDAEAICEAVTRANMRFVATKTAEQQSCLVLHRTRHLFIRQQTAVINAIRAHLAEFGIVAPVGRHGVEELLNVVADPNDKRVPEIARVCLSALGAQLRKIKEQILGFDRMITAWHRSSETSRRLDDCPGVGPALATALVASVADPKAFRSGRNFSAWIGLVPKQHSSGGKDRFGSISKQGDRYLRGLFVAGALAVIRYAKIHGTKHRPWLAALLARRPTKVAAIALANKIARMAWAMMAKGERYKEPVALAA

SEQ ID NO: 406228 - protein, 339 aa, unidentified
MRLYTGFDLHSTNSYVGIIDEDGKKVWKKKLRNDPGLILAALKKFKSDIAGVVVESTYNWYWVVDLLIEEGYQVHLANPSRIQQYSGLKHADDEHDAFWLAEMLRLKILPEGYIYPKEQRPLRDLLRKRGHFVKLRTSLITSLQNILARNIGKKMNTNHLKALTKDWVAPLLAGNDDLSLAGKVSKDAIDTFSRQINVIESVVEKKLALRKPYEFLMSMPGVGRVLALTIMMETGPIDRFPKVGNYVSYCRKVPAARYSNEKKKGAGNRKNGNKYLSWAYAEAAEFARRFDPKARSYYDRKSRRTNAPIAYNALANKLSRAAYYIMRDGVLFMPEKMFT

SEQ ID NO: 406229 - protein, 348 aa, unidentified
MYYVGVDLHKETSWFYIVDAQSKKYDSKNIQNKPEILKKYFEQIPKPFTLAVEATYNWYFFVDLAEQYAQKVFLANSYELKAFAKRHKKTDKIDARLIAHILQKGFLPVVAIADQETRQVRELLRYRLNLVTDRSRNIFRLKALLDKLGLNSQLDFTTYKGLKSVVIEKLPGIYTRLIKNYIERITGLAQKLTGIEKEIGTVSNLDHDMVNLMSIPGVGHFSAALIKSEIIDIARFASFNRLCAYAGLAPRVSASANKTFHGPLNINRRKNLQWILLENVYHFILAVPEMKERYGILKQRKGHNTAKVVLARDMLKIIYHVLKERRPFYSDKKEFQIQSVAAPALCGV

SEQ ID NO: 406230 - protein, 314 aa, unidentified
MTDISEQMRFVGIDVAKKHLDVHLLPDGKSWRVDYTPAGLARLLEQLEKMAPTLIAMEASGGYERACADCLAGAGLTVAVINPRLVRRFAGSLGKLAKTDQIDAAMIARYAAFAKPANHHTPDPAQAMLMALTMRRRQLVSMIVMEKQRTDPGHVHPAILPDIKRHLRMLEKEQLKLEARINALIASHPVWARVTAALQDVKGVGPQTATALITHLPEIGTLNRRQAAALAGLAPINRDSGTHRGRRFVQGGRQQLKTALYLAALSAARYHPTLKPFYLSLRNAGKAPKSALIAVARKLLVILNAVARETIMAA

SEQ ID NO: 406231 - protein, 348 aa, unidentified
MEQEQFVGFDVSQAETSVCVVDESGKVVWQGKCASTPEAMAATVKRRAPQVARIALETGPMSAWHYRSLISLGLPMVCVDARHAKAALAMQLNKTDANDAVGLAQIVRTGWYREVAVKSEHSHRTRGLLAARATLVGMRKEVANQLRGLLKVFGHVIGAAGGEKFDARARELTAGDTTLTITAEALLAARAALAAQVARLDKLLLAQARQDPVCQRLMTVPGVGAITATAFVATIDDPARFKHSASVGAYLGLTPRRYQSGTMDVSGRISKAGDALLRCYLFEAATTLLSRVQKTSALKEWGVRLAKRIGHKKARVAIARKLAVILHRMWADKAEFRAVPAVAAAATA

SEQ ID NO: 406232 - protein, 398 aa, unidentified
MWVGIDVGKGFHHACAVDETGQVVFSRKVVNGQAAIEQLIARTRAKAAEVVWAVDMTSGAAGLLLALLLGTGAPVVYVPGRLVNRMAGAFAGEGKTDAKDAKTIAETARLRGDLTPVTSPDEIAADLKILTARREDLMADWVRGVNRLRELLASIFPALERAFDYSARSPLILLTGYRTPATIREAGAPGLTAHLRDNGAWPKSTSSIVDKALAAAGEQSLALPTEATTAPLITRLARQLLDLEREIKDLDKHITERFGQHPAAGPITSVDGFGPILGAQLLADTGGDLQASFGNSGRLAAYAGLAPVPRDSGRVRGNLHRPTRYHRGLRRVFYLAALSAIKVKNGPSRTFYQKKRDEGKIHTQALIALARRLVDLIWALIRDGREFHHSPPPTAQTA

SEQ ID NO: 406233 - protein, 351 aa, unidentified
MLQKTDAVVASTIGIDTGKNTLHLIGLDDQGTIVLREKLSRSRIVSRLANVPRCLIGIEAGMATHYVARELIALGHDVRQVPPAYARPFRQAHKNDFRDAYAIAEAVQRPSTRCVPVKTDDQLDLQALHRVRSRLVGQRTAVINQIRGFLLERGIAIRQGLRFLRQQLPEILAKRIDVLSPRMIRIIEDLSGDWRHLDERIEHVTEEIEVLALGSESCRQLMTVPGIGPLIASAMVAAIANGAAFAKGRDFAAWLGLVPKQMSTGDRTILGRISKRGNRYLRMLFMQGARVILLRPANWAKHSFGPWLTAAAKRLHHNVLATALANKLARIAWTILAQRRNYEARVIADVA

SEQ ID NO: 406234 - protein, 318 aa, unidentified
MSQELFVGIDVSKATLDVAVLPSDESWSLPNTEPGIGELVARLRQLPPPTLVLMEATGGLEHQALATLAAAGFRAMAVNPRNVRDFAKSLGRLAKTDAIDARVLALFADRIRPEWRPLPDEETQALEALLVRRRQVVEMITAEKNRLGATSSSRIKKDISEHIEWLQRQLRITDRKLDQSIKDSSVWKEKVDLLKSVPGVGRVMVATVLSQLPELGTLDRKQIAALVGVAPFNRDSGTLRGRRSVWGGRASVRGVLYMSTLTATRFNPTIRAFYERLRAAGKLPKVALVACMRKLLTILNAMLSRRTPWNHLSPEVSA

SEQ ID NO: 406235 - protein, 364 aa, unidentified
MDNLTHMGLDVHKDTIAVAVLRPGTITCDERVIPNTPEAIRKLLSRHADPSLLRTCYEAGPTGYDTHRVITSLGIACDVIAPSLIPKRSGVRVKTDRADARNLARLHRAGELVAVRVPTPAEEAVLDLVSAREEIKADRRIARQRIRSFLLRYGKRYPKPTDRWSFRFEVWLRALRFEEPLSQATFEHLLGAYFVRDSQLAAIDRQIEELAVLDPLAEPVARLRAFRGIDTLSAVTIASETCDFRRFGTAASYMAFTGLVPSEHSSGASTRHGGITKTGNQHIRRVLVEAAWAYRYAPAVRGQLKKRLEGQPPEVAAYSWAAQCRLSGTYRKLAAKKGANKAVVAVTRELSGFVWGAMTGNMGT

SEQ ID NO: 406236 - protein, 322 aa, unidentified
MSVSVLGIDIAKQKFDAALLVDGKVKHKAFKNTAEGFETMRLWLEKQGIQKVHACLEATGNYGEDLAIYLHDAGHIVSIVNPARIKGFAQSELLRTKTDKLDAALIARFCLAMKPGPWSPPSPEIRSLRALVRRVDSLVDMRSQEKNRISTAHETVSLLIKEHIAYLDQEIEKIRQQIAKLIEQNPDLKRNKDLLNSIPGIGKITIPAILAELEGLEKFNHVRELVAFIGLAPKETLSGSSIKGKPRLCKIGHARLRKALYMPALVSIQCNPVMIAFYNRLKDKGKNGKVIVCAIMRKLVHVIFGVLKSGKKYDPNFKPISA

SEQ ID NO: 406237 - protein, 415 aa, unidentified
MVVCRANNTSCRTEKDVAQPTLWAGIDAGKAAHHCVAINTGGQRVLSERVINDEGALLDLIRAVKELADGGSVQWAIDLNSGGAALLITLLLDDDQDLLYIPGRTVHHASGAYRGDGKSDAKDAAIIADQARMRRDLLPFRHRDKTAVDLRILCARRTDLASDRNRAINRLRAQLLEYFPALERAFDYAHRKAALILLTGYQTPDGLRRMGAPRLERWLRDRQAYNAGDLAARAIEAANLQRTTVIGQHVAAAVVARLAQTILDLNTELADVDTMIEETFQQHRLAAIIVSMPGFGSLLGAELLAATNGDLASFNTADRLAGISGLAPVPRDSGRISGNLKRPRRYDRRLLRVFYLAANNSIKTSPESRDYYDRKRSQGKRHSQAILCLARRRLNVLWAMQRDQTSYQPGMPRAA

SEQ ID NO: 406238 - protein, 421 aa, unidentified
MSDDRCRLGSDDVVIGLDLASAEHQAVVVTAAGKRLTRFRMPHTRAGLEELLRRTTPAALGRPGGARVFAFEATGHLWEAVAYVLRARGEPYVVVNPLATFRVREARQLSREKTDLTDAEQIAELCRTGLVTRTQLEARPYLALRRAWGEYARLREERARLKVLVAHQLYGLFPEFLRVWADLLQPGALAVLRTGLTHAAMAALPLTEFVAQARAHGAGHRLWRDTLAQVHRAAAQTMACPDGLDVLAREVQRAVARIDMLTAHMTAVAAEIDSMLAELEEVPSLRPIPGLGWTSVAGLLAPVGAITKYHHGRQLIKLAGTNPSRRDSGQTVGHGQRMSHRGRAGLREVLYLATISCLQHNPRIRAHYDRLIQRADRPLPKMQALGACMNKLLLYAFAVMHRREAFQLDHDWPRTTMARVA

SEQ ID NO: 406239 - protein, 297 aa, unidentified
MSQSRTLFIGMDVHKDTIAVAYVAQDHGAEGTSLGTIGTRQCDIEQLIRKMPSQATHLIFGYEAGPCGSWLSRYLRKKDDDCWGVAPSRIPKKAGARVKTDRSDARQLAHLARSGDRTVVYVPQVQDEAMRDRTRARAAAISALQDAQCRLKAFVLRHDSRSTGRANWGPAHLRWLSEVVCPTPTPHIVLQAYGRAVQEHTERLQRLEHALHEHVQAWRVSPVVEALQALRGVPCTVAVTLRAAMGALTRCDTPRELRQFLGLPPSEYSAGAQRRQGAIPTAGNTHARRVLVEGAWA

SEQ ID NO: 406240 - protein, 335 aa, unidentified
MKTFKTFVGIDISKLTVDVSVFHQHTTDQIHHFKAPNHLSGIKQLLKTLKQQKINLNETLFCCENTGIYTVPLITILGAASLHFWVVSAIEIKRSQGIARGKNDQTDSKRIAFYAFTHLHKYEPSSLPQTEILQLKLLFTEREKVLKAIALFERTKENEGFIDNSIFKLVKKINDRQIKQLRKTLRELEAKMQGLIESDVTLQTQFQLLKSIPGIGPQTALYLIITTKSFQGFKTWRQMACYAGVAPFEYSSGTSIRGKTKVNSLADKKMKSMLQMCVLTAIKIDPEIKKYYQNKKQQGKASMLVMNNIRCKLLSRAFAVINRGTPFVSQQTIAA

SEQ ID NO: 406241 - protein, 366 aa, unidentified
MKLKVTKQNPNNQSPSIDLDGEPVYIGIDVHKDQWKVTIRVGGMEMSTFSMNPSVEELVSHLQKNYPGGEYYSAYEVGFCGFSIHRQLEARGVENVVVNASDIPSLQKERMTKTDTVDSRKICRELERGTLSSIYIPTTGQEALRQLCRWRRKISIEEGRMKVRIKSFLNFIGFKLPSKFDGRRWSGKFISYLRELRFAEELNTVMLQSQLNVLESLRREEVLVLRRIREEVRNDEEKQRVMNLLLTVPGVGIATGLAIYSEIMDMKRFSSLDRLKSFVGLSPAVYSSGDKMKVLGLSWRYNKYLRNMLIESAWVAVHKDPALLSRYLELSHRMSRTNAIIRIAKKLLNRIMHVWNTGLPYERKVA

SEQ ID NO: 406242 - protein, 349 aa, unidentified
MGKQIDTSQATVFCGIDVSAATLAVAVIEQDQPLQQRAFANRASGHKALIAWLGKRKSMLRVSLEATGIYSLDLALALDRAPDIAVAVLNPKMVHGFAQTLRRSKTDAADAMVLAEYSRRMPFTGWRSPRLSALGLRAVGRHIAALVVEHTRQQNRLHAAQGSTATPRCVVQDLRRSLIALERRIVKMRREALALVHSDAEVEQRFKLLTGIPGIAATSAVQILGELALLAPEMKVRQWVAHSGLDPVHQDSGTSVHRPTRISRAGNRHLRRALYMPALAAVRWDPHLRAFYELLQARHKTKLQALIAVARKLLHAIHGIFRTGQPYDGQKLFPALLPSENQNPLPVLL

SEQ ID NO: 406243 - protein, 311 aa, unidentified
MEHSHFVGIDVSKNHLDVHVRPTGDSFRVPYDDAGLVTLVEHVRPLAPAVLVLEATGGYEVPVAATLASAALPVAVVNPRQIRDFARATGQLAKTDTLDARIIALFAEAVRPAARPVPDEQAAALGERIARRRQLVDMLGAEHNRRRLLRDRRLQRHLDAHIAWLEEALRRLDQDLTTLIRSTPVWRETDDLLRSVPGIGPVTACTLIADLPELGRLDRRRIAALAGLAPIARDSGAFRGRRMIMGGRPHIRRVLYMATLTAIKHNPAIRAFHQRLVAAGRPGKVALTAAMRKLLTILNAMLRDRRPWQPA

SEQ ID NO: 406244 - protein, 409 aa, unidentified
MDLLHPRCAGLDVHKDTVVACLRRVVEGRVKRELRTFGTTTRELLELSDWLASQGCRHVAMEATGVYWKPVWHILSDGDVELVLANARHVKNVPGRKSDVSDAAWQSDLLAHGLIRASFVPDGATQELRGLLGTRKQLVQERTRHIQRLQKTLEDANIKLDSTISDLLGRSGRAMIEALIAGETDPDKLAALADGRIKASQARLREALRGRVTKQHCFLLRLHLRQIDGLSEGIADIDREVETRIEPFRKAVELLSSIPGVSTLSAQVIIAEIGLDMSRFPTVGHLLSWAGLCPKSDESAGKRRSTRMRKGAPWLKTNLIQCAWAAKNAKRTYLQAQFYRVRARRGDKKAAGAVAASILTAAYHMLQRGVFYQDLGPEHFERSKAAQAKRLVKRLKNLGYAAALTPIAA

SEQ ID NO: 406245 - protein, 403 aa, unidentified
MRVPAAADKAWAGIDVGKRHHWVCVVDRDGRQLLSARVANDEAGIAAVIGSVTGLAAEITWAVDIIGAPSALLLAVLSQSGQHVRYASGRLVAAMSGAYTGEGKTDPKDAFVIAETARIRRNLPVTGHKGELVCNLSLLTAHRADLIADRVRMINRLRDVLTSVFPALEREFDYSSCKGALVLLTGYACPARIRRTGQARLASWLRQRRVRGYASVAARAITAAQAQRITLPGQDIAADIIAELARNLLALDERVTELDTQIAALFAEHPQAEIIQSMPGFGPVLGATLLVTAGDLAAFPSPGHLAAAAGLVPVPNDSGRRSGNLHKPRRYSRPLRRVFYLSAQTSMMREGPSRDYYLKKRQHARPHNQAVIALARRRIDVLWALLRDNRTYAATPPAPAKAA

SEQ ID NO: 406246 - protein, 370 aa, unidentified
MEKTITFVGLDVHKKGISVAVAEGGVRGTARFVGEISNTPSALSKLAEKLARKGRLLRFCYEAGPCGYGVWRQLTGLGQDCVVVAPSLIPRKPGERVKTDRRDCLSLAALDRAGALTSVWVPDADHEAMRDLVRARAAAVRALRRARQQLTGFLLRHGHVRHGKNWTLAHRRWLSEIRFDHPAGQIVLQDYIHVVEDAETRRDRLTGQIEELLRDWSMAPVIEALQAMRGIALVVAVTLVAEAGDLTRFDNPRQLMAYLGLVPSEHSSGQSVRRGGITKAGNGEARRVMVEAAWTYRMKARISRARLGRMEGLAKPVRDIAWKAEVRLCARYRRLSAAGKPANVVTTAIAREMLGFAWAIAQHVKPRSAA

SEQ ID NO: 406247 - protein, 341 aa, unidentified
MGVKRYHVGVDLHRNNFTYCVRYPNGEEKVEKEEIRNLGNFARRLGKHASVAVEATGNTWMFCRVLKKHVGRLVIVNPNQFKVISRSVKKTDKNDAKTLAEFLEKDMLPEVRMKDELQAKVASLTQTREKLVQLRTVLKNKINNLFASQFIQLKREELSSEKGLLKVLTYHFDAISDVELRVMVDQIRSLNKSIAELEKAIEESGSKMDGFENLKSIKGIGSKGAATLLSVIGNVEDFSSGKRLAAYIGIVPRVSDSNDTSHHGRITKLGSKIARTTLVQCALIAKRYNSYLFHFHEGIKMRRGGAKANIALARKFLEIIYRTLKNHWIFEDFTRFKIAKT

SEQ ID NO: 406248 - protein, 360 aa, unidentified
MAKVRSFVALDVHAQATAAAVIDSESGELRRQRLSGRAGELTEFVAGLPGPVRATYEAGPTGFALARRLQDAGVDCLVCAPGMIPRAPSDRVKTDQRDAERLVRLLMAGELRPVAVPSLEAEGLRDLVRAREDLRGDLMSARHRVGKLLLRHDVRFDGPERNWTQPHLAWLSKVRFEQPGAQAAFDDYRGAVDALLLRRSGLEREIAEQLPSSPWAQTARRLMCLRGIDTLTAAGLCAEVGEFGRFKHPEQLMSYLGVVPSEHSSGTRRRQGSITKSGSQHARRLLVEAAWHYRQPPRVSEPLRRRQAGAEPAIIALSWKTQRRLHRVWTRMEQRGKRRTIIAVAAARELAGFCWAVATE

SEQ ID NO: 406249 - protein, 345 aa, unidentified
MYRTRVGVDLAKEVIQVCTYTSKKVQSNIEMTPNEFLCWLINSKPATIIFEACGTSNYWKQKAIEAGHDARLISAKLVAVVRQNQKTDKNDALAIIQAALLPDVTFIGGKTVAQQQLQTIKRLRELAVKHQGAAQKQLVSLLLELNIRISNRKGGIISAIDGVLEDATNDLSAECRKAIYTAKLHLKGLIEAVHQYDACLEKSASTHPECKKLLKLEGVGTMNAINLYLALGCFDLGVFNKGKDASACIGLTPIQHSSGGIVKLGSIGKHCKNSILRSQLICGAMAAVNQATMRDPKTKKDAWLRGLVERRGKKCAAVALANKTVRTAFAMLTQGTEYKAELLAA

SEQ ID NO: 406250 - protein, 391 aa, unidentified
MNQSKGQRIIGLDMHPDVFAAAALSGGGATPHRVEWVQDRQETAGLEAWAKRHLRADDVVVLEASGNSFEIAARLHAGGHTALVLESAQAGKIRDNFCNDDRHSAVKLARIYLSGLAKVVWQPDAKTREYREVFFAHRNAVKDATRGRNRIHSFLNEHCVRLKRGVRLTEPSGAATALAAKAWTPLQAELLAQKFTQLREVEARRKQLEKIMARELATNARWASLWRLMGIRHRVAFALMAMVGDIHRFPTAKKLVGYFGLAPRKDQSGKDAKGRDLGLGGFGRGDVRGLLLQSAHNALTQRDSPLHKWGWKLLLKKHRNEAAAAVARKLTVSVWHLLMGHFTPLLEAGEHLRTKLLKLATVIGKTGLKELGFADRDAFVSAQIKSLQLLT

SEQ ID NO: 406251 - protein, 371 aa, unidentified
MKADKKRSRKGCDMNSIVAGIDLGDKESLATVLSPVGDVTDRFSFPMNEEGYAFFSSRVPKDARVAFESTIMAYPIMRALKMHGYGDVTVAHPKTLAWIVRSKKKNDKVDSLKIAKLHMAGMLPESHLLDRDEQIARDLLVQRVKLGVEIGRLKSSVIGYLKREGLHDVLPKTKDNFSAARRQAIDSLRFHDERDLVLKTMMDRLRFLEDQCIPLESCIRENAKENADAKLLMSVPGVDYYLASLLSSFIGDVNRFPSDDHLASFFGIVPTSRDSADIKRRGRMTKDGSSIARWTLSIMVDTVMHYNKPIRGHYLSVKKRTGSGKLAHVSTMRKLTRMLYHMLKTKQHWKWENPHLTERKMTRLQGGGDES

SEQ ID NO: 406252 - protein, 346 aa, unidentified
MKIIGCDFHPSFQQIAMLDLATGEWTRKKLPHASGEAEQFYRSLQGEAVRVGIEATGSTRWFERLLEELGQELVMGDAARIRSLVTRKQKTDARDAEHLLELLERDQFPAIWVPSAGERDLRELVLHRHKLVEMRTRIKNQLQHVALNEGLQKKRQLWTERGRRWLEDLALPPWTERRREDLLHFLDELDARIAELDQAVGEAARQNARVRLLMTHPGVGPVTALAFVLVVGEVTRFPRSKKLASYLGLIPSEDSSGSRRRLGAISKQGNSLLRTLLVEAGQSAARYDPELRRAYQRLCHKKQHTGIGKVMVARKLTVRLYWMLKTQQPYRPARMQSSPSHSVSAA

SEQ ID NO: 406253 - protein, 339 aa, unidentified
MELYVGMDLHSNNTYIGILNKDNQEKVFHKRLPNELPRIVYELEPFRVNIKAITVESTFNWYWLVDGLMDSGYEVCLANPAANHQYNGLKHSDDKSDAFWLAQMLSLGILRKGYIYPREERPIRDLFRKRTFFVHQRTSNILSLQGMINRCTGNRINSYAIKTLTEEKIYKLFKDEGMRLIAMSGTNTIKTLEHEIKTIENAVLEKAKIRKEFENLLTVPGIGKVLALTIMYEVGDISRFKKVGNFSSYSRCISGKWTSNDKVKSKGNSKNGNKYLAWAFVEAANKAKRYNKKLNSFYQRKESSHNNFVATKALAHKLARASYYIMKDQVPFNEEMLVS

SEQ ID NO: 406254 - protein, 326 aa, unidentified
MAIIGIDVSKAKLDCLWLRDSVSLKVKSRVFPNTPAGYQALLAWMEKHTGEAAGELHCVMEATGIYHEGLAYALHEAGAWVSVVNPAQMRDYAKSLGTRTKTDKKDALVIARFGATQQPRQWQPEPPEIRQLKALIARLEAVKQDTQRELNRLEKAQVTQASAEVLTSIETVHQQLDTERVRLETLINEHIDQHPGLKQDRALLESIPGVGPVISQHMVALLRSRSFDAASQCAAFLGLVPVQHESGSSVRGRSRLSKTGNAQLRAKLYMAAIVAKRHNPDIKIQYERLLRHGKPRMSALCAAMRKLVHICFGVLKHQTPYLPQVT

SEQ ID NO: 406255 - protein, 318 aa, unidentified
MLIHYIDIAKRNFVIAVSSLSKTKTETNNPKGIAHTIEYLKKHKVALVVTESTGGLEIPAAKAIRRAGIAVIIANPRQTHQFAQSQPLTKTDAKDAKMPAFFAQMTAQKEDSQTMPYQPPTEAEEVLEALVNRRNQPADMRTAEKNRLHQVHETQVGSVKQLIAHFDRLIDELDKQIDDHTHTHFDGKDQVAEQIKGIGSITTATLMAMLPELGRLSHKRIAGLAGIAPHPREGGETKFKSRCFGGRSAVRKALYMATVAATRFEPLIRDFHQRPLSEGKPYKVAVTACMRKLLTISNARMRDYFAENDTAENGIRTA

SEQ ID NO: 406256 - protein, 373 aa, unidentified
MPRYSTAFGMDVHLRSTTVCALDAETGEAVARRFRGNPWGEVAEWMSGFPGPSLAAYESGYLGFAPQRELSALGVDCVVAAVSKVPRSAADLSSKNDRNDAARMAKAILSHDVTPVWVPSPEIEGLRDLAAAHDAATARLAAAKQRLLAFLARRGYVYGGTTPAGNPRKYWTYGFLRWLDGIRPADDGGIRALAALRNEVEAADETREAVLAEYRAAVAAAPLSAEVEALQSIKGCGFVLAAAFASEVGDFSRFRSGRQVTAYFGLAPKQRSSADSVRLGGISGAGNALVRRLAVEGSWRYAQAGHQPKLMPKGSGVPLEIRMHGRKGSERLLRRREEMLERGMPQAKANAATAAELVRWLWALGMMCREAGE

SEQ ID NO: 406257 - protein, 383 aa, unidentified
MEKFTFGIDVSSKTSTVAIALGERILDNYTIKNNLTGFTKLYEDISSVRYCDVIFEATGVYSRRLEAFLVSKKVGFTKLNPYASKNQLNNELRKFKTDKTDAEGLAISQARLQRKPTPQEDEVYLELRDWSRYYAQVNRDLIAHKNRLHRILQLTFPEIESFLSATDGVFYWNVVKHFPTPIDVLKSDINDIPRILLESTNKNMSINRAQMLTDKLINFAKESYSCDRFGVQKYQVIKLAENLIDLNNEKNNIINKMAELAKDLPELQILQSIPGIGLRTALLIIAEIGDFKRFSSSNQINAFVGIDLPRVESGDKRNLDSISKQGTSIGRKVLYQAVKCMVSASKFNPNHIADYYQTKKVACSSTKKATIASIIDLLGQCTI

SEQ ID NO: 406258 - protein, 345 aa, unidentified
MKYVGVDLHKQVISVCVVMHQDGHRKIVQRQRLACQDVAGITAFFQSLGPFEVVVEATSSYEWFFELLEPWAMRLVLAHPRKLRVIAESTRKTDKIDAHVLAEFLALDMIPQAHRPSPRVRQHRALVRQRHFLQRRITAAKCKVRHVLARYNADIQSLFTREGRTYLTQQPLSGADRFVVEQLLATLDHHTQLLAAITRQLREFARSAPIAEREAREVLAKIPGVGAVTADIVLAELGDLRRFKNQRQVAAYAGLVPRVRESAGRVKGGGITKEGSGLLRWALVQTAWRFVTKTRRWALAYERLKRRAGAKRAIVAIARRILCMMFGLLRRGEKYSLAREALAEI

SEQ ID NO: 406259 - protein, 354 aa, unidentified
MSQTLNAAIAVIGIDIGKNSFHIVGHDERGAIVLRQKWSRGQVEARFANLPPCLIGMEACVGAHHLSRKLNSLGHDARLMPAKYVRPYSKGQKNDFRDAEAIAEAVQRPTMKFVATKTADQLDLQALHRVRERLISQRTGIINQIRAFLLERGIAVRQGQRFLRAELPRILATPPDVLSPRMVRVIEDLAGDWHHLDERIEGLSEEIVGLARADASCERLMSVPGIGPIISSAMVAAIGAGDAFSKGRDFAAWLGLVPKQKSTGDRTILGKISKRGNRYLRVLFVQAAWVVLIKPKIWERHGLKPWIEAAKKRLHHNVLAIALANKLARIAWSVLARGRAFEVRKIDAAANQSA

SEQ ID NO: 406260 - protein, 320 aa, unidentified
MESKRVVGVDIGKRWVDVAREGTARVGRHRNEAVDIAVLVATFDASRDLVVFERCGGYERHFEAALGAAGIPWAVVHSAAVKAFRQVQGIKAKTDAIDARLLRDFGRDRLDAGKLRLGRTEDVVLDALVARHRQLKAALHAEQCRRETAAIAAAQASIERMIAHLQAELVTVGVELSLHESSDPQIVFKEAVMCQRKGVAQATARALLAELPELGRVECKQITALGGLAPRIHQSGRTHPRRGLVPGRASVKAILFNPARSAMRWDPEIRTFCNHLRARGKPGKVIMVAVMRKLLVRLNAAVRDALNQPEVLSPATRMAV

SEQ ID NO: 406261 - protein, 338 aa, unidentified
MKTYVGIDYHKRFSYGTIMTEAGQIVKQSRFDNHPAAVAAFLADRCNHNSSAVLEAGYNSLVMHDWLDELVGSVILADPLKVKAIAEARIKTDKIDSTTLAHLLRCDLIPSAHVSSPAARIGKKLLRHRMFLVRLSTMVKNRIHSLMDGFPLVRDARSMKDIFSKKGVCWLKQIELPKYARRILDSEVSLLEYVGSQMKCVDSWVSGFGRKDQRVKNVMTIPGIGKFFSLLTVSEIDDVHRFRSASKLYAYSGLVPSTYSSGGRTYHGRITKQGNKYLRYAMIEAVWPALSKCPDLEEVYNRVYRRRGSNSAKVAAARRLLTIVYRVLKENREYRYRD

SEQ ID NO: 406262 - protein, 370 aa, unidentified
MENRSMFVGLDVHKETIDVSIAEGHRNGEVRHYGVIASDLEPLDKVVRALRAPNRRLQFVYEAGPCGFGIYRHLTKRGEACVVVSPSMVPKRSGDRVKTDRRDSVTLARLHRAGELRAIYVPDDADEAMRDLVRAREDAVVVGTQAKYRLKAFLLRQGRRYPGREGWTLPYRRWLTDLSFPTAPQHITLQEYRDTIDETERRIARLTEQLRQLAPTWRWAPVVAALQALRGVSFITAVALVAELGDLTRFGHPRELMAYLGLVPSEYSSGPSARRGAITKAGNPHVRRLLAEAAWAYQGIPRIGRQHAYRQEALPKVVCDIAWKAQLRLTTRFRRLIARGKAKPKVATAIARELTGFIWAIAQEVSPASQ

SEQ ID NO: 406263 - protein, 366 aa, unidentified
MKKISTVAIEGMQIFKENQLTIGLDLGDRTSYYCILDEAGQVIWEQELPTTPKGFEQVFGKIPRSRVAMETGTHSPWISRQLTQLGHEVIVAHARNVRLIGESSRKDDRLDARTLARLARIDPALLGPVRHRSAKAQIHLTVIRARAALVSTRTALVNAARGLTKSYGARLPKCGTEQMTREIAKELQPELREALNPLLAEIESLNERIAEYDTRIEQIAREKYPEVARLKQVKGVGPLIALTYVLTLEDPYRFRRSRDVGCFVGLRPGRRNSGMSEPQLHISKEGDRYLRTLLVQGAHWVLGPFGQDSDLRRWGLKLAERGGKNAKKRAVVAVARKLAVLLHKLWVSKEVYEPLRNNRKGMAQVA

SEQ ID NO: 406264 - protein, 344 aa, unidentified
MHIVSVGIDLGKTTFHLVALGVAGKVLVRKRFTQKQLLAYTANMQTSLIGLEACSGAHFLGRALQKQGHDVRLIPAQFVKPFVKSNKNDFVDAEAIAEAVERKNMRFVPIKTDDQLDLQAIHRVRDRLICRRTAVINQLRAFLLERGLVFAKTPAKLRAALPSVLENADLDLTPQMRNLIDLLWNEWKTVEGQIAGLSLELERISAADPGCTRIRQIPGIGPIVATAIVAAIGNGAAFRKGRDFAAWLGVVPRQYSTGGKARLLGISKRGNVYLRKILIHGARAAVLRIKRDRAPIGAWLDALDARAPKNVVVVAMANKLARIAWAVLSSGEDYRPNSDMVTAS

SEQ ID NO: 406265 - protein, 448 aa, unidentified
MVVRDPALGVPSINPKGGDTMKKRMKFDHLSTLCVGLDIGSRSNFITALNFDSDRLINMRPVFNAANGVETMEAMILAVLEGSPQFRYLLVAMESTSFYGVHVANYLSTSDLLKPYGVKVFCLNPKTVANYKKTFTGLGKNDGIDSFIVADYVRAGLIEIEPWRGSQYLALQRLTRQRRHISEAIAREKNYVLNNIFLKFSEFALLSGEDSPVSNKFSTTAEAVLTEFKTTEDIANAPLDELIDFISTSGHGRFSDPGQVASLLQKAARNSYRLDKALYEPITTSIACSFNCIRAFEKEQKALDKAIAATVAGLNPTEYQILKSIPGIGPVYAAGILAEIGSVRCFNSNNALAKYSGIIWRDNQSGEFDSEDTPMMKAGNRYLRYYLIQAAGSVIRYCPEYEDYYNKKFAEVPRHQHKRALALTARKLIRLIFGLLDKNQLYSPAKGR

SEQ ID NO: 406266 - protein, 332 aa, unidentified
MNMHLQGGVAKGDRRPNAGVDVSKQHLDVCCNGQTHRVANDAQGWDELTARLRREQVDLIVLEATGGYERGLLCALQSAQLCVARVNPRQARDFAKSMGVLAKTDRIDARVLCDFADVLARHAGRERYVAPMLEQARQTLAELMTRRRQLVDMRVAEHNRLEHAGPKAQRSIRSVIKLLDRQLESIDRQIDDHMDEHFKQQRQLLDSVKGVGPVTILTLTAMLPELGQLGRRQIAKLVGVAPLADDSGTRQGKRMTWGGRAEVRSVVYMAAIVAMRHNPVIRVFYERLVAAGKPKKVAIVACMRKLLTILNAMLRDQATWNAARHLSLAIGA

SEQ ID NO: 406267 - protein, 408 aa, unidentified
MNPLFVGIDVSSKNNVAYLMKPDGSKHSSFSVQNNLGGAKLLSERIVSALGSMQLERVVIGLEATSIYGDSLVYALREDGRLGRFQRKIHVLNPKQVRKFKEAYSDLPKNDWVDAFVIADHLRFGRIAKEVYMDDYRYQALRTLTRARFDVIQNLTREKQRFANYLFLKCSGMAQDKDIQNTSATTIALMEHFETVDDLANADLEELTAFITETGRGKFADPDATAKAVRAAAKGSYRLPKTVNDTVNQAMAVSIASMRALKGQVKVLDKAIEQQFEIIPNTLTSIPGIGKVYSAGIIAEIGDIHRFASQASVAKYAGLVWNRSQSGDFEAEHSRMIKSGNRYLRYYLLEAANSVRRCDSEFRRYYDLKFKEVNKYQHKRALALTARKLVRLVFRLLKDNRLYIPPEG

SEQ ID NO: 406268 - protein, 307 aa, unidentified
MLPQKSKVCGIDVHKKFFVAAILSNSGEVWIERFDHTQSGLLVLKRWILGHGCEQVAVESTGVYGYSVYSTLEDQIEVIAANSYRIKNIPGRKTDIIDAQWIAELALNGLIKPSRIFPKEDRALRNLTRVRESLVHSRTRLKNRIHRVLESASIKLSSVIADIFGKSGQYILQQILQGTPIDTIIRGIPSQKVKDKGDALKDAIQHHLGDDHVLIIEQSLEQISVINRQILDIDTEIQIKLEGRMTDLMIAMSVPGIGSIGAATILAEIGNYRDFDSADKLAAWAGLTPAIYQSADTPTIRSKTFSS

SEQ ID NO: 406269 - protein, 403 aa, unidentified
MNAVGIDVSKGKSMVAVMRPLGELVVKPFEVHHTANELKDLSDLLRGLDGEVRIIMEFTGRYYQPIARYLVEAGFFVGVVHAKLIHDFGNNSIRKVKTDRADAIKIANYGLSNWISLKRYTPEDETRLLLKTCNRQYNQYMKLKVSLKNNLIAILDQTFSGLNEMFTSPVRADGHEKWVDFAEKFWHCEIVSSMNRAKFTTQYSKWCQKHGYNRSDSKASALYELALNQVATLPPTTQTKALIVQAISQLNFVSVSLAELRRQMQQLAASLPEYPVVLAMSGVGETLGPQLIAEIGDVRRFSHKGALVAFAGVDAPPFQSGVFESASRSISKRGSPALRKALFQVMKSILKNSPSDDAVYQFLDRKRAEGKHYYVYMVAGCNKFLRIYYARVKEYLITLENIS

SEQ ID NO: 406270 - protein, 346 aa, unidentified
MEYIAMDVHKKYTWARVENEKGDKLYECKLSHSHGTIENFVKRWSAGSPTAVETVGNWYWVVDEIEAGGGQPQLVNARLAKLMMGCVNKSDKLDAKGMNRLQRAGTLPTVWIPPSSVRDARELPRTRMVLSRQRTQLKNRVHATLGKYGYTVEGASDAFGQKGRRIVAQLMAKLPPHTEQALGGVLDQLDHVCENLKWIEGKMIEVFAPCPQTTWLKSLPGVGDILAVVIWTEIGTIERFGRAEQLASYCGLVARENSSGGKIRFGAVRRDVNVYLKWAFVEAANSALLNAERCGYDHISRLYQRIKPRRGHGKAKVAVARHLSEASFWMLKKGESYREPMSSTQR

SEQ ID NO: 406271 - protein, 356 aa, unidentified
MSRDIKYIGMDVHQEAIVIAVLNGSGKLVMETILETKASSILQFIHGLRGELHVTWEEGTWAAWLYDLLQPQVQQVLVCNPRRNALLKEGSKSDKVDARKLAELLRTGMLRAVYHGGNGLRTLRELGRSYQTISKDLTRVMNRLKALYRGWGIPCAGTQVYAPRYREEWLSKIAQVGVRRRAELLYQQLDGLQALRRTLRPEFLAESRKHKAAKLLRQIPCIGPIRAARLIALMQTPHRFRSKRQLWTYSGLGIETRDSAQYRFVRGQLQRSKKPQQLRGLNQNHNHEMKEIFKSAATRASCGTGPLRDFYTALLAKGMKPEMARLTLARKIAAITLTLWKKGGRFDAEQLKTQAA

SEQ ID NO: 406272 - protein, 554 aa, unidentified
MELILIPVVVEFLSLFDFNSVFCEERESASMGGAPSSAGGVVVEGEQAARRYECRSQASDAYRQSFERRAELCFLTNPQMSSGPISYDSTIRPSPKQSLPVCESSIVEVNAMESIACSTDYTAYVALDWADKKHAWALQEAGQKRMETGWLDNTPEAVEVWAMELARRFGERSIALAVEQPRGAVVAKLSKYAHLVIHPVPPSMLAHYRQTFCPSGAKSDPGDSRLLLELLTQHRDQLRTLRPDTPETRRLQLLSEARRKIVDDRTAGKNQLTNWLKQVFPQVLDWFDDIGMPLALGFLRRWPTLQSLGHKRKETLRRFFKQRNCRSRERIEQRLEAIATAVPATNDEMLLEAAIVVIRHLVVLVEQHNKTIADLDDRIAKAYRAHPDYPIAHSMPGIGPALGPRLIAAVGTDRDRFANATELQCYTGIAPVITRSGNQKWVHWRWACSKFLRQGFQEWAQHSIGFCGWAKEYYTRQKAKGKAHHAIVRALAFKWIRIYFRCWKDHQPYDDERYLAAITTPRPKPPDKPEGQSGSLAVQWETHAGFSKVNAISC

SEQ ID NO: 406273 - protein, 348 aa, unidentified
MSEYAGKQFVGMDLHRRRSVMVRMTEAGEVLETVQILNDVDRLNWVIDRAGVDPEVVLEATYGWYWAVDALQAAGARVHLAHPLGVKAFEYRRVKNDVRDATDLADLLRMGRLPEGWIAPPATRELRELVRHRAKLVGLRAHGKAEVHAVLAKCGIQVLMSDLFGVAGTALADRLALPAPYAARIASLRRLMDDVDFEIDLFENLARGRLRTDPGYTAVQQIPGIGAILGAVFVAEVGDVHRFGNAAQLACWAGLTPKHHESDTHVRRGPITKQGSRLVRWAAVESVKRVGAHTRTGALRDRVAARRGANIGAVAAARLQVEYVFYALRDGHVRALEHPATHQHRESA

SEQ ID NO: 406274 - protein, 376 aa, unidentified
MQAAQVKGYEVNTSLYMAMELSNSKWKLGFGNGTKIRRKSIDARDRQRCLEEVALAKVKLKLPADAAVVCCFEAGRDGHWIYRWLESEGFEVMEIDSSSIETARGRKHVKTDRIDVEKLLDLLIRFHCFGLRKAFRVVRVPSVAAEAGQRLHREDEYLIRQRTRVSNRIKGLLIAQGVDTVSLRGNFTSYLERVRLWNGEGLSAELKTELTRMHAQYVVFNDQLKALAKSYAEELAADTPLAEMRRCLETLKSMGPKTSRILSAEVFGWRSFANTKQVGAFAGLTPTPSQSGDSDTEQGISKAGNRRVRRVMIEFAWLWLRWQPDSALSQWFNRRFAHGGKRQRRIGIVALARKLLIALWRYVEHGVIPEGALLKG

SEQ ID NO: 406275 - protein, 344 aa, unidentified
MNYYAALDVSLRSVHLCVVDDEGELITETKLSSEVTDIIAYLDTLDLEISIVGLEAGTLAQYLTYGLQFAGYEVACMEARQVKAALSAMRNKTDKNDARGIAQLLRTGWYSRVHVKSMESHRVRALLSSRKAVLSKCIDLENEIRGLFKVFGIKLPPKLGHGSFDVAVRGIIETDTTLSHSLLPLLDARLVLYHCFRELDNRTRHMAHADSICQRLMSAPGVGFITALTYKAGVDDPYRFKHSRTVAAHFGLTPRRFQSGEIDIDGHISRCGDQDVRCTLYTAANALLTRSATRSPLKAGGMKLAKTRGHRRAVIAVARKLAVILHRMWLDDVPFHWSTEATRS

SEQ ID NO: 406276 - protein, 396 aa, unidentified
MLQENEGTISTQDQPTGSDIFVSVEMSRSKWVVGIHTPLADKIGLHTMACGDVDALLALIDRTRAKLIASGSNSPAALVCYEAGYEGFWLYRHLVALGIRVVVINPASLLVDRRAKRAKTDRIDARAMVRALMAWARGERQVLSEVRVPTVEQDDARRGLRERQRLVKERTGHGNRIKGLLKTQGIMDFDPRAADAAARLDAIVTGDGRPLAPCLKREIVRELERLALVMRQIDQVETERDAVVQACDAGAGTDALAAEPEREAAMIGELNRLKGIGMNDATILVREAFWRDFRNQREVGGWSGLAPSPWASGSVLRDQGITKAGPPMLRAHMIQMSWRWLLWQPDSDLAQWFRKRTEGATGRMRRIMVVALARKLLIALWRYATTGMVPHGAIVT

SEQ ID NO: 406277 - protein, 343 aa, unidentified
MGEVSTIGLDIAKSVFQVHGVDVDGAVVIRKRISRAKVLEFFATLTPCLVGIEACPTAHYWSRKLQALGHTVRLMPPSYVKAYLKRSKNDANDAAAICEAVTRPSMRFVPTKSEQQQSALMLHRSRQLLVRQRTMLSNAIRGHMAELGVISAKGRNGTVELLKIIAKDEDDRISGVARLSLTVLARQYAAITIEIGTIEKQIHALHRSCEESRRLAEIPGVGPIVATALIAEVGDWTVFSSGRSLAAWIGLVPRQHSTGGKDRLGRISKQGNRHLRWLLVAGAMAVIRYARQHGTKRLWLVRLMGRRPVKVAAVALANKIARMAWAMMVRGERFNEPKLLSAA

SEQ ID NO: 406278 - protein, 339 aa, unidentified
MPVTIGLDIAKRFFQLHAIDTDSGQIERLKLRRAEVVPFFANRRPCLVAMEACGSSHHWARELRSLGHEVRLIATKFVRPFVKNNKTDAADAQAICEAAQRPEMRFVPVKNEHQQAILCLHSMREGLVKARTAQVHQIRAAFYEFGIELPDGRHWCVKSLPAAFTRLEGKIPGTVVDALQMQLELIRDLTLRVDEIERKLEAYKQSDERCQRLLKVPGVGLLTATAIVAGVGNANQFRSGREFAAWLGLVPRQSGTGGRVRLLGISKRGSSYLRALVIHCARAVVARQKKHSIWLEQLLARRHWNVAVVAQANKIARTIWAVLAHGVSYEQNHRAVQTA

SEQ ID NO: 406279 - protein, 340 aa, unidentified
MRLIGCDLHASQQSIAMLDRDTGAVIEKTLKHEGEAVREFYASIPPPVVVGIEATGSMGWFLRLMEELAIECRVGHPTAIRKAETRRQKHDRRDAALLLQLLAEDRFPAIWIPSTEYRDLRSLLLHRHQWVRMRTRVQNALHAIVLAHGVRRGHTLWNRDGQALLASLPLPPHTADRRSELQALYQHLQAHIDRLDDRVEHVANERARATLLMTHPGVRPVTALATEVFVGDPARFLDGKALASYVGMIPREYSSGKRQRLGALSKQGNPFLRFLWCEAAAHAVRRDPDLQRFYRRKVVQKGFAKARVAAARKRGIRLWIMLRDQIDYAEFCRRGLARQS

SEQ ID NO: 406280 - protein, 349 aa, unidentified
MNEQKKRDKVTIGLDLGERRHRFCVLGREGEIVEEGSLLNERVALSALISRYPAALVVMEAGCHSPWISRYLEEGGWEAIVSNPRKVRAIYQHERKSDRRDALMLARIARMEPALLYPVKHGSQEAQQDLLRIKLRDSLVRARVGVINSIRSTIKSLGYSVPRCSSERFHKVIKAALPVELSEVIAPSVQVLEELSLRIRVLEREISALARTKYPATARLEQIAGVGPITALYFVLKIEDPRRFAKVRDVGAFLGLCPRRNQSGENDPQLRITKRGDPYLRRLLVSAAQYILGPFAPASALRQYGLTLAAEGIARAKKRAVVAVARKLAVLLLSLWKNERSYVPFPQFS

SEQ ID NO: 406281 - protein, 403 aa, unidentified
MAATRTAGVDWASEAHEVCISDEGKVAERFSAPHDERGIARLAARLTRAGIARVAIERPDGILVERLLAAGLEVLAIHPNQVKAARARFAVAHGKSDRFDAYVLAELARTDAHRFRALVPDTEETKALKALTRAREDLVAVRVELANQLRAQLQAFWPGALIFAEVDSPISLAFLARYPSPADAKGLGAGRMAGFLTRNAYSGRTEPAELVARIKAAPEGTAGEAECQARRTVVLGLLAALEPIVEEIAELTSQIRECLAAHPDAEIFRPLFRDPKTTICPATLIAELGDARGRYPTEAAMAADAGMSPVALESGKLRVATFRRACDKRLRVAVATLADSTRHWHPWAKEVYRKARARGQDHPHAIRTLGRAWIRVLWRCWRDRVPYDPARHGNFGRLQTAGG

SEQ ID NO: 406282 - protein, 348 aa, unidentified
MRFYTGRHRYYCGIDLHARTMYLCILDHDSGDVLLHRNLRCDPELFLEAVAPYRDGLVVATECIFCWYWLADLCVREGIAFVLGHALYMKAIHGGKAKNDKIDSHKIAVLLRGGAFPPAYVYPRRMRATRDLLRRRLFFVRKRGELFTHVRNTFHQYNLPAPSGQLLYKKNRVGLALAFAHEPSVRASIEADLALADPYDDVIRRIERVVQAEADVHDPDAFELLRTVPGIGKILGLTLLYEIQEIGRFPSVQDFSSYCRLVKSVHTSAGKRTGSGGAKIGNVHLKWAFSEAAVLFLKDNPRAQAHLKRLRKKHGHGKGLAILAARIGRSVYFMLKNREVFDMNRFFA

SEQ ID NO: 406283 - protein, 417 aa, unidentified
MKIVRNICCGADVHKDIIVATIATTNQDGITEYLQESFSSQNYDLYRLKSWLKENNCLEIAMESTGKYWIPIFNVLEDEINTRIVHPKYTKAIKGKKTDKKDSKWIADLFKHDLLRFSFIPPKEIRELRELSRYRIKLIGMRSSERLRYQNAMTVSNIGLASILTDPFGKSAKAIMKEVLSSNTLDEDKIKSLLSKSAKKKTVEVLKSLEGCHIETDQRIKMNTASKHMDELDKHIEQIETEMAKRCIPYTPIIECLIQIPGISYISAMIIIAEIGVDMTVFDSDKQLRCWAGLAPANNESAGKKKSVRISKAGSYIKPLLVQCALSAIKSNSEPYYRVKYERIKKRRGHKKAIVAIARMILVAAYHIILTGETFNPSDIEDIHKPKTSKNNQITVDLALAFLQQSGYDTSTISLIS

SEQ ID NO: 406284 - protein, 343 aa, unidentified
MEISTIGLDLAKSTFQVHAVAASGEIVVRKALRRGQVLSFFAKLPPCLIGMEACGTSHHWGRELAKLGHEVKLMPPAYVKPYVKRGKTDAADAEAICEAVMRPSMRFVPVKSAEQQAALALHRTRDLLVKQRTQLVNMVRGLLAEFGIEMARGLHHALRLAARLSAGDAPEVPTLAQRVVKSLADQIGALQVQLAALEKELLAWHRSNELSQRLATIPGVGVISASALAASVVEPERFRSGRQFAASLGLTPLQNCSGGKERMGRISRMGDRYLRRLLVIGMTSLIRRARARPDSVDPRIAAMLERKPARVVTVAAANRTARVAWAIMTRGGTYQAPARAAAA

SEQ ID NO: 406285 - protein, 362 aa, unidentified
MKADNNTTSFFEKVLLFIGIDVHKAKWVVTLRTYDLELKTFSMMPSAEELEKFLLKNYPGADYRIVYECCFSGFWIYDYFSKKGYKIIVTPTNRIYKDGSTIKTDKIDSRKLALQLSRELLREVLVPAKRIREYKYIFRIYDKQKMRQGQILRQIKAILEQKNHPLKWARWNKGLLEKLKVIKFDDKLFDLKFGNLLKEYEYLVSQIKDSEKIIEQIKESASGGDELGKRINILEKINGIGIISSVRMCLYLFDKKDRFESSEKLNHYLGLTPSERSSGDKIVRGRSGMCGNRQLRSIIIQLAWMTVRKDGSLLEKFDKVYKASGSKQKAIVAVARKLMTKIFAAIQKEEDYRINVRTVSAA

SEQ ID NO: 406286 - protein, 359 aa, unidentified
MQTQSNKIDFKGQNIYVGFDVHLKDWKVTIMTEKLTHKTFTQPPKPEVLYHYLTKTFPGGTYHSAYEAGFSGYWIHNKLIGFGIHSMVVNPADIPTTGKETIMKDDTRDSIKIARSLRNGDLNPIYVPSLTTLEDRGLVRTRATLVKDLTRYKNRIKSFLYFHGIEFPEIFSKPSTHWSNRFNKWLEDVTLSEPSGKASLNVLLMQSINLRASVLQTTKQIKQLAKTDRYKTQHELLRSIPGIGLLTAMIILTEIETIDRFGTFDQLCGFIGLVPSTHSSGDHEVIGNITPRGHSVLRASIIESAWMAARLDPALNKSYHDYCKKMEPNKAIIRIARKLTSRIRFVLKNNQPYVCSIVK

SEQ ID NO: 406287 - protein, 418 aa, unidentified
MREERLSQYTAYIGLDWADTKHDVCVQSAESGEREFSVVNHNPKALDEWVKELRKRFGGMIAIAVELSKGPIVSVLQRYDFIVIFPINPSTLAKYREAFQPSRAKDDPTDAELALDLLVRHPHRFKPLQPQSAKIRTLATLVEHRRQQVSDKIRVTNRLRATLKQYYPQILEWFYHIDTPLFCAFFKRWPTLIQAKRARATTLRKFFHEQHMYRETVLERRIAAIKDSLPLTEDEAIIVPFQLNAEVLVAQLDLALEAVDRFDKEIEMAASKHPDYELFKSFPGAGSSLAPRLLVAFGEQRDRFGNAADIQMYAGVAPVTERSGRKHWVHWRWQCSTFLRQTFVEWAAQTINKSYWAGQYYYKQREKGLTYQAACRSLAFKWIRIVYRCWQTGTHYDESKYLKALELRGSPLITQRSG

SEQ ID NO: 406288 - protein, 323 aa, unidentified
MQTQPIYVGIDVSKGHLDVARHDEDDVWRVDNDGEGIDELVARLAEIGPELVVLEATGGFEVAVAAALAARELPVVIANPRQARDFAKSTGQLAKTDTIDARGLALFAERVRPQVRDLPSEEARALGALVSRRRQVIDMITAEKNRLGFALGPVQKGIKKHIRWLERQLAEVDSDLDSMIRGTPIWAAKSDLLQSVPGVGPNLSRILIAELPELGQLSHKQIASLVGVAPYSRDSGMLRGKRMIWGGRAPVRSALFLSVWSAAKWNPAIRLFYDRLRAKGKPPKVAQVACMRKLLTILNAMVRDDRTWDPSIPLDQLRMQHSC

SEQ ID NO: 406289 - protein, 332 aa, unidentified
MFVGMDVHRNRTQVCVLDRKGNEVRNRNVTNDRQALRKELAGLRRGTPVAFEAAYGTGWIAELLGDLGFEAHLAHPSGCRAIADAKLKNDRVDARTLANLLRTGYLAEAWLAPKEVREQRLLLRERARLVRIRTTAKNRIRAQIADEGVPAPSHGLWTKEGATWLDSLDLSPMHRWVVTDCQALIDVLQSRISLLEAEIRRRAKPDKRIDALTAIHGIGLLSAMTLVSEIGDISRFATARKLCAWAGIIPSMRNSDRTVHHGHITRAGPSAVRHVLAEAAQVAIRKEPYHSDYLATKQRRGTGIALVRVSRKLLTEAFYVLKALEDEQRQCS

SEQ ID NO: 406290 - protein, 389 aa, unidentified
MLLDHPSDGLTAIRTHIGAIFVSLELSRSTWLITSLSPGQGEKMSRHSIAAGDIAGLLALFAELKRKAAIRTGQSYPIITIQEAGLDGFWLHRVLQQEGIESHVVDPASIATPRRRRQAKTDRLDGETLLRALLAYKRGEPRVCAMVVAPSPEEEDRRRLCRERRTLIEERVIHTNRIKGLLFAQGICDYVPMRRDRRARLEALRTGDGRELPSHLKAQIGRELDRIELLLEQIKAVEAAQDALLAAARRPASQEAAPDPVTMLLALKGLGPNFAAMLWSEAFYRQFANRRQVAAYAGLAATPWQSGGIRHEQGVSKAGNPRLRTTMIQLAWLWIRHQPQSVLTRWFKERSQQGRKRAIVALARKLLVALWKYVTQGVVIEGAMMKPAA

SEQ ID NO: 406291 - protein, 340 aa, unidentified
MYYVGLDVHKKSIAYCVKQADGVIVREGSVAARREDLHVWAAALPQPWTGAMEATLFSDWVHDHLAPFAAALKMGHPARMRAIATSKKKTDRLDARTICDLLRCDLLPPAFVMPPELRQLRRVLRYRNLLVRASVQMQNKIAGLLLEMGVEYDTPRLHRKRYFGQLIEQKQAEIPASARRLLAFSREQYETLHRMELQLLRGLEQHPDIAQRVARLMTIPGVGPVLGLTWALEVGPVERLGNLSRAISFCGLSSALRESAGKQTRGPISKQRNAHLQTVLIEAAHLASRWNPLLAEVRERELQRGHPNRATLAVARKLVAFLMAADRGHQPHPRAAPVAA

SEQ ID NO: 406292 - protein, 355 aa, unidentified
MNDAKYIGMDVHTATICAAVRDSSGNLVMEATLETKAETILEFVHGLRGSLRVSFEEGTFAAWLHDLLKPHVTEVLVCDSRKNALLRVGNKNDREDARKLSELLFLNKLHPVYHGETGIRTLKELARSYLTITRDLTRVMNRLKAIYRGWGIACTGQQVYAPRYRAEWLAKIAEAGVRRRAEVFYQQFDVLVALRQEVRRELLAESRKHPAMRLLRQIPSIGPIRAALLIALMQTPHRFRTKRQLWAYCGLALRTYDSGEYRFVGGQLKRSKKAVTIRGLNKNHNHDLKNIFKGAATRAAAAAGPFQNFYEARIANGMKPPMARLTLARKIAAITLLVWKKGVRFDAEQLKQQAA

SEQ ID NO: 406293 - protein, 366 aa, unidentified
MKKNNTKQNDKEANSGKSWRGMQGLTIGIDLGDKRSCYCVLDAAGKILEEAALTNTAASLAKHFGGQPRARIALETGAQSGWISRELENLGHEVLVANARELRAIWGSGRKSDRRDAEKLARYARVDPSILRPVRVRGAQAQLDLGRIRARDALVRARVLLVNAARGLAKSHGQRLARGVTASFGERSQALLTAELAAVLEPLLEQIDALGEQIKRCDREIAQLLERYPKAAALDAVPGVGPLTALSFVLTLEDPQRFGRSREVGPYLGLCPRRGQSGDSDPQLGISKEGDEYLRRLLVQCAHWIVGPFGTDSALRQWGLRLAQHGGDNGAKRAIVAVARKLAVLLHRLWVTQQRYQPFPQGVATG

SEQ ID NO: 406294 - protein, 388 aa, unidentified
MDFIYESCAGIDVHQSNIVVCVLHGPLTSTRPKREEARFDTTTAGLKECRDFLQSFNVQACGMESTGVYWVPVWSALCQDFELILAQPAHMKNIPGKKTDKKDAHWIAQLTRLDLLPKSFVPDTDIRELRDLTRQRKHYVEARNREVNRIHKTLQLGGIKLTTYIDDIMGASGRHLLNLLRDGEEITKSLIRSAVYTSLKNKVPELMKAMDGNFSEHHRFMLGESLDIYDFYQKKIQRLEQRISDYLVKYEREVDILDSIPGIDRITASVMIAEIGVDMSQFPTAANLASWAGLCPGNNESSGKKKSTKIRRGNAYLKKCLCQAVFAAKRQKNSLITQRFNEIRSRRGPQKATIAMAHSLLKLAYYLLSYQLTYEEYKTIQKGMPETS

SEQ ID NO: 406295 - protein, 338 aa, unidentified
MSLYAAIDLHSNNGVLSVIDQDDRVQFERRLPNELPGVLHALEPFRQELVAVAVESTYNWYWLVDGLMDHGYDARLVNTAAVPQYDGIKHGNDHTDARHLAHLLRLGILPEGYIYPRPGRALRDLLRRRFHLVQQSTAHMQAVQCAWARRTGQGLSANGFRQLTAAAIETAITDPLEQLAILVQITVWRALDEQVQQVEKWVMEHLRDSPTLKALRSTPGIGAILGTTILLETGEITRFAEVGDYASYCRMVDSKRLSNGKLKGRGNAKCGNRYLCWAFIEAANFALRYSDDIRRWYDRKAAKKLRVVALKAVAHKLARASYYLMRDGGVFDVKRAFG

SEQ ID NO: 406296 - protein, 379 aa, unidentified
MVENITHVALDDHKKRHQVAVLLPGIDREEAVTWRIENTRAGIRKMVRKVLKMAPGDVRFCYEAGPNGYALLRQISEFDRVSCVVVAPSKTPRRSGDRIKTDRRDAKKLVGLFRAGELKSIVPPLKEEEAVRDLCRCRKAAQKRVTASRHQVDKFLMRNGYVYRDGKNWTRRYREWLRSLKFDDWRRERTFQAYLFGVEQDEDRVKRLDVEIVRAAEEEPYRTLVGFVRCFRGLDTLSAMILTSELYAIGRFTTAPSLMGFVGMVPSEDTTGWDPHRGPITKAGNEHVRRILVEAAKHYRHPARVSKALTQRRKGQPDWVIAIADKAQTRLHQKYWKLVMGKGKHPNVAAIAVARELVGFIWAVLIQAATTTNVEELVA

SEQ ID NO: 406297 - protein, 413 aa, unidentified
MEMLYACCAGLDVHKETVVACVRVRDGKGKARQETRTFGTMTSQLLELGDWLAEAGVTHVAMESTGVYWKPIWNLLEGQFELLLVNARHIKQVPGRKTDVKDAEWIAQLLQHGLLRGSLVPPTPQRELRELTRQRRQLVQTKATVANRIQKVLEDANIKLASVATDVLGVSGRDMLRALIAGQTDAVGLAELARRKLRAKIPQLRLALHGRVTEHHRFLLQLLLDELTHLEALIERLTARIEAVLSAPFQEAVKRLATIPGIDVRAAENLLAEIGADMQPFPSAGHLASWAGMCSGNQESAGKRQSGRTTKGNRWLRATLVQVAWAASHTKNTYLAAQYRRLAGRRGKKRALIAVGHTILVIIYHMLKEQTTYRELGADYLDQLQSQRLTKSLVRRLERLGHEVTLKPKEVAA

SEQ ID NO: 406298 - protein, 347 aa, unidentified
MKYYKTTTKYNCGIDLHTKQMYICVMDREGNILVHKNIKGNDFDFFLKCVAPYLDDLTVVCECCYNWYWLADACCDAGIEFVLAHALYLKHIHGGKNKNDRIDSQKLAHLLRSNLIPPSYVYPRERRPLRGLLRQRMGYVWERSTLLGHLQMNQQSEGHDPVPKGGHNRDVWEERILSQYPDPLHRLAVKCDMGLIRSYDERIELIDQRLAELARRVHGRDFALIKTVPGIGRVLALTILFEIDRIDRFPTVKDFTSYCRLVKGSVASAGKVKGLCGGKMGNAYLRWAFGQAAVICKRNHPLLTPYAEMLVSKHGKFKGNAILANKLGRAVYFMLQKGTAFDAELIV

SEQ ID NO: 406299 - protein, 426 aa, unidentified
MASEPIKVIAGIDTHADTHHVAVINEHGKPLADREFLAVGSGYRKIIDFITSYGTVVAVGVEGTGSYGAELARTLRGEGLTVLEVNRPNRAARRLKGKSDPLDAYQAAKSVLEGRTKAIPKAKDGPVECLRIVRSGRASAIKARTAAINQIKALLVSAPDKIRAKYRALATSALIPALQRTRPSGHMADPEYVTLLTLKALAARCQALGTEIAAADAALKEILDGYAPMLCDLPGVGTEVASQLLITVGDNPDRLGNEAQFASLVGVAPVPASSGKTTRHRLSRGGDRSANNALHQVVLVRMGSCQRTKEYVAKRTSEGKSKREIMRCLKRYAAREIYRQITNPRPAPDNSDLRRRRTDLGMTLTTVAGELGQWVSIISRLERGHIRNDALAGAYRKWLIDQAEMPRRTPPTTAAARTNALPGAVS

SEQ ID NO: 406300 - protein, 340 aa, unidentified
MKVAIAAIDLGKHAFHLHAQDDRGHELYRKKFTRVALIQHLANLEPCTVVMEACGGAHFMAQEVAKQGHTPKLIAPHLVRPYVKSNKNDFADAEAIGEAATRPTMRFVHPKTQAQQVLAMSNSIRDSFIKDRTATVNRIHAALLEVGVSLTPGFKSINTLPAMLEASSLSEPFKKNLMMLHEHFNYLDGQVKKLDKDVECQAAEDDLAARLMTMPCVGPITSSVLAAELGDGKQFKCGRGYSASIGLVPKQHSTGGKTVLLGISKRGDRNQRRLLIQCARVYLIQLERQKGWLADWVRQLLAHHHSNHVVCALANKLARIAWAIAAHHTEFDAGPAAMNA

SEQ ID NO: 406301 - protein, 317 aa, unidentified
MLNKNAKQFIGIDLSKEWISTELYPSGQKYTIDRTHEAIQEWIAELPRGIELAVMEASGGYEALPAALLHEAGIPVAVINPRQIRGFAVAMNLKAKTDELDAGLIARFAHDIHPIPKPMSSDNQNQLKELLSRRGQLMKMQTAEKNRLGMAHDPRVKKSIKTHLEWVARELARIDKELDSLIKASPLWKEKEDFLKSVPGVGTITARSVLAGIPELGCLNRKEVASIAGLAPFTHKSGKWQGHSFITGGRAGVRSALYMSTLCATRCNPVIRTFYERLVRCGKPKKVAIIACMRKLLTILNALMREKIFWQIPSIPA

SEQ ID NO: 406302 - protein, 342 aa, unidentified
MSSANIYIGVDLHKKTCYMTVMDKAGIVSKQTEIKNDREEINKFFNIYGKDTKVAVESTMNWIPFYEQVEKMGFEVVLSNPLMTKAVAAARIKNDKVDSKILAELLRTDFLPTAYIQPKAIRDLKELIRQRAVYVEMRTRIKNKVHSVLFKTGDKQEFTNLFGKGGRKFLAELKAAPVYRTELDRYLLTLDNLGLQIEDMEQDIKAKAKADYDCKLLCTIPGVGPYTALMIKSEIGDIARFRSSGRLCNYAGLVPSTYASGEKIRTGRITKRGSKWLRKALVDAVTSSCRNANKISVFYKKLKKSKGTGKAKVAAARKLCSVIFAMLTDKQPFKEFVPVKER

SEQ ID NO: 406303 - protein, 339 aa, unidentified
MKYTPVGVDIAKHLIQVHFIDEHTGEVIDKQLRRQDFLTFFSNRERCLIGMEACGGSQHWARELKKLGHEVRLLQARFVKAFVMGNKNDVMDARAIWMAVQQPGKEIAVKTEEQQSVLVLHRSRRQLVKFRTAQINALHGTLLEFGETIHKGRAAMDRVLPAALERLKTKLPPYLINVLGDQYNRLSELDSLIDGLEKQLNSVARQSETCKRLMEIPGVGPLIATAAVATMGEASAFKSGREFAAYVGLVPKQTGSGGKIRLLGISKRGDTYLRTLFIHGARAAALLTKEPGPWITELKKRRPTSVAIVAMANKLARTVWAIAAHEREYDKNHVSIRPY

SEQ ID NO: 406304 - protein, 374 aa, unidentified
MGHDSEAFIGIDTAKLRNAIAVAEAGRNGEVRYLGEVDTSEAATRKLVAGLSARYRRLTFCYEAGPTGYGLQRLIESLGHTCIVVAPSLIPKKAGERVKTNRRDAVGLARLLRAGELTAVWVPDGRHEAMRELTRARDAGRGDLTRKRQQISSMLLRLGRYYPGIKTWNARHRCWLANLRLDHPEQRFVLEEMLQAERQVVERIGRLEQAIREALADWSLAAIVPALMAMRGIDLVAAVTVLAEIGDLSRFESPRQLMAYLGLVPSERSTGESVKRGSITKAGNGRARRVLVEAAWAYRHPPRVGYEKQALVSAAPRPAREIAWKAQVRLCKRFRALSRKGKTSTVVATAIARELAAFIWAIAREVGKTPARAA

SEQ ID NO: 406305 - protein, 419 aa, unidentified
MNAAGIDVSSRKSTVAVLRPFGEIVKLPFDVRHSAEDLAALAEQLKSIEGETRVVMEHTGRYYESVANVLHEAGLYVSAVNPLLIKEYGNNSLRKVKTDKADAMKIAKYVLDNWCELRDYTPMDTIRYDLKTLNRQFQLASKQKTATANNLIALQEQSFPGIRKLFDSPVRSDGTQKWVDFTHDFWHVDCVRSGSQNAFAERYHKWCKRNRYQFSMEKAAEVYALAKSAVVLVQKTSVTKTLVQEAANQLTAISRSVETYRSEMNKLASQLPEYPVVMEMYGIGESLGPQLMAEIGDVRRFEHKQSLVAFAGIDPAPSESGDYCSGSNKTTKRGSPYLRKTLFNIMTVHLQRAPADEPVFQFLDKKRAEGKPYYVYMTAAGNKFLRRYYGKEMTYFSTLEELPPVDPVDMDSIGLHHAE

SEQ ID NO: 406306 - protein, 358 aa, unidentified
MLGVDVGKQELHGTWRDPETRRIRWQGAVPNTINGIERLLRRAPGVSVVVEPTGRYGEPLIRAAQAAGREVLLASPRKARAFLWSEQPRAKTDRVDSAGLALYGLTGRLRPYLLPSPAVDQVKQLLAARRGLSQSLTSLRQQRASLPLAADVLTPAITALERQIAELDRQMKRALGSATEPSPQRALAAAAAAVPTVADPDTTVVPVAPRGHSLTTAAAALLAVPGIGKVTAPALAACLIDKQFTHPDQFVAYIGLDLRVSQSGQRRGQLGLSKHGNAELRRLLYLAALSAGNSARDDTFAKRYQREQAKGLAKTAALNAVARKLAKVAWSIVTHGTTYDPKRVDAQPVDDDPLDTQA

SEQ ID NO: 406307 - protein, 356 aa, unidentified
MIVIGVDPHKRSHTAAAVERATGELVGERTVAARERGQGELLAWARSLDRERVWALEDCRHVSSRLERFLLARGERVVRVPPKLMAGARRGARRRGKSDAIDALSVARAFLREPDLPIAMLAGAEREIRLLADHREDLVGERTRIQNRLRWHLHDLEPELEIPPGALDRFRWLDRLQALLQACTGQGVQVAIASELVERCRELTQRINELERELELVLRSEAAELLALVGCGTLTAAKLMGEVAGVGRFGAEAKLAKHTGTAPLEASSGERQRHRLNRSGNRQLNCALHRIAVTQARIHQPARAYLERKQAEGKSRREALRCLKRHLARTVYRTLKEIERRKMTSTSAPALEPALT

SEQ ID NO: 406308 - protein, 368 aa, unidentified
MTVASMPHPPQSSQADACGEEVVLGVDTHKDTHVAAVLTTMGALVTSRCFPTTAAGYQQLLSWAQAVGTLRRAGVECTGSYGAGLTRHLRTEGVQVVEVNQPDKTTRRRRGKTDAVDAEAAARAVLCGRATATAKTGDGPVEMARMFKLAKDSAIKSRTQAINQLKAVLVSADPALRESLSGLSTAKLIRRCAQLDTGVPTDATSAAAWTLRLLAHRIVGLTAEVGDLQTRITNAVNTSTPRLLERNGVGPDSAATLLITAGDNPERLHSEASFAALCGSSPVEASSGKTQRRRLNRGGDRQANAALYRIALSRLRWDPRTRGYVDRRIAEGKIPREAIRCLKRYIAREIYQIIIQSRPTPTMVPSAA

SEQ ID NO: 406309 - protein, 391 aa, unidentified
MINIGIDVGKFKHCAAVLDDKTGEVLIKPFFFRNDQEGFELFCSKTKQYFRRKHLIGMEDTGHYMINLTNYLLDKNLTVKYINPRSTSLRRKELGMSAKNDRKDALLIAEMLSEKKFWRSVSKQSLEIDKLREITRLYHQLQEQQNQDMNRLQRALDITFPEVNSLSWTRYSKSYMQFLSLYSSAASIASQDIRNLRKALKTTGRGRQCKVTAEEIKQLAKESIGDNNVAVELEIKSVIAIINTREDQIHSLVKKIEEFSRQLNSPIISIPGISHITGMTILAEIGDIRDFPEAAKLISFAGMEPLVHQSGKYDAAHTPISKHGSKYLRKALYQAIFTVCNYDPTFQDYYTKKRNQGKSHRCAQGHCVRKLIRVIFKLLSSNSSFDSELIH

SEQ ID NO: 406310 - protein, 459 aa, unidentified
MERKMKLGMDVVNFNAAGIDVGSRSHYVAIGQELGDVKEFGVYAEDLTALCQWLMESDVTTVAMESTGDYWQNLYVELISFGFEVVLANGKFTKNAKGKKTDVKDCRWIQKLHTLGLLSGSFLPDLTTEQLRTFCRQRGNWIDLSASATHKMQKYLKLLNFRLDVVVKDVCGLTGLKIIEDICKGNLDPQSLAEHRHYNCRRPKEEIARALHGNNRSDYLFGLQQELETYKFFQKKIADCDKKIEHIIKQELKQHPERRKMKTTEKPHKRINKNAPQIKDLNQMAFRYFDGVDLFAIEGLSHSTILTIMSEIGPEGFYKFGTSKHFTSWLRLAPNNKISGGKILSNRVPKGSNRLKIALRQAANSIGNLKGTHLSDFFRRVAYRKGRHSAVSATARKLAVIIWNMVTKKIEYQPPQQYLFLDQKRKLGLVNRIKKQIDRFELKPEDLGFKNNLDISNLI

SEQ ID NO: 406311 - protein, 345 aa, unidentified
MPIVGGLDIHRKQITFDYLDTVSGQVQRGQISPADREHLRAWLARFNGTEDVAFAVEGCTGWRYVAEELAAAGVAAHLAEPADTAFARGRKRHAKTDKTDCRHLRLLLAEGRLPECWIPPGNVLECRAMLETYHDLRREHTAWVQRIHAVLFHQGAPALGGGTLRTGPGLAALRAAAAAHLSPAGQLQVATALDVLEALEDRMHELRHQLTGAARRLAGAKVLAARLYGVGPIAALAMTCWLGGEGRFSSSRKAVRFAGLDVTIWSSDRKGPPGRLSRQGPPVLRWALYEAGKTHARSSAPDYRYYAQVKDRCNGKRAALSEARKILRQACHILAELGDDALAPA

SEQ ID NO: 406312 - protein, 347 aa, unidentified
MKTTQIGFDLAKAIFQVHGVDARGKVGVRKQLKRAQVIAFFTQLPPCLIGMEACGGAHFWARRLTALGHTVKLIAPQFVKPYVKTNKHDAADAEAICEAVGRPNMRFVPIKNTEQQALLGLHRARQGFVTARTAQANQIRGLLAEFGLVIPVGIRSIERKLPEILEDAENGLSGVSRALFARLLSHFRALDIQVQEVEREINAWHREDTASQRLQGIPGIGPLTASALVASIGDAKAFKNGRQLAAWIGLVPRQDSTGGKTKLLGISKRGDVYLRTLLIHGARAVLRQLKRHAERQEGWLARLASRRNANIAAVALANKNARIVWALLAHGRHYQPGYVSARTTATA

SEQ ID NO: 406313 - protein, 376 aa, unidentified
MPRKSNRLEAVATLGIDNQEHPMPRKSNRLEAVATLGIDIGKNTFHLIGLDRKGAIVLRQKLSRGQVQARLANIPACLIGMEACVGAHHLSRQLKAHGHEARLMPARYVRPYSKGQKNDFRDAEAIAEAVLRPTMKFVATKTVEQLDLQGLHRVRERLVCQRTSVINQIRAFLLERGIAVRQGLRALRTEMPIVLAMTDKLSPRMIHMLEDLCTDWRYLDERIETVSNEIETLSEQDVGAKRLMTVPGIGPIISTATVAAIGSGDVFSKGRDFGAWLGLVPRQMSTGGRTVLGPISKRGNRYLRMLFVQAARAVLLRPQSWEKHGLKSWIEAAARRLNRFKLAIALANKIARMAWGVLHGGRNFEVRPMKPAPQAA

SEQ ID NO: 406314 - protein, 480 aa, unidentified
MAKRATQRADLKAVPLLLNESLYVGIDIGKGRHLAGFLSKTLLERHERFEACPALVFENAREGFRLLIERIRGLAPLEHVFVLMERTGHYHRALEQYLQELDIPVYIMHVQSRPGGMLKTDKRDALTLANQLYSQLELGVQVANKLQLVRRVVPPTEAAAQLKGLIRHRYELIRESTQRKNKLTALCDEIFPELTRVVKDPNSLFALELRERFPTPQATATASFTTLQEIRGGARSLSNAKLQELPALAAQSIGIKDVARLRGLVLEQSQLIKELRLLREHVEQLDSEIVNIVEHAREGQILLSFPGFGAITAATIIAAIGSIHNFPSASALKSYFGWAPVVVQSGSTLDHSRLTRGGTRTMKQILFLAVFQAIRLQDNEWAKLYERLVKTRCPFDEKTQSRVGKKRVIGRVAGQMTEAIYALLKRDAELLAKVLPGQDPPPPLLYDPEVHQRHRQGDYRPLKSTPLPNTITVLHPFSSE

SEQ ID NO: 406315 - protein, 476 aa, unidentified
MGKCKRNSTAEVKQRKPLHAAKARISAPETTVRAQYRSAIGIDVHLNLLVCNFQTQLDDHREIRESREFYADRTSLDEFAQWCSEKKPEIILMESTGVLWYSPYEALEHVGFQNSQLALINARDAKAAAGRKTDYKDAARLSDLARAGHFSRSFVPPKAFRIQRLLARDIQKNKADLSRCTNRYQKMLNSTGCRASTVFSDVRGKAANAILEAKISNAPNLEDIIKKNCRRLRATPEEIHSALNFVIDSAISEQLAAIRKKIAQLEGYDADAFSRLAELQKPYAKDIKFLMSISGIQERSARLIYAELGPNLLEYFPDSEHFCSWLGICSGSNTSAGRQSSGKCPKGNKWLRRTLIECANGLSLSKNFAGMDKFFAHKLVRGRRRAIVELAHFLARVIFSVLTHQKPYEERTTTAVRDVLVKRFNRVARQLSGRTDLVVQGDCLVEKATGAILAKISEFSPKPRSEPNVIEVIEPS

SEQ ID NO: 406316 - protein, 370 aa, unidentified
MRPARTDPVHVVSGQGVNAWPCWQTPSSSPVGVDTHKDTHTAAVVVAATGALVEQLTVSATPAGYQQLLRLAARQPGQRVWAVEGTGGYGAGLTRFLHGHAEQVVELDRPKRAARRHGAKSDPIDATRAAREALTRDRLAQPRAAGHRAALSVRLAARRSAVQATTDTQRQLHALVVAAPDALRGRLRGLTTHQLVTACGRLRLRADWDAETTATAASLRALARRIQFLDAETAQHTGAITTLVRAWRPDLLTRCGVGPIVAASVLCAWSHAGRCRSDAAFAMLGGAAPIPASSGQTVRYRLNRSGDRHLNQALHVVVMTRLRTDPATRAYAQRRRAQGKTNREIKRCLVRYVARQLYRLLETNPALDAT

SEQ ID NO: 406317 - protein, 346 aa, unidentified
MIILGCDFHPSWQQIAWLDTETGETNEQKLVHGEGEALKFYGELPRPVLIGMKATGNSQWFVELVEDLGHEIWIGDAAQIRASYVRKQKTDRRDAAHILKLLVEGRFPRLWAPDREQRDLRQLVLHRHKLVLIRARVKNELQHLSLNKGMQRKRKLWSAAGVQLLRELPLKPWASCRREDLLGLLAMLDEQIAKLDGAVAKAAEENPQSKLLLTQPGVGPNTALAFVLTIGDVSRFRRSKQVAGYLGLIPREESSGGRQKLGAISKQGNRMLRSLLVEAAGIAVRYDPGFRKQYLHRCHSKPKAVAKVAAARKLAVRLYWMLRTNTAYPEIVRIESSPRLALVGAC

SEQ ID NO: 406318 - protein, 291 aa, unidentified
MNSEVYVGVDVHEGESQIAVLNKDGELLEEKRLPTCSLTKYLSSINGNKHVAVEAVGFVYPIYDKLKMLNDCTVSVASPSRLQLIAKSKLKNDRVDAIALGELLRTNYLPVSHMIDEQAREKKLLAMARYARRKARVIVEIKWLLKRRGIKVKGHDDLKELHLPEIDRRLKEMELLNSIIDELENAIRETAANDERVKLLDTIPGIAPYSALYLSTMLDDVGRFHDSKQAAAYLGLVLSLYQSGDVCYTGHITKAGDPVLRSILIQCARASIKSDKRLKEFYLRIKHKRRQ

SEQ ID NO: 406319 - protein, 293 aa, unidentified
MKKTSTVRVNGNMIFKGHKLTIGVDLGDRSSNFCILDEAGEILLEQKLATTPEAMKQTFEKIPRSLVALETGTHSPWSSRLLKELGHEVLVAHAQKVELISKSKRKDDRHDARTLARLARIDPELLGPVRHRSAKAQIHLTVIRARTELVSARTALVNAARGLVKSYGERLPKCGTEQVSRELAAELSAELREVLEPLLKEIESLNERIKEYDARMEKIARESYPQVALLKQVKGVGTQIALTYVLTLDDPHRFRRSRDAGCFLGLCPGRRDSGQSQPALTHESAPTLYFLPT

SEQ ID NO: 406320 - protein, 382 aa, unidentified
MTTAAATHNAQSNTTEATLFVAFELSAKTWKLGFTTGHGQKPRERTVTARQQEHVLDEIAQAKRRLGLPETAPVVSCYEAGREGFWLHRFLQGHGITNQVVDSSSIEVNRRRRRAKSDGLDVRKLLSMLIRYHHGERQVWQVVKVPSVEAEDQRHLHRDLETLKQERASTTTRIEGLLSSQGLRVTSLTKLPEQLDALRLWDGSPIPPGLRRRVLRVYAHHTFLSEQIAEVEAERRAQLQTSSEASIDKVRQLMQLKGVGINGAWLLVMEFFGWRAFKNRREVGGLAGFTPTPYQSGESAREQGITKSGNRHVRWMTTELAWSWLRFQPDSALSCWFRERFGGGGKRLRRIGIVAVARKLLIALWRFLETGVLPAGAVLKEA

SEQ ID NO: 406321 - protein, 353 aa, unidentified
MIVIGADVHKRTHTFVAVDAVGKQLGSTVVPATTAGHRTAMQWAHARFGTEVLWAIEDCRNMSARLERDLLGADQKVVRVAPHLMAEHRRTGRERGKSDPIDALAVARAAAREPDLPVASHDAVSYEMKALVDYRDCLVRERTSKINRVLWRVHQLDPEYHIKKGGLTAKKHQKALQTWLEPQSSVDARLAGKEVAAIYDLTVEINEVEKEITKKVSDAVPTLLAMPGCGALSAAKLLGESADITRFPGEAQFARHAGIAPVPVWSANPGRHRLTRSGNRQINAAIHRIALTQARMPDTLGHAYYEKKKAENKTPREAMRCLKRRLARVVYNHLTTDHHARTRKADNPTPAAA

SEQ ID NO: 406322 - protein, 348 aa, unidentified
MEQISRIGMDTSKHIFQLHGVNTAEQPVLRKKLRRKEMFAFLEKLAPTVIAIEACGASHHCARLLQSFGHSVKLIAPQLVKPYIKRGKNDAVDAEALCEAMSRPTMRFVPVKTAERQAALMLLGLRDRLVRNRTQLANAIRGYAAEFGLAAAKGIAHLAPLLARIQSDESLPGLARELFAAHAKEYAQLQAQIDEVEGKLMAWHKTNPGSQRLAQIPGIGPIGAAMLIMKTPAPETFRSGRQFAAWIGLTPKDHSTAGKVRLGVITRAGDEGLRSALVVGATAVIRHLRNGKGRSMLSAWVEQLLKRKPPKLAAVALANKLARIAWKLMVTGETYAAKPRPVASAGIA

SEQ ID NO: 406323 - protein, 370 aa, unidentified
MAKRSMFVGMDVHKESIDVSLAEEGREGEVRRYGVIPGDLEAVAKMVRALRAPHRRLRFVYEAGPCGFGIHRYLTTQGEECVVVNPSSMPKRSGDRIKTDRRDGDALARLHRAGELTAIYIPTAADEALRDLVRAREDAVGLSTQAKHRLKAFLLRQGRRYPGRAGWTRPYRRWLADLTFPLAPQHIALQEYRDTIEETERRVERLTDQLRQLTPAWRWAPVVDALQALRGVSFVTAVGLVTEIGDIRRFTHPRQLMAYLGLVPSEYSSGLSVRRGGITKAGNSHARRLLAEAAWAYQGVPRIGRQLLYRQEPLPKSICDIAWKAQLRLTSRFRKLVARGKAKPKVATAIARELTGFIWAIAKEVPPPAA

SEQ ID NO: 406324 - protein, 402 aa, unidentified
MNFVVGLDWASQAHAVCVLDATGQVCWQGSVEHSADGLAELLRRLARFGPPASLPVALERPSGLIVDTLMDAGYRVVPIHPNALKASRPRYSAAGGKSDPGDAFILGDLLRTDGHRFRPLQPLSDETRALRALVRGRDDLVAERVALANQLRALLDRFWPGAAAIFADVDSPIALAFLSRYPTPHSAERLGEKRLARFLVQHAYCGRRPAAELLARLRSAPITQTSELEAEASGEIVRALVTVLLPLVTQIQQLSTAIAAALPQHPDGPLLQSFPRSGSVNAAQILAELGDDRSRFATDEQLAAEGGVAPVTRESGKHRGVAFRRACNKRLRQALTSFADHSRHASPWAAAIYAAARRRGCHHPHAIRVLARAWVRVLWRCWQDRRPYDLTLHRAAQRVAAA

SEQ ID NO: 406325 - protein, 352 aa, unidentified
MQLLSVGCDAHKHYSQLEVQDATGQALSRVRIDHTRGAIARFFSTLPNGTPVALESVGNWYWIADEIEQAGCLPLLTNPAKAKLLMGHVNKTDKLDASGLATLLRLGSLPSVWLPPAELRDQRELPRTRMALTALRTSIKNRIHSLLAKYNLSPEGGAQLFSKEGRAWLDSSVSSLPPESARCLTQQLELLDSLSLQISTLEERIHSLIPLTPTMQLLKTIPGVGDILAILIEREVGSIERFPSAPQFSSYCGTTPRVSSSGGKTRYGKLRTESNQYLKWAFIEAANAVAAHHAQRGWTTRHASRLYLRIRSRKGGSVAIGAVARHLAESAFWVLKKNEPYRETNAISPRQG

SEQ ID NO: 406326 - protein, 353 aa, unidentified
MEQFIGCDAHKKFSLFVAMNERGEYGPAVRVSHERPAMRAFLGGLPAGSKIALETSGSYYWLVDEMERAGHQAQLAHALSAKRRMEGRHKTDHKDAQGLAMLLRNGTLPRVWIPPQELRDQREMLRLRMTLVGMRTQIKNRIHGVLLRYNVVVPVTDLYGKQGRRQLAESLAELPPYSRQSVYEQLEMLDFLEMQIQDCERMLEQILEPNVERELLKTLPGVGPILSAVIALETGDVQRFPDAEHFVSYAGLVPTARQSAGRKRRSQCPQDCNIYLRWAFVEAANVVACQQARWTQAHVVKLYQRVHKKSKLHAKAVVAVGRHLAEAAFWMLRKQQEYRAPGSNRSAASSTHG

SEQ ID NO: 406327 - protein, 410 aa, unidentified
MDRVYARCAGIDVHKDSLVVCVRLDGRESPVQTFGTTSREILRLGDWLGGLGVTIAAMESTGVYWQPVWNLLEDRLQLMLVNPQHIRRVPGRKTDVTDSQWIAQLLEHGLLSPSFVPPKAQRQLRDLTRQRTQLLGDRGRVINRVQKVLETANVKIASLISDLAGVSGRKVLTALAQGKLTPQGMADLVDRRMELKKPALREALAVAPLGEHPRFMLRQLLAQLDHIDKQVEAFDLRVEEVMSPLERQTVQRLDEIPGFDLRTGQNVIAEIGTDMSRFPSAAHLASWAGLCPGNNQSGGKRKNGKTRRANRWLKAALTQSAWGASRTRDSYFAVQHRRLSKRRGVKRASIAVAHSLLGVAYELIKHPDLAYTDLGANHFDKKSSVQRQVQQMLRRLKRLGCDVEIKRPAA

SEQ ID NO: 406328 - protein, 293 aa, unidentified
MAISVVGVDLSKSVFQLSIADSKHHIVDRKRLSRAQFHRFLAQTEATRLVMEACGTSHYWARTAQSLDHEVKLLHANYVKAYVRRTKTDAADADALVLASSDKSLHPIPIKPEELQALQSVHRIREQWKRARVARICEARALLAEFGITTPAGVRGISKKLTLATEQAPMLIQPTLLDLIQEISELEQRLKRVDRALAAYADTNPDVQALLGIQGIGITIATAFVARVSNIHTFKRGRSFASWLGLTSREYSSGQNRRLGRITRQGDRYLRTMLIHGARAALMAARRKQANGK

SEQ ID NO: 406329 - protein, 346 aa, unidentified
MEHYAGIDVSLELSSVCVVDAQGKIVKEAKVASEPEAVVAFFEALGFAVKRIGLEAGPLSHWLHAGLKEAGFETVLLETRHVKAALSAMTVKTDRKDARGIAQLLRMGWFQQVHAKSMASQEVRALLVGRKQLLGRLIDVELSIRGILRGFGLKVGAVTRKGFEARIRELVTGQATLERIAEAMLSARAALKAEYEKLHKAVLAIVREDAVCRRLMTVPSVGPLVAITYKSAMDDPSRIAKSKAAGALFGLTPKKYQSGEKDVTGGITRTGDEMVRTALYEAANVLLSRITRFSKLKRWGMDVAKRRGSKRAKVALARKIAVILHRMWIDGTTYRWAEAKPIAAQA

SEQ ID NO: 406330 - protein, 320 aa, unidentified
MRNAVGLDISKLTFDATAIVGNAEYSAKFDNDSKGLDQFSDRLKSLGCQNLHICMEATGNYYEEVADYFAQYYSVYVVNPLKISKYAESRFKRTKTDKQDAKLIAQYCRSAQESELVKRQKPTDEQYRLSRMIAAYAQIKSECAAMKNRHHAAKDEEAAKAYAEIIKAMNEQLEVLKEKIKEQTEKPNCKEGVKRLETIPAIGRMTAAVLFHHLTSSKFETSNKFAAFAGLSPQQKESGTSVRGKGKLTKFGNRKLRAVLFMPAMVAYRIRAFPDFIKRLEEKKKPKKVIIAALMRKLAVIAYHVHKKGGDYDPSRYKSA

SEQ ID NO: 406331 - protein, 345 aa, unidentified
MLHVGMDLSRHRLDVRVLEEDGATVAELAVAPTGPELRRLAARFALEAPVRGVIESMNGARFVHDTLELAGWEVAIADAQKVKGLAPLACKTDRIDAWVLAELSRRDLVPAIWLPDPTVRAHRERARFRLHLVHHRVGLKNRIHASLIAFGHVCPTTDLFGRSGRQRLAELAFPEPWASDIAACLELIDHLDRQIAVIETDLRREGADHRYVPLLLTVPGISWILSYTIAAEIGDIARFESPKKLAGYSGLCPRVYQSGDTDRRGRLTRQGPKYLRWALVEAAVHAARHPAYVDHYQRTKVRLGRQRGAKVARVEIARKLTEAIWHMLTNGEPFAPAGPTKTLAA

SEQ ID NO: 406332 - protein, 419 aa, unidentified
MSFKILKFKCCGLDVHKTWIYACIGITDSNNRTEYKQARFSSFTKGLNELCDWLAKYNCTDVCMESTGKYWIPVFNILEQHNLWVTLSHPKYTKPMKGNKTDRKDAKWICDLYMCGMVKPSFIPPADIRELRDLVRYRYKLTCMITGEKNRAQNCLTVSNLKLDDVFSDVFGKSSRSITEQILQHPGEKFDVAPFVHGRCKTPIEEIQAAVDGAISKEQAVKLRQCLDHIDELNKHISEVEQEILCLSDKYEAALNLIRTVPGFNKNPLTAIQVLSEIGGDMSVFPTAKHLVSWAGCCPRNDQSNQKIKSTRISRAGSYFKPVLVQVANALIKSKKHSEFTSRYKRIKARRGHKKAIIAICRMILTAIWHILSDLKPYTPEGFLESRPVKEGKVLSTSQALNLLKQRGYIIKGEPLAVS

SEQ ID NO: 406333 - protein, 436 aa, unidentified
MRGCRCSMIMGFTKPIEHFNLQRKKVITMNTLYVGIDVSSKSNVVYLMLPNGDKHSNFSVANSHEGSTLLVKKIYSALTSHSLDTVLIGLEATSVYGDNLVYFLREDATLAPFNRKIHVLNPKQVKKFHDTYNDLPKNDYVDSFVIADCLRFGRINKEVYMGEYRYKALQNLTRARFFAVQNLVKEKQRFMNVLFKKYSTMTQEKVFSDAFSTTALAVYDEFESAEALANMDLHELTDFIIEKGKNRFPDPDAVAKAIQKAARSSYRLPKTVNDSVNQVLSISITSMKALESQIKEFDKAIKALMELLPNVLISIPGIGPVYSAGIMAEIGDINRFDNQASLAKYAGLAWKQHQSGGFEAEVTRLIPSGNRFLKYYLCEAAFSLVRCDKKYSDFYHLKYKEVNRCQHKRALALTARKFVRLVFRLLKDNRLYCPAK

SEQ ID NO: 406334 - protein, 340 aa, unidentified
MPLYGGIDLHANNSVIVLLNEQDEVIYGKRLPNALSTVLDQLAPYHTEMKGLVVESTYNWYWLVDGLMEADYQVHLANPAAIQQYSGLKYSDDHSDARWLAHLLRLGVLPEGYIYPKAERAVRDLLRKRAHVVRQHTANVLSVQNILARNTGTRFSVKRIHELTKQELKSLLAEEPQVLAVTSSLAVLDCLRQQIKTLEQTVHKRLHHTPAYEQLLTVDGIGTILAQTITLETGTISRFPTVGNYASYCRCVDSNKISNGKRKGTGNVKNGNPYLAWASMEAAQFALRFQPAAQRFSQRKLAKSRHNTVLARKAVAHKLSRACYDIMRDLVPFEAAKAFG

SEQ ID NO: 406335 - protein, 471 aa, unidentified
MGHSGSFTRSEGRKKFKRVSPSLLERINPNAAGIDCGSGRHFVAVPSDRDPEPVRSFSTFTAELNRLADWLQACGIETVAMESTGVYWIPIYEILEARGFNVVLVNARHVKNVAGRKTDVLDCQWIQELHSVGLLSGSFRPVAEIAALRVYLRHREKLIQSASAHIQRMQKALVQMNLQLHNVISDIVGLTGMGILRDIVAGVTDPEVLATHRDPRCKASHKEITASLTGHYRAEHLFTLRQNLEIYDTFQNQIQVCDREIELRLQSLAAKRDQPNAPPPPARSKKNPRGNEPRFEIRAPLYRLAGADLTQIDTIGPYAALRLVTEIGTDMTRWRTERHFTAWLTLAPKNKVSGGRLISSKTQPSASRAAAVLRMCAMVASRTSTALGAYYRRLAYRIGKPKAITATARKLAILVYRVLRGDLDYRDPGAEAYEAHHRTRTVRNLRKRARALGLALVDLATGEQDPGVQPA

SEQ ID NO: 406336 - protein, 318 aa, unidentified
MTDVPPLFVGIDVAKAHLDVAFRPVGTHERLTNDEEGIAPFVARLLAAHPTLIVLEATGGLEVPVTAALAAAGLAVAVVNPRQVRDFAKAIGQLAKSDVLDAHVLARFAEVVRPTPRPLPDADAQALAALLTRRRQVMAMLVAEQQRLPTTLPPLRPRVAAHIAWLRQERDDLDRELRQQIRRSPAWREDDDLLQSVPGVGPVLATTLIAELPELGHLDRKQIATLVGVAPLNCESGILRGRRIIWGGRAQVRAALWMGTLVAVRHNAIIRQFYARLLAAGKAKKVALTACMHKLLTILNALLRHRTRWEEPSYAMIP

SEQ ID NO: 406337 - protein, 348 aa, unidentified
MAHFVGLDVSVKETSVCVVDDAGKVILEQKVQTEPAAIIAVLTSLDVSFGRIGIEAGPLSQWLVNALTAAELPVICVETRHMKALLTAQQINKTDRNDARGIAQMMRVGLFKPVHVKTLVAQEQRMLLTSRKLLQRKLLDVESDLRGTLRNFGLKVGVVSSGRYEARVRELVAGFPRLAAIVEPVLSVRRVMRQQFAVLHKMLLDTVRGDPVCRRLMTAPGVGAVVALTYRATVDQPQRFHHSRAVGAHVGLTPKRYQSGETDYEGGVSKCGDALLRTMLYEAAHVLLTRGAKWSWLKAWGVRVAQRRGMRRAIVAVARRLAVVLHRMWVDGSEFRWRKDSTAVPAVA

SEQ ID NO: 406338 - protein, 344 aa, unidentified
MDHFGGLDVSVKETSICIVDDSGRIVKEVKVASEPEALLKVLGNPTYRFKRIGLEAGPLSQWLFSALAEAELPVICVETRHMQAVLKAQINKTDRNDARGIAQMIRVGLYRPVHVKTLRSQKLRMLLTHRKLLQSKAIAIENDLRGTLRNFGLKVGMVGKVRFEARIQELVENIPDLAVLVEPLLIVRRVLREQIVILHRRLLAIVREDEVCRRLMTTPGVGPVVALTYRATVDVPARFRKSKSVGAVFGLTCSRYQSGEIDWSGKISRCGDEMMRTMLYEAAQSMMHSKKWSWLKAWAMQIARRRGMKKAIVALARRLAVIMHRIWVDGTEFCWTREQATAAA

SEQ ID NO: 406339 - protein, 353 aa, unidentified
MSQIIRIGMDTSKYIFQLHGVDASERVVLRKRLSRKAMLEFFAKLPPTVVVIEACGAAHYLARELGKLGHTAKLIAPQLAKPYVPRNKNDGRDAEGLCEAASRPRMRYVPVKTAEQQAALMLLGVRDQLVGRRTQLSNMIRGHAAEFGLIEAKGLDKLAALLAAIERDERVPVLARELFAGLAREYAQVQVELKAIEAKLLAWHRANAMSRRLAQIPGIGPVTAAALVMKAPDPHAFHSGRLFAAWLGLTPKDHSTAGKTRLGKITRAGDERLRQLLVVGATSVVKQAKARGRGPRWLIELLKRKTPKLAAVALANKMARIAWKLMTTGETYDSARLEARTGAEVAVQAAAAA

SEQ ID NO: 406340 - protein, 396 aa, unidentified
MNQVIHYIGLDVHKETIAVSIAPANTTEVRRYGIIGGTLAAVDKVIKKLSPPGVEVRLVYEAGPCGFVLCRHLRSQGYHCDVVAPSLIPKKASDRVKTDRRDADQLARLHRAGELTAIHVPDQEDEAVRDLVRARASAVVEQRKARNRLKGFLLRLGFRYTGKSSWNDAHKRYLAGLVMPQPPQQIAFQEYIHAIDDATARLERLTQAVEDALPGWKWEPVVRALMSLRGVQVLTAMTLVAEVGDFSRFDEARSLMHFFGLTPSEHSSGGSRAQGGITKCGNAHCRRVLTEAAWQYRLKPKVSEAMQKRQEHQSKEVRMMAWNAQQRLHQRFKQLSVRKKSVVAATAVARELAGFVWAIACQVKPKERTAAPEIIRTCRGRVYRLGPDKKLEKQGR

SEQ ID NO: 406341 - protein, 420 aa, unidentified
MVAKVLAKVFDQVHERVAGLDVHKAQVTAAVRVPALDGGRLLEVAEFKTTVTGLLALRDWLSAHGVTYVAMEATGVYWKPIWAILEDTFECVLCNARDVKQVPGRKTDVSDAAWLAQLAEAGLLRASFVPPKPIRALRNLTRYRKAQIEDRQREANRLHKILEDTGIKLDCVASDILGKSGRGMLDALVAGTTDPEILAELAKGRLRAKLPELREALEGRFDAQHALIVGAILAKLDFLDEQIMLLSDAIEEQLAPFADAVRLLCTIPGVQARTAQVILAEIGPDMTVFPTDRHLASWAAQCPGNDQSAGKRRSGKTGKGSRWLGIALTEAALAATHQKDTYLSAQYRRLRGRRGHKKALGAVKHSIIVSAWHMLTTGELYVDPGADYFDRRIDPQRKIKRLIAQLESLGQTVVVEPAAA

SEQ ID NO: 406342 - protein, 332 aa, unidentified
MSRDIQYIGMDVHKEAIVIAVLNGSGKLVMETILETKASSILQFIHGLRGELHVTWEEGTWAAWLYDLLQPQVHEILVCNPRRNALLKEGSKSDKVDARKLAELLRTGMLRPVYHGENGLRTLRELARSYQTISKDLTRVMNRLKALYRGWGIPCGRAELLYQQLDGLQALRRNLRPEFLAESRKHKAAKLLRQIPCIGPIRAAHLIALMQTPHRFRSKRQLWTYSGLGIETHDSAQFRFVRGQLQRSKKPQQLRGLNQNHNHEMKEIFKSTATRASCGRGPFHNFYAALLAKGMKPEMARLTLARKIAAITLTLWKGGKRFDAEQLKTQAA

SEQ ID NO: 406343 - protein, 340 aa, unidentified
MKLYGAIDLHSTNNVTVVIDEQDRVVYQKRLPNDLALILKELSVYQSELQGIVVESTYNWYWLVDGLMEQGYKVHLANTAAIQQYEGLKYTDDHSDARWLAHLLRLGVLPQGYIYPKAERPVRDLLRKRSQLVRQRTTNLLSIQNLMTRNTGSSLSANRVKGLDVQQVDELLPNRDLALAVKANLSVMCSADEQTEILERTVTERVKLRPQFSFLKTVPGIGQILALTIMLETGDIGRFSSVGNFASYCRCVGSQKISNGKKKGKGNTKNGNKYLAWAFVEAAHFAIQFNSKIKSFYQRKKAKTKVVVAIKAVAHKLCRACYYIMRDRVAFDVTKAFGQK

SEQ ID NO: 406344 - protein, 410 aa, unidentified
MNAAGIDVSKGKSMVSVMRPFGEVVAKPFTVRHTGSELKELADYLKSLDGETRIIMEHTGRYYEPVAQFLHDAGLYVSAVNPKLIKDYGNNSLRKVKTDKADSRKIAKYGLDNWVELRQYVSMDKIRYQLKTLNRQCNLYGKTKTMMKNNLIALLDQTYPGVNDLFDSPVREDGTQKWVDFAASFWHLECVKNMSLDAFTGRYRKWCKRNKYNFSSDKAAEIYAGVQDQIAMLPKDALTKLMIRQAINALNAVSATLEKLKAEMLELSSQLPEYPAVMEMRGVGDSLGPQLMAEIGDVMRFARRSAITSFAGVDPGADQSGGHEAKSVPTSKSGPPELRKALFLVMDHLIQTKPLDDPAYQFMDKKRAEGKPYLVYMTAGANKFLRIYYGRVKEYLTKLEQPLAPNPEQH

SEQ ID NO: 406345 - protein, 350 aa, unidentified
MTMVGGLDVHRQQITFDYVDDDGVVHWGQIRPATRKALRGWLAEHYPGGDAEFALEGCTGWRYVCEELAAAGVGVHLGDPAEIAALRGPKKRAKTDRADARLLRTLLLEGRFPESWIPPAHVVEIRTLGRLYCTLMDERRAWQQRIHAQLFHQGCPPIKALLTQAGRDALAGAELSAAGRQYENTALGCIDELTTEIEPLRTQLVHFARHQTGCRALQHHYGIGWLCAAIIWAEIGDARRFRSCDQLVRFAGLDITVYSSDGKCSPGHLSRQGSPELRWAAFEAAKCAARRGSPDYGYYHTLAAKRDGHNGKNPTLAVERKILRRCYHTLRALGDAALAMPSPQGQEVAA

SEQ ID NO: 406346 - protein, 339 aa, unidentified
MNITTVGLDLAKNVFHVVCLNEHNKEVKKRMLRRNQVRQFFAQLPACTVAMEACATSHYWGRELIALGHNVKLIPPQHVKPMVLGNKNDYNDACAIAETVNRPKITFVAVKTTEEHDMQAIHRMRSQCLRDRTALSNSTRGLLGEYGISFSKGLAVLRRKIPELLEDADNGLSLRFRNLLARRYEQLVEIDEHIAFYTKELELLSKQDDACQRLQTIPGFGPIVASAFRSTIGDGRAYSRGRHAAASLGLVPRQYSTGGKNVLLGISKRGDKYLRKLLVHGARTVVLHAANRDDPLSLWINRIHERRGYNKAAVAMANKMARMGWAVLMYNTSYEPTLV

SEQ ID NO: 406347 - protein, 397 aa, unidentified
MYAVGIDVSKGKSTVTVIQPFGVVIAEPYDVLHTSSDLNKLADFIKSLPGETKVVMEYTGAYYEPIANVLHNNGIFVSVVNPLLIDDYGGNRVRKIKTDKKDALKIAAYALDKWIDLREYIPADVIRKNLKAANRQYIQFNKMLVMQKNNLIALLDTCFPGINSLFSSCRKETNGHEKWIDFIIKFPHLDTVAGLSLSAFITKYQSWCRKYKYQYRKSKAVQIHEFAREQNASSCQSETMSLLVIKSAEMLNSTLDTLFSLRTEMEQLSSQLPEYSTVIALYGVGPVFCAQLIAEIGDVRRLKSSKSLVALAGIDPPPNQSGTVDIRSRSISKRGSPQLRKTLFQIMRGLLQSQPIDEPVYQFLDKKRSEGKPYKVYMIAAARKFLRIYYARVMEAT

SEQ ID NO: 406348 - protein, 365 aa, unidentified
MKKSSTARAASNKNLHGKLTIGLDLGDRSSWYCVLDEAGEVISEQKLGTTPKAMKEVFVAMPRSRIALETGMHSPWVSRLLSELGHEVIVAHARNVRLIGESRRKDDRLDARTLARLARIDPQLLSPVKHRSAQAQADLTVIRARASLVRARTALVNTARGLTKSYGERLRGCNPRNLDTEKAQALSPELQAALGPLLQALESLSERIAEYNQQIEATAQQSYPQTALLKQVKGVGTLIALTYMLTLEDPHRFRKSRDVGCYAGLQPGRRNSGQSEPQMHISKEGDPYLRTLLVQGAHHILGPFGADSDLRRWGLKLAERGGKNGKKRAIIATARKLAVLLHRLWVSGEVYEPLRNTKRTMVAAA

SEQ ID NO: 406349 - protein, 376 aa, unidentified
MLRPRRQVKLAKGAKAKEHTMCQKLNARIAVIGIDIGKNAFHVVGHDERGAIVLRQKWSRGQVETRFASLSPCLIGMEACVGAHHLSRKLQMLGHDARLMPAKYVRPYSKGQKNDFRDAEAIAEAVQRPTMKFVATKSADQLDLQALHRVRERLVSQRTGIINQIRAFLLERGVAVRQGLRFLRAELPDILARRTDALSPRMLRIIEDLAGDWHRLDERIEDLSAEIEALARQDKACERLMTVPGIGPIISSAMVAAIGTGDAFSKGRDFGAWLGLVPKQISTGDRTILGKISKRGNRYLRVLFVQAAWVVLVKLRPKHWERYGLKSWIEAAKKRLHHNVLAIALANKLARIAWAVLYRERNFECVRRNAMASQPA

SEQ ID NO: 406350 - protein, 343 aa, unidentified
MEHYVGLDVSLKQTSICVVNQTGSIVRESVVDSDPEAIAAFVRSKAPDAVRIGLETGPTATWLWTELKRLGLPVICIDARHAKAVLKMQINKSDRNDAAGIARIMQTGWFKEVRVKGLDSHSVKALLASRALLVKIKRDLENQVRGLLKNLGLVIGRAKFNVFAVRAEELIADRPKLVAAVRPLLEARKAIEQQVADLDRKVHKLARHDAQVRRFMTAPGIGPITALCFKATIDDPTRFKRSRSVGAYIGLTTRRHASGEVDWSGRISKCGDAMLRMYLFEAAGVLLTRVPKWSALKAWGMRLAKRNGLRKAKVAVARKLAVILHRIWIDETEFNWSPKKAAA

SEQ ID NO: 406351 - protein, 406 aa, unidentified
MELISIYKRVIGLDVHQAQITACAIIEEADGTTRVERRQFGAFKRDRRALAEWVAALAPEVVVMESTGIYWKSPYAALEAVGIRAQVVNARHVKQVPGRKTDVGDAQWLAMLARAGLLRSSFVPPATLRELRLIARQRQKLVGLLASEKNRLHKVLTDSGIRLGVVISDVHGQSGRAMTQALIDGQAPHEVLAHASRRLKASRETLFDALQGDLTDSHRFVLRELIDHVEELEARITRFDARLLEGLQDERNALALLQTLPGVDRMGAAMLLVEIGSDMSVFGSADRLASWAGVCPGNHESAGKRKSGRARKGNPYVRRLLCEFAHAARRTPSVFKAKFDALVVRRGHKRSIIAIAHKLLRTIFFMLSRHEPYRDTVVDYQALSVKRNAPRWIKALTQYGLIPTQA

SEQ ID NO: 406352 - protein, 320 aa, unidentified
MRNTVGLDISKLTFDATAIVGNAEYSAKFDNDSKGLDQFSDRLKSLGCQNLHICMEATGNYYEEVADYFAQYYSVYVVNPLKISKYAESRFKRTKTDKQDAKLIAQYCRSAQESELVKRQKPTDEQYRLSRMTAAYAQIKSECAAMKNRHHAAKDEEAAKAYAEIIKAMNEQLEVLKEKIKEQTEKPKCKEGVKCLETIPAIGRMTAAVLFHHLTSSKFETSNKFAAFAGLSPQQKESGTSVRGKGKLTKFGNRKLRAVLFMPAMVAYRIRAFPDFIKRLEEKKKPKKVIIAALMRKLAVIAYHVHKKGGDYDPSRYKSA

SEQ ID NO: 406353 - protein, 338 aa, unidentified
MHDDSTLYVGLDVHKDSIMVAYSVDMGDVELLGKIGTTQIEVDRLCKRLRCKARHICVVYEAGPCGYGLYRRLIDKGFDCMVCAPSLIPRKPGERVKTDRRDAIKLVRSLRAGDLSAVHVPTMEDEAFRDLARAWSSAREDLKQARCRLKSFLLQHGVNYFGRADWGPAHRRWLSTFSFDSGWQQLAFNEHRRTIEDRLAQCERLETALREAVADWRFYPAVLALQSMRGINFTSAVGLVSELADLSRFEHPRQLMAWLGVTPSEHSSGGKRRQGSITKTGNSYARKLLVESAWSYRHSARVSIDIQRRHEGIPKAIIDRAWDAQLRLCRRYRNPQPT

SEQ ID NO: 406354 - protein, 409 aa, unidentified
MQVLHARCAGLDVHKDIIVACRRVVHGNSARKQLESFGSTTRELLRLTAWLEEVGVTHVVMESTGVFWRPVWNVLDGHFEQILANPSHVRAVPGRKSDVKDAEWLSELLAHGLVEASFIPDAATFAVRELTRAHKQLTRDRARQVQRIQKRLQSCNIRLDSVLADILGKTGRRILDAICAGESDPHKLAALAANNIKATRAQLAEALEGRVNAVTRILIRTALNLIDAFDENMRRLEQEIDEAITPFAEAVELLKTIPGVSDGHAHTIIGEIGVDMSRFPTPGHLVSWAGMCPRLDQSAGKRRSNKLRDGNKWLKTALCQAALSSRKCKAQSYLHARFWRIRARRGAKKATMAVASSILIAVHAMLTAHQSYRDLGPDFYTRKNNEHTVRRLTRRLIDLGYDVELRRAA

SEQ ID NO: 406355 - protein, 377 aa, unidentified
MTEFAVSTSNEQSIFAALELSKNSWLLAIRVPGRDNPSLHPIKGGDAEGLIAKLDAARDRVAKVTGQAPTVTLCYEAGYDGFWLARFLEQRGIECLVMEPASLQVNRRARRVKTDRIDVESILHTLIAWCRGERHVCSMVVVPSVEEEDLRRSHRERDRLIRERTAHINRIKGLLFGQGIRGINVKAHDKTLTPSALVTADGRPLPERLGRKITREIERLAQVQAQIVAVEHERDKAPTPCVATERQRHQLLRLKGVGPALSSTLTREVYYRRFVNRRQVASYIGITPSAYDSGEGRRSQGISKAGNRLARVAMIEAAWLWVRHQPDSAPTQWFHDRTRGQKGRIRRIMIVALARKLAIAFWRYLETGLIPEGAVVK

SEQ ID NO: 406356 - protein, 348 aa, unidentified
MAMTIVEADRAIIGGVDTHLDVHVAAALDPIGGLLGVESFAAAPRGYRAMLEWLGAFGTVDKMGVEGTGAYGAGLARFLRRAGIEVVEVDRPNRQARRTKGKSDSADAVEAARAVLSGRAGGAPKSRDGAVEAIRTLLVAKRSARDARSRALHQMRQLSYTGPDQLRSRLKGLSISDLVAQAAALRPRASGDPVVYATKVSLAALGRRVVALEEEIAGVDELLTDLVTQSAPEMLELFGVGIDTAATLLVTAGDNPERLRSEAAWAHLCGVAPIEASSGKVTRHRLNRGGDRHANQALWRIVMTRLAWDPRTRAYLERRTKEGRSKREVIRVLKRYVAREVFKHLPRG

SEQ ID NO: 406357 - protein, 345 aa, unidentified
MPIVGGLDIHRKQLTFDYLDTVTGEVKRGQIAPADREHLRSWLVRFAGRGDVAFAVEGCTGWRYVAEELAAAGIAAHVGEPADTAAARGRKRHAKTDKTDSRHLRVLLAEGRLPECWVPPAQILEYRALLETYHDVRREHTAWVQRIHAVFFHQGAPALGEGALRTERGLAALREAAAVHLSPGGQLQVATALDMLAAVEARLEVLRTQLRYAAGHLTGAKVLAARLYGVGPVTALALTCWLAGEGRFSSSRKAVRFTGLDITVWSSDRKGPPGRLSRQGPPVLRWAVYEAGKTHARSSAPDHAYYATVKDRKNSKRAALSEARKIVRQACHILAELGDDALTTA

SEQ ID NO: 406358 - protein, 318 aa, unidentified
MTNITTLTAGIDTAKDKLDLAIHGQTAVWTVENSLPGWKRLAGELAKAGVQRIGIEATGGYERGVTRHLQGAGFTVVVLQPLQVKAFAKLHLRRAKNDRIDAILIAACTVAIDAQNKLPPDPRFDALTDHLTFIEQVEEDIARYKTRLEHVSNKRLRRSIDADITRLERRRTEELKRLIGAMRGHADLARRFDLVLSVPSIGERTALALVLRMPELGQVSREEAAALAGLAPFVHQSGKHQGETHIGGGRARLRHSLYAAALPGAFRWNPALKDLYARLMARGKTHKSALVACARKLLVFANTVAARGTPWLNKPAGA

SEQ ID NO: 406359 - protein, 518 aa, unidentified
MAKSKRQHIQKVKGRRFTDEIRNLNLEKVLVIPIECGKNSHKALVANYFGDILYDSFEFANSNTGVKMLDSIIQDISSSVNAQKIVVGIESTGHYYENLYRNLITLSYDVAIVNPSSVYSQRTGQLNWCKTDEIDLCAIGQVLIDNQATETKLSDGLYYNLKHLARLRRDEVNKRARLKIQIKVLCDHIFPGLQKAEVFSDFWGKASVLLLENYPTPASIISLGVNRLARFFKKHNTKLGLTTAQRLVNLAKNSLTTDASNIYAHLFNLKFKIQDLKMADEKIRKLNIELASCLIKTPGLLLLSIRKINVASAAEFIAEVGPLSQAGNAKKIISRAGLNPSRFQTAEYERTDNPITKHGSNHLRNISLTIAHNLVGDDPHLVNQPANPYFRNFFDHLVIEEGKDKRVAKVACANKFIRVACAMMIQKMLFCPPTWKQDLVADDPLIKLSKFLQDNDAKDMFDDIVHIAKEQLPDDYGSYVKQKESDIDSLVSSLTNDTERDPDNFLGPMPLEFVEVKG

SEQ ID NO: 406360 - protein, 310 aa, unidentified
MGQMFVGIDVSKDRLDVHVRPSDEAFAVGRDGEGLVALIERIGALDPYLVVLEATGGFELTVAAALVAAGMPLAVINPRQIRDFARATGQLAKTDALDAKAIARFAETVRPEPRAVPDEQARALGELVARRRQVIEMMTAERNRRRQLTSRRLIKSIDRLLAVLLKELAELDRDVGDGIRGTPAWRERDELLRSVPGIGDIVSRTLIADLPELGRLDRKQIAALVGVAPLNRDSGTMRGRRTIWGGRAKVRGALYMAALVASRHNPVLAAFYQRLISAGKAKKLAITAVMRKLLTILNAIIRDRRPWQNA

SEQ ID NO: 406361 - protein, 416 aa, unidentified
MSGKKEIACGVDVHNKFIVATILSSDGLKLQDRFDTNLEALLKFKDWLKENGCHKVALESTGNYWLPIYHVLEGSVNFILANAYQIKHIPGRKTDTLDSEWIAEICLKNLISPSRIFTRDHRELRSLTRARESLIKVRTKIKNRVIHELEAACIKLSSVIADVFGKSGRHIVDGLLNGMDLEKILESIPSRRVRKNKDEIRGIIQATLSSSQIFLLRSHLNTIDAVTKQIEEIDARISDQISLRNEDIRIALSMPGMGFISASTILAEIGDFRDFSSANKLAAYCGLVPSVYQSAGKLINGHITKHGSPHIRRIIIEVAHAIILTKRISKLKKFFLRIKARRGAKIGIVALARKVLCILYHLLIRREIYQDDLLGKPRCIKHSSVHSTASMSLEEMIRTITRAGYEVRKNEYMEGG

SEQ ID NO: 406362 - protein, 321 aa, unidentified
MNPASIYVGIDVSKDSLEVAQRPDGEAWCVGNDEADIAALVARLAQSPPALVILEATGGMEMPLVRALVAAQLPAVVVNPRQVREFARATGRLAKTDTIDAQVLAQFGEAVQPEIRPLPDAATQELGALVTRRRQLIEMLTAEKNRLRTATRTVRADIQGHIRWLEHRLSDLDDDLDQAIRSSPVWRERDNLLQSIPGVGPVLSLTLLAELPELGALNRKEIAALVGVAPLNRDSGHFRGKRKVWGGRSHVRSALYMAALVATRHNPVIKAFYGRLLAAGKPKKVALTACMRKLLTILNAMTRDHRSWQIMPLSLDTQDSY

SEQ ID NO: 406363 - protein, 349 aa, unidentified
MTIVILGVDLGKTSCSVVGVDATGAVVARRTMRHQTLIDYVTKLPACVVAMEACCGAHHLGRLFATRGLEIRLMSPKYVRPYIKAQKNDDRDAEGIAEAASRPTMRFVDLKSQEQLDIQTLHRVRSRLVAERRNLINQLRAILLERGLIFAVGRRKFEIGMDALLAESNEILSLRMRRLVGDLRVEWKELVNRSSLDTKIEALNTEFIQLARGDVAMRRLTSIPGIGVLNATALVAAVGDASSFTKARDLGAWLGLVPRQYSTGGKPRLLGISKRGNTYLRTLLNHGARAALPSLSTSDTPLGRWLNAMIERGIHRNAVVVALANKLARIAWAALRKEIGFDRCHPVAA

SEQ ID NO: 406364 - protein, 361 aa, unidentified
MKKLHRRARRFKGFTVGLDLHKRLIWYTVMDRRGNEVAAGRIEASPEALLRLLTPWRKQGAVQVAFEASGCFLWVFDLLVQELGREQVHVAQAAKIMAIANSQEKNDENDAWWLAYLLWDGRLPEAFVAEGALRELRIAGRELRSYTDLRSDLVRRVRSHLAQLGVSLPKGWHTSEVKREAARTAIEAISGMRGAALRELYEQVVALTAVITRWHQEVKGLCGQFPEVQAVQAEMPGLKTVTAGLLYGELGSPGRYHSEKAYAKATGLTPGSRTSAGKDQQRSISRAGSRHARWALTRAVIACLRCKRGPGAQVRAWVEKQCARQKCKRKVIVAAARKLAEGVWRLLAWGEVFDLRKAFPT

SEQ ID NO: 406365 - protein, 429 aa, unidentified
MTRISAGVDVSKNRSTVCIIDQDGKFIMRPFLVWHSTEELDFLADTLKRLNGEVRVIMESTSVYQYPIALQLKERGLFISIVNAYEMKQFANIDFRGGKTDKKDSRTIASYGISYWDKLVEWQIPKDTYFNLDLLNRTYMNAKKHRQIILQELQHYIDCAMPGMDKELHSLNLSTKKDFMLDFVEKFWHRDEIVNMTEAEFTEVFTAWAKEKGYRPGKGKAAKIYAIAKSCIPYYPANPTVKTILQCIVDKLSGVNRTLVTIVTQMIEEAKKLPEYQIVREMPGVGDPLAARFFGSAGDIRRFKNSKALVAYAGIDSPPDESGDFSSTHRHITKKGSKVFRDTGYEIMMALRAQKRTWEKVRKNPEVYDYMLKKEAEGKPRKVAKIAALNKFLRIVYARIKELYDNMALAERAKAKTKSKTKAKTKATA

SEQ ID NO: 406366 - protein, 403 aa, unidentified
MKHVIAFDVSMGKSYMVIYNAQKQCVFESEINHSKPDFKKLQEKIHNLTDETGESPKIVFEATGIYSRQLERFMQNNQYTYCLLNPLEAKIQCDSLRIHKTDRSDAHRLALTHFTVTRRVSTETDNLFYQLKSLSRLYSELDDELSIIRGRMHKVIQLTFPELERIFTSKSDLFLNFVQLFPHPDCVLGLSKTIIKNRIRANTNKKISNITAEKKAIQILEIAEICYPAVSQNDVLCDQLKLYARRYQELLHQKESCISKMVYVAKQRAEYDIIRSLPGIGPNTAVRLMAEIGDITRFNNNKQLNAFAGIDIRRFQSGKTFFKDKINKRGNKHLRKLLFLIIQNMIKQRRYGQNHIVEYYDKLKRQPYNKCHKVASIACVNKLLKLLFYLITHNMHYDYRLTA

SEQ ID NO: 406367 - protein, 435 aa, unidentified
MNREVSEMKYNTQNAKIKSITEETLIVGIDVGSETHFARAFDWRNYEYSKKPLEFSNTEAGFMTFKAWMEDIAEKHGKDVVIPGMEPTGHYWFNLGAFLQDNGMKPVHVNPHHVKKSKELDDNNPNKNDRKDPKTIAALVNEGRFSYPYIPTGIYAEIRNLSNLRLQTQEEITRIKNRIARWFRIYFPEIKDVYKNPDSVSGLMVLKVAPLPQDIVKLGVDGINKIWRDAKLRAAGPKRAKTLLTAAEHSIGSQEAPESARIELKNLLNDYEIYRKREEDLMGMIEQKLLEIPYIDKLLEIKGIGMKTVSGFVAEVGDITRFDDPKQLQKLAGYAIVECSSGKHKGESHISYRGRKRLRYVLYEAAISLIARNEEFKEVHRYYRTRKENPLKKMQSVIAVACKALRIFYMILTKGVSYDGAKMLQDIKRPQMLAA

SEQ ID NO: 406368 - protein, 313 aa, unidentified
MAQILPTVGIDVSKDWLDVAVRPGKQQFRVANDAAGWAELCRRLKSIEPQAIGVEASGGYERGLTHALLAADLPVRMVNAWKLRQFAKAAGLLAKNDRVDAHAIAWFTATLPSREVRRDPAREHLAELVRARRQLVDAKQAFANQLEHMRDALLRRQMARRIRQLEADEAALDQRIGQAIAAEPTFAARHELVCSMRGVGPILGSTLVALLPELGSATNRQIAALVGVVPYDFDSGKMRGLRCIFGGRADVRRVLFMAAQAAAMWNPDLKAFKQRLRAAGKKPKVAIVAVMRKLIVTLNAMVSSGTKWQQKTA

SEQ ID NO: 406369 - protein, 460 aa, unidentified
MRRDKPAVSTWEGLKVIHPNAAGLDIGSEEIWAAVAPGRTAEPVRKFGTFTPDLHVLADWLTACGVDTVVMESTGVYWIPVYEILEACGLEVFVVNARHVKNVPGRKSDIQDCQWLQGLHSVGLLRGSFRPAEEIAALRAYLRHRAGLIEHRAAHIQHMQKALAQMNVQLTQAVKDITGVTGLAIIRAIVAGERDPKQLATLRQPGVKKTEAEIAKALTGNYRPEHLFALQQALALYDFYTAQLAACDAEIERQFANLKPISDDLPPLPPSAKCDSHSKNAPNYDARGYLYRLTGVDLVAISGLNESTVQTIISEVGTDLSAFFPTEKHFCSWLGLAPHNDISGGKRLRSRTLKTNNRAGQAFRLAAQSVAKSPESACGAFYRRMKARLGSKQAIVATAHKIARAFYHILKHRTPFHDLGGEEYERCAREREIKNLQKRAAKLGLAVVETPSAPALAGSF

SEQ ID NO: 406370 - protein, 400 aa, unidentified
MRVVFGIDVSKVSSEVAILVNGEKVHNYTMSNDAIGFSRLLGDLKTVHKPEIIFEATGVYSRRLQAFLDEHGYAYTRLNPLEAKKQLDSLRVRKTDQIDAEKLAQSQFVLNRKPTYVQKEVYQNLRDLSRFYQNLTEDIVRAKNRLHKALQVTFPELENILSTPTGEQYWNLVIAFPCKDLVLELSKDKLSESIRQSTSKRISDKRVAYLAEKLIALANQSYCAVKKTSPMLEEVRYYTKELLRLSEQRQAVLNEMVELAQPLPEYDILLSIPGIAETTATSIIGELGDIRRFQSANQINAFIGIDLKHYESGNFLAKEHITKRGYPYARKILFKCIHNIASASHTNPCHIADFYEKRKKQSQTTSTKPHTIASIHRLIRTMYYLIMHNKLYDYASTQNR

SEQ ID NO: 406371 - protein, 411 aa, unidentified
MDVVNARCAGLDVHKAPVVAGVRVPGPQPGARRGETKTFATTTRGLRDLTNWLLTHGVTVVTMESTGVYWRPVYEALEGLVQLVVVNARHVKMVPGRKTDVKDCEWLAQLLECGLLRGSFVPPRAVRDLRDLTRLRKALIRERGHHVNRIAKTLELAHLKLSCVVTDLMGKTGRASLQALSAGIDDPERLAACAQGLLRKKQAALREALGGRLTPHYAFLLQQHLSLIDGLDAHIATLDTRIEAAMAPFAEAAALVQTMPGVAARAAQAILAETGVDMDLFPTPAHFASWARLCPGNHESAGKRQNTTTGKGAPWLRATLQETAWAAVRSKKSYYRALYHRLKGRRGAKRAIVAVQHAMIVALWHMLKHRVAHQDLGADSFERRNIARIRRHHVRRLEQLGYDVTLRGKAA

SEQ ID NO: 406372 - protein, 340 aa, unidentified
MNNYVGIDVSLEASSLCVVDANGKIVREGKVASEPDALIAWLRGLKLELTRIGLEAGPLSQWLYAAMRQAGLAVELLETRHVHTALETMPVKSDRNDARGIAQLMRLGWFRPVHCKSMAAQETRALLTARKLLQTKLHDLELSLRGILRGFGLKVGPTTPARLEERIRELVAGHPSLEVIADGLLAARVALRCEFDRFEKQVRDAARCDRRARLLMSIPGVGAIVSLTFTAAIDDPARFKSSKQVGAYFGLTPTKYQSGETDIDGRISKIGDASVRASLYESANIILTKPLKGCTALKSWAMKVARRSGMKKAKVALARKLAVIMHRMLADGTSFRHAAV

SEQ ID NO: 406373 - protein, 371 aa, unidentified
MNHVTSIGLDVHARSVTAVALDSITGEVRSQKFGYSPAEIAGWILQLDSPKAVYESGVTGFHLVRELREMGVDCIVGAVSKMHKPASDRRKKNDRNDAEFLARQLMAHNIVEVFVPDVETEGARNLSRALEDIRDDLTRAKHRLTHLLIRWGYIWNEFNEDGKRRGSWTHAHWEWIRGIELPDAAARESLDYYISEVRHIESQKKAIEKRVAQCASRPRWRDRVEALRCMKGIETVTAFALTVEAGVFSRFDSARAFASWLGLVPSEHSSGERASRGGITKAGNSHLRKLLVEASWHYTRATKERKRSLYDESVPASISNHAAVGVRRLAERRRHLSCELRKRPVVANVATARELACWIWALGRMSEGALA

SEQ ID NO: 406374 - protein, 457 aa, unidentified
MSKRRSKANSKNIKVPKLPQHLQHMNLNAAGIDIGSERHMVAVPEGRDKVSVREFGTFTADLEALAVWLKQCGVTTVAMESTGVYWIPLFELLERRGFEVKLVDARHVKNVSGRKSDVLDCQWIQQLHTYGLLAGAFRPPDEVCVLRSYLRQREMLTQSSSMHIQHMQKALQQMNLLLHNVVSDITGVTGMKIIKAILAGERDPRVLARNRDDRCRNTAATIAKSLVGNYREEHLFALRQAVDLYETYQAKIADCNQAIIKQVEKQPDISDDDPPTPEKQVQARDRIRDGIDVRDLLFKKSGVDLFAIPGLAADTLLTLASEVGFDMTPWKTEKHFASWLDLCPGTRISGGKVLNKKTKRNPNRATQAFRMAAASLCRSQTALGAFYRRIKSRAGGQYAVTATAHKIARIYYAMLTHATSYVELGQQAYELRYKERRINHLKVQAKSLGFQLVACAN

SEQ ID NO: 406375 - protein, 296 aa, unidentified
MLHVGLDLSRKRVDVCLISAAGELIDQFRAPADRDGLHGLARRVAVYDDVVRGVIESMNGARFVHDELVAHGWDVLVADAQRVKGLAPLACKTDKIDARVLATLSFYDLVPAIWLPTPQLRRERERSRWRLHLVKHRSTLKNRVHSTLIGFGYQVPMADLFGVGGRRLLRELKIPEPWRGHVDASVELIDELERRIAAIEDELQRSGADHRYVPILMSAPGFGWITSFTVACELGDITRFSTPTKFVGYTGLCPRVSQSGDVDLRGPVSKRGPRYLRWGLMEAAIHAASHPLYTER

SEQ ID NO: 406376 - protein, 461 aa, unidentified
MRKARRWRRKPGKKIVDVTAGLEVLRPHAAGIDVGNAEHYVAVPPGRSDPSVQTFGSFTADLHRLAQWLQACHIESVVMQATGVYWMGLYQVLESHGFQVYVVNAKYTQTLPGRKTDVLECQWLQKLHTYGLLNNSFLPPEEIRVLRTYLRQRENLVAAAGTCIQQMQKVLTEMNVQLANVLSDLSGTTGMAIVQAILEGQRDPQRLAALADPRVQASRKEIAQSLEGHWREDLLFVLQQVHDLYFTYLESITACDRRIEAHLKTLEAKADLAAQPLPPMPRLPRRKHIPQTQLREELYRVTGVDLTRIDGIHVQTAQVVISEVGVDMTRWPDEHHLASWLGLCPNNRITGGKVIRRGTKKVLNRAATALRLAAQSLHRSKSYLGAKYRRLRARLDGPVAITAMAHLLARLIYRLLRYGTQYHDKGVEHYERKYRETQIKSLKKQAALLNMQLIPPPGVSK

SEQ ID NO: 406377 - protein, 414 aa, unidentified
MEDILECCCGLDIHKESIVACLLKGPLETELKPRNEIREFGTQLKDLVALRKWLEKHECHYVAMESTGIYWQPVYAVLETALSDEMRLLVVNARHMKNVPGKKTDMRDAEWIATLLRAGLLKGSFVPERDIRDLRQFTRYRKALIRDITSQKNRIEKLLQSNGFRLSSFLSDIFGSSGLAIMHQLVQVGSISSQSLDRCLKARARQKAGEILSSLNGTLSVPQRKLLKMQLAHLADLQANLQEVEEEIHDGFSQFQGPIELLDSIPGIDLTAAYAILAEIGKEMSSFPTAQHICSWAGLAPGNHKSANKKKKQRVTQGNNYLKTILCEVAWVIAAHKKLYLSGWYWRLKQHTDAKRAIVALARKLLVIIYTMLKTHQPYNEQKFVERKNASEQKRVKRMVYELTRLGYAVSLAA

SEQ ID NO: 406378 - protein, 355 aa, unidentified
MKVVYPVCCGVDVHKTFLVATIITTTGMIQPHYKKKRFSTHTGDLRAFAAWLKENKCPEMCMESTGKYWIPVFNILEAEGINITLANPKWVKAVKGHKDDVKDSKWIGELFRLGLVPGSFIPEKPIRILREFTRYRVKLTSIASSERNRFQNAFTVCNVTLDSVVCDMFGSSATKITDYLMSNSSYDPEYCASLIHWRMKDKTEAVLASIDGCVIEPEQKVRMKVIKKHITQIEKLMENLDKRIDKIVKPYESAISLMESIPGIQRRTAITVLSEIGADMSQFGSAKRLCCWAGLTPGNNQSAGKKKSTKITKAGVYIKPALVEAAHGAVFCKSNPYYKQKFERISKRRGKKELI

SEQ ID NO: 406379 - protein, 429 aa, unidentified
MSEEKAIELRVSVDVGYRRHSVAIGLSSGEVLEEFEIEHRPEGFHEFFSRIEKHHKIKSSPVAVAMEGYNGYARPLDSLVRGRGYRLYNLNNLKFARFKEIFPGAAKSDRIDARKGLELFQLRDHLPLAKEVLQEVKGTPTENEVLKRLTRRRRRLVNERVRVVNNLQADLQAVCPGLLEITNDASNQWFLNFLLSGESLTQIARLRGSTLLKIPAVGVKTAAIIVGWQKRSHFSDEVEWVGEMIQEDARRCLELDEKVKHLQTKIAALAANSKIAKTLRSIPGFGAVCSSELAGEIGTIERFSKEGSLALYLGMSTLDNRSGKYQGTKAPKQVNTRAKAAMMIGVDRHRKRVVQSQRYYEKKRAEGKKHNQAIRALGRHLTRIIYKLLKEERAYEIRPEKGNTKTKVGPTACVKTQIRRPKISGIEKK

SEQ ID NO: 406380 - protein, 440 aa, unidentified
MRTNLRIIDPNVAGIDIGSTEIFICANDDGYKSFGTFTEDFILAAEYIKKNNVNSVAMEATGVYWIPLKDVLESEGLKVDLVKAGDANQLPGREKTDGADCQWIRTLYQHGLLRSCFIPEENIRELRAIIRLRQDHIEMASSHILHIQKAFTLMNIRLHQVISQIQGVSGRRIIEAILDGERDPERLVLLCDKQILKNKREEVLKSLNGNYRTEYLFMLQHAYRGWDFYNELIAECDSTIEFWLKKNNNSKPEFNNEKPTKQIRHHKPKIENFHGQTLKLMDGKDLSQLPGLTDYSVIRLVAEVGLSLKEWKNYKRFVSWLGLSPKRRDSGKMKRRYKGKQNTIAGQIFKEAAQSLLNSKSIGLGSFARKIRARKGPQVAIKATARKLAILYYNAVTKGNDYVEIGVKRYDEKAKHTEFMKLNKLAKTLGYSLNEIVVHQ

SEQ ID NO: 406381 - protein, 355 aa, unidentified
MSQTPNTAIAVIGIDIGKNSFHVVGHDARGAIVLRQKWSRGQVEARLANIPPCLIGMEACVGAHHLSRKLASLGHDARLMPAKYVRPYSKGQKNDFNDAEAIAEAVQRPTMKFVATKTAEQLDLQALHRVRERLVSQRTGIINQIRAFMLERGIAVRQGIGFLRTELPTILATRTDALSPRLLRIIEELAGDWRRLDQRIDGLSSEIEALARQDQACSRLMTVPGIGPIISSAMVAAIGTGDVFSKGRDFGAWLGLVPKQISTGDRTILGKISRRGNRYLRVLFVQAAWVVLVRIKNWERYGLKSWIEAAKRRLHHNVLAIALANKLARIAWAVLAKGRAFELTRTDDAGVVQPA

SEQ ID NO: 406382 - protein, 391 aa, unidentified
MSMYFVGIDISKYKHDCCIISAADQQIVSKFTITNDKDGFEQLRISLNSLSNSEDIKIGFESTAHYALNLELFLENANHSFMEVNPLLIKEYKKTTTLRRTKTDSVDCESIARWLMTVEYKPHSKGFYHAYSLKSLTRLRDRLIRQRSFYLVKITNVLDHTFPEFKPFFNERLSKTAIYLLENYGSAEKMANMNSVSYDKLRCISRGKFSIQQFLRLKELAANTVGVNNSIFDIELNSLLTLYNSLCKEIKTLEAEITRLIEEVHPHYMSIPGIGPISAAVIYAEYGDISNFSTPSQMLAFAGIEPGINDSGTESHGGRMVKHGSSQLRYVLLNACLPLIRFDLTFATYYAKKRAEGKKHRVAITHVAKKLIRVIYALERQDVDFNAQKLR

SEQ ID NO: 406383 - protein, 350 aa, unidentified
MTTIARRITGGVDTHLDIHVAAALDELGALLGVESFAATAAGYGELLRWLEGFGTLELVGVEGTGSYGAVLTRHLLHHRVAVVEVDRPNRQRRRRKGKSDPEDAVAAARSAQGGDATGSAKTRDGNIEAMRVLRVARSSARSSRTQAINQMRSLVSTAPEELRAELRGLSIYKVLTLTSAYRHTGRTDVTTLTKLTLRMLARRALSLEEEVKEIDRLLKTLVAETAPELHAINGVGTDVASALLVAAGDNPERLKNESTFAKLCGVSPLDASSGKQQRHRLNRSGDRQANSALWHIVFTRMVCDPRTQHYIERRMKEGRSKKEAIRCLKRYVAREVFAALPRSQFALDNP

SEQ ID NO: 406384 - protein, 416 aa, unidentified
MDVIVDRCAGLDVHKNTVMAAVRSPDGVGGRAEVVREFSTFTADLVRLGDWLVSERVTQVVIEATGVYWRPVWHVLEERGRYELMLVNPRHVRNLPGRKTDAGDASWLAQLLECGLLRGSFIATKEMARLRDLTRYRTKLIQERTREIQRVQKLLEDANVKLDSVISDVMGKSAREMLDALITGEADVEAMAQMARTRMRAKIPELRLALDGRFDDHHRLMLSMHLEHIDHLSAMVAGLDSKVDELMGPFDESATRLLSIPGLGKRTVETIVAEIGVDMSRFPTPGHLASWTGLCPGNDESAGKRRSGRARKGNEALRTAMCEAAWAASHTRDTYLSAQYRRFKRRMGTKSEGKAIFAVAHTMIVIVWHLLHDNTSYTELGPDYFDRRNDADARRRYLIRELEKLGSTVTLQPAAA

SEQ ID NO: 406385 - protein, 340 aa, unidentified
MYVTTIGIDLAKTIFQVHGVTEDGGVAFNRSLRRHQVLPFLAKLDPCLIGMEACSTSHHWAREISKLGHHVRLMPPAYVKPYVKRGKTDAADAEAICEAVTRPTMRFVSIKSPDQQALLSQHRARQLLIGQRTQLSNMIRGLLGEFGYVVRKGLNHIRDFAEGLQAGNGPALPSAAQTVILSLCQQLLLLHARIKDLEAEIFAASRTDKRVKLLETIPGIGPVTASAIVATVGSPHQFRSGREFAAWLGLTPLNRSSGGKERLGRISKMGDRYLRALLVAGMTSRVRAARARPDRVDPWLVSLLERKPIRLATVAMANKAARIIWAVLTRGEPYRAPVTA

SEQ ID NO: 406386 - protein, 399 aa, unidentified
MFVGIDWATDAHEVCAVDASGKVRHRATVEHSQDGLDQLVGYLHRWATQGELLVGIERPEGRLVDRILEAGYPILLVPTFAMKDLRRRYTIGGAKSDRGDCYVLADVTRTDGHRLRRLEPLSAQTRALRAVVRTREDLVDQRKALANQLRATLEASWPGAVAIFADVDSEICLAFLERYPTQESAARLGEARLASFLTKAGYSGRRPAAQLLARLTAAPAGVVGAEAEARADTVRAMVRVLRALLVSIKDLDRSVVAHLGEHPDAEVFTSLPRSGQINAAQMLAEWGDCRQAYPQADSAAMLGGLCPVTHASGTHRDVSFRWACNKRLRQAMTTFANNSRRASPWAAEVYRQAVARGCDHPHAVRILARAWARVMWRCWQDHTPYDPALHRAARRLKAA

SEQ ID NO: 406387 - protein, 309 aa, unidentified
MSSFVGIDVSKATLAVAVRPAGSSLSFTNDAQGHRDLLQSLKGLSVSRIVLEATGGYERALLVALLDAGLPAVRVSPHRARAFATAMGRLAKSDPIDAAVLAHLAEVLDVGSTPVVSPKQQALRDLVQRREQLIQWRDDERRRVQQAASPFVRHSLQRSLVATQREITRCDREITAALAAVDLESSQRLLAVPGIGPVTTASLLAYVPELGTLDRRQVAALVGLAPYNSDSGAHTGKRRIHGGRPRIRRVLYMAAWSAIRSQPDFKARYQDLRQRGKCAKVALVACMRVLLIRINAMLRDKTEWKMAKI

SEQ ID NO: 406388 - protein, 386 aa, unidentified
MGKSITSSVYVGLDVHKDSIDIAAADAGRDGEVRHIGSIGGDLVSLDKALRKLISRGRPLHMVYEAGPCGFVIWRHLSAQGLACEVVAPSSIPKRSGDRVKTDRRDAILLARLARAGELSAVRVPDAADEAVRDLVRAREDAVRECRNARHRLKALLLRNGINYAGKSSWTAAHLRWLAKLKMAHATQQIGFQEYLHAITEATARIGRLEQALRDALPEWTLRALVQALHALRGVQLIAAMTLVAELQDFTRFANPRQLMSYVGLVPGEYSSGPKRRQGAITKAGNSAARRMLVEVAWHYQHSARVTPIIAKRQDQLPKAVTDIAWAAQLRLNAKFKRLVARRVLKTKAVVAVARELAGFVWAIGREVQTSGWQGITTEAAKAAAH

SEQ ID NO: 406389 - protein, 294 aa, unidentified
MATIDGAGIQRETRSFKTFTSSLNELKEWLLSNGVTHVGMESTGVYWKPVYKVLEDSIPNVWIVNARHIKNVPGHKTDKMDSEWICKLLLAGLLKPSYIPPKEQRQLRDLTRYRNKLIQQIASEKNRMMRILEDCNIKLSSVVSNTSGTTATSLIDMLCEGKVLTLDDINSVYHGKLSASPEELLEACTGFVEEHHIYLLQMIRKDIDQTQTLVDDLSERIKRLLSKYENVLELLREIPGFSTKVVEDLVSEIGLDMSHFPSEKHLSSWAGLSPGNNESAGKKKAHESLTETNR

SEQ ID NO: 406390 - protein, 385 aa, unidentified
MHGPLDLQSYSTTIRRILAVDLGKFNSVLCRYDPATHVHHFVSAATTPQTIHDLLIEHQTGDPAQTLLVIETCDVAGWVFDIATALGINVAVANPAHEAWRWTRVKRKTDKDDALKLAKLAVLGQLPTAHMPSPQQRQRRRLVHHRRVLVDRRTQIKNQIRSIYSQQGLSLPRRGKAWTNAGIEQMAQEARPLKDCESIDDLWRGRLFVELQLLESLNIQIAQVDQKLDTLGAKDPRVQLLQSVPGVGPRLAETVVAHIDDPHRFKTAGQVASYAGLVPKQFESGTIKRSCRITRRGPALLRCMLVEVAWMVYMRNDWAKAYVRRISRGVASRKNIAIVALARKLLVTLWAMLRDNTRWREPNSISPPQDTVPQRSLSSAAVAIG

SEQ ID NO: 406391 - protein, 359 aa, unidentified
MREQRNEISFRGQKIYVGIDVHLKSWSVTVLSETSVLKKFSQRPSPEALHGFLTRSYPGAEYRSVYEAGFCGFWIHERLTALGIDNIVVNPADVPTKSSEKLRKSDAVDSGKLARGLRANELKGIYTPDSVSLEMRSLIRLKNSITKDTTRQKNRIKSQLRYLGIGIPQEFLEPFSNWSKRFFAWLKEVETLTPSGRQALDIQIRHWEELRRQKLEMTRALRTLAKTDRFREPLRLIMSIPGFGQATGMAFLSEICDITRFRNAEQLAAYIGMIPMCHSSGEKDGTGDITLRKHAVMRCNLIEAAWVAIRQDPAMNLFYTEQCKRMPKSKAIVKVARKLVNRLYFVLKHQTEYVNSVVS

SEQ ID NO: 406392 - protein, 360 aa, unidentified
MEGLYAGSDLHGNSNFLGIIDARGKRVFKKKLPNDLSLIRQTLEPFQGELVGIAVESTYNWYWLVDGLMEEGYKVHLANPSAIQQYVGLKHADDRHDAFWLAEMLRLGILPEGYIYPKEERPVRDLLRKRGHLVRLRTSLVISLQNILSRNLGRKVNVNDVKALREDRVVPLLESSEDLALAGRVSKEAIDFLTHQIRRVEGVVLKRITLKEAYRYLLTLPGVGKILALTIMLETGPIARFATVGDYVSYCRKVPSQWMSNGKRKGSGNRKNGNKYLAWAYAEASELARRYYWEPRAYYHRKMQKSNAAVAHSALAHKLARAAYYVMRDQVPFEPQKLFGTRARGWNGEPALGLVKSHQA

SEQ ID NO: 406393 - protein, 407 aa, unidentified
MNAVGIDVSKGKSMMMALQPMNKVVLRAREYPHTEVGLEQMALAILGLGEDTRAIMEATGRYHEPVAAALHEYGIHVTVINPLFIKQSGGGSIRKVKTDKADARKIAKYALDNWTDLREYTPMEAIREQLKLSSRQYNLYMKNVVALQNNLISLTDKVFPGVNELFSSPDRVDGSQKWVDFVMTFWHCECINLASEATFTERYRKWCKRKGYHFSQGKAAELYMDSMGHITTLPRNSNTKLLITTAAKELASAKATLAVLRIEMNRLARQLPEYDTVRAMYGVGEKTAPQLMAEIGDVRRFPRRSSIVSFAGVDPAVDESGKHVSKSNPTTKRGSPHLRKTLYQIVCTYLKKSPADEPVYQFLDKKRAEGKPYFVYMTAAQNKFLRIYYARVKECLAAADASELGEN

SEQ ID NO: 406394 - protein, 348 aa, unidentified
MKSCFENKDIYVGIDVHKKRWVVTVRTYDLELKTFSMQPIAEELEKFLVDNYKDALLHIVYECCFSGFWIYDYFNERGYKIIVTPTNRIYRDGSVVKTDKIDSRKLAFQHSRGLLREVKVPKMKIREYRSLFRIYDKEKMRLGQILRQVRSILEAKNHPLKWERWNKEMVEKLREVKFQEGIFNKKFSSLLNEYDYVKEQIRDTEKRIEEISEEEELGERIKRIEKINGIGIVSAVRLVVYLFDRKGRFESGEKLVHYVGLTPGEHSSGETIVRSRTGLVGNKQLRSIIIQLAWVAVRKDGNLLNKFERVYRRSGSKQKAIVAVARKLMMKVYTITEKEEDYEINIAA

SEQ ID NO: 406395 - protein, 323 aa, unidentified
MMAEPAEIQSVLGLDVSCNTVTLFDSDTHRCLTIANETDALRAALQPYQGTATLAVCEATGGHEDRLLGVLLELAIPAHRADPAKVKAYIKSFGKRAKNDSIDSRWLSRYGRDRAAMLLRWQPANPTQQKLELLVARRLDLVAMRVQEQNRLKAPRSSLIADNIRAHLCELERHIEALNAEIDTQIGESRDLALRAKSLRSVPGIGPVLVPLLLAVMPELGTLNRRQVASLAGVAPHPKDSGKASWHRSTTGGRRQIRPALFIAALAACRGNSPIATAYKTLLKAAKPKRVALTAIMRKIITIANARVRDALREQNEKMPVPA

SEQ ID NO: 406396 - protein, 388 aa, unidentified
MQIVTDRPQAPTAIRTDLGAIFVSLELSRSTWLITSLSPGGGEKMSKHTVRSGDVAGLRARLSQLRDKVQVRTGKVVPIIVIQEAGLDGFWIHRLLQDDGVESHVVDPASIATSRRRRRAKTDKIDGEALVRALLAYKRGEPRVCAMVRAPTPHEEDRRRICRERKTLTAERVEHVNRIKGLLFAQGISDYEPLLRKRRERLEELRTGDGRPLPEHLKAQIRRELDRLELTLQQIKSVETERNAMLSPSDDGAPAPGAMLKNLKGIGPEFAGILWSEGLFRSFSNRRQVAAYAGLAPTPWRSGSVAHEQGVSKAGNPRLRTTMIQLAWLWIRHQPRSILTLWFHQRVQLNGGRVRKVLIVALARKLLIAFWKYVTAGVVLEGAETTAA

SEQ ID NO: 406397 - protein, 351 aa, unidentified
MPKRTSAAAISTIGIDTGKNTLHMIGLDEKGAIVLREKISRHRIAARLVNVPPCLVGIEAGMATHYIARELVTLGHEVEQVPPAFAKPFRQGHKNDFRDAHAIAEAVQRPSTRCVPIKTEDQLDLQALHRVRSRLIGDRTAVINQLRGFLLEHGITVRQGHRFLRQQLPQILATRSDVLSPRMIRIIGDLVEDWARLDERIETVTDEIEGLARADVSCGRLMTVPGIGPIIASAMVAAIGDGTAFAKGRDFAAWLGLVPRQMSTGDRTILGRITKRGNRYLRMLFIQGARAIQLHPASWAKHSFGPWLTAVARRLHCNVLTVALANKLARISLTVLVQGREYETRIETVAA

SEQ ID NO: 406398 - protein, 353 aa, unidentified
MKYVGLDWAYRVAQWCALSPGGEIAGEGRIAADRDGLARLVLELGDEVKACLEMMSGALWVRDELVACGWQVEVADARKVKTVAPLAAKTDKVDARLLAELSRRELVPALWLPSLDERALRERLRRRMHLVRLRTSAKGRIFGLQTQWGIRISLRRLRRADGITLLERAGMPAVWRRSISECLVLIDFLDKRIAPLDAELRPFAKADPRAVLLDTIPGVAELLALTIAVEVGEISRFAGPEKLVSYGRLAPRVHQSGDGRPHTGPLSKSGSRLLGWAAVEAAQQAWRESNPWHQLYLDVAGRSHNHNSAKAAVARKILIAAWHMLSRNEPFKPPPRSTADTSVPASSRFALAA

SEQ ID NO: 406399 - protein, 379 aa, unidentified
MNRIIKIGMDVHTTNYTLCIFEPSFEHDGTVHCITQVKPEVKNIIHVIETFKKKHENEELNIVCGYEAGCLGYSLYHELKEKGIECVILAPTTMKTEKGGRKLKNDYRDAKMIAECLAYGGYSAVHVPTELDNSVKEFIRMRDDIKENLKSIKQQIIAFLTRNGKQFDGKSFWTRKHIDWINTVSFSEPLLQDTLKEYMIEYNHLCDRVETLDKQIEEISLKEEYVEKVQQLQCLIGIKTHTALSLIVETSDFNRFKKGNMYSAYLGLIPGDDSSGGHEDKLGITKAGNNHLRRLLVEAAQGYTRGRVGFKSKDLKSRQEKCSSEVVAYADRANERLRRKYYRMTLRGKRYNVAKAAIARELACFVWGIMTDHIDLCSL

SEQ ID NO: 406400 - protein, 305 aa, unidentified
MFNRFIGVDVAKAKVDVFLSETGELLQIKNIETDLKRFVRSLKPTEDTLVVIDLTGGYETKCVKIFYQAGFMIHRAEGRKVKAFMRACGQLAKTDSVDARALADYGKRLQDKLTLFQPVDNEIKPYIMRLNELKQLLQMEKNRLQSPLTDDKIYEQINRHIAFLKTEINFLAKELQQIIEKTPLLLEKQKVLTSQNGIGETTANLLLALLPELGYLPRRKIAALAGLAPYAKDSGTLNAARHVYGGRKEVKRALFICALTAIKKDKEINKFYEKLLKNGKKKMVALVAVMRKIIITLNAKCKNLN

SEQ ID NO: 406401 - protein, 355 aa, unidentified
MDNKKHIGMDVHQTSISIAVRDATGKLVVESIIETKATTILEFIRGVQGTLWATFEEGTSAAWLYDLLKPYVAKVIVCDPRKNALLNAGNKNDRVDARKLSQRLHAGLLTPVYHGENGVRTLRELSRSYLTVTKDLTRVMNRLKALYRSWAIPCAGQKVYSPRRRNAWLDKLSEAGVRRRAEQLYQQLDALAQIRRETRRELLVESQKHPANQLLRQIPRLGPIRVALLIAPIQTPHRFRTKRQLWAYCGLALQTRASGEYRFTGGELQPSKRSPALRGLNVNHNHDLKYVFKSAALDVSTSTDPLGDFYRNLLAKGMKPTMARLTLARKMAAIVLTVWKKGARFDTGELKRQAA

SEQ ID NO: 406402 - protein, 355 aa, unidentified
MDSKKYIGMDVHQASISIAVRDATGKVVVESIIETKATTILEFIRGLKGTLWVAFEEGTSAAWLYDLLKPRVAKVIVCDPRKNALLNAGNKNDRVDARKLSHLLRAGLLTPVYHGENGIRTLRELARSYLTVNKDLTRVMNRLKALYRSWAIPCAGEKVYSPRQRNAWLEKLSQVGVRRRAEQLYQQLDALVQIRREARRELLTESQRHPATPLLRQIPRLGPIRVALLIALIQTPHRFRTKRQLWAYCGLALQTRASGEYRFSGGELQHCKRLPALRGLNVNHNHDLKNLFKSAATHVSTSTDPLGDFYRSLLAKGMKPTMARLTLARKMAAIVLSIWKKGARFDPAELKRQAA

SEQ ID NO: 406403 - protein, 389 aa, unidentified
MKIFVGIDIAKLNHFAAAISSDGEILLEPFKFTNDADGFQLLVSKLESFDKNSIIIGLESTAHYGDNLVRYLVAEFYQVCVLNPIKTCQMRKNNVRKTKTDKVDTFVIAKTLMMQDDLRFITFFDLDMMDLKALERFRQKTIKQRTRLKIQLTTYVDQVFPEIQYFFKSGLHQHAVYALLKEAPSPKEIASMHMTHLANLLKVNSHGHFTKEHAKELRVLAQKSVGANDSAISIQITQTIQQIELLDSQLEKIEAEMTDIMKFNDSVIMTIPGIGYINGGMILGEIGDIHRFSNPNKLLAFAGLDPSVYQSGNFQAKTTRMSKRGSRVLRYALVNAAWNVVRNNATFKAYYDAKRAEGRSHYNALGHCAGKLVRVIWKMLTDEVEFNLE

SEQ ID NO: 406404 - protein, 410 aa, unidentified
MDVVAACCAGLDVHQASVVVCVNRSGHGGRSHKEVRTFATMRDDLIALRDWLKQSGVTQVAMESTGVYWKPVYEALEDDFETIVVNARHIKNVPGRKTDVKDCEWISDLLRHGLIRPGFVPPRDIRELRELNRYRRKVAQVQGGERNRLIKVLETAGIKLAGVASNVLGVSGRAMIRALIEGGDTPQAIAGLARGKLRRKLNELARALDAPLQAHQRFMLRTQLARIEQAEADLQRIDAVLWEMAAPYQNDIRLLMSIPGIDWLNAVTIIAEIGVDMRAFHSPAHLASWAALCPGNNESAGKQRSGKTRKGNVVLRATLVSAAVNAARCQGTYLAEKYRRLTARRGKMKAAVAIAHKILISIWHMLSDGTFYQDLGVGYLDSLDRTRNARHLVRRLANMGFEVQLREKAA

SEQ ID NO: 406405 - protein, 344 aa, unidentified
MKNTTIAIDLAKSVFEVGISDRPGHVAANHRLSREQIGTFMANQPATTVVMEACSSAHYWGRTFQGFGHDVKLLPPLYVRPYVQRSKTDRADVKGMLEAWRNSAIRAVPVKTESQQQLTSLHRVRSGWMTARTMQINMARGLLREFGFVFPLGASALPGRIRELIANADTPLPTALRELLHQLVLEIGELETRVKAVEKQLGALAIQTPIIERLRSIPGIGLLGSTALVGFVGDITRFPSGRHFASYLGLTPREYSSGSRRRLGRISKQGDAYLRTLLIHGARSVLIRAKTSSQPDRFRTWALEVQSRCGHNKAAIAVASKLARITWAVWKSGKPFESRSQALT

SEQ ID NO: 406406 - protein, 331 aa, unidentified
MFPVGIDVSKDTLDLCMLYDGIKGRVKTRNIKNDRSAVENISRWLRLQHCGSEDVHVVMEATGVYHERLATALHDAGFYVSLANPHRSREFARGMGIMTKTDKVDAYMLACYALLKKPHRWEPPAADISHLSALLRRRDVILADAVREENRLEKYQSTDTPADVVSSCIRMAQLLREEVKSIERQIKAHIKASPDLKRDYALLTSIKSVGPQLGMHMLVVLRSHHFESADQAAAFLGVVPVEKRSGTSVRGCPRMSKIGPPQLRAKLYMSALCGKIHNKRMRTVYEEMCLRGKPKMVAIGALMRKLVHWCYGVLKTGTAYNDGGPRAALNT

SEQ ID NO: 406407 - protein, 372 aa, unidentified
MKEHSELFIGLDVSKLKISVALAEDGRDGEVRFFGDIDASPASIAALATKLAKRGARLHFCYEAGPTGYDLYRQIIVLGHDCAVVAPSLIPQRPGDRVKTNRRDAVSLAKLHRAGELTPVWVPDVGHEAIRELVRAREGAMEALRRARQQLLSFLLRHGRVYTGRTPWSKAHSSWLCGQTFEHPAHQIVLAEYRHAIEEAEVRLKRLTAQVTETAASWSMAPVVKAYQAMRGVAFMIAVTFVAEIGDVRRFENPRQLMAYLGLVPSESSTGERVRRSGITKAGNSRARRVLIEGAWTYRFPARMSRLIQGRQDDVPKAVREIAWKAQVRLCGRYRKLTAAGKLKAVTVTAIAREMAAFLWAIGQVVAPVLAV

SEQ ID NO: 406408 - protein, 348 aa, unidentified
MTIVDAARPVTGGVDTHLDLNVAAALDPVGGLLAVAEFPATSGGHRRLLGWLAGFGPVARVGVEGTGSYGAGLARYLRAAGVEVVEVDRPNRQARRRAGKSDPLDAIEAARAALSGRACGAAKTRDGNVEAIRALVVAKRSARSTKIKTLNQIRHLSFTAPEELRQRLKEVSRQHLAARAAALRPSQREGADPVMTATKTALRILGRRVLALDEEKARIDILLSELVTQTAPDLLTLHGVGIDTAATLLVTAGDNPGRLRSEAAWAHLCGTAPIPASSGKVTRWRLNRGGDRQANCALWGVVITRLRNDPRTQAYMARRLAEGRSKPEVIRILKRYVAREVYHHLPRP

SEQ ID NO: 406409 - protein, 345 aa, unidentified
MDHFAGLDVSVKETSVCIVAATGKIVREVRVASEPEALLAVLASPAYHFKRIGLEAGPLSQWLFSALAEENLPVICVETRHMRAVLKAQVNKTDRNDARGIAQMMRVGLYRPVHVKTLRSQKLRMLLTHRKLLQSKAIAVDNDLRGTLRNFGLKVGMVGAARFEARIKELIENFPDLAVLVEPLLVVRRVLREQLGILHGRLLAVVRDDDVCRRLMTVPGVGPVVALTYRATIDVPARFRKSKSVGAVFGLTCAKYQSGEIDRSGAISRCGDEMMRTLLYEAAQSMLFHSTRWSWLKAWAMQIARRRGMKKAIVALARRLAVIMHRIWVDGAEFRWTREQATAAA

SEQ ID NO: 406410 - protein, 389 aa, unidentified
MQVEHPVCCGIDVHKDTLTACLRRVDANGQVSKEGREFATTSLSLLALSDWLVEQRCPVVAMESTGVYWKPVYHVLAGTVEVFIGNAHEMRSRPGKKTDKRDAAWIAELLAHGLIRPSLVPPPAICALRDVTRTRVALVQTRSQSKNRVHKLLEDTNLKLGSVVSDLFGVTGRRMLAALVAGERDPQVLASLALGALKHKRPQLELALTGQFTAHHGTLLALLLELIEVLDRQIATLDQQIGELVAPFQAQIAQLDSIPGVDIIAARDILAAIGTDMSRFGDAARLASWAGVCPGNHESAGKRYRGKTCKGNRYLRRVLVQCAWGARKTPTFLGRTFRRLEVRIGKKKAALAIAHKILVIVSRQEARERQRALKALERLGYTVTLERAA

SEQ ID NO: 406411 - protein, 413 aa, unidentified
MPYNIAGIDIHKKVIMVVVADVSVGVEEFEFESHRFGTSAGDRQRLAAWLEEHGVQEAVMESTAQYWKPVWLDLERHVPQLHLAQAHSNRAPKGRKHDFADAKRSVKRLAAGELILSLVPDAEQRGWRTMTRGKLQLVCDRVRLQNQMEALLEEMRIKLSSVISDLLSLSGRRILRALADGESDPAKLAELGDFRLKCSKAELADALNGHAEPMHRQILKLFLKRLELLDEQIQQLDKMIAEAMGKYEQAVIRLAAAPGFGPDSAQQVIAEVGPEAKSFSTPAQLASWAGVCPGSQQSAERNHSSRSPKGNRFLRRILNQAAQAAVKKKGSHFQMAFRRWMPKLGYNGAIWAIAHKLCRVVWKILHDSVPYLERGQESDPRTKKRRAQKMIQTLRKMGYKVELSLLTPEPAQG

SEQ ID NO: 406412 - protein, 399 aa, unidentified
MIGVGIDISKNKSTVSAINDTGEIIMKPQEFKHSENELNKLIQWIKDQEDTVFVVMESTGHYHYPVLKKLYEEGIYVSVVNAYLMKKYGDIEIRKAKTDRKDAIRIAKYAIEKRFSLKKYEGEDEKYNDLKFLSRQYNQIVSIRVKAKIQFNNLLDEIMPGINKILTRTTGNSSKILYDFVEKYEHFDNIKRKGEQKFIKEYSAWSKKKGYRNGAIKALKIYELAQNSITTRSANNSTYIALRNCIKILRETEESSNSILTQMQTIAYTLPEYKIVRELKGVGDKLAPRLIAEIGDVRKFTSAKALNAYAGNDAPPHQSGQFEGTKRHISKRGSSSLRKVGYEIMMALKVTKPTEDNAVYEFMIKKESEGKAKNVAKMAALNKFLRIYYTRVMNLYKTL

SEQ ID NO: 406413 - protein, 345 aa, unidentified
MKHFAGLDVSLDETAVCVGDEAGTMVREARVPSEPEALVGFFQGSGLVLERIGLEACSLSAWLHESLVAAGLPAVCIETRRAKAAMGAMPNKTDRNDARGLAQIIRTGWYRVVHVKSPACRSWRALLAARRLVLNKMRDVENGLRALLREAGLKLGTPARKEFAARVRELTAADPVLSVLAEPLLTIIAAMARELAQLTRRVLDIVRDEPVCRRLMGVPGVGPLTALAFRATIDRPERFRHSRDVGAHLGLTPKRYQSGETDMQGNISRCGDELARTALYEAAHSLLIRSRKWSTLRAWGMQVAKRRGMARARIAVARKLAAILHRMWADGTEFRWGKDDAAVAA

SEQ ID NO: 406414 - protein, 415 aa, unidentified
MEPVLDSCAGMDVHEKKVDVCIAHGPLEKSPKFEIRTFSTMTSDLEDLKSWLKKYNVTTIGMESTGVYWKPIFNIMEGEFTIVLANAQRLKAIPRKKTDIMDCKRIAKLLRYGLLPNSFIPPREIRELRDLNRTRRKLVGMMTSEKNRLTKVLESSNIKLSSVVSKISGVSSMAMIRSLLEKDRLSKEEISQLAKGSLKKKVDLLEKALDGKLTDHHRFLLKMHMENLDHLARQIAKIDEQIERKMIPFQKESNLIQSIPGISKVSASAILAEIGTDMSQFPDEAHLSSWAGACPRNNESAGKKKSGKTQKGNSFLKGTLAEAAWAASKVKRSTYNAFYQNIVRRRGKKRALVALAHRMLMDIYRVLKTGAPYQDTGAEEANERATKRKERSMIRLLEKAGYEVVRTCTSEIAAA

SEQ ID NO: 406415 - protein, 497 aa, unidentified
MVMRVLPFVGRSARRFAFEKSYSDLICAIFSRSGAPNRNQTDGVAAQRVDNYEYMASASSAGGHESLLALSVWINAMHRKRVHKHAFCVRKRHAVLTQIPRRLGRIKFKVHWLVTVCMLCIRVKASLLERLTNVRDFPDVARHWSAKIEVCVHVQSQPRRGSLVSNVTTVGIDLAKNVFSLHGVDARGVVVLRKTVSRARLASFVAQLPASVIGMEACSGAHEWARRFAQHGHTVKLMAPKFVVPYRKSGKNDGNDAAAICEAVSRPSMRFVPVKSVEQQTMLTLHRVRLGFVEERTATINRIRGLLAEFGVVLPQRAMEVRRGAAASLEQLPAAAARALADLLAHVRVLDERVNEYECELEQHARRDERAQRIQSLSGVGPISASAIVASVADAHEFKNGRQFAAWLGLTPKQYSTGGKTRLGHITAHGDPYLRTLLIMGARSMLQTALRRTDRLARWALGVRARRGYHRACIAVAAKHARIIWAMLAKNEVLQLS

SEQ ID NO: 406416 - protein, 431 aa, unidentified
MCFAPAFGDEEESMGKINERCGGIDVGKRFLLCCVLTGAAHEEPRSQTRRFEATVSDLVRLREWLAAERITHVVMESTGSYWVPVFNILEGHFIIVLANPEEVKNRKGHKTDRKDAEHLADLLRHDHIRASFIPPKPIRDLRDLTRRRLQLIQDATRERNRVEKLLEHVNVKIGNVLSDVFGVSGQSMLLALLDGKTTAEQIAHLARGQAKRKIPQLTEALEGHGMRDHERFLIRSCLRHLACLEEEVEQIDGEILQRMQEPPFQGAFQRLQTIPGVGQLAAASILAETGVDLTTFPTAEKMASWAGLCPGNRESAGIKKGSQTTQGNSYLRTTLVQCAWSATRKTGCIFQTRFRELSPRRGQKRAIVAIAHQMLTVLHFMLKNDVPFNGAANAPTQRRRQRRAHHHLRCLRRLGISVQIVEPTESAPQTG

SEQ ID NO: 406417 - protein, 340 aa, unidentified
MEGIAVIGLDLAKSVFQVHGIDGQGAVVVRRRLSRAKLVPFFAGLPRCLIGMESCASANHWARELVALGHEVRLIPPRYVKPYVKRSKNDASDAEAICEAVTRPTMRFVGVKSPQQQGVLVVHRTRLMLTRQRTQIGNAIRGHLAEFGIIAPVGRQGLERLVAVIGDESDGRVPACARPSLAMLVGHYQLVVADLLETDRAIRTHSRSSELGRRLQEIPGVGPLVASALVASVPDPHVFRTGRCLSAWLGLVPRQHSSGGKERLGGITKAGDTYLRTMLFVGAMAVIRHAERYGTRKPWLIKLLSRRTPRIAAIALANRIGRIAWALMTSGERYREPAVT

SEQ ID NO: 406418 - protein, 375 aa, unidentified
MKRSEAFIGLDVHKETIAVAIADSGRNGEVRYWGTMPNTAHHLGQLVTKLAKKHRQLEFTYEAGPCGYDIYRHLKDKGFACQVIAPSHIPRRAGDRVKNDHRDAVTLARLARAGELTAIWVPDPVHEAMRDLVRARHAASKDLKQARQRIQSFLLKHAASTYEAKAWTGRHRLWLAGRRFPHECQQVAFQSYLNAMEQCLSRRSDLEEQIRGLVPTWSLGTLVSELQALRGVALLVAVTLVSEVGDMRRFATAKHLMAFLGLTPGEHSSGANIRPRGITKAGNTAVRRILYEAAWSYRVTPRVGSHMHAYMPPNISQEVKDIAWKAQLRLCKRYKQLIAKGKKPQVAITAVARELVGFIWAIGQKVQPPAAAAPS

SEQ ID NO: 406419 - protein, 351 aa, unidentified
MFMIGVDYHPSVQQIAFTDTETGECGERRLNHSDGEAGKFYRELKQRGLSVLVGMEATGYARWFERLLAELGFELWIGDPAEIKTKRVRKQKTDRQDAQLLLRLLLENRFPRIWRPSPENRDLRQLLWHRHRLVQMRTRIMNQLQAVAMNEGKRWKKKLFSAQGRAQLEELPLAPWASRRRHDLLELLDRLNPTIETLTAAIEQEAKRRPEVLRLMTLPGVGPITALAFVLIIGTPERFQCGKQIGSYVGLIPCEDSSAGRQRLGHISKQGNTLLRFLLVEAAQAAVRWDPDWRRRYLHLAMRRDRRISKVAMARRLGVRLYWMWRNGWEYSQLVKFGSHAGQPVHVHGVR

SEQ ID NO: 406420 - protein, 361 aa, unidentified
MDLPITHTDEEALPVVLGVDTHVDAHVAVALDGLGGRLGHKTVPATEAGYALLAAWAEEFGVLERAGIEGSGSFGVGLTRFLRVRGVEVVEVNRPNRQHRRRFGKHDTADAEAAARALQANTATGEPKSADGPAEMVRALHVVRRSALKARTQAANQLRALLVTAPEGLKAELRGLSTTNLVATAARFRPGAHSEDLRAATKLAMRSVARRHLTLSEEIAQLEEQIERLVKEAVPALASLRGVGTDTAASLLVAVGDNPERLKSETSFARLCGVAPVPASSGKTARHRLNRGGNRDANRALHVLALGRMSWDERTRAYVARRTAEGKRRREILRSLKRYVARKVYRILVAPGGLPPPISVP

SEQ ID NO: 406421 - protein, 351 aa, unidentified
MLNVGVDLHKTQMTVCFLTSKDEPLQKVYRTDKSGYEAFSTDLKSFSIARKKIRIGVETTGTVWSFVKYMENSVGEIQVINTMKFKVIVESTSKTDRRDARIIAEYLQKDMLPTVILPDEKSRLIAKYVKVRDRYVKLATRIKNQIHALYAEEGIQIKSGDLTSAVRLRSLENHEVCGDVQFLLDDLIEELLSIKMKVRRIEKKLEEMTEEDQTVRLLRTIPGTGIVNACALRGILADIKRFDNPKKVAAYAGLVPWVSNSNETVHHGHITKRGSTILRNALVQMAMGMIRNWSAQKQCNNTFYSWYKNISGRTSGGKSKIALARKMAHIVWAMLTYNEEFEMEVTSSRAS

SEQ ID NO: 406422 - protein, 433 aa, unidentified
METSSIEYAAYVGLDWADREHAWCLHVPGNTSLESGFVCQTPEAIEQWVATLAQRFQGRPIAVALEQSRGALLFALTKYEHLILYPIHPARLAHYRKSFRPSGAKDDPSDAELLLNYLCNHRDQVRPLQQDTEDTRALQFLVEARRRIVDDKTRFKNRLTAILKQYYPQILDWFADVDSAVAIDLLERWPTLENLQRVRRSTLDHFFKQHRCGGFQKLEQRWEQIQSAVPATKDLAVLKSFSLTAKCLVRLLREMRSAVELYDQTIEDLAQKHPDFDLFKSFPGAGDALIPRLIAAFGSQRDRWANASELQCYTGIAPVLETSGRQRWVHVRWACPKFVRQTFHEWALHSLKKCSWAKEHYNTQLNRGKSRHAAIRAVAFKWLRIAFRCWATSSRYDSDLYLRCRSNRTSSATELQIQWKTCGSFSKLAAVRH

SEQ ID NO: 406423 - protein, 377 aa, unidentified
MNASRTALQEKHTGEASELYMAFELGEKNWKLALSDGTRSPSRYTVTAGDTAVLLERIAKAKARCGFPKRARVHSCYEAGRDGFWLHRWLLESGIDNIVVDSASIEVNRRARRTKTDRLDGDKLLAMLIRYHAGERRVWSVLRVPTLEQEDERRAHRELERLVRERTAHINRIRALLVMHNLRVKYVGGRLWQRWWGQHAGELLPGVRGEIEREGERLLLVRAQMRAIEAQQHQAVATGSEPQVARLAKLGAIGVGSGWVLVKELFGWRRFGNRREVAGCLGLAPSPYSSGKHETEQGISKAGNRQVRTLMVELAWSWLRNQPQSALSKWFTRRFAAGGKRLRRIGIVALARRLAIALWRYLEDGLIPEGAKLKATG

SEQ ID NO: 406424 - protein, 412 aa, unidentified
MQTLIERGCGLDVHQATVVACLLIVRKDGKVQKEMRTFGTATRELVGLRAWLLSEGCTHVAMESTGVYWKPIYAILEGALEIVVANAQHIKKVPGRKTDVKDAEWIADLLCHGLLRSSFVPPKPIRELRDLMRYRRKLVESQAAERNRLLKVLETANIKLANVATDVFGMSGRLMLRALIAGKATPQEMAELAKGLLRKKIPELELALEGKLEEHHRFLLELQLQRLEAAEKDLAALEQRIRQKLEPYAAQLALLDEIPDVDWTLAAVIIAELGVDMTVFGNVSQLAAWAGVCPGNNESAGKRKSSRIPSGNVYLKSGLVEAAIAAGRAKGTYLRDKFFRLKARRGYKRAVVAIAHKILVAIYHMLSQQVSYNDLGDLYLDKLNQNHLTRNLVHRLERLGYAVTLTLQQKAA

SEQ ID NO: 406425 - protein, 425 aa, unidentified
MSSSDAPSSPVDASGFAYVVGIDMGSQAYVYSVLQPDKRPVGKPTELANSRAGFEQLHGCLRQLGVAPERVLIGLEATSRYSENLYQFLSEQGYTLCLLHPRQTHQFAQQRGLRAKTDRLDATTIARLVLSGEARRGYVPDELIATYREVARLHSQLADDSARYQNEIQALLVVLFPEFVQIFADPCRPTALALLKRYPSAQAIVTAGVEALTATLRALAPRHYGRPTAQELVRLASQSAASGLATGARSLSLHVLCDQLEHTLANLAQVEHELDQLLDRDQGASNLKSTPEFGRKTVAVLRAELGDVTRFQRVDQVVAYAGLDLQVRQSGQWKGQVKLSKRGSGRVRRVLYLAALRSIRLPASAFGAYYRRLIGRGMKARDALMAVMRKMLIVAYHLLRSNETYDPTKVCAVACTPPRTPSSGS

SEQ ID NO: 406426 - protein, 351 aa, unidentified
MNYVGVDIHKRYSVLVAVEERGREVARSRINGNTTSGFAQFFRALTGPSKVVLEACWNWGRIHDLLREIECIEEVVLAHPLKTRLIADAQIKTDALDAKALATLLRGNLIARAYVPTQRTRQRKEVLRQRLYWARLRTRIRNRIHALVDRQRELEMPQCSDLFGRKGLAALKKLRLSEPDAMLLREELQLLELIQNQIKVQEARIEEFNSGDEVTAHLQSIPGMGKILAAVAAAEIDEIERFSSAAKLCAYAGLVPRTYASGGKVYQGSLLKSRNKWLQWAFIEAAWVAVGCSAYFGGLYRQRRARGKNANIAITSLARRMCQISWTLLKERRDFYEAFPGRSACRLTAAA

SEQ ID NO: 406427 - protein, 368 aa, unidentified
MDGEYYTTIGMDVSDRTTKVCVMAKERGARRIIEETTIPTTGDALRAYLSGKSSDWPVVFETGTHCRWMKREVESLGMKAIVANPSKLRMVTESNTKNDRNDARELARFALADVGLLHPVRLRSERCQQMLRLMKARDMLVKVRTMHVNELRGFAKSMGFRLPGCPANKVHALDKAGWPDDFESLAWPLMDMLETIDLKIRAYESQIRSLAESGELRDKIDRVREVYGIGLLSGAALVASIDADPGRFSKARDAGAYFGLVPKQRQSGEMDVQCHITRAGSGFVRRLMIEAAQIAMRESARDTDIKLKGLRICARGGKIAKKRALVAVARCLVVTAVALLKKPDADYVPLSERARLEFEAMRSAETAA

SEQ ID NO: 406428 - protein, 343 aa, unidentified
MQTITTIGLDIAKSVFQVHGVDADGRVVVRRQLKRRYVLAFFQKLPPCLVGIEACASAHHWSRELQALGHTAKLMPPAYVKPYVKRHKNDATDAEAICEAVTRANMRFVATKTPEQQSCLTLHRTRHLLMRQQTSVINAIRSHLAEFGIVAPVGRNGVEQLLGVVADSNEKRLPEIARACVAALGAQLRVLKVQILEFDRMIRAWHRSSEASKRLDQVPGVGPVLATALVASVADPRAFRSGRDFSAWIGLVPKQNSSGGKERLGNISKRGDRYLRSLFTTGALAVIRYAKIHGTRHRPWLTSLLARRPTKVAAIALANKLARMAWAMMAKGQRYKEPAALAA

SEQ ID NO: 406429 - protein, 356 aa, unidentified
MSREVKYIGMDVHKEAIVITVRNTRGHVVMESIVETKASSILQFMHGLQGELHVTWEEGTWAAWLYDLLKPHVHQVLVCNPRRNALLKEGSKNDKVDARKLADLLRTGMLRPVYHGEHGLRTLRELARTYQTLSQDLNRAMNRLKALYRGWGIACGGTQVYAPRYREEWLDKIEHVGVRRRAELLYQQLDGVQALRRTLRPELLAESRKHKAAKLLRQIPCIGPIRAARLIALMQTPHRFRSKRQLWTYSGLGIETHDSAQYRFVGGELQRAKKPQQIRGLNRNHNHEMKDIFKGAANRASCGMGPLRDFYVALLDKGMKPEMARLTLARKIAAIALTLWKKEERFDAEELNTQAA

SEQ ID NO: 406430 - protein, 419 aa, unidentified
MDQAKAPSSPVDASSFAYVVGIDIGSEQCSFCTLKPDKSQVIKPTEFANALASFRLLQGQLERLGVAPGQVLIGLEATSRYGENLYRFLEQQGYQLCLLHPRQTHQFAQQRGLRAKTDRLDATTIARVLLSGEARPGYVPTELIATYRELVRLHSQLSDDIARYKNEIHALLSVLFPEFTQVFLDPCRPTALALLKRYPSAQALASAGVEAVAALLHELAPRHYGLKTAQQLVQLAQHSVSSGIAASARAITLKVLCDQLEHTQTNLAQLEQEVDKLLDTDQGAKGVQSVPEFGRKMVAVLRAELGDVTRFERADQVVAYAGLDIAVRQSGKWRGEAKLSKRGSGRLRRILYMTAVRCIRLKDSAFGLYYHRLLARGMKPRAALVAVMRKMLLVSYRLLRTEEAYDPTKVCARPGARLA

SEQ ID NO: 406431 - protein, 366 aa, unidentified
METIYIGVDFHARQQTICYLKTETGELVFHELKHQDKQEVRAFYAQFPGSVIVGLEASGYSPWFERLLEELGCEVWLGHATEIHRRARWRQKNDRRDAELILDLMLHNEFPRLHRPAVQSREVLRMLRYRQKLIKMRTMSKNSLQALALQAGLAKRSGLFTKQGQQQLGAAEMSPVMHWQREHWLQLMEPLNQQLLETIGWFKAQSKGDDSITRLRTHPGIGLLTSLCLLHTLQPVSRFRNTRKVAAYAGFDPVERSSGERKCFLGISKAGSRLLRYLLVEAAQTAVRKDEDLKRFYQRLADRRGRPKAKVAAARKLLIRAYIMLRDEIDYAEFRHRAVAARLARRGQGPSNVPEVLIGQPASPEQ

SEQ ID NO: 406432 - protein, 347 aa, unidentified
MALTIVETPITGGVDTHADVHVAAALDPVGGLLGVAEFPVTPAGYARLLSWLSGFGTVCLVGIEGTGSYGAGLARHVATAGIRVVEVDRSDRQDRRRQGKSDPLDAVSAARAAQSGRARGAPKGRDGSVEAIRALMVAKRSARAERTQTINQARSLIVTGPDDLRARFARHTVAALVAETASLRPRPGSTVGYATRIALRELGRRAQFLDGQLARLDELIVPLVTARGPGLLAVYGVGPRTAALLLIAAGDHTGRLRSEAAWAHLRGVAPIPASSGKVARRRHGPGGDRQASRALWRIVFTRLGSDPATRAYAERRTAEGKSKAEIIRCLKRYAAREACRHLRPAAG

SEQ ID NO: 406433 - protein, 315 aa, unidentified
MSDMPCFVGIDVATAQLDIALRPSGERWAVPNDASGVMTLVDRVQALHPTLIVLEATGGLERAVTSALATAGLPVVVVNPRQVRDVARATGQLATTDALDARALAHCADVIRPTPRPLPDAQTQELRALLGRRQPLIGMRTAEQNRLAGTNARLTKDIAAHMTWLNAAIATLDDDLETILRASPLWRENDDLLQSAKGIGPVCARTLLLELPELGTLTRQPIAALVGVAPLHCDSGTLRGRRMIWGGRAHVRTVLYMGTLVATRFNPQIKVFYERLLAAGKVKKVALTACMHKLLTILNAMLKHRTPWQPQEVQS

SEQ ID NO: 406434 - protein, 412 aa, unidentified
MRRVIGIDIHRTFGEVVFWEDGRLRPAGRIDMTRTALEGFGKSLRAADAVVIEATGNCMAVSRVLSPFVQRVVIANPLQVKAIAHAHVKTDKVDAGTLASLHAAGYLPEIWTPDAATERMRRLVARRYQVVRHRTRIKNEVHAILHAHLIPRCPHADLFNRRGRDWLARQPLPDDEQAAIERHVRELDRLGEDLAILDREIAESTLDDAAIRRLLTITGVNLTVAAGLMAAIGDIGRFKSPQKLVSYFGLNPRVRQSGLGAAHHGRISKVGRSHARAMLVEAAWAAAKSPGPLHAFFVRIRARRGHQVAAVAVARKLTVLCWHLLTKEEDYLWARPALVANKVRAMELQAGKPQKKGNRRGPAYAYNVRALRKQEMRIAEQAEQSYEHLVAHWQPRHPKAGVRGRLKPAGLE

SEQ ID NO: 406435 - protein, 432 aa, unidentified
MNESIPAASLEGVAAYIGIDWADQKHDVVLRSAAEPNKVEHRVIEHQPGALMEWIGQLQQRFGGHGQILVCLEQSRGALIYHLMGYGFLELYPVNPLQLARYRETFSPGGAKDDQPDAELLCELLYCHRDRLRAWKADSELTRKLAFFNEGRREAVDQRTRLSNAIKSQLKVYFPLALELLHQDTSTALAADLLLRWPSLEALQKQSPHQLRKFFYAHHCRGESTMLERLRLVQQAQALTQDSAVIEPATVRVQMLARQLKNLLPDIARYDQKIAELFAAHPDRFLFENLPGAGRVLAPRLLSALGSDPNRWESAQEIATLYGVAPVRRASGKKSGKKGEKKASVRFRQACPKFLRQSFHEFAGCSIRYCGWARTHYEAQRAQGKGHHVALRALAFKWIRILFACWKQRIPYDPQRYLHALQQRASPYANAC

SEQ ID NO: 406436 - protein, 356 aa, unidentified
MLNITRVGVDLAKMVIQVHAVDVAGKVVINRSIKRASFLAWCSGLPAGCLVAMEACTGAHHWCRQLIKRGLDARMMSAQFVAPYRIQGKTGKNDANDAAAVCEAASRVHMHFVPPKTLDQQGMLCVHRLREALKQERTACINRIRGLLAEFGVVLPQTPAVLGLHLNDVLEDASNDIAGMARLVLQKAQQHWHELDAHLQWCDERIAAHRKDSEQVQRAAEPRGIGVITASAAVATVGDFKQFKNGAQFGAWLGLTPRQNSSGGKTSLGGITKRGDNYLRTLLIQGAKAVVLTGKHNDDPISQWAQRLRERCGWQKAVVALANKNARILWAIMTKDESYDARHVSTRATAARPIAA

SEQ ID NO: 406437 - protein, 401 aa, unidentified
MVSDFRKGRYNLMKIYVGIDIAKLNHFAAAISSDGEIILEPFKFTNDADGFQLLVSKLESFDKNSIIIGLESTAHYGDNLVRYLVAEFYQVCVLNPIKTCQMRKNNVRKTKTDKVDTFVIAKTLMMQDDLRFITFFDLDMMDLKALGRFRQKTIKQRTRLKIQLTTYVDQVFPEIQYFFKSGLHQNAVYALLKEAPSPKEIASMHMTHLANLLKVNSHGHFTKEQAKELRVLAQKSVGANDSAISIQITQTIQQIELLDSQLEKIEAEMTDIMKFNDSVIMTIPGIGYINGGMILGEIGDIHRFSNPNKLLAFAGLDPSVYQSGNFQAKTTRMSKRGSRVLRYALVNAAWNVVRNNATFKAYYDAKRAEGRSHYNALGHCAGKLVRVIWKMLTDEVEFNLE

SEQ ID NO: 406438 - protein, 481 aa, unidentified
MKPKPKEKSKQATRPTPSKWHEMNRKQRREMTRKIQSEDLSLEVVHPAAGGIDIGNESHYVAVPPSRDSQPVQRFGCTTAELKAIADWLKQCGVQTVAMQSTGVYWIAVYDILEAAGLEVYLVNARETKNLPGRKSDVQERQWLMKLHTYGLLRNSFRPSQEIRTMRTYWRQRNDLVQSAGRHIQRMQKAMTQMNLQLANVLSDVSGVTGQAIIKAILAGERDPHKLAAFRDCRVKASEEEIARSLEGNWQEDLLFVLKQEQAGYEFCQKQMAECDRQIEQYLQQREDRSRGAILPEEKRKERLKKKKGNKPQFDLRAELFRISGTDLTRIDGIDVMTAMTILSEAGWDMSKWKTEHHFVSWLRLCPDNKVSGDKVIGKGRLPTNNRVTIALKMAASTLWASNTYLGAQFRRLKTKLGAAVATKAMAAKLARLVYRMLRYGMPYVDRGAEFYQAQHRQLQIKYLKWKATSLGFQIIQVPAA

SEQ ID NO: 406439 - protein, 337 aa, unidentified
MKRYFGVDLHRTQFTVCVRQEGQVVEVRQWRIEQLPQFVEQLQDDDELAVEAMGTTARFYDAVVSAVGRVAVVNPHQFKVISESVKKTDRRDAEQLALYLEKGLLPEVRMKEPKQRELQQLLETRDLLVKQRSALKAKINNVLAAQGINLKREALSSRKALQRVLAVEASAMVKLELRVLVEQIAHLNAGIKEVEKQILHEGKQLPGHKNLTSIKGIGRLSATVLLTAIGPIQDFADENKLAAYLGLVPKVQNSNESQRSGGITKRGNKLARTALVQCGLVAQRHSPYLKQRYERIKQRRGGGKAKVALARKLVKIVYDTLKNDWVFADFPSFTLAA

SEQ ID NO: 406440 - protein, 340 aa, unidentified
MDKLDFAGIEVSAEQLVVALQREGKGKNLKTFANTAAGHQALIRYLSCAGRTVRAVLESTGLYGLDAALALQRAGLEVMVANPRAVRHFAQALMKRSKNDRLDAEVLMEFAARMPFRAWEPPRPAALQLHAVARRLEALTEMQTAEKARLDALQATDTTPAALLRDLARSLRSLRRALARLSGEALKIIEQDPGLKLRFHLLISAHGSIAETSAIRILAEMVLLAHDLDVRQCVAYAGLDPRECTSGTSVHKKVRISKAGNAHLRRALYMPALVAIRHQPHLRAFYQHLRAQGKPKMVALVAVMRKLLHAIYGMFKYQQEFDGSKVYSLPEAEISTKEAA

SEQ ID NO: 406441 - protein, 419 aa, unidentified
MESVQGTVAGLDVHKKTVVVVVLQSDYSDEDHAAGVFGTTRYGVNELIAFLRQHGVTHAAMESTAQYWRPVWMALEGQFTMTLAQARSTRAPRGRKWDKADAQRIAKRLLSGDLTVSYVPPPEQRDWRLLSRTQVAMHESVVRVRNQVEVLLEQAQIKLSSVVTDILGKSGRRMLDALVRGVSDPVELARLGDRRLHASKEQLADALSGQLTEAQRIVLKLYLEQIDLIERHMAEIDESLAQALVPHQDAIERLCEIPGIGVRTAQHIVAETGPRAEVFDSAGKLASWAGMCPGQQESAGVSVSSRSAKGNWMLRRTLCQTAWAAIATKGSEAQRRFHRWRPRLGTQKAAWAIAHYQIRIVWKVLHDGVRYRSPDTEVMAQRALLARAKRAINDLRRLGYAVSITPPETQTAGALGLPG

SEQ ID NO: 406442 - protein, 345 aa, unidentified
MELHTIGIDLGKTVFHLVGLNRSGEVVVRKKFSRRQLLQFTANLHVDLIGMEACGGAHFLGRSLRGQGHEVRLMPAQYVKPYVKTNKNDYIDAEAIAEAVARPTMRFVPIKTDEQLDMQSLHRVRERWVMRRTAIINQIRGLLLERGITLRKGRRHVDGALPGILEDADSKLSGALRVLLAQLKLELDQMAIRIDEADAVLNKTAHENEACQRLVAIPGIGPITATALIAAIGNGAAFRKGREFAAWMGVVPREHSTGGKQKLLGISKHGNSYLRRLFIQGARAVLQHRTKQAPGLSEWLAKLASRTHHNVVAVALANKLARIAWAVLAKEERYQPPALISLEAA

SEQ ID NO: 406443 - protein, 483 aa, unidentified
MRPTLFSKGDALNNKGKKITKKTHPISGLPSEFEQINLNAAGIDIGAQKHYVAVAKGRDPEGRDIRYFDTFTVDLHALADWLKHCGIDTVAMESTGIYWIPLFEILEQNGFEVKLVNPRSIKHAPGRKSDVVDCQWIQQLHAYGLLTSAFHPDDQISVLRAYHRQRTMLVNHAGTHIQHMQKALEQMNLKLTNVISDITGTTGMKIIRSLLAGERDPEKLSKHRDPHCKKSEKEIAKSLHGNWRDEHLFALQQAVALYDFYQTQIMDCDKQIQAQLCRFEDRSDTGELPPAASKSSGSGKKLTFDAREHLYRMAGVDLTQIVGLNTPTVLTVLSEVGLDMSRWPTAKHFASWLGLCPGSKISGGKNFSSKSKPSANRAAHAFRMAAYSLHRSQSAIGAFLRRKKAQLGAPKAITATAHKIARIFYEMLKTRTEYKDLGVDYHQNRYKERMLRNLKRKAKEFGLELVNPNQDQLVMASSKGLVP

SEQ ID NO: 406444 - protein, 395 aa, unidentified
MFIVGIDIAKRSHEAIIIAEDGQVVRKAFSFRNNCTGYNLLLEQVRRLTLVKSQIVFAMESTAHYWLALYARLLKDGYTVMVLNPIQSHSLRELYIRKAKTDARDSLIIADLVRFGRCKASNVPQDKILALRELCRSRAYLVDMAADLKRKLTALLDRIFPEYESLFDSVFSKASIAVLRKYSTPQKVKNAHLGKLTDLLTESSNGHFGEWKAHQLKEAACSSFGIDDSGGVYSTLLGMFLEQILSLTAQADSLEKQISVFFQEFNNPLTSIPGVGTVLAATILSEIGDITRFSSADKLLAYAGLDPSVKQSGEFKSNQNRMSKRGSPYLRRAIWLASTVAVHRDPMFQTYYEKKISEGLHYMNVIGHVSRKMTAVIFAVLRDGQPYQPILQSAG

SEQ ID NO: 406445 - protein, 337 aa, unidentified
MAKVFAGLDVADRTTQVCVVDNSGRTIFECITDTEPIALVNALKPFRRVLGAVGMEAGVKSAWLYKGLTAKKYPVYCLDPLQTHAALSARRNKSDKNDANGMALLLCRGIFAATYVKSYEARRTRTLLVHRKALQRKAIDVFAALRMTLKSFGASVDIKGKTPKVVMAKRDTEILALAASMLRAHAALKAEYLFLDSMARKQAAADPVCRRLMTIPGVGPLTALTFRAAVDDPERFHSSRNVAAHFGLTPRRFQSGEHDVMGSISKRGDRAVRSVLYEAASVLIAVSKSKAPLRQWATALAARKGFKVAAVACARKLAVIMHRMWITGRDFDASPAA

SEQ ID NO: 406446 - protein, 342 aa, unidentified
MKNMMIGVDLAKRVFQVHGALMTGEVQFRKKLSRAQFRVFMAKREPSLVIFEACGSASYWAREMEAIGHEVKLIAPQYVRPFVKRQKNDAADAEAIAIAARQPEMRFVAPKSINQQARAALFRGRERLVRQRSEDVNALRSILYEHGHVFPVGLGHLKRMEALVDGETCDLSTMIREECRDLLAQIAEKTERIATRDKKLKELAAQSDKARRLQTMPGVGPLTALAIEAFGPDMTQFKKGREFAAWLGLVPQQHSSGGKERLGRITKAGQADIRRLLIIGAMTRIMGHARRKIPAESWIGKMLVRKPKMLVAIALANKMARQIWAMLTKNEDYRDPVLAAAA

SEQ ID NO: 406447 - protein, 407 aa, unidentified
MQATPTTSCYAGIDWSWQHHAICVVDNDGHRIAEVTVAHSRPGLARITALLRRHGVTRVGIERGDGPVVEHLIRDGFEVVVISARQVKSLRARYGSAGNKDDRFDAFVLADALRTDSGRWALVRPDTDETIALRMLVRARQDLLGHRIAVHNQLLAVLQHNFPGAIGLFSQLDIPISLRFLRRFPSEAKASWLSEVRLAHWLKANSYFGRTPPVDLIEHLRNAATGRVTGAAAAASELIVLALVDLLTQLREQQAQLETRIKEALLAHPDGPIFQSLPRAGTVRAATLLAEIGDCRARFPDPAALAAAAGVAPSTRQSGKHRNVAYRRGCNKQLRHALIDWAQDTPRANAWAHHTYYRARDRGCRHPHAARILAQAWTRILWRCWHDHVPYNPDLHGRLNALTQEAA

SEQ ID NO: 406448 - protein, 350 aa, unidentified
MLIIGCDFHPRYQQIAMMDTETGELVERRLEHENGEARAFYASLPKPVLVGMEATGYAQWFERMLAEFGHELWIGHASEIRAGVVRKQKTDARDAHHLLRLLLEKRFPRIWIPSPAERDARQLLRHRYKLVCFRVSVKNQLHGLAMSQGVCRKKKLFTAKGREELEKLSLGPWGSRRRQELLGMLDQLNPVIEELDRAVQQQAENHADAARLMTHPGVGPVTALAFVLTLGPVARFPRSKQVVSYLGLNPKERSSGDKQHTYAISKQGNTMMRWLLVEAAQTAVRFDPELLRVYQRLKFRKGANVAKVAVARKLAVKLYWMLRATASCAQQAPMQGSSRGTLVPQVGSSF

SEQ ID NO: 406449 - protein, 339 aa, unidentified
MKKVFIGIDFSKLKFDAVLIIEVSTQKTVHQEFDNTPSGYQDFVLWISRHTNLPSQDWLICGEHTGLYSYCLTEYLNESSIDIWLENPVQIKRSMGLTRGKTDKADALNIALYAYRFRDKAQSTKLRDKALEQIKDLMAFRARLTDMKTALQIPANELAQVKTNESVFDIVSESLLFCHYIQNLIDTIEQRIKSLLSNHELLYQNYDLLLSVKGIGFVNAVMMLVITNNFNEFDNPRKFGCYCGVVPFCHQSGTSIRGKDRVSQMANKKMKALLTQAALAAVKHDPKFKSYYIRKLQEDKDHALIINNVRNKLIHIMFAVIKNKKPYDQNYINTNNNVA

SEQ ID NO: 406450 - protein, 491 aa, unidentified
MAKRKQQSTFERLTSGKLNRKQRKELIRKIEAEDPGLEVIHRNAAGIDVGNESHMVSVPPDRDPQPIQEFGSWTKGLQNMADWLKACGIESVVMQSTGVYWVALYDVLEERGFKVCLTNARDTKNLPGRKSDVQEAQWLRKLYSYGLLRNSFRPPEQIRSLRSLWRLRDRHVKDAAEEIQHTQKALTQMNVQLANTISDVSGVTGQAIIRAILRGERNPYKLADLKDYRIQASREEIARSLEGTWREDMLFELQQVVDRYDFCQQQIQQCDQRLQVLLAAIPSGPAMPAAKAEETKPDSQLNADSQGRKSKPRGAKAPRKNQPTGFDLAAEVKRICGVDLTRIDGVKVMTVQTFFSEVGTNMSIFPTEGHLLSWLGLCPNRQVSGGKLIRHERKKNKNRAAAALRMAASTLEKSDSYLGARFRYLRARLGPGKTIKAMAAHLARLIYRMLTRGEEWVDRGAAEFEKRRKFRQQHSLERLAKELGYTLMPAA

SEQ ID NO: 406451 - protein, 434 aa, unidentified
MSVFLNDFVVGIDVSSEFSVVAMLDPNGSLIRKPFRIDHNPAGFNKLLTILKKEEERLKQKPIYFVESTGIFHLPLFFFLKSNDLKGFVLNPLCVHSTKNFDLRKVKNDAKDAEAIARLAKFQDVKYSLVPEPQILALRMLLREYYAISDMLTELKNRLCTDLYLLFPGYLEVFGNPFGKSSLKILRDYQTPQDILSENPDTLAQMIAKNSRKGLTWGQKKVAKLFDMATLCLSMPMDFTCLSRKIQYHLDGIETFQANLEGLKKQLAEMIASDAFPQNVRNSIALLEAMPGIGFLTAATLLAEIGDFSRFHSPKALVAFFGLDPSVNQSGKFNGDRNKISKRGTRFGRRVLFTAALASIRTTCKGNPINPILRDYYQKKCLNKKKKVALVAVMHKLLHYIFAVLRDQKPFIFRRPEEHQTWRNYKNSGLSLAA

SEQ ID NO: 406452 - protein, 391 aa, unidentified
MQDEEDFNMSLQNAPNINVDGKMDVSNIHFINENAGGAFMAKYNIGVDYHKKFSYLVVKEEKGRVLRSGQITNSKKAVADFLKPFKDDSTAVLESCRNWCVMHDWLEDIVDDVILANPYKVKAIAEAKIKTDKIDATVLADLLRADLVPQAYIAKRPVRDMRNLLRERIYFVRLRTMTKNRITTIFDRYPEEVRKEKAKTDLFGKKGRAQLENIELRPADRALINRELNFIDFINVFIKEVEEVIAENFQISKNAKYLKTIPGIGQFFSMLIDAEVGDINRFRNEKKFAAYIGLVPSTYSSGGNTVNGRIIKRGNKLLRWAFIEAVIPAIAHDEYMRWEYDKLRERMNYNKAKTAMARKLSSIAFKCLKEQRNYKKFNKIELEYKKLGRAS

SEQ ID NO: 406453 - protein, 398 aa, unidentified
MTESNDYESVQVFIGVDVGKDTHHAVAINRSGKRLFDKALPNDENKLRSLISDLKQHGQILLVVDQPATIGALPVAVARSEGVLVGYLPGLAMRRIADLHAGEAKTDARDAAIIAEAARTLPHALRTLKLADEQIAELSMLCGFDDDLAAQTTQASNRIRGLLTQIHPALERVLGPRLDHPAVLDLLQRYPSPEKLASLGEKKLAAQLCKLAPRLGKRLAADIAQALAEQTVVVPGTNAAAVVLPRLALQLITLRKQRDEVALAVEQRVLAHPLYPVLTSMPGVGVRTAARLLTEVACRAFASVAHLAAYAGLAPVTRRSGSSIRGEHPSRRGNKALKRALFLSAFAALRDPLSRAYYTRKMSQGKRHNQALIALARRRCDVLFAMMRDGTFYTPQAS

SEQ ID NO: 406454 - protein, 547 aa, unidentified
MDCCVGKFQVHTFTFPDYGVSKMYHVRRSGRKQPKAKPRSKQSLQKPNGVISPRVQKVGGEHFAIVCVDPAKHRSEWMMADYFGNLLIECQTVEHQSVFFKVAVEMIRQAQQQHDIQDTIVVVERTGNYHLPPKRAFASAGFDTRVVHPFATKQYRVPANPGIKTDENDLYAQHRAAVAGFGLCELELEPPFRDLQLRARHRRNLVEKAASLACQIREHLHLGMPGYAGLFDRLFETPTALVIAARCDSPAKLIQLGRNRLSRYLSKSKVRHQLRTIDKVLAWAAQAADDPIQDGPMHHAIWTDLHELYQHIQRQIVALEQELAGDVVQTPYVRLMAIPGINVVSAAELAAEMGPISGYANANAITGRAGLFPSRYQSDQTDNDRGPLIRQANRRLRCVLMRIADNLACHCAYYRGQAEVDKARGVDKRASRVKIAKRFSRLALACVAGDEPMRHPCFQKPDSILDKLRRFHHAHQTPMDVLLTDLEAAVEQLPYNTCNHEAEIVADVLEQHTRRRRGAGLIGDVLPAVLARLNIRTTEANKNRDRS

SEQ ID NO: 406455 - protein, 391 aa, unidentified
MTAVVIGVDPAKRSHAMAVLDEREEQLAALQVGNDSDGYRAMLALAKRWRNRVWAIEGAGGVGVQLAQRLVADGETVLDVPPKLSTRARIFDRGHGRKNDPTDARTVAVVALRTKGLREVVLDDELIALRLMSERRADLVRTRTATVNHLHQLLMELLPAGAERKLTATKAKALLATIRPRDVAGRTRRQLAVDLVEDLTATDRKLKDLDKRLREAVEATGTTLTEIKGVGVATAAMVLGEVGDVRRFPSKHHFATYNGTAPRDYSSGGVDTRRLSRAGNRKLNHALHIIALSHKRYDQRGGEYYARKLAGGKGKKGALRCLKRRLSDAVFRTLVDDREKRQAAGPEGQSGATTTSSATDRTPMVSTSEKPLTGPAEADATPERVLSLAPA

SEQ ID NO: 406456 - protein, 387 aa, unidentified
MARKRTLSTLDTSISYEAVGLDLAKEDVALAAFDPDHKEPYLIDRISYDKLYALLADMAPTLVAMEPCSGAHQIAEQIEALGHEVMMISGRHVQAWVKDHCNGQKTDLNDAFAILNLAYDRWLTPIRGKTREECRLLALKTAYRQLKGQRTKTMVHVKATLHGWGFPIRTGSFNQKVLHELLDANRETFGDEVAEALHLMINRVRDLDHDIAAVLKLLTEATKRDPRASLLRSIPGFGVMTTSRWCSVMGDVARFESPKQAMAFVGLVPNNKITGHHTETSSGREARGQGKMSKRGDKMLRSLCILGAGSLCLMVRNGRLPDCLFVACIKERLASPRPWFKVLVYVAAKLVRIATALLKYGETFSFEKAGVSKAVLKQWELEQAKAA

SEQ ID NO: 406457 - protein, 343 aa, unidentified
MDHFAGLDVSVKETSLCIVDDTGKIVREVKVASEPEALLHVLMNPAYHFKRIGLEAGPLSQWLFGALAEAGLPVICVETRHMRAVLKAQINKTDRNDARGMAQMMRAGLYRPVHVKTIRSQKLRMLLTHRKLLQSKAIAIDNDLRATLRNFGLKVGTVGRAKCEARIKELVEDLPDLVVLVEPLLIVRRVLREQVGILHRRLLAIVRDDDVCRRLMTVPGVGPVVALTYRATVDVPARFRNSKAVGAVFGLTPCKHQSGEVDRTGAISRCGDEMMRMMLYEAAQIVLVRSAKWSWLKAWAMKIARHRGLKKAIVALARRLAVIMHRIWVDGTEFRWTRDVAAA

SEQ ID NO: 406458 - protein, 523 aa, unidentified
MATKTRKNKNSKTTVRFIGKPTGQIQERVQKVGPQHFGIVSVDCAKRRSKWMLCDFYGRVLVEPTVVEHTRSGLDMMTQSITIARQTHHLKDLIVAVEMTGIYHRPVQRACRDAGFETRLVHPFASKHFHKPLHTDDKTDDHDLEAIFHAVAQGYGLEIKPLDEIYLSLQLLTRHRSRLVKQKARLQIQIRQLMHQSMPGYADLFEDDNFFNKSIAISVAKKFSSAKEIHDAGVKGISAYLKKNKIRFQAPTVEKIVAWASNAADAAPLGKMLTMQWLELNDLRFQMVENVVRIEREMAGFLAKTPYVLLLSVTGINVVSAGALAGEAGPLNRYANSRSMIGRAGLFPSRYQSDEVDRPNGKLVRQGNKRLRVALLTIAENLIKCHSYYRGYSALLTQQKVHPRDRRCRVANKASRMIFQIVGGRQVWRGKGVDREYLLYKLKEFHRTHRSPATQTVGDLNEAFKWLPKSSYREEAEQLSVAAGKRRRGVTSLGDLLVPLLIRLGVPASDEVDSSSSEARDSH

SEQ ID NO: 406459 - protein, 430 aa, unidentified
MNHSDLKTIEFAAYIGLDWADQKHDICLQENHSPRVESLRLDHKPDAISNWAAELRQRFQGRPLAVALEQKRGALLYALMRFEFMVLYPINPKSLASYRDAFTTSGAKDDPSDALLLMEMVRLHRDKFQPWIPDDPLTREISLLVEYRRRLVDDRTRLTNRLIALLKQYFPQALNWAGKLGSLPAVDFLTQWAQLETIQRASADEVQDFYRQHGFRLGKKIQTRLDEIKAARPLTTDQAVIAASASMMRALLGPLRGVIAGIEALDQQIEACYEQHPDRQIFDSLPGAGPALAPRLLAAFGADRERYRSAEEMQCFSGIAPVTKRSGKTTFVQRRLACPQFVRQSFHEFAKSSICRSSWARAYYDQQRQRGNKFHEAVRALAYKWIRIIYQCWRQSVPYNEAVYLARLELRGSLLAKLVSSDGCKNQELS

SEQ ID NO: 406460 - protein, 397 aa, unidentified
MSPHTRHEAAAPTGAEATTLYVAIEISRKSWVVGIKSPLVEKIGLHTLGAADVAGLKSLIEERRGRAERTMGQAVAVRVCYEAGYEGFWLARWLERTMGLETVVLDPASLLVNCKAKQRKTDRIDATKMVRALLAHDRGDAAVLSRVRMPSVEEEDRKRLLRERQRLVKERTSLTNAIKGLLKLHGIFDLEPRAGDFDAAFAAVTTAYGEPFPPQARREIERLAERLGLVMRQIEAVEAERDAAVRRTEADRRGAAGAGSRARADASIAALARLKGIGTNDATLLTHEVFYREFRNRRELAGWAGLAPTPWASGDVERDQGIGRDGPAWIRAQLVQMAWRWVRFQPGSALSQWFQARTAGARGRIRRVMIVAVARELLIALWRYANTGLVPTGARVA

SEQ ID NO: 406461 - protein, 354 aa, unidentified
MADYREAFVGIDVAKLKNAIAVAESGREGEVRYFGEVDASYASMRRIIQRIAAKFDRVHFCYEAGPTGYGLHRLIQSLGHECMVIAPSLIPRKPGDRVKTNRRDALALARLLRAGELTAVWVPDEGHEAMRDLVRARAAAVETLRVHRQQISAFMLKHGRIYPRKKGWTMRYLCWLQEQQFDHPAHQIALQEMVEAVRVSKERVERLEKVIEEFVPNWFLAPVVRALQTLRGVDLIVAVTFATEVGDVSRFESPRQLMGYLGLVPGERSTGETVRRGAITKAGNGRVRHMLVESAWTYRHPPKVGARKLYRLPQAPPKVREIAWKAQSRLTARYRMLTGRGSERRWFVPPLPAS

SEQ ID NO: 406462 - protein, 420 aa, unidentified
MICAGVDIAKVDHVIGAVDERGSEACGPMGFKNSAAGFERCEAWLEGVAASPADVPVGMEAAGRYWMALYAFLASRGYAVAVIDPLQARAVRRFKGLGGVKNDRVDAGLIAEAMRMGRYDPARLATDDARSLRTLTRYHQSLKSGLAEVKVQCACLLDAYFPEFSGVFSDMFGAAGRAVLSRSPLPSEVRRRRVDSPRRDISSAARGSRRVDGKAAEIKELAGRSAGIALGERAASLQVRSLVRQMDFLDAECAKIEAEARGLLDRVEPLVLTIPGVSYTTGAQIVAEIGDVSRFRNASAPVGYAGLDSSVRQSGMFDSGGGPITRHGSPYLRRALWLAASWARLHDPSLREFYERKRAEGKRHRVAVTAVARKLCHIVFAVTRDQVPYDPSRPGRDPSKHSVSGSQGAAKSKTKSKTEN

SEQ ID NO: 406463 - protein, 321 aa, unidentified
MTQSISSGLFVGIDVALDKLDLGRSDSDKLPSFPNDADGIRQVVDTLRAAAPQLIVVEATGGLERPLLDALLDAGLPVSLVNPAHVRHFARGLGIRAKTDAIDARVLAQFARLASPRQAQKRSANQAELEALVTCRRQLTHVRTEQTNRRKRTSSKAALKAIDAVLKAVDTQIETLDAQIRKLIESDDDFNSIDQLLQSVPGVGGVLSATLLAELGELGSTDRRQISALVGVAPFNHDSGQLKGKRAIRGGRTAVRSVLYMATLAAIRFNPIIKIFAERLKKAGKLNKVVIVACMRKLIALLNAMLRDRLPWDQLNLVKNL

SEQ ID NO: 406464 - protein, 381 aa, unidentified
MNPEITRTINDTPQPQYLYMAIELSNDKWKLGFTVGFGQAPRLRDVYARDLVALTKEIAMAKGRFDLSANTQVRSCYEAGRDGFWLHRFLQAQGVTNLVVDSSSIEVNRRKRRAKTDRLDVGKLLTMLLRYCQGEGRVWSVVHPPSPDNEDQRQLHRELMALKAERTHLVNQMKGLLACQGVALPIQRDFLSHLERVRLWDGSPLPVALHARLKRDHGRYELVKKQIHQLEGERAETIRTAKGPVLDQVRQLLQLKGIGVESAWMYVMEFFSWRDFRNRREIGSLAGLTPTPFKSGESHREQGISKAGNHCIRAMAIEIAWAWLRYQPESKLSLWYQERFGRGNSRARRIGIVALARRLLVDLWKYLDRGILPEGARLKSA

SEQ ID NO: 406465 - protein, 304 aa, unidentified
MFGIGIDVSGENLDVAVHEQAFRQFKNNKRGWASLIRWLQRWPAKQVVLEASGGYEQKALDALHEAGLPMVRINPGRGRSFASATGRQAKTDRIDAMVLAHMADALKLTRYVPPAAWQRRLGELCQRRRHLVQMRVSEHQRMRAFSEPCLISMLNQYLDEIQKSIKQLDATIAALLAEQDGWRDFAKLKGAGPVLMATLACELPELGKLSGKAISALVGVAPMNRESGTWKGRRNITGGRAVVREALYMAALTAKRYEPRLKEFFESLVNQGKPGKVALVAVMRKMLVILNARKREAEAQMASA

SEQ ID NO: 406466 - protein, 429 aa, unidentified
MRLSDYLFVGIDLHKQTHTAMILDSCGKELGTITFENVPSDFSKLERKVKKCIQKIKLSQGVEVEAFYCLENAYGYGRALAVWLIDKEYVVKDVNPALSNRQAKHRAMYRKSDEDDARAIAMAGIHEFEKLPDACPLDEYWSIQQLVHRRDTIMNQRVRLVNQLHEQLHRAFPYYKEFFQDISRPTALHFFETYPSRKYLVGVSAEDIRDELLPVSHNKCSTKVCQNIYDIVSADTSKLCEYQDSRDIVTRGIISDIQHSNKMLAEIDSELERLYKELGLTLATMPGMKIIMSMKLIAEIGDVRRFMSSEKLAQYAGIAPMPYGSAGKNRDYATKQGNRRLQATIYYLAVQQIQISPSGKPRNAYFRTNYEQKLLEGKNPKQALICISRKLVKVIYSMLKNKTSYVMPEYLESREDKASDSCSITKEAS

SEQ ID NO: 406467 - protein, 428 aa, unidentified
MIANSAAAPRGTFVAIDVAKLVHEVLVEPPTGRRQRWRVGNCLPDFVALRDRLHAFQAPVLIGFEATGNYHRPLAYYLGQCGFELRLLSSLAVARTRDALYNSWDKNDPKDTQVLLHLLKTGVVQRYHDPLVHRMNDLQELAQTHYQVSLRKVQVQHSIMTHYLPLYFPEAERYYTNSRAQWFTQLLHRFPCPTAITRYSQDAFEQEAWTVVGRKVNKHGFLADLYATASQSIGLAVAEDSEAIQMFRVMLAEHQHLCATRAAIEQQADQALRAHPDYQRLRTLPGVGPILALTILAEAGDLRRFPHHRQFLKFCGFDLSTQQSGQFRGTSRLSKHGNARLRYAFWMAANGAVRMRQNTFREKYARYIKSDPQNPDRKRKALCAVAAKVARVAHGLIKTGSDYRPYFEALPPSGVLRSRGPSRQVLTS

SEQ ID NO: 406468 - protein, 319 aa, unidentified
MSESAVVEVFVGIDVSKNTLDVGMDLGNEFFRVSNDDAGIQDLCRRLQTLLPTPTLVVMEATGGLEACVACELTLQGFAVAVVNPRQARDFAKATGHLAKTDRIDALLLARFARAIRPEARPLKDTETQELADLLSRRRQLVDNRVQEELRLHSAKMLRVRKNLKAHIEWLNKRISELDDDLYGHLQKSPAWKEKDDLLQGIPGVGKVTSLAVIARCPEIGTLNRREIASLVGVAPHACDSGKFRGKRAIWGGRADLRAVLYMAALSAMRSNPGIKRFAERLKAAGKPAKVVIVACMRKLLTVMNAMIKNNTPWQSDFA

SEQ ID NO: 406469 - protein, 321 aa, unidentified
MTTDTVHIGVDMAEDTFDAALPSGILHLENSPAGFRAFVRALHKLGQAVCVYVEATGGCEQQMCDYLLEHEIAVAKVNPKRVRDFARGLGKLAKTDPIDAAVIGEYGRQAKPRCLAQESAYQRSLSALVRRRDQITALINVETNRLGRCSDPWVKKSMESSRRFLKKLQKCAEEAIHALIAEHAELAQRTECLTDIDGVGTTTACAVLAFVPEIGTLSRNESAALVGLAPFNRDSGKFKGHRMISGGRPEARRHIYMAALSASKHNHVLAPFYNRLVKAGKPKKVALTAVMRKLVAYMNHKMRKLSEHTEPLPVSASAAAH

SEQ ID NO: 406470 - protein, 369 aa, unidentified
MEQSIIYVGLDVHKDTIVVALAEAGLRGEVRQHGTIANTADALKAVAVKLAGKNRALRFCYEAGPCGYGIQRHLSAIGHECAVVAPSLIPRKPGDRIKTDRRDAINLAKLHRAGELTPVWVPDQAHEAIRDLVRARQAAVRTLRQARQQLSGFLLRHGHHYHRPAWTLLHRRWLASLKFDQANHHIVLEDCIAAIEAATARRDRLEAHIEAALPGWSLAPVVQALQALRGVGLVAAATLMAELGDITRFSNPRQLMAYLGLVPSEHSSGRTRRQGGITKSGNGAARRMLIEAAWSYRFPARISREQLLRQERLAQPIRDIAWKAQERLCRRYRTLARAGKLPTVITAAIARELAGFIWAIAKQIQSAAF

SEQ ID NO: 406471 - protein, 394 aa, unidentified
MKLVGIDVGKNSHYFCVMDKETGEFNVTPTSFSNNKEGFDFLINSLKPYSKKSILIGMEDTGHYHVALLKFLLSNGYTVALINPKTTDLTRKMEGGITKNDKLDTITICNVLDTPERKKQYRITKVDRFDLYEQRQLTRHHHNLKEELNIYCNRLQKSIDLVFPEFNTLFSSKYGVIYMNLLKTFGSAEAIASTDIRTIRKCFEIKGRGGRISLTAEKLKECAKNSIGIYSEVETIQIKHLVSQITLIKEQIAEIDKKIEEFSIKNNSPILSIPGISHFSGTSILAELGDIGNYSKPSQIIKFAGVAPYHYESSQYNAQHTGITKKGSKYLRKTLYQIILPVINNNPVFKKYYRLKISQGKGHRCAQGHCIRKLLRIIYHLLETGQSFDPALLR

SEQ ID NO: 406472 - protein, 343 aa, unidentified
MAIVILGIDLGKNICSLVGVNEDGAVVLRRRMRRQTVLTFAAKLPSCVVAMEACCGAHHLGRLLTAQGHTVKLMSPEYVRPYVKAQKNDDRDAEGIAEAASRPTMRFVDLKSQEQLDLQSLHRVRSRLVGVRRTLLNQLRAILLERGHIFPQGRRKFEAAIDTLVADPAYEISSRIRQLVIDIRSEWQALDSRIEALNGEFVAIARHDETARRLVTIPGVGVLNATALVAAVGDGAAFRRGRDLGAWLGLVPKQHTTGGKPKLLGISKRGNKYLRMLFIHGARAAMPSLSASQSPLGEWLRGLLARTHRNIAIVALANKLARIAWATLQRKTSFDLRHLAVAG

SEQ ID NO: 406473 - protein, 416 aa, unidentified
MTHPSTPPTTIATLDIAKHTHWFAVFAPDLTPIIPPHPITTDATALQSVIATLIQLAQTNPVALAMEPTSIYHLPWLHALTAALPPTVTCLLVHPTAVHHARTVLTAGRLRKTDARDCHAMAAAVRDGHGRPWSPPSPQQAHLRAWAAQEAATMHTLTQLAHSLSRLTDLLWPGLVARRSASAALPPLVSSRPWTRQIIQTILLHHPDPHTWRSLSVAAIQARLKALGVRCGPVRATHLAAILAAQVVLPPDQTSPLAARLATLMQQYCHHTTHLAALHAEAETLIAPSWAAVLCSIPGMSPVLAARYAAAVGDIRTITSAKALWSLAGLEPSIYASGVRSRVGQSSLAGRITLRQALIRIGASLSRHCPPVRASWLAARARGKPLAVALIHAANKANRLLFALAISQQPYQPSGA

SEQ ID NO: 406474 - protein, 393 aa, unidentified
MVVSVGIDVSKNKHDCFIVSSEGEVLADVFTIPNNMDGFYALLEKIRACTTPQDKIKVGLEATGHYSYNILGFLLDNGLATYVLNPLRTNLYRKSLSLRKTKTDRVDARTIAAMLLSDVGLKPYTNTAYHNEELKSLTRYRFDKVKERAKLKSSISRLVCILFPELEKLVSSLHLATVYALLEEFPGSKQIAKAHLTRLKTLLGNASKGRYGRDMAVTIRSAAQNSVGSCMPAKSLELQHTIRLIRELDAEIAEIEAEIETMMDKIQSPITTIPGMGFRMAAMILAEIGDFSRFESPDKLLAYAGMSPSTYQSGQLKNCYPHMEKRGSRYLRYALYNAAKYVCHWDPTFAAYLAKKRDEGKHYNVALSHATKKLVRLLFALERSRQPYCSLAA

SEQ ID NO: 406475 - protein, 340 aa, unidentified
MVHVGVDLHKRMSQIAVLTEEGEIAQRRLANDPERLEAFFAQLPPQTPVAIEASGTWWWLVDLLERGGHRPVLSNPKQTKAIAAARLKNDRVDAERLALLLRGDLLPTVWIPPAELREARELIRHRVQLVWLRGEVRNRLLAMLARRNLQPTSGKSWLTVRGQRELQALPLTPIATTIRADCRALLPLLDEQIRRLDDDLRTRWGADPRVRRLQTIPGIGAFIAIVLVMELGDIQRFPTAKHVASYIGLTPRVRASADRIRSGHISKEGNRLLRWVLVLAATQAARQPGPLRAWFRTMKQRRGTKIARVALARRLGEIVYHVWKHDCDYFTMLRRGAVRG

SEQ ID NO: 406476 - protein, 302 aa, unidentified
MGEVSTIGFDIAKSVFQVHGVDSAGAVVIRKRISRSKVLEFFSGLLPCLVGIEACPSAHHWSRELQALGHTVRLMPPNYVKAYLKRSKNDANDAAAICEAVTRPSMGFVPIKSEQQQSILILHRSRQPLVRQRTMLSNAIRGHLAELGIISAKGRNGTAELLRVIANAKDDRIPPVARFCLDVLARQYLTITAEVAAIDKRIHAWHRSCEESRRLEEIPGIGPIVATALVAEIGDWKQFRSGRNLAAWIGLVPRQHSTGGRERLGSITKQGNRYLRWLLVAGPWPSFDMRDSTARSDLGSHE

SEQ ID NO: 406477 - protein, 356 aa, unidentified
MQTQVTKKIDFTGKDLFIGLDVHKKSWSVTIVVGGMEHRTFTQPPDPEALHKYLQRFFPGGNYTSAYEAGYCGYGIHRRLNDLGIKNIVINAADIPTTQKDKLHKRDPVDSRKLARGLEKNSLRGIHVFNRDHEELRSLNRTRFYLMRDLRRSKNRIKSFLLYYDIPLPGEFDNNQWSLKFIAWLKQVRLQTTAGQEAFSHLITSYEHHRQQLLILSRIVRLRISQYDKELFNLLKTIPGIGPLTSSALITEIGDINRFPHIDDLGSYVGLVPRVRDSGETTHTGGITFRCNNFLRVLLVEASWQAIRQDPALMQYYHMHVINSKGHKVIIKIARKLLNRIRYVMRNRQPYVTGVA

SEQ ID NO: 406478 - protein, 347 aa, unidentified
MNVTTVGIDLAKLIFQVHGVDGHGKAVIRKQLKRAELMKFFANLPACLIGMEACSSAHYWARKLIEQGHTVKLMAPQFVKPYVKTNKNDARDAEAICEAVARPNMRFVPIKNVEQQVLLGIHRARQGFVKARTAQANQIRGLLAEFGIVMPKGVRFIAQQMPGILEDAENGLPHRSRELFAQLLAHFRDLDHQMNELERQIKTWHRQSEQSQRLEKIPGLGPLSASAVVASVGDAKAFRNGRQFAAWLGLVPRQKSSGGKEQLLGISKRGDTYLRTLLIHGARSVLFSLKRHNNGAAGWLMRVAERRNPNIAAVALANKNARTIWALLAHGREYQPGYVSSSIAVAS

SEQ ID NO: 406479 - protein, 447 aa, unidentified
MEILHERCAGLDVHKKNVKACFASPAEGGKRKKETRTYLTMTQDLLQMRDWLKEQGCTHIAMEATGVYWKPIYNLLEGDFEILVVNAHHIKTVPGRKTDVKDAEWIADLLSHGLLSASFIPSSPQRELRDLTRYRTKLVEERAREINRIQKTLEDTNLKLGDVVSDVMGKASRLILSALVEGESDPVKLASFALGRVRASQEDLERALTGKVTAHHRFLLGEHLRQIEHLDEAIRRVSEEIARRFTLPELPAEEDGRSHAASEPTTEASETPPSSGVLAPLSWQEAVRLVDEVTGISEQVAQGLLAEIGINMDQFPSSKHLASWVGMCPGNHESAGKRLSGKTRKGNPYARRLLIQAAHAAGKSKNTYLGAQYRRLANRKGSKKAAVAVGHSILVIIYHLLRDHSSYHDLGGNYFDERDRQVVQKQLIRRLERMGYQVELQPLAQVG

SEQ ID NO: 406480 - protein, 353 aa, unidentified
MVFVAVDVGKRRCVTCVMGEDGSILDTSSYPNTFLDASLYAKQIVDRYGSECKAVVESTGNMCMKTYEAFESNGVEVKLANPVKTRAIAEARVKTDKLDSKILAHLLRADLIAECYVPSRDVRLSRALLSHRVNITREQTRMKNRIHSLLDKYDLECEYDDIFGAHGMRWLHTLQLNGHDHEILQSLLRQLEFQQDEEAKANSTIAKDALHSQYVPIIMSMTGFDYYSASVLAAYIADISRFPSPSHLASWVGLCPSVYQTGESLYMGRMKGGSRKVKWIMTQAANTAIRSDPRMRAYYERKIRRHHHNVAVTHVANKMLRIIWHMLRENRLYNERKERLYQSKLKRMTHAGQ

SEQ ID NO: 406481 - protein, 339 aa, unidentified
MIYVGIDLHRKWSQLAALDAAGEPQMSRRIPSRPEEFFRVFGELAPEPLEVAFEATFGCSWLIDLLADAGIPAHMAHPLATKAIAAGRVKNDAVDARTLAHLLRANLLPESWIAPPEAREARRLVRTRASLVRLGSRLKCQIHALLADYAVNPELTDVFGRQGRKIMAELRLPEVSQHRLELNLRLIDSLAQEVKLTDQMLKQRFGRDARARRLLPIPGIGLFTSATIVAEVWDVSRFPSPRHLGSWAGLTPREHSSGDHTRRGHISKQGSRWLRWVLVEAVATHALRDPQLRELYMRVRRGSKERDQIARVAVAHRLLTLCYYALGDETGCRAYPVAA

SEQ ID NO: 406482 - protein, 347 aa, unidentified
MVTIGIDPHKASHTAVALDPNGEMLGELRVVADASMLRRLRKWASSWPQRVWAIEGAAGLGRLLAHQLVAAGERVVDVPSALAARARVLASGHGRKSDGIDARSVAVVAQHRGDLLAVAADDHTAVLRLLSDRRDELTGERRRTINRLHRVLRDMHPGGAPRQLSADRAARLLTSIRPASAVDLERKAIARQLIADVRRIDRALLENRRRCEQAIAASGSTLTEIFGISDVLAAKILGHTGDITRFASADHYASYTGTAPVEASSGEQTRHRLSRAGNRSLNHALHIAARVQTMHPGPGRTHYQRKRAEHKTSTEALRSLKRQLAKIVYRQLRHDHLGRPFIDSGLT

SEQ ID NO: 406483 - protein, 439 aa, unidentified
MSTPSLPVLDPHAAAIDVGSEQLHVSVAGGPPKVFGTTTGQLHEMRDWLKAQEVRSVAMEATGIYWLCPYEVLEQGGFEVVVVNGKYVKNLPGRKTDMKDCQWQATLHAHGLLKPGFVPPAHIRRLQDYIRVRTDHITMAASHEQHMQKALDRMNVKIHEVISDLTGESGLSMIRGILDGLRHPAALLALCDRQVQEKKAERMLAALEGTWKEEHLFALRQAYELWKFYQDKISECDEAIEKVLQEIAGPEDPAKPAPPTTKRGGVNSPAIAGLHSLLWRLCGNKDLTVLPGVADYVLLQLLAEVGTDLGKNWQTEKHFTAWMGLAPGSRQSGKRRGSQKRGRNRAGRLFCVIARSVGRSVDKALGGFYRRLKGRRGGLVANLALARKLAELFWRLMVHGMTYVEQGLKKYEEKVAQTEQHLLQKLARRYNMVLQPKAP

SEQ ID NO: 406484 - protein, 344 aa, unidentified
MKHYAGIDVSLELSSVCIVDAAGKVVKESKVETHPEALVKFFKDLGIPMTLIGIEAGPLSHWLHAGLVAAGFETVLLETRHVKKALSASTIKTDRRDARGIAQLLRLGWFRPVHAKSLGSQEVRALLGARKLLQHKLSDIEMSIRGILRGFGLKVGKVTDRTFEGRIRELVTGHEMLEEIAAAMLSARASLLTEFTRLHKAVLRVVRQDEVCRRFMTTPSVGAIVAITYRSALDDPHRITKSKNAGPLFGLTPRRYKSGETDITGGITRVGDEMVRTALYEAANVLLSPRTRFSWLKRWGLEVAKRRGLKRAKVAVARKLAVILHRMWIDGTTFRWTKVEAAQA

SEQ ID NO: 406485 - protein, 348 aa, unidentified
MLIIGCDYHPGFQQIAFVDTETGECGERRLTHREEAEQFYGGLRQRSVRVGMEASGHARWFERLLRDLKFELWIGDAAEIRTKRVRKQKTDRQDAQLLLRLMVEDRFPRIWVADAENRDLRQLLWHRHRLVQMRTRVMNQLHVVALNEGLRRKKALWRPAGRSELESLVLARWASRRRQDLLDVLDQLTPKIQELTRALEEEVEKRPVTRRLATHPGVGPLTALAFELVIGTPERFHSGKQIASYVGLVPSEESSGDRRRLGHISKQGNSLLRFLLVEAAQVTVRSQPQWRSKFFHLAMRRGRKIAKVAMARKLAVHLYWMWRQGLDYGQFEKLGSHAGEPGHRHGVQ

SEQ ID NO: 406486 - protein, 331 aa, unidentified
MNFNLFIGIDVSKSTLDVHLKPIGCYKAFSNDPHGFIAIVEWIMDQAGKFCHKELVFGLEHTGLYSENLILFLDQNDFAFTVIPGLELKRSLGIRRGKSDKADARDIAEYIYEKREKIKLYKLPSQTLDKLKKLASIRERMVKERAAYQVRMDEYLEQFPDSTFETYLQTQQELIHCFNSQIERVEKDIERLIKEDSSLSDQYKLINSIKGVGPQTAIMMIILTNGFSSFDNWRKFASYAGIAPFPNQSGTFNGRTKTNKLANKRIKSLLTMCASTAIQFNPEMRKSYENRVQMGKNKMSTLNIIRNKLTARIFAVISRNTPYVEIHKYAA

SEQ ID NO: 406487 - protein, 341 aa, unidentified
MNNITIGLDIAKSTFHLVQMDKNGKLLKRKQLARKKVADYFANLAPCIVVMEACGSTHYWTRVLIRCGHVVKAIAPQFVTPYRKGNKNDYNDAEAIAEASQRKNMRFVPLKSLEQQDIQMVHRVRERLMKNRTALSNQIRGLLAEYGLVIPKGVHHLKSQLPAFIEAADNELSVNARRYFNGLYEELNKLEQEIKVVDKEILSICNQHNICKQLSTMNGIGPINATALYAGIGDGKDFNSGRHLSAWLGLVPRQHSTGGKANLMGISKRGNTYLRTQLINGARSALRHCDNKTDRVSLWAKAMKGRSSFNNATVALANKMARMAWAMLHHQENYKFSNTQK

SEQ ID NO: 406488 - protein, 342 aa, unidentified
MQVTTIGLDIAKNVFQVHGIDAREKVVVRRQLRRGQVIAFFKTLPPCLIGMEACATAHYWARELRKLGHEVRLMPAKDVKAYVKRNKNDAADAEAICEAVRRPTMRFVRIKSVEQQGQLMQHRTRDVLIRQRTQIINALRAHLAELGIVAAQGEAGVNALRAIVADERDERLPIDARASVIVLAAQLEALQTLIGSIEKRIKMQHRSNETSQRVETIPGIGVLGATAIVATAADPTVFRSGRDFAAWIGLVPRQDSTGGKQKLGPISKQGDRYLRRILVVGAIAVLRRALENPGKYPWLTQLLARRPFKVVAVALANKMARTAWALMVHGGTYRAPELAEAA

SEQ ID NO: 406489 - protein, 390 aa, unidentified
MLKYDGLSHSLTAFDQDSTLVVVVELAASSWTVGALVPGVTRQPTKKMAADKFALARQLEDWREQAEAAGHSIKRVCVSMEAGRDGFWVARWLLERDIEAYVIHPTSIPVPREHRRAKTDRLDVGMLLRAFLGWLRGERKHCSMVKILTREEEDGKRPLRERDGLVGDRSRLINQVKSLLALHGIRGFKAGTKKAAAQLKRLLTAEELPLPPDMLAALERALVRLTLVMAQIAEIDKERMRRLKAAPDQGLHPMIRIIAKVKGVGLMTAELLVREVLSRPLRDRRAVARYVGLTGSPDESGKRRREQGLAKAGNGRVRHVLIELAWRFLRHQKDSALAQWFFARTQDGRGPTRKVMIVALARKLLIALWELANTGKLPEGVSLHSPSLVA

SEQ ID NO: 406490 - protein, 424 aa, unidentified
MKVTYQTCCGVDVHKSFLVATIVKTTGGIEPSYQKKRFSTFNNSILEFKQWLLDNDCHDVCMESTGKYWVPVFNLLEDDINVVIANPKWVKAVKGNKDDTKDSKWIGDLFRLGLVKGSYIPCKKVRILREYTRYRYKLVSCRSSEKNRYQNALTVCNVALDSVVSDIFGKSSTSIIDYLLEQSGSSINHEEIASKLLRSLKSKEDAVIESVEGYQMTDAQKYRMRLVRAHMDYITAEINDVDKMIENMISSNPDFENAVQFLCTIPGVKRDSAITIISEISTDMSQFSSSKRLCCWAGLTPGSNESAGKKKSVRITRAGVYLKPALVQCAHAAVKSDKSPYYKKKYESLVKRRGKKRAIIAIARMILTAIYQMLSTGEQWNPSDLYKIDMPVALVEKQKAKAIKQAKKLLQREGLLPPDEPLAS

SEQ ID NO: 406491 - protein, 358 aa, unidentified
MAKYSLSSLQKFVSGFENESFWIGLDVHKRSYHVALKRSDGQHATWVATASPATFTKQILHLGIKIGAVAYETGPTGFALARALEAAGLQVIVAAASRIPRSVTAGAKCDRLDCIKLADYTAKGMLKPIAIPTSDEEAHRTLLRRRHTLVDSVRRSKQRIKSMLLFAGIEEPKEVTNWSDRAKEALFALPLEPASQLTLESYLRELTFHQTELRRVERELRQLVASTKQKQSVRYLQTVPGVGPTVSTTFALELFCPERFGRAEEVASYLGLAPMVHHSGVKTPRGRLVPVGQKRLRSLLIEAAWMWKAKDPSAAELYNRLLARSGVAQKAIVAVARKLAVILWRLLIEQRPYRIGAV

SEQ ID NO: 406492 - protein, 400 aa, unidentified
MPFHAGLDWGGVSHAMCVIDGVDPVLVRLDVRHDSAGLADMVGRPKRVAAPAELRIAIERPGLGVDTLVEAGYPVIPVHPNVVKACRPRYHAAGGKSDPGDAFMLADILRTDGHRFRPLVPVSDDFLALRALVRGRDDLVAQRVALANQLRNLLEGFWPGAVAIFAAIDSPIALAFVGRYPTPDSASRLGEKRLASFMAQHADRGRRSPADLLARLRAAPTGLAGDAEAGAKGELAGALVAIPERLVCEIAKLSSHIEHAVAQLPDGKIVMSFPRAGRICAAQILAELGDVRERFLMQDQLAAEAGVCPVTHASGKSRGVVFRWACNKNLRLAFTCFADNSRHASAWAAAVYRKARDRGCKHPHAVRILARAWLQVLWRAWRNKALYDPQQRRAAIKITA

SEQ ID NO: 406493 - protein, 475 aa, unidentified
MSRLASRRPRVSEATQPAPSQPTSPPPESASPIPALDSPALLGLDVSQAEVVACLFLPDGKIAARWSEPNNQPGAQALAERLVSLGRQHGFRRVRIGLEATNLYWWHLACFLKGTPSLSTLSPEVYLLNPRLVSGLKKAYSDRGKTDRIDAWFIAERLRIGRLPAPFEADLLYAPLQRLTRFRFHLAKTLAREKNYFLTFLFLKFSAFSQVDPFGDSFGATSSALLEEFTTEELVATPLEELARFLDAKGRGHFADPTELAETLQRAARDSYRLDKLLDEPLSLILGTTMATIKTLQRQIQEVDKTIARELEALPLERRIIRSIPGLGPVWTAGLVAEIGNVHDLDNEASIAKLAGLVWHPSQSGTFQAEDTNLAKSGNAYLRYYLVEGANSVRQHCPEYREYYEAKYAQSPKHAHKRALVLTARKLVRLIDTLLRAGMAYQDPETRQDWKEARSQPHAARPGTPQRARLPAAAG

SEQ ID NO: 406494 - protein, 387 aa, unidentified
MDERHYVGIDVHQGKCVWCLVDATGAVVGEGTVRTDLAGLDLMTREWKRLGVHEVRVGLEASTAGKAVARHLRDGGWDVWMAHPRALKAIAASETKTDRNDARVLAHLVRLDYFPRAYLPSEEVERLRNLVRMREEQVEKFRRTKQQLRALLVGHHLNHEAAKYDDLFGVQALRWLKGVELAEPIEQQRMALLLEEGALYQRQVEVLTDGLAKVGVDQEMVRILQSVPGIDYVLALTILAEVGDVKRFPNRKKFAAYCGLVPKNRDSGDKVGVHARLRHGSPRLKWAFSVAVQALLKTKRGRFVVQFRRLEKRLGRPKALMAVAHRLAFTVYGIWKTGRLYEEGSASLYARKREQLARRAARRATLPSRDELLDKLIRKAAMPGRPA

SEQ ID NO: 406495 - protein, 363 aa, unidentified
MMTNEVTATRRVIGGVDTHKDVHVAAVLDEQGRLLGTASFETTAAGYRDLGRWLCGYGEVLAVGVEGTGSWGAGLSRSLRARGLNVVEVNRTNRQTRRRKGKTDTVDAEAAARAVLAGDATVTPKSGDGPIEALRQLRLARNGAMKARTAAANQLHSLTDTAPEELRARLRGLTTLQRARTCARLRPGDVLTPAGAAKAALRSVATRWLTLHAEAAELSRAIKHVLDTIAAPMLERYGVGYETAGALLCTAGDNPDRLNSEGSYAALCGSSPVEISSGKTNRHRLNRAGDRHANAALWTIVMSRIAAKHPPTITYIERRTTDGLSKREAIRCLKRYVAREIYNDIRTIIAATTNTEHEAAIAA

SEQ ID NO: 406496 - protein, 331 aa, unidentified
MFPVGIDVSKNTLDLCMLYDGIKGRIKTRNIQNNRHSVENILRWLRLQHCSPEDVHVVMEATGVYHERLATELHDAGFRVSLANPHRSREFARGMGIMTKTDKVDAYMLACYAFLKKPHRWEPPAPEIRYLGALLRRRDVLLGDALREENRLEKYLSTDTPADIISSCRRMAQLLREEISNIERQIKAHIKASPALRRDYTLLTSIKSVGPQLGMHMLIVLRSHNFVSAEQAAAFLGVVPIEKRSGTSVRRRPRMSKIGPPQLRAKLYMSALCGKIYNKRMRNIYDEMCLRGKPEMVAIGALMRKLVHWCYGVLKTGTVFNDEDLKPVLST

SEQ ID NO: 406497 - protein, 530 aa, unidentified
MTVNVRTNRRQRRKPHSKSTRRSKQSVHKPNGVIGHRVQKVGGERFAIVCVDPAKHRSDWMMADYFGNLLIEPRKVEHQAASFREAVEMIRQAQQQHDIQDIIVVVERTGNYHLPPKRAFARAGYETRVVHPFATKHYRVPADPGNKTDPTDLFAQHRAAMAGFGLCDFELESPYRELQLKSRHRRNLVEKAVAIACQIREHLHLAMPGYAKMFDRLFQHQTAMAIAACCDSPAKLIELGQAGVSEHLRKKKIPHRMRTIEKVFAWASQAAREQIQDGPLHHAIWTDLYELYQHFHRQIFSVEQELVGLLVQTPYVRLLAIPGINVVSAAEFAGEMGPITRYANANAITGRCGLYPSRHQSDETDRDRGPLIRQANRRLRCALMRIADNLALNCAYYRGQAELDDARGVDKRASRVKIAKRFSRLTLACVGGEEPMRHPCFQEPDSILEKLRRFHLEHQTPIDLLLADLETAVTQLPYKTCNYEAEIVAHVLQRHARRRRVPAPIGDVLPAVLARLNIRTTEANKNGDRS

SEQ ID NO: 406498 - protein, 455 aa, unidentified
MTQRNAKFKLKPRQPRAVLSITHPNAAGIDIGSAAHFVAVPPDRDDEPVRQFASFTVDLNGIADWLQACGVDTVAMESTGVYWIPLFELLESRGFTVLLVNARHVKNVSGRKSDVLDCQWLQQLMTYGLLGGAFRPTEQVCVLRSLWRQRGMLLRSQAKGVQHMQKALTQMNIQLANVISDVVGQTGQKILRAIVAGERDGLVLGAMKNVRIHASAEDIAKSLQGNWRAEHLFALKQALAAFDFVGTQLAECDREIEAQLKSLQVHDGEPAKDKKRGGRSRNAPKFDLRTQLFKMCGVDLTRIDSIDVTTALAVISETGADMSRFPSEGHFASWMGLCPGTKITGGKVISGRTKRSANRAAQALRLAAASLRTSQSALGAYYRRLCARMDKPKAVTAAAHKLARLIYRMLTKGEEYTDRGQAYYDERYRERVLRQLNRRAQNMGMQLVPVQHAAA

SEQ ID NO: 406499 - protein, 387 aa, unidentified
MGRVIIGMDPHKRSATIEVINDREQVLAQGRFGTDRDGYQTMLKLGRQYKDRVWAVEGCNGIGRHIAQRLVADGETVLDVPAKLSARARVFATGQGRKTDPVDAHSVAVAALRTNGLRQVVVDDTAVAMRLLVDRRDGLGRSRTEALSRLHHLLLELVPGGAKKFLSAPQARALLNTVRPRDIVGRTRHRLASELVSELAAIDKKIKAANAQLTELVDATGSSLQDLNGIGPSGAARLLGDIGDISRFADRGHFASWNGTAPIDASSGDQRRHRLSRAGNRRINRVLHIMAVVQLRHDTEGRAYYRRKLAAGKTPMEAMRCLKRRLSNVVYKRMVDDAKRRRTGPGGHAGATLESSAAGPIPTADTSEQSLPGPVDHQPRTSLLAPS

SEQ ID NO: 406500 - protein, 334 aa, unidentified
MEKISVFVGLDYHQESVQVCVLDSGGRVLGNRTCANDPRLVAEYVATHGGVRGAAMESCEGTADFAEGLIAAADWSVDLAHPGYVHRLRQNPDKTDYSDARLLADLERVGYVPKVWLAPQAIRELRRLVRYRRQLVNERRNVKLRVRALLRAHRRGCAAPRWGVAWFQWMRDVDLPEQSRWILDRHLERLRQLNGDIQGVEGRLGVVTKDDAVVQKLLTLPGVGSVTAWVLRAEVGRFDRFRSGKQLARFCGLTPWNASSGSRQADAGLIRACNDDLRSVLIEAGHRLKRCDPRWSALANQLRQAGKPGSVIAAAVANRWMRWLYHEMTATQVA

SEQ ID NO: 406501 - protein, 433 aa, unidentified
MDRSENIVAWIGIDWADEGHQVCEYEVNNGSKQNYAIQHSAESLQEWVNQLRTRYQGKRIAVVLEQARGGLIYALMSADFIEIYPVNPQSLAKFRQALYPSGAKSDPSDADLLEEMVRQNPGRFRAWKPGDEQTRSLQLLTEARRKFVDDMTALTNQLTSALKTYYPQALDWAGELHGEQAGAFLEKWPTLVELQKSRPFRIREFYQKYGRPKREVLDARIQQMQKARPLTSDAAVVMAGVMMVRALVDQIRPLRAAIEKYDREIERLFQQHPDRAVFESFPGAGRVLAPRLVAAFGADRDRFTAALEVEQFSGIAPVTERSGKQIWVHRRWACAKFVLQTFHEFADQARKFCAWSKLYYQQQRAAGKDHHAAVRALAYKWIRIMFRCWKDRTPYDDTRYVKSLTARGSRLAVGLAPAASAVEIRVTVCESRA

SEQ ID NO: 406502 - protein, 369 aa, unidentified
MDTITYVGLDVHKATISVALAESGRGGEIRQIGVFENRPEVLAKLTARLAKGGRLLSFCYEAGPCGYGLHRLLTGLGHDCVVVAPSLIPIKAGDRVKTDRRDALMLAKLHRAGELTAIWIPDAAHEAMRDLVRARATAGRVLSKARQHLQGFLLRHERIYRGGRAWTLAYRRWLTTVRFAHPAQQIVLQDYIHAVQDAEARLDRLMRQIEELLPSWSMAPVVTALQAMRGVALVVAATVVAEVGDFRRFANARQLMAYLGLVPSEHSSGATIRRGGITKAGNALARRVLIEGAWTYRMQARVSRKLHDRNEKLPPAVRDIAWKAQLRLCARYRRLAAVGKPKVVVTTAIAREMVGFIWAIAGVAQPTLA

SEQ ID NO: 406503 - protein, 322 aa, unidentified
MTHTTTTIGIDVSKQYLDAFCRHDQHTVRVPNHPQGITALLAWIGQRTARPFIVIEPTGGYEHTLQAMLLEQGLSLAKVNARQVREFARAKGRLAKTDTIDAAVLADYGQVMTPRTLVGPSPEQRELAQVVKRRRQVVELATIEKNRLEKATDDLAIESIQRLLRILKEEIQEMDARMAKLMKSHRSLSNAHDVVKPIKGIGPLTLATLLAELPELGRIGNRQISSLVGVAPHNVDSGMRRGTRHIHGGRVRIRCALYMAVLSAIQHDPGMKRFYQHLVEHGKKPKKVALVAVMRKILVRLNAKMREYYLQVDGAPWQGQAV

SEQ ID NO: 406504 - protein, 357 aa, unidentified
MEYCGIDAHSKSSTVYVMDESGNKLIEGKVPSTKAGLEKKIEDFDKEMRIIIEACSSSRAVIKHLQEIGFKDVIVVNPQATAQMRARGKKTDYVDAHGLAELGRLGLSEAWKVHMPGEWAQRIRDLLYQREYVVKHRVGAINRAYAIFRREGKQAPSLKSDKGWAAAIQILPEHEEELQSLRVIRGYYLDWEIKLTKQITSEIKKHPQYKLVNSVPCVGPLTAAALLACIDDISRFRSGKALASYFGIAPSVFQTGATERMGGITKRGNSLARKFLAQAAHHARYSSNAFNPIYRDLVHKKSTSIAVMTVARKIAVSVYAVMKHNEPFDPTKMGLVKVDEEIKFVRVYERAHKVQAV

SEQ ID NO: 406505 - protein, 360 aa, unidentified
MTIVAHAHPFVIGVDTHARSHTIAILVASTGEPIATEQFPSTAAGMDRAISWAARRTGGDLTALWVIEGVATYGARLAAAVDHAGYEVVEATRMDTRQHRGTGKSDSLDARRIAAAVLSLEPTQLRRPRSDDGARAALRVLITARDHMTTERTASINALTALLRVTDLGIDARKPITARQVSEVARWRARTEALAVATARTEALRLAKRVSDLDQELTANRTQMSCLIRESKAAVLLEKTGIGPITAAVVLAAWSHAGRVRSEAAFAALAGVNPIPASSGNTTRHRLNRGGDRRLNRALHMAVITRMTHDPRTRAYVERRRTEGRTTKEIRRCLKRYLARHLYRTLNSLHAAPEPGPQTP

SEQ ID NO: 406506 - protein, 320 aa, unidentified
MAIIGVDVSKLSLVAVRSSSTGIVKESFEIPNTEVEIGTWLDKLKSKHKYLLVASEATGDYHNVLAKSCLKQEITFRLLNPILTKQFNRGTVRRSKTDLKDAEVIARLAIQGEGSKVSLATFSNSKSLHRTAIRLGKVYQTLKLMSLRMETNIPEEKQANQALNKCWQQIDTTRELLRKRARITTDPKLSQLLMSIPGVGEKVVVTLINEIDDINRFPSPKSLIAYAGLDPRVRQSGTSLKHNTHITKRGSVYLRRDIFIAAYIAARWDDEIRLYYEKKIGEGKRYKEAMVATSRKLLNRVYAVWKRGTPYERRPVIANT

SEQ ID NO: 406507 - protein, 381 aa, unidentified
MKLTQVNDTRGDELVMAVGLETAGGSWKLALQDGRRGKPALHTCKEQQAQARLEAAVQRIEQTKGKWGLPTGTRVVIVYEAGQEGFWIARALRALGYEVYVTDPASVAVSRQHRRAKTDRLDAIRLVNALRSWLRGERDVMRMVHLPPEEAEAQRHGTRERGQLQKEIHGHCDRIEKLLRTVGCWQKVAEGFGAERLEQLRCYDATPLPLPLRRRLERECARLALLRAQLSALEQSLFAELPAPLQARVRQLQELKAVGWVGALRLVLELFWRDFRNRREVGSCVGLVPQPYDTGNSHRDQGISKHGNARVRALAIQLAWMWLRYQPQSELSQWFKRRTQGSGANKRQRRIAIVAVARRLMISLWRYLEDAVVPAGALRKG

SEQ ID NO: 406508 - protein, 456 aa, unidentified
MDRAKREMPRAPAVPALRRQHAAAAGLDIGAQEIWACVPADRAPQPVRAFGTFTPDLHALADWLEQCGVQTVAMESTGVYWIPIYEILEARGLEVYLVNAHHLKHVPGRKSDVQDCQWIQQLHSYGLLTASFRPTEDMRVLRAYLRQRAMLLEHRAGHMQHMQKALQQMNVQLPQVLSDITGTTGLAIIRAIVAGERDPQVLARLRHGRCQRSEAEIAKALSGHYRPEHVFALKQALALYDFYTAQVQECDTYLEQHYAAIKPTYDEPPPPLGPDPKPNSHAKNAPAFDVRGCLYRILGVDLTAADGLEASSAQIIVSEIGTDMSKWPTEKHFASWLGLAPHNDISGGKVLRSKPLKGNRRAAQALRLAAQTLGRTQTALGSYYRRMRARKGPAQAITATAHKLARILYHVLKHRTPYQPQSQETYDQHLRERAIRHLKRTATRLGFTLVPQPVAA

SEQ ID NO: 406509 - protein, 465 aa, unidentified
MTPHKDFFLHPRPPTSPPPQPPALTGSLQVFNPHAAGIDIGEAEHWVAVPPGRDPQPVRRFGTFTADLDTLADWLMDCGVTTVAMESTGVYWIPLFELLEARGVQVLLIDPRQAKRAPGRPKTDRLDCQWLQRLHAYGLLAGAFRPDDQVCVLRAYLRHRQMLLTYAAHHIQHMHKALQQMNLKLTQVVSDLTGVTGMAILKAIIAGERNPQHLAQLRNPHCHHDADDIAKALQGTWRAEHLFALQQAVALYEFYHQQLALCDQQIKRHLETFADKSEGQPLPPKARRHKKTNEPRFDARPPLYRMAGVDLTTIEGIEENTALVILSEIGTDMHRWPSVKHFCSWLGLCPQHKISGGKVLSRRVRPGAHRVTVALRLAARSLHHSQSALGAFFRRMKARLGTPKAITATAHKLARLVYSLLQHGSAYVQQGVDAYEAQYRERKVQSMAKQAKVLGYTLVPLPSQG

SEQ ID NO: 406510 - protein, 341 aa, unidentified
MSVMIGIDPHKGSHAAAAVDESEVALAEVEVRATRRQTTELLGWADQFPTRSWAIESANGHGYLLAQQLVAAGEHVVDVPSAQAARVRVLDSTRSQKNDPNDARSVAIVALRQPGLRVVSVEDHVAVLRMLGRRHKQLASLKTQAASRLHAELATLTPGGLGKEMVVRQASELLRRIRPVSMVEAERKRLAHQHLAEVRRLEKELKESRARLKEAVEAAGTTLTDIYGVGPVVAGLLIGYTGDVSRFPTRHHYATYNGTAPIDASSGQHQRHRLNPRGNRMLNHALHLIAITQLRYPDTEGRQFYERKLEEGKTRKEAIRVLKRRLSDVVYRHLIADHQTR

SEQ ID NO: 406511 - protein, 368 aa, unidentified
MGESEFPNTKTGYLKLTKWVKNTSELGRSFDSSLVLFCGEHTGTCSIGLCEYLYAKGMKIWLESALKIKYGSGLKRIKDDKADAEMIAYYAKRFYEPGSCALFEPDSADLKTLRTLYQFRNRVVCDRVAIGNRISSGAFDCSTLVRNRMVKHHKEAQKDEKDIEKEMVKLMETSEELASNYQILISFKGIGPITAAALIIYTSNFKKFDNPRKFACYCGIAPFGKQSGTSINTKPHVSRFAHIGIKAAMVQACKSAMQHNAVIKAYAQRLYAKGKHEGIVMNNVKNKVMHIIFKMIQTQTLWEQEYQQKHTKECKPIPGKNGIGATEAAPIINATLKTSSSVVECTFLEKHSFQKNSKKTSSFSCVET

SEQ ID NO: 406512 - protein, 335 aa, unidentified
MKKIHVGIDISKEKCNLCYRSGLEIVREEECANDVKALKKAFKAALKGLGASLEEVLVCAEYTGRYIYPLTVACQELDIFLWMDDPTRIKNSMGLTRGKNDAIDAARIAEYAFRYSDKAIRYYIPDAALVSMKNLLADREFLLTDKKRYQSQLTDQKKYMAPGDFKHKNNRWKKVIKSIDDQITAIDAEIESLIAADPVLTRQKELLVSIDGIGERIAINMIAITGGFTRFQNARQFCSFAGLTPYKYDSGTSVRSKAKISKRANQTMKALLHLAAIGVATHMKEGEYKDYYERKTKEGKHVMCVLNVIRAKLVHRMFSVIKRNSEYTKEYKTAC

SEQ ID NO: 406513 - protein, 320 aa, unidentified
MTQTIEADIIGVDVSKDTLDIYLSATDQSCSIANDTASIEHWLARQAGPIRLAIEPTNTYHLGIATAAHVRGHQVYLIDPYRLVHYREGVGQRVKADDQDARLLARYLQREIGELRVWTPPRQGPQRFWHLLKRRASLVQTVVRMKQSLTNLGALQTDVDDLIKQGQKTIRKIDQALMTQARRLGWDAQVRRCQGIPGVGPLTALAMVATYHRGQFRNDDAFIAFMGMDVRVRESGLYRGRRKLSKKGDPELRRLLFNAAMQGRRNAHWEPYYLALRERGLSSTAAFVALGRKLARLCFVLLRKEADFDPNFCSRGCMAS

SEQ ID NO: 406514 - protein, 353 aa, unidentified
MTNTKYIGMDVHQESISIAVRNDAGKMVMECVIETKASMILQFIDGLRGELQVTFEEGTWATWLYDLLKPHVAKLVVCDPRKNSRQGNKNDRIDASELADRLYMNKLSSVYHGGAGVRTLRELARSYLTISKDLARVMSRVKAIYRSWGIPCAGRQVYAPRHRAEWLAKITEVGVLRRAEFYYQQLDALRPLRHEVRCELLAESKKHPATKLLCQIPSIGPIRAALLIALIQTPHRFRTKRPLWKYSGFAIEMHSSADYRKVRGQLQKSRKRVSVRGLNRDCNHDLKNLFKSAATIASVKPGPFQEFYAALLAKGMRPEMARLTLARKIATIVLIVWKKGVSFDAKYLKPQTA

SEQ ID NO: 406515 - protein, 381 aa, unidentified
MSSMQLRRDDVIIGVDTHKDNHVAVAIDGLGGRLGDVVISATVAGFDELVTFCLALVGPAGSLIGFGVEGTGSYGVGLARYLRNHGHQVHEIARPARAAERRLAGKNDTIDAEHAARQLLAGHGLSAPKTADGAVETIRLVKIAYDGAVQARTTTMITLKATLATGSEALRAKLEKLTDHKLITACAALEGPTPLPPVRRGAPAVVVPNDPEAAMRHVLSSMAQRWLALHEEAKAHAASLKTLTAATAPRLIEAVGVGYDTAAQMLITAGDNTNRIKSEAAFAKMCGACPIPAGSGKTNNRHRLYRGGNRQANAALYRVVIVRMRWHQPTIDYVARRTAEGLSKREIIRCLKRYLARELFRLLPTPDTTAEPRVDEPEIAA

SEQ ID NO: 406516 - protein, 348 aa, unidentified
MTYYAGIDVSLECSSVCVVDTAGKIVREAKVASEPAALIAWFGGLGLSLARIGLEAGPLSQWLFAAMQQAGLAVELLETRHVHAALGAMPVKTDRNDARGIAQLMRLGWFRPVHCKSVGAQETRALLTARKLVQSKLKDVENSLRGILRGFGLKVGKTTDRSFAGRVRELVTGHPSLQAVAEALLAVRAVLLREFNGFEKRVRMMARSDAKARLLMSMPAVGPIVALTYASAIDDPARFKSSKQVGAHFGLTPKKFQSGETDRTGRITKIGDGAVREALYQAAHVMLTKPVAGCSELKSWAMRVAKRAGMSKAKVALARKLGVIMHRMLADQQTFNPAANPKVLAAAA

SEQ ID NO: 406517 - protein, 398 aa, unidentified
MLSIGIDVSKGKSTVCGMKPGGEIVYTPFEIQHTREGMSELLSLLRGSGEEVRVVLESTGSYHCPVVAALLENGIFVSVVNSLRMKRFCSQSIRRVKTDQIDAMQIALYGLAYWQELQPTRLPENTYRELQLLARQYYQMTSILIKAKVDFNALCDQVLPGMQELMSDHAGRHKLSDFVLRYRHTTHILEMGETRFRKDYCKWAEKKGYRNRERMAALIFATAQNGIPVLPNAPSTQIVITEAIRVLHTVEASRDAILTQMQALAKTLPEYSLVREMPCIGDTLAPRLIAEIGDVRRFHSKRALIAYAGIDAPPYQSGKFSANNRHISKRGNRYLRKTGYEVMQSYVMHKPANDPIFTFIEKKRSEGKSGKLAMVAGLNKFLRVYYGKVTELYRSLPQ

SEQ ID NO: 406518 - protein, 362 aa, unidentified
MNINIGVDLHKTQFTVYYRSGTGYYREYATNEQGYRSFLMNINRLREIGDTVRVGVESTGNTRYFKNYLEREGIEVKVINTLKFKVINESVKKTDRHDASTIAEFLEKDMLPEARLCSEKSEEMRRLLKVRRTLVRTIVTVKNQIHSLLTGLGMEDVRGSLQSKRGRQAVLDALHRTARGLVVQPLFDIINRLQEDVKHIEKELEKLTAGDRVVELLLTIPGCGPITAWTIRASTDDITRFSEHKRYAAYAGLAPWVQCSNMTAHYGRITKRGPEELRTALVQLVMGMNRSRMTKDYRVMIQYKAMKKNKGSGKSIIATARKLSKIIWFMLTDNKPFNSDLMVNKNLNDKADDMRTAIKISA

SEQ ID NO: 406519 - protein, 326 aa, unidentified
MIKNTNYFGIDISKDVFDVSGADGNHHQFKNDLSGFKKLLRLTNEFSHCVMESTGVYHLRLCYYLEEKGIAVSVENPLSIKRFIQMRLTKIKTDKRDSQMIYEYAVNSGVELRLWKGQSETQIACSQIISLTNLYTKQTTALKNKLQTEESMGSPCSKVIRSLKRSLKHLKNEIDKLEDSLLELVKLDNQDLLTRVESIPGIGRKSSMLLIVLTGGFERFNKSSELCSFAGLTPMIRQSGSSIRSRSRISKMGNRRLRKTLFMCSLSAKKYNKACKEIFDRIVAKGKSKKVALIAVCNKLLKQAFALAKSGLIYDKNYRSVLVKLN

SEQ ID NO: 406520 - protein, 324 aa, unidentified
MAIVGGLDIHRRQITYDLDTDSGETRRGQLSPATRLELRAWLTRFTGQQADFALEATTGWRFVAEELERAGIAAHLAEPADTRALRGPKRRAKTDRTDARHLRELLRAGTLPESWMPPAHRRRAYPVRLRRGLVGERTGRYQRIHAILFHHGLPERSQLLTADGRAWLASIHLPVVARQAVELALRMIDHLEVELDTLDAQLAGIARAQPGCQALQRRYGVGWLTAVAIWAEFGDVRRFANSRQAVRFCGLDITIAESDGKRARGHLARQGSPVLRWHCTRRPCAPPDPPPPTTPPTSRSNSAWAANGPRCRWPTSWPARPTTP

SEQ ID NO: 406521 - protein, 399 aa, unidentified
MICVGIDVSKEKSTVCILKPYGELLCSPYEIKHTESELSELSNIILRMNDEVKVVMEATGVYHIPVLNFLKEKGIFISVINPLIMKKYASMTLRKGKTDKIDSIKIANYGIDNWFRLEEYQLTEEIYEELKLLGRQYSHYVKMKIESKLALGNILDKTMPGIKNLLKSGGANSKKDKLNDFVEEYWHFDNISKKSEKQFISSYLKWAKKMGYHQNETKAKHIYAIALEGIPTLSSSSPSTKMLVLESVRVLNEINQTLELILSQMRELSRGLKEYEVIKEMPGVGETLGPRLIAEIGDVRRFKNGKSLVAYAGIDAPPYESGQFTGTKRHISKRGSSLLRKTGYEVMKCLKSNKPLEDPVYQFMLKKELEGKAHKVAKIAALNKFLRIYYARVKEVYSS

SEQ ID NO: 406522 - protein, 459 aa, unidentified
MERKMKLGMDVVNFNAAGIDVGSRSHFVAIGQELGDVREFGVYAEDLTALCKWLLESDVTTVAMESTGDYWQNLYVELISFGFEVVLANGKFTKNAKGKKTDVKDCRWIQKLHTLGLLSGSFLPDLTTEQLRTFCRQRGNWIDLAASATHKMQKYLKLLNFRLDVVVKDVCGLTGMKIIEAICKGNLDPYSLAEHRHFNCRKPKEEIARALHGNNRADYLFGLQQEFECYKFFQKKICDCDKKIGHFIKEELKQHPERRKMKTTDKPHKRTNKNAPQIKDLNQIAFRYFNGVDLFDIEGLSHSTILSIMSEIGPEGFNKFKTAKQFSSWLRLAPNNKVSGGKILSNRVPKGSNRLKIALRQAANTIGNLKDTHLSDFFRRVAYRKGRHSAVSATARKLAVIIWNMVTKKIQYQPPRQYLFLDQKRKLGLVNRIKKQIDKFELKPEDLGFTIALDISNLI

SEQ ID NO: 406523 - protein, 359 aa, unidentified
MQRKEISFNGQSIYIGIDVHKATWSVTVLTEHSNLSKTFSQEASARKLFDFLKKNFPDGRYLAVYEAGFSGYSTYYELKSFGIDCIIVNPADVPTKDSERKTKTDAVDSAKLARCLKNGDLTPNYIPSKEYLDDKDVVRTRSMFQKQLSGYKSRVKHLLYRNGVEYPERFERLGTHWSKAFIKWLREDVSLLSDGRMSLDLLLDQVESLRRSVLVATKAMRTLGQTARHKENLEHLLTIPGIGEVTAMTLLTELCEVGRFSNERQFTKYIGFVPNVHSSGEREGVGEMTRRGNTRLRTMLIESAWKSIAKDVTLAAAFGRYRQRMTPNEAIVRIARTLSHIAFAVVKNNTVYDPGRHLE

SEQ ID NO: 406524 - protein, 350 aa, unidentified
MEYIAFDAHKKYTMASVEDRGGRILREVRVPHRRETIGQFLAQWTLGSPVAVETVGNWYWLVDEIERAGMQPRLVQARKAKLMMGLVNKTDKLDARGLNHLQRTGTLPTVWIPPGELRDQRELPRTRMVFARERTRLKNRIHATLAKYALSVPDVSDLFGRQGRAVLTTRLAELPPHTRFATEQLLVQLRGVEEQIDHCETRMRQTFQQTPALEWLMTLPGVGLILGLVILLEVGDVRRFPDAEHLAAYAGTTPQVHGTGGKIWMGKLRTEVNHYLKWAYLEAASAISTHRAHWPTRHVVRLYERVRARKGHEKAIGAVGRHLAEATYWMLTKEEAYRAPQRHPSASTKA

SEQ ID NO: 406525 - protein, 414 aa, unidentified
MESVYRSIAGIDVHKKMLAVVIRRQCGERVEYEKRRFGTTRAEIQHLAAWLAARSVSEVVMESTAQYWRPVWYGLEPHFRLHLTHPLKTQAPRGRKSDFRDAQRLADRWSSGDLEDSFIPGAEQRSWRWLTRTRVQLKKKVGVIRSQVEGLLEQGGIKLSAVVSDLFGVSGWAMLEQIAGGVTDVEVLVKEARGGLRKKDKQLKEALEGQLEPVYRLLLKQDMDQVRLLRRQVEEINQTVAEAMKEHIPALHRLSKIPGVDLYAAQELLAEIGPKAAAFASAEQFASWAGVCPGSKESAGVNYSHRSAKGNRYLRRLLCQIAWAAIHTKQTFFAGLFARLKPRVDGKGAAWAVAHRIAKVIWLLLHQEVEYQEKGTAPPNERTLLRKLKRIIKEFGHLGLDVRALLDQQLPAPA

SEQ ID NO: 406526 - protein, 464 aa, unidentified
MPLLIMEDVPMKRKISTKNKAKRIKKHLEEINLYAAGIDIGSREHFVSVPESLDDQPVRHFGCFTIDLETMADWLVRIGITTVAMESTGVYWIPVFEILETRGLEVILVNAHHVKNVSGRKSDVKDCQWLQQLHTYGLLAGAFRPEDEYCVLRAYMRQRGTLVSTLSMHIQHMQKALRQMNILLDNVVSDVTSKTGMLILRAILSGERNVEKLASYRDRRCKNSVEVIAKSLLGNYRKEHLFSLKQSIELYDFYHEKLRDCDQEIEQQLAQFEKQPDLVEGQRPTKKRNKKHEKNAMQFDVANYLYDLCGTDLTDIDGLDEGSVLKVLSETGIDMTKWKTASHFVSWMGLSPNNKISGGKVLSSKTVKTRNRAKQAFKLAAWGLSNSKSGLAAHYRRLRARIGAPKAINATARKIAVIFYNMLKNKTAYITQSQEEYDKAHQQRILKQLQQKAVQFGLELVPIA

SEQ ID NO: 406527 - protein, 435 aa, unidentified
MQITRGMRRQSEKLARRRSMLPLDALVAGVDLGKRESVVVFIAAADRRRLGTMRMSTERAGVELLRRRADELAHRHVLGPLVVAMEPTSHFWKPVARALEADGVGYVLVQSFVVSTGRELDNLTRDKTDARDAGLIADLAAELRFTETRLPAGPWAEMDLLAEARDARISERSAAFQEQRALLELVWPELLAACPDLGGCHLQALLATGLAPGEVAAMPARRFQRLLRRHLARERRFSQWMTDRLHGTARNVQPVPETAGAALRWRLAAERIALADAAVVVLDTRLLALLESTGYGRLRGQIRGLGDVTLANLLALTGDPARFDDARCLPKLAGSNPTERSSGERSAPGGITRRGRPVLRLVAYQAAVNLVRHHPDFQARFEALVHRPVRPLAKPAAYIAVANKLLRTLWVLAVSGADYRSEVARGEVRPAPIAA

SEQ ID NO: 406528 - protein, 447 aa, unidentified
MKKKSGFPVLHPNAAGIDIASSEHYVAINPEVDEQSIRAFGCFTEDLYAIADWLLECKVDTVAMEATGVYWVSLYLILEEAGLNVVLVNAKHVKNISGKKSDVKDAEWIRQLHSCGLLSASFQPDHFTRTLRTFMRHRKNLTDMAATHIHMMQKAMEQMNIKLQNVIADITGKSGQAIIEAILKGEHRPEVLVQLLDGRIKASHEEVRKSLEAVWKEENLFELKQSFELYRTYRSKIRECDEQIKAHLTTRTNEMEKEISVSKQKVKTKAKSNKNNLSFDATEMLQQIVGTDLTEIFGITDTNAIEIISEIGLDVSKWATVKHFTSWLNLAPNNKVSGGKILSSKTQKKKNKAGQIFKLAAYAVQRSKNWLAMFYHRIKSKHGTKKAITATARKIAVIFYKLMKEKTSFNPLSAELYTRTFREQQLKRLKKQADKLGLLLVPNELVT

SEQ ID NO: 406529 - protein, 341 aa, unidentified
MEQATTIGLDIAKYVFHMHGADAAGHVLFRKRITRAKLLGFLAAQARCVVAMEACAGAHYWAREIAKLGHHVRLIAPVYVKPFIKRQKNDAADAEAICEAAQRPSMRFVPVKTEEQQANGIVFRARDLLVRQRTQCVNALRGHLMEYGYVFPKGITHVETLVAVVEDLQSSLPDSVRVILKLLVDTFTALEAQIAALDAEIRQRSKSDPTARRLMTIPGVGPIASTAITALVPAAEGFPAGRDFAAWLGLTPLQKSTGGKQKLGAVSKRGERTIRRLLIIGASAVVQQASRRGAPKGSWLAQMLARKPKMLVTVALANKMARIIWALLVKGGTYKTPTAAA

SEQ ID NO: 406530 - protein, 391 aa, unidentified
MSMYFIGIDISKYKHDCCIISAADQKVVSKVTIKNNKAGFNELLTIIHSLANPADIRIGFESTAHYALNLELFLENSLLTFMEVNPVLISEYKKSKTLRRTKTDSVDCESIARWLMTVEYKPHSKGFYHAYSLKSLTRLRDKLIRQRSFYLIKITNVLDHTFPEFKPFFNERLSKTALYLLENYGSAEKMARMNSASYEKLRSLSRGRFSPQQFLRLKELAANTVGVNNSIFDVELNSLLSLYKSLVKEIDTIEKEINKLIEEVHPHYMSVPGIGPLSAAVIYSEYGDISNFTNPGQMLAFAGIEPGINESGTESHGGKMVKRGSSQLRYTLINCCLPLIRFDMTFATYYAKKRGEGKPHRVAITHVAKKLIRVIYALESQDIDFNAQKLR

SEQ ID NO: 406531 - protein, 347 aa, unidentified
MDTIGLDLHKRESQLCIIAEDGSISERRIVTSRERFTVVLGNCPRARILLEASTESEWVAQHLESLGHEVIVADPNYAPMYATRARRVKTDKRDARALAEALRLGAYRAAHRVSPERRHVRAELAVREALVRTRTRYVSLAKALVRRDGLRVAASESHLVAKRIAALDLSDTLASELMPLFSVLAPINDQIDAADRRIASLTYNDPDVALLTSTPSIGPITAAAIVATVVDITRFDSAHQFEAFLGLVQGELSSGEKRRVGHITKSGNSRVRYLLVEAAWRILRSKSEDTAALRTWALLISARRGKRIAVVALARRIAGIVYAMWRDGSPYNASKLRMPSPLLSKAG

SEQ ID NO: 406532 - protein, 436 aa, unidentified
MKQIVSVGIDVSKGKSTVCAMIHPNTIIKESFEVLHTVEEMSMLADYIGSLDGEIRIVMESTGHYHLPVAQFLYQKGFFVCVENAYIIRQFSRIMLHGAKTDPLDAKKLAKYGLAYWSELKPYKFHPSCYTELSLLSKQYQTYIKLLIAAKQNVIHLMDEMLPGFKEALDTASSVQFSKVKYVDFAKEFYHVDMIKSMGKEIFRENYKQWCKEKGYRFQSEKADELFHLAEDGIPTLPTEFPSTRLCMEVATEQVSQLGYALEQILSQMQNLAKTLPEYQTIRQMGGMGEKLCVRFIADIGDVRRFHNGKALVAYAGIDAPPYQSGQYTGTKRRISKRGNSALRKTGYEVMKSLKSHPPKTDTRVYDFIIKKENETSVYKGYKRDKIEMRVDRVEVSDFPLYLNTVAGGLDCRDQTIGGFSFVVKIYALPVVEIIG

SEQ ID NO: 406533 - protein, 420 aa, unidentified
MFMDIPSPFPYKATVGIDWADQKHDVFVRFAKGDSYRRKIDSRPGAIQEWLLELRSVCAEGKIAIALEQRRGALFYQLCTHLNWIDLYPINPHSLASFRLTFFSSRAKDDPIDSQLLEELVRTHSDRLRAYQPESTTERKLDQYCRHRRSLLDLATKTELKLISTLKQYFPLVVNLFAAVGMKSDIALNFLSRWPTLDELQRAKTHTVRSFFYAHNSRSQTLIEKRLQQIADAHHVTDDFALIEPLVVTTKCLVGQLRQFNQVIKEFDHKIKELFKSHPDHFLFESLPGAGAQLAPRLLSLFGSDRSRWADAADIQKYSGIAPVIERSGQSVWVHRRLSRPIFICQTFHEFAQQSVQRSAWADQYYRRQREKGKSHHSAIRALAFKWIRIIFACWKANKPYDESFYVHALEKRNSSLSTT

SEQ ID NO: 406534 - protein, 443 aa, unidentified
MSKIKNHFELTHPNAAGIDIGASSHFVAVPPDRDEQPVREFLSFTEDLYALADWLTACGVDTVAMESTGVYWIPLFELLESRGFTVYLVNARHVKNVSGRKSDVLDCQWLQQLMSFGLLSGAFRPQGDFCALRAVARLREMLLRNQAKHIQHMQKALLLMNLLLTEVISDVVGETGQKIIRAILAGECDGQVLAKYRNNHIKASEEEIAKALQGNWREEHLFALKQAVALYDAYAVQLMECDQQLEKMLKDLARNDLKAEKPKRRGGKSKNAPNFDARTLLMQMCGVDLTRIDGIDVTTAFKVLAEIGADLSRFKDAKHFASWLGLCPGTKISGGKKISAATSRTTNRAAQALKMAAVNLRASQSALGAYYRRLCGRMDKAKAVTACAHKLARLIYAMLTKGEDYVDQGQEHYEEKYRQRVIKNLTKHAEKFGFQLIPVPEGV

SEQ ID NO: 406535 - protein, 343 aa, unidentified
MKYVGVDLHKKVISVCVVMQKGGQRVVVKRETLRCDEPQRIQAWFRRLGAFQVTVEATSSYEWFVQLVEPLANRVVLAHPKKLRVIAESTRKTDKLDAQVLAEFLSLDMIPGAHRASPRLREHRALVRQRQYIQRRITSAKNRLRHLLSHYNADVKYLFSAQGVAYLKELRLSAADRFVVRQLQASLEHWGSQLLEMQAELRKFAKQAPEAEREARQVLETMPCVGPVTIEVVLSELGDVRRFRSQKQVAAYAGLTPGIRQSAGRTKQLGITKEGSGLLRWVMIQTAWRLVGKTRRWGLTYERLKARTGAKKAIVAIARRLLGVMVAMLTSGRRYCLASEARA

SEQ ID NO: 406536 - protein, 361 aa, unidentified
MTVYIGVDFHPYEQSVAYANDIDGEIGYRRFLHGDKQSIRAFYRKFGEDAVIGVEAAGCLWWFEKMLYESGQKLLIGDPRMIRRAALSRHKSDLRDAETILDLLMRGDFPAIVPRSEESREVLDLLNYRQTLVQKRTSIANQLQAFARGKGLAKFRMPAVKGRRKLVDSPVTDIETLLVRSRLDLFDHLTKEMKAIQERLELLAEDDERARLLMTHPGVGVINALALVHTLGDVRRFRRKEEVVAFVGLDPLEKSSGEKKRMGQISKHGSRLARHLLGQAAQACRDHRIRKFYLEVSRRRGRPKAKVAAARKLLINCYVMLRDGISYEEFQRRGEAGLCEGSGEPSRKAAVSGSLRARPAI

SEQ ID NO: 406537 - protein, 373 aa, unidentified
MIVIGADTHKTSHTVGAVAEATGRVLADRTVKAKRRSFDDLLRWGRGLGGERVWAIEDCRHVSGALERFLLARGERVVRVAPKLMAGARRSARERGKSDTIDAVAIARAAIREGLETLPVAQLAGPELDVRLLVDHRERLVAQRTALINDLRWGLHDLWPELEIPPRALTAARWQDRVAGRLTRAEQTTRVRIARDELRRIRELSRSIDALEAELAGLVASLAPRLLAERGCGVLTAAKLIGEIAGIGRFTSDAKLARLAGSAPIPASSGGTDRHRLDRGGNRQLNCALHRLAISKGRLDPDSAAYLARKQAEGKSRREALRCLKRHLARRVWRALQPAPAERARDSSTRPPTLSPPGTTIHCNMPYGRFSLT

SEQ ID NO: 406538 - protein, 364 aa, unidentified
MLYLGIDQHSKQLTVSIRDESGNAILRRQVSTQWKKVRDFFSEVRERGVAQGGYQAVVEVCGFNHWLLKLLPEYGCRETIVVQPEEKSKHKTDRRDASQLSEVLWVNRDRLAQGLPARGLRRIQVPDADGQADRRLTSLRHDVGRELTRAVNRIKAVLRRHNLQQDCPTKGIQTKAATKWLWQLSLTPEERLEMDQQLTRVGLLREQLQRLQTEIAARYERSPAAQLLSTIPGAAAYSSLGLACRVGDVARFKHPRSLANYWGLTPGSRNSGEVTQRLGSITKQGSGLARFLLGQLVMHVLRDDPWMRGWFRGIKHRRGAKIARVAVMRRLATIIWHMLTSHEGYVCGGPPQARLKRKPAVAGN

SEQ ID NO: 406539 - protein, 337 aa, unidentified
MQHLAIDLGGKESQICVRDSKEKILEERKYPTKRLGEYLAKQPPSRVILETSAEAFAVADLARHAGHDVRVVPATLAPSLGVGARGIKTDRRDAQVLSEVSCRVELRSVHIPSEQARSWRTLCNSRDALVSSRTKLTNTVKSQLRCRLVLTHRRRSGATPEQIRSLWTELAGSVPPHVERQLLVIEMLDAQIAEADKEIRQLVKPNETCRRLMTAPGVGPLTSMRFVATLDDVKRFATAHDVQAYLGLTPGEHSSSTRTRRTHLTKAGSPQMRWLLVQAAWTALRCAPTHPMCSWATQVAERRGKRVAAVALARKLAGILFAMWRDGTTYSQKQGAD

SEQ ID NO: 406540 - protein, 418 aa, unidentified
MEVLCPCCCGLDVHKDTVVACLVRSVTAGVRTKETRTFGTTTGELEALGAWLRAVGGTHAAMESTGVYWKPVFNILTEPGDDLAVWVVNAQHARAIPGRKTDVKDAEWLADLLQHGRVRPSFVPGREQRELRDLTRTRTSLVDERSAAVKRVQKVLEDANIKLSGVATDVMGTSGRAILAALLEGTADPAELAELARGKLRAKIPQLERALAGRVREHHRQLLALHLGHIDFLEGAIAELDARIADKTRPFEAELARLDTIPGVDRRTAEVLVAEIGVDMAQFPSARHLASWAGMAPGNNASAGKRKGGKTRQGSKHLRRALVEAARAAARTKQPGRTAFAQQYRRIVVRRGPKKAAVAVGHAILVTAYFLVSRHTTYREPDPSQFDDRRRARVRQRALDQLRALGYHVTLAPKEVAA

SEQ ID NO: 406541 - protein, 464 aa, unidentified
MQLRLGIDIACRAAHQVSLADEQGRFIWTGRRFRTTPQDLARLWSMLPEGTDPADIVVVMEPTRNAWVPLAAWFRRRGAEVVLVPPERSADLRRYYAKHTKSDRLDSQLLARLPILHPDGLHAEQGLGPGDALKRAAKLHSTLTHRRTQSLARLDALLEILGPAWHAAIGGDLANRTPLKFLAAGYADPHVVKRLGRTRLARFCYRHSRGAWGEPHADALLAAANQTLELWSGGELDYPDLAEDIAVEARLALQLTEELKDLDERTALLLREADPTGILTSAPGVAAITAAAILGRLGDPNRFTSLAGARAFTGLVPILDASGVNGRHGGPTKRGDAVLRQALFMAAGQARRIDPTLAAKYHRLMTDAGKHHNSALCHIATTLLTRIIACWRAEQPYQLRDVDGTPVTIDQARAIIAERYAIPKDLRARRRTTDTARTDRRNKESPSAPSTGPSKPNATTPTAA

SEQ ID NO: 406542 - protein, 364 aa, unidentified
MGYDDRSINQIIYPKHERRPSMQFYAGIDLHTRNSVVCVIDQKERKLVTETAPNDLPSILSLLKKVPRRPTVAIEATLNWYWLVDGLQEAGYKVKLAHTMGLYMITGAKVKTDRRDAFALAKLLRLDAIPEAYIYPKDTRPIRDLLRRRTRMVRLRAEAYIAIKRKFQQYGLPCSDKAIQGVDEQELLQSFTHPGIRAGLGMEFERIRLYSRELKTVEKYILSTVKNKPIFEHLQTIPGVGKILGLTIYYEVGEIARFASAKQFCSYARVVPGLAQSGDVIRRGRGSKQGNPHLKWAFNQAAAVSVRHYGYVRSFRQKHLARRRSKARRMISLSIVSHKLAIAAYHVLRDDVPFNKELMFGKAS

SEQ ID NO: 406543 - protein, 334 aa, unidentified
MENIALIGIDLGKNSFHIHCQDRRGKAVYRKKFTRPKLIEFLATCPATTIAMEACGGSHFMARKLEELGHSPKLISPQFVRPFVKSNKNDFVDAEAICEAASRPSMRFVQPRTESQQAMRALHRVRESLVQDKVKTTNQMHAFLLEFGISVPRGAAVISRLSTILEDNSLPLYLSQLLLKLQQHYHYLVEQIKDLESQLKRKLDEDEVGQRLLSIPCVGTLTASTISTEIGDGKQYASSRDFAAATGLVTRQYSTGGRTTLLGISKRGNKKIRTLLVQCARVFIQKLEHQSGKLADWVRDLLCRKSNFVVTCALENKLARIAWALTARQQTYVA

SEQ ID NO: 406544 - protein, 353 aa, unidentified
MKALKAVVGIDVSKDHFMVCYKSRDSKVIKGTRSFNNNESGFLELLDWCSKRSDIKPDFVMEATGVYHEKLTDYLYKNGCQVSVVLANKIKHYAKSQNIKTKTDKSDASVIADYGLERNPAAWKPMTPKFFLLRQMCREMLSFKQDLTRAKNQRHALEYAYGISEQVLKVKDEQILFLNKSIRIMEEEICRVSQEDKAFDARVKLLTSIPGLRAITIITILCETDGFASFNNLRQVVSFAGLDISEKESGQMKGRSKISKTGNSHLRQCLYMPALSACSCNKPIKVLYERIVERNPTIKRKGIIAGMRKLLILVFVLWKKGEAYDPDFQWGKTKTSGNDETKSSYCSSSKSCL

SEQ ID NO: 406545 - protein, 338 aa, unidentified
MDKFGGIDLHSNNSVVVVSDEADRIIYQRRLPNDLIQIRAALVPYRDELVGVVIKATFNWYWLVDDLMKEGYRVHLANPAAIRQYEGLKYRGDFADAAHLAQLLRLGLLPEGYIYPPEERPVRDLSRKRMQLVRCRTAQILAIENVLARQTGARMTSEMVKRLDEEQVNELGFAPDVALAMKANLAVMQTLQNEIGVLERRLAERVTLRPEYSLLKSVPGIGPILATTIMLETGTITRFADVGNFSSYCRCVESRRESNSKKKGEGNTKNGNKYLAWAFVEAANFAIRACPEAKRFYERKKRRRNAIVAIKALAHKLARACYHMLRERKPFDVTRRFA

SEQ ID NO: 406546 - protein, 371 aa, unidentified
MVWTAPYGISCARMRLLRSQTKEPSVSQIIRIGMDTSKHFFQLHGVDAAELPVMRRKLRRNEVLAFFAKLPPTVIGMEACAAGHYWARELRKLGHEVRLIAPQHVKAYIKRNKNDGRDAEGLCEAMSRPTMQFVPVKTAEQQAALMLMGVRQQLITRRTQLGNAIRGYAAEFGLITAKGLDKIEPLLAQIAQDKSLPALAREMFTLQGRDYARLQVELKAVEARLMAWHRANTDSRRLAKIPGIGPIGATALVMKAPDPCLFQSGRHFAAWIGLTPKDHSTAGKTRIGKITRAGDEMLRSVLVAGATAVIQQAKNGRGRPSPWLLALLARKPPKLAAVALANKTARIAWKLLTTGESYDGARMPVASALAA

SEQ ID NO: 406547 - protein, 315 aa, unidentified
MSQPILVGVDIAKDTFEVAWAGAALTQSFPNDEAGHAAFVQSLSTQEVALVVLEATGGYEQDCALALASAGLAVSVINPRQARDFARATGKLAKTDRLDAIALAEFAALLHSQGHVPRPLATEQQRELTALVVRRRQIIAMLVAERQRLSVAHTRAKPSIHAVIKMLTRQLEDLDRDMGQQVRRHHADLGKLLQSVKGVGPTTTATLIAELPELGLLNRKQIAALVGVAPLNRDSGTLRGQRHIYGGRPTVRRVLFVAALVATRFNPAIRTCYQRMLAAGKPKKVALVACMRKLLLVLNAIARTRRPWNPSTDQL

SEQ ID NO: 406548 - protein, 320 aa, unidentified
MTSRGAEKMKNDTIGVDVSKDHLDAHRLADGATRRFANDKGGHKALIKWLAETPLNRVVFEPTGPYHRAVERALGASGVPFVKVNPRQARRFAEATGKLAKTDRLDAAILARMGALLELEARPARSELLFELKELYVAREALVKDRTAARNRGKALTLSLLKRQNAQRLEQIDRQIATVEAAILQIIEANVSLADRFAILISIPGVSNITAFALLIAMPELGSLEAGQAANLAGLAPIARQSGRWTGRSFIRGGRADVRQALYMPALVAARFNPDMKAKYAHLIKTGKPAKVALTAIMRKLVVLANALLKANRTWTPKTA

SEQ ID NO: 406549 - protein, 401 aa, unidentified
MKEFNPERHRIETASALEVVTSAGHQEHHAAYVGLDVHKEAIAVAVAEPGRAEPVYRGEIANKPKSIEKLIGKLSAAYDGALLQFCYEAGPCGYVLYRQILACGHDCQVVAPSRIPRTPGERIKTDRRDALKLARLLRAGDLTAVWVPDRDQEMMRDLSRARDDMKGQERKARQQLNAFVLRHGHHWPRGKSRWTQAHYNWLESLRFEHPWQQVTLQEYIDAVKAASARVAQLSGHLMRALPEWSLAPVVDSLIALRGIDKLAATVLLAELGDISRFDSPRELMAFLGLVPSEHTSGARRRQGGITLTGNGHARRMLVESAWSYRFPARQTMHLKRKAVNASELAKKIAWKAQVRLCGRYRTLTRAGKNTKVVCVAIARELAGFIWDIVRQQMARPAPQAA

SEQ ID NO: 406550 - protein, 435 aa, unidentified
MCYVDDIRLEQFRQLKKEIRGSDEYLIIGIDVAKEKHRAFFGTAQGKTLLKNVVFDNTIEGFEKLDAYVDRIKVQYSLRKVVFGIEPTADYHKPLAEHLLKCGLMVVFVGGMAVKNNRQLLNGRWDKNDDKDSANIADLIAQGKCMFYEYPLMTLQNVRVLNAVKRRLKKREHGISAYIRNHILAQYFPELDTYYGSSETLAVVRECLDPSAIAGMEYDDFCRTVAPGKMTLARERRVGAIWRTAVNSVGCTMGEAAFHEAQIAVDSLNQVRQEIKAIEDKLENACLEFPEYTYLLSIPGFGPDVSAKVLGAVGDPHRFTSGKQVLRLAGLDLCAKRSGKTSNRATPIISKQGKADLRCALYQAAFIASIKSKDFIPYFTNKLAGRAKEKGIATKMRVKLAAKLLIIAWTLMKKKECFDPKYLKLEKRVEQKAAA

SEQ ID NO: 406551 - protein, 346 aa, unidentified
MLYAGLDLSRKRLDFHLLDGEGATLEVGAAPPDGDGLDGLTERLARYGAPIRAAIESMNGARFVHDRLELAGWQVEIADAQKVKGLAPLACKTDRIDAWVLAELSRRELVPAIWLPDPLVRAERERARWRLHLVRHRSSLKRRVHAVLLTHGKPCPVSDLFGVRGRRLLAQLGLPEPWQGTIEASLRLIDELDREIGECERELRRLGADHHYVPLLLTVPGISWVLAYTIAAELGDINRFPSPRKLAGYSGLCPRVYQSGERDLRGPLAKQGPRYLRWALVEAATHACTHPAYRQRYTDTKARIGKQRGAKVAQVDLARRLAEAIWHMLTRNQPFAPKGATDPLAA

SEQ ID NO: 406552 - protein, 345 aa, unidentified
MKIVGCDLHTRYQQIAMLDAETGELVERRLEHESGEARAFYAGLAGPVRVGIEATGHTRWFERMLGELGHELWIGDAAQIRASMVRKQKTDARDAAHLLELLRSDRFPRIWRPSLEERDLRQLVWHRQKLVWMRNAVGNQLHALAMGEGVCRKKKLFTKKGRVELEGLKLGRWASHRRQELLTMLDQLDASMKELDQAVAEQAEQNQSATLLMTHPGVGPVTSLAFVLTLGAVERFERSKQVVSYLGLNPREHSSGGRQRLGAISKQGNPMMRSLLVEAGHTAARLDAELRQDYQRLKLRRGSGVAKVAMARKLAVRMYWMLRSPASYAQLVRMQGSPRGTLVGP

SEQ ID NO: 406553 - protein, 416 aa, unidentified
MNAVGIDVSSRKSTVAVLRPLGEVVCLPFDVTHDIAGLASLVEKLKALDGETRVVMEHTGRYYEAVAKALHEAGLFVCAVNPLLIKEYGANSLRRVKTDKADAVKIARYALDNWADLRDFTPMDAIRYDLKTLNRQFQLASKQRTASANNLIALLEQSFPGIRKCFDSPVRSDGTQKWVDFAHSFWHVDCVRKQPFPAFCERYRKWCKRHAYLFKLSNAEEVYALAKRAVVLTPKSKVVKVLVQEAANQLISISRSVEVYRAEMDRLAAMLPEYPVVMAMYGVGKSYGPQLMAEIGDVRRFERKQALVAFAGIDPMPNQSGDKNVRSNKSSKRGSPYLRKTLFNVIRTYLQCAPQDEPVFQFLNRKRAEGKPFYVYMLAAANKFLRRYYAKLRDYFASLDTLQPVAPIPTILKATL

SEQ ID NO: 406554 - protein, 343 aa, unidentified
MEHYAGVDVSLKLSSVCVRDERGTIVREAKVASEPEALIGWFSACGLKLALIGLEAGPLSAWLYRGMHAAGLPVRLIETRHAQVGLKLMPVKSDRNDARGLAEIMRLGWYRPVHCKSEAAQERRALLAARVVVKTKLHDISMHLRGQLRTFGLKVGRTTPARFAGRVRELVAGNPTLELIAEALLAVHAELRRQLAALHKRLLAIAREDPVVRLLMTAPAVGAIVGLTYAAAVDDPARFRRSKQVGAYFGMTPRKYQSGETDVDGHISKLGDASVRAVLYEAAHVLLTLPTKGGWLKSWGAKLAKRVGQRRAKVAVARKLAVVLHRMWCDGTDFAFVNPGAAA

SEQ ID NO: 406555 - protein, 344 aa, unidentified
MLTIIKLYVGMDLHSNNTYIGISDANGKRVFKGRFPNNIIVILKVLAPYAENIVGIVVESTFNWYWLVDGLMDAGYSNVRLANPSAVKQYEGLKHTDDRHDAFWLAHLFALGILPEGYIYPKEDRPVRDLLRKRSFLVKHRTAHILSLQSMLEREKGYKLRGNEIKRLKTEDIARIFSQEHLVMSAQANRASIEFLRHHIKRIEKAVRNRVKLHRSFEYLMTVPGIGDILALTIMLEVGDIARFARVGNFASYARCVSSQKLSDGKKKGQGNRKNGNRYLAWAFVEASHHARRYNERLRSYYQRKCAKRNQAVATKAVCNKLARACYYIIRDQVPFREEALFCS

SEQ ID NO: 406556 - protein, 420 aa, unidentified
MSFKIFRKNCCGLDVHKTWIYACIGITDTNGRTDYKQTRFSSFSKGLKELSDWLAKYHCTEVCMESTGKYWIPVFNVLEKAYVSVILSHPKYTKPQKGNKTDRKDAKWICDLFMCDMVKPSFIPPADIRHLRDLVRYRFKLICMITGEKNRAQNCLTVSNLKLDDVFSDVFGKSSRSITEYILEHPGDLFDVTPFVDRRCKTPIEEIQAAVDGAISPEQAVKLRQCLNHIDELEKHLEEIEQEILRLSDKYQAALDLIRTVPGFDKNPMTAIQVLSEIGGDMSVFPSAKHLVSWPGCCPRNDQSNKKIKSTRISRAGSYFKPVLVQVANGLLRSKKHPEITDRYKRIKARRGHKKAIIAICRMLLTAIWHILSDLKPYTAEGFRESRPVNESKVLTTSQALNLLKQRGYIIKDDLTPAMN

SEQ ID NO: 406557 - protein, 352 aa, unidentified
MGNTNLKAVIIGVDTHKSTHVAVAIDTQGARLAALSIPTNSKGYLELESWSRSLGNVEAFGIEGTGSYGAGLSRSLLRKGYKVVEVTRPNRQLRYRHGKSDSLDAEGAARSVLSGQAVAEPKTQTGSVEMIRHLKIARDTAVKSRSQAMVTLKSLIINAPAELREVLDQIKGKVALIRHIAAFRPGEINSTTASAKAALRALARRWLALHEEIQAHDKELERLVAERAPGLLASHGIATMTVAEMLILIGDDPTRIRSESALAKLCGVCPIPASSGKTNRFRLNRGGNRQANAALYRVAIVRMKSHEPTLAYVRKRTREGKSKSEIIRCLKRYIVREIFSQICRPKTTHLAH

SEQ ID NO: 406558 - protein, 345 aa, unidentified
MMNLNVIAIDLAKNNYQVCKIGQDRQVIYNKEVSRQKLLQLLASEKQSLVAMESCGGTHYWARKAKEAGHTVKPMSARVVKAFRQGQKTDANDALAIGIAAQQPTVKPSRLLSINEQCLQAMSAMREHFVKQKVALGNLQRGCLLELGIPIAKSDNKLIDAVESLLEDTNLDVPMAFRASLKIMNEQFKSVMKEIRELEKLIEEEIKNDEVCERLQKLEGVGPVGSMMLKVYFSCIEHFKNGREASACAGLTPVQHSSGGKERIGSISRTSANKKLRSTLYQGALAVVTHVVKRASRTEKDEWLKKLIARRGKKVAAIALANKTIRTAFAMLKKNECYQPTLLTA

SEQ ID NO: 406559 - protein, 345 aa, unidentified
MSIVGGLDIHRKQITFDYLDTVTGEVRRGQIAPADREHLRAWLARFTGCGEVAFAVEGCAGWRYVTEELAAAGIAAHLAEPADTAMARGRKRRAKTDKTDARHLRTLLAEGRLPECWIPPGHILEYRALLETYHDLRREHTAWVQRIHAVFFHQGAPRLGEGALRSEQGLAALRSAAAAHLSPAGQLQVATALDMLAAVEARMHVLRKQLLETARHLTGARVLAERLYGVGPVTGLALTCWLAGKDRFSSSRKAVRFTGLDITVHSSDRKGPPGRLSRQGPPVLRWAVYEAGKTHARSSAPDHACYAAVKDRKNSKRAALSEARKIVRQACHILTELGDDALTVA

SEQ ID NO: 406560 - protein, 356 aa, unidentified
MNIHRVQDFVVKGKEVFVGLEDSKKTWKLAVRCERMVIHRTSMEAKYSVLITYLRNKFPECTIHLIYEAGFKGFNLYDRLIEDGIDCVVIPPHMVTEPKVNRVKTDKRDANRLALILENHDFKCGCHVPDKERREDRQVSRTLIGIQKDIIRTRNRIRKVLDFHGIEVPFSDRWNRKEFAALKELSVSEPLKASIAVLLTQLEQLWDHQTTLRAYLRSLCRKERYRRAFEIARSLPGIGWFTAIRLILELGEDLSHFTSGKKIAAFVGLTCSEHSTGETERKGRITGMGSGFIRSALIENSWMAIRKDPALLAKFSRIWRASGNKKKAIVGVARMLIVRLRACVISGAPYTMGTVR

SEQ ID NO: 406561 - protein, 373 aa, unidentified
MPKYSTAFGMDVHLRSTTVCALDADTGEAVTRRFPGNPWGEIAGWMDGFPGPSLAAYESGYLGFAPQRELAGLGVECVVAAVSKIPRSAADSASKNDRNDAARMAKAILAHDISPVWAPSPEVEGIRDLAGAYDGATARLATAKQRLLAFLAKRGFVYGGTTPAGNPRKYWTYDFLRWLDKVRPEDDGGVRTLAALRNEVEAAAEARADLLSEYRAAVDASPIAAEVAALQSIKGCAFALAAAFSAEVGDFTRFRSGRQVTAYFGLAPSQRSSGDSVRLGGISGAGNALVRKLAVEGSWCYAAARHQPKLMPRDTGVPLEIRMHGRKGSERLLRRREEMLARGVPAAKANAATAAELVRWLWALGMMCREGAE

SEQ ID NO: 406562 - protein, 407 aa, unidentified
MEVVYRCCCGIDVHKKVIVACLVNGGEQELREFGTTTSEIKTLANWLTESGCEMIAMESTGVFWKPLYNLFELMDLDAMIVNAAHMKALPGRKTDVKDAEWIADLLRHGLLKASYIPNREQRELREITRYRKSLTEERCREVNRLQKILEGANIKLDSVVKDITGKSARKLLQRIIDDDIPDSDEVSKLVHGRMRPKLEQIVASIEGITTPLQRKLLAQIIDHIDDLNRRIGELDKLVQEYMAEYEAAIEAIDEIPGIARRSAEVILAEIGLDMGRFPSAAHLCSWAGVCPGNYQSAGRRKHGKTTKGNKALKTILTQCAKSAKTVKSSYFFAQYQRISARRGKNRATLAVAHSMLIAIYHILKNKTAFHDLGSDYYDSFNRDRKINSYLKRLKALGWEPDAIPSSA

SEQ ID NO: 406563 - protein, 344 aa, unidentified
MILIGVDPHKSSHTAVAVDAAGHQVAQRRFVVNAGTFRQLMRWCEQWPERRFAIEGAGGLGRSLAQQLAAAGENVVDVPSTLSARARLLATGGDRKTDAKDALHVAQVALFRHDLRLVVKEDQSTILRLLTERRDDLVHERTRVLNRLHAVLRDLLPGGAPTGLSVDKAATLMKGIRPATATDNCRRDIARDLLADLRRLDRQVKDNEAEMREAVAATRTTLTTLPGLGTVLAAKVIGHIGDVNRFPTEHHFASYTGSAPLDASSGNNVRHRLNTGGNRALNSVLHTIAVCQIRDGGRGQDYYLRKISEGKTPSEARRALKRRLSNVVYRIMKRDQRNHLAHAA

SEQ ID NO: 406564 - protein, 331 aa, unidentified
MNYSHFVGLDVGKKTFDASLMSADEKELSHKSFDNTPTGIQSLLDWIAGYHLSLSKLLFCAENMGSYVTELSVSSVSMGFSLALVCPLTIKKSIGLQRGKNDRIDAKRIANYAVLHYRKLEFYKLPDKDLVRLRGWIIIRDNLVKQKVSSIKLLETFSWMAKLADVTESISFLEEQLKSIKERILEVEEDMEQLIAASTSLYTNYLLLRSIKGIGIINAIVLLCVTDNFQRFDNPRKFACYCGVAPFEHTSGISIRGKTQTSSLANKEVKVYLTRPAITAISWDPQMKAYYKRKIAEGKHKASVINAVRAKIIARSFAVIRRQTPFVTLAV

SEQ ID NO: 406565 - protein, 332 aa, unidentified
MSHYIGIDVSKATINVHISKNSQDLVLENSIKGYKSLFSKLKKIYKKEIENIVFIFEPTGSYSEALRKYCSQQNIKCFIINPKQFSNYAKALGVEVKNDIEDARVLSKAIHLAKDGQVRVPVFNEDVEHIKELMSFYKFTKKQTTQQKNHLESLTSKKGDKFSIKELTKSIEDSKKKELRIIAEVQTVIDSNDEYRVAYDNIISIKGIGQIGAIVLFHLFLKYPDANQRQITSLAGLNPIYRQSGTSVQSKYRISKTGSVLYRGTLFMAVFSAVQYDKNFKAFYERLKEKGKHSTVAQIAVMRKMIITAHSLYKNNKKYDENLNFKETTMID

SEQ ID NO: 406566 - protein, 389 aa, unidentified
MYFVGIDVSKYKHDCFIVSSDGEAPFGVFSFENNKQGFKVLLDRLNSLDSSEEKRIGFESTSHYTLNLKLFLEKHSYTFMEFQPALISQYGKALSLRKTKTDAIDSQTIARWLMTVEYKPYPSSFYHNYSLKSLTRLRFSLIKQRTFYLIRLTDILDHIFPEFKPFFNNNFSATALHILEKYGSPEKIAAFRTTSYDELRKVSRGKFSMQKFLALKELAKNSVGVSNRIFEMELSCVLRLYRQINEEITNIETEIKTLTLELDRPCLTIPGVGILSAAVILSEYGDISKFNSPGQMLSFAGLEPGYFQSGQSEHTGHMVKRGSSHLRCAIINCCLPLIQFNMTFAEFYAKKRAEGKPHRVALSHVAKKLIRLIYTLETTNQPFKADKLR

SEQ ID NO: 406567 - protein, 345 aa, unidentified
MSSMYYIGLDVHKKTISYCVKDASGKIHQEGKIGATRRELNSWMRTLAQPWTVAMEATIFTGWIYDHLLPHAAQVKVAHPVMLRAIAPAKKKNDCLDAAKIADCLRCDLLPECHMVSSEIRERRRSLRYRHLLVRQMVQMKNRVSGLLMETGVSYNKQRLHKVGYFRELLSSNEEIHPSIRPLLQLSRETIVRLQKTEYALVSSLQRDPLLVERVERLKTVPGVGPITALTWALEMGEVSRFRSIKQAISYCGLCGDERSSAEKVLRTPLSKQRNKHIQRVLVEAAKLAPREDHHLALVYESEKQKGNANRATLAVARKMVAYLLAVDRGKREFVPAEEHRGAAA

SEQ ID NO: 406568 - protein, 414 aa, unidentified
MTKFSVYIGIDWANDKHDVCVQVANSSARKFEVIKHSPKSVNEWITSLHKQYKGQIAVAIELSKGPIVYALQKFDFVTIHPVNTSMLAQYRKAFSPSGAKDDPTDAEIALDLMLRYPNKIKALKMESESVRKLTYLVEQRRKLVEDKRRFSNRLIVTLKEYYPHLLDWFSHRGSGIFCDFITRWPNLQKLKRARPDTLKKFFGSYPGRTASYSVKRIQSISEAEPLTLDNAVIESHQLLAVALANQLLVAVKVIKVFDREISELFNALPDAELYKSLPGTGPCLAPRLLVAIGENRSRFNSASEIQMYAGIAPVTVRSGQKSWIHWRYQCSKFTRQSFIEWAAKSVHQSYWAGIYYQQQRSKGNTHQSSIRSLAFKWIRIIYRCWKTKEPYNEAKYLKALSDRNSPLLFKEKAC

SEQ ID NO: 406569 - protein, 354 aa, unidentified
MNKKKIIVKSTKDNSYPDLIDQFDHYLALDWSIINMSIARLTKKKKHPVIIDVPADLNNLKDYIKNLNGKKILTIEETTTSQWLFVELVDYLDRIVICDPYRNRLLSDGPKTDKIDAGNLCLLLKNGLLKEVYHTTDSLYDLRMLVSSYDDQVRAGVRLLNQKSALYRAEHKSHKKDKTLKANAIKKFVLATIDEGIVSYQEKKDRYEKEFEKICRQNKTLRNLKTIPGIGPISSVTILSIVIDAKRFKSPNHYLSYCGLVCHQKLSGGRSYGKRKPRYSRRMKGIYKSAAIRVLNHENPLRDYYDYLVTEKNLTEKNAVNSVARYIAKISLGIIKSGKKYKPYKKRGKEKEAA

SEQ ID NO: 406570 - protein, 370 aa, unidentified
MSNATTFVGLDVHARPVKACAFVPETGETIRKSFGYEPGEIASWVSSLPQPARCVYESGVTGFHLCRELNAMGAACVIGAVSKMHKPAADRGRKTDRRDAQFLAVQLALGVVTEVHVPDAECEGARDLARALADARDDAVRAKQRLSKFLLRHGLVYDERNAAGQRRNRWTGDFWAWVGRIDLGDAAAMATLDHYCERVREADAAKAALEAKVKSLAQQPRWKPTCDALKCLKGIDAVTAASIACEADGFARFATASGFAAWVGLVPSEHSSGESRFRGGITKAGNKHLRKLLVEAAWHYKGASRSPKDLAKGQVVDAATRRHANAGVRRLVDRRRSMDDAGKQSSVANVAVARELACWCWAVGRMAEGA

SEQ ID NO: 406571 - protein, 369 aa, unidentified
MEKCITYVGLDVHKNSIAVAFADGGCDSEVRSYGTISSDLASLDKVARKLVSRGRKPCFVYEAGPCGYGIYRHLKRENFECIVAAPSLIPKKSGDRIKNDRRDARMLARLYRAGELTAVYVPSGEDEAMRDLSRAREDAKRAERKARQQLSAFLLRHGLLYSGLSRWTLTHWRWISDIKMTHEAQQFTLQEYVDAVRSSSERVERITEKIRLTVAKWRLSPVVEALQALRGVCLITAAAVVSELGDLSRFDNPRQVMAYLGLVPREHSTGESMKRGPSTKTGNAHARQMLTEAAWSYRMPARVGRRLRERQQKLPEKVWQIAWKAQVRLCARYARLVARGKSSQVAITAIARELAAFMWAIARTVEVGA

SEQ ID NO: 406572 - protein, 319 aa, unidentified
MGTVMNQISSSVYIGIDVSGSTLDVAIHDTTEHFSVDNETAAIDQLVQRLIALGPTLIVMEATGKLELAVLRALCEAGLPAVAVNPRQVRDFAKATGKRAKTDRIDAFVIAHFAAVIKPVVRPLNDVQTEQLQALLLRRAQLIDMLVAEKARLERAHAAAKESLNDHIKWLKQQLTVADTDIDSFMRSSPAWRQKEDLLRSVPGIGPGAAATLIAFMPQLGSLNRREIAALTGVAPFNCDSGKHTGKRRIHGGRAIVRRALYMACIPALRFNPVIRAFYDRLRKAGKPFKVAMTACIRKLIVTLNAMVHNSTPWSASTN

SEQ ID NO: 406573 - protein, 397 aa, unidentified
MYIVGIDIAKRKHEAAVIDGEGTVIIKPFSFTNNCSGYNRLLAMLAKAKLPLDEVSFAMEATGHYWLALFTRLQKEGFRVQVINPVQTNSIRSFYIRQAKTDPRDALLIAEVIRFGHFSESTLHPENIYELRELCRGRHAIVSMQADVKRKVVALLDQVFPEYETAFTNMFGDTSMAILQTCPTPKELSEMPLEELCHLIEVSSHKRFRMAKARELQALARNSFGFAMAGDVFSTMIRLYAKHLDFLKQQVREMDRKIAEIMDTLDTPITTITGIGPTLGAYILSEIGDISRFSSAAKLAAYAGIDPTMRQSGEYNGVRNRMSKRGSPYLRHAIWLAASSAVLHDPALKLYFQKKRDEGKPYMASVGHACRKMVSIIYAVMRDNKAYTPCIPNEISA

SEQ ID NO: 406574 - protein, 335 aa, unidentified
MNSEKYIGLDVHQATISVAVRDCRGKVVMESILETKASTILEFFAGLRGTLLVTFEEGTWAAWLYDLLKPHVAKVVVCNPRKNALLKDGNKNDRIDARKLAELLRLDNLKAVYHGETGVRMLRELARSYLTIVKDLTRVMNRLKALYRSWAIPCAGRDVYYTRHRSEWLEKIREVGVRRRAEQLYQQLDMLQRLRQQSRRELLAESRKHPITAKLRRIPSLGPIRSALAVALIQTPHRFRTKRQLWTYSGLGLETRSSGEYGYVKGQLRRSKKCVSIRGLNKDHNHDLKGLFKAAATRASVQPGPFQDFYQRSLAKGIKPTMVRLTLARKIAAVT

SEQ ID NO: 406575 - protein, 341 aa, unidentified
MEQSSTVKVDFFVGIDMSKAKFDVAIINNQGQKVSHKKFNNNNLGFDDFFIWLNGTVNSDSLFFCMEYTGVYSRKLWMYIQDYGFPLWMESGFQIKRKSGIFKTKNDKVDAYRIANYALTNAFNLKITPDYDENLFILHDLLSNRNRLIDCIKRLEVPLKELEKYGNQSSYDYIKDANLTAIKALKISLKALDKKIDDLIEKNTKWQNNIELASSVPGVGKLATLWLLVYSKNFSNEFNARQFASLSGIAPFEISSGTSIKGGFHVNCYSHKQLKGILHIVAMSAIKYNPHMKAYFHKKKKEGKKGFVPINNIKNKIIQQVWSIIRSGKVFDLNYQHPKAA

SEQ ID NO: 406576 - protein, 457 aa, unidentified
MEKEGFLGIDVSKGYADFLLLDKESNVLEEGFQLPDNKTGHQKLKEIIAGWQQKGLEDLYCGVESTGGYENNWYWYLKTVFKKSKVWICRINPRGVKSVGDASLKRTITDAVSAENIASYLIKFPKKLDYSNNALEVNNGFKEGRQHMTYIRMLQKQKVQLNNQLEKLLYQYFAEILVYCRHGSPIWLLSMLTKYPAAAVVLKAGTAKLSAIKGISKQKAIAIVGKAKNNIQDVSPQMGRIIMATAKEILHKEILIKEEKQYLAKLYQESEEVILLSSIPGIGIDSAVTIALEIEDVKRFETAKKMACFFGVHPTFKQSGDGTWGNHMSKKGRGEIRAVLYLASLSAARFNPILKQVYARFRAKGMKHRQAAGVVMHKLLRIIYGILKNKVKFSAEIDEQNQQKATEKQHNKEQKDKADKKVKQQKKHRFQVVSTEAPISRRAEQKIRKQIASQASN

SEQ ID NO: 406577 - protein, 354 aa, unidentified
MNDAKYIGLDVHQATISVAVRDSAGKLVMEAVLETKAETILQFVRGVRGSLHVTLEEGTWAAWLHDLLLPHVTRVVVCDPRRNSLLKSGNHNDRVDARKLAELLYLNELNPVYHGEHGLRTLRELGRSYIAITRDLTRVMARLKAIYRSWAIPCAGEQVYAPRYRAEWLAKISEGGVRCRAEHYYQQLDALAALRQEVRRELLAESRKHHATGLLRQVPSIGPIRAALLIAIMQTPNRFRTKRQLWGYCGLALRTYTSGEYRFVKGQLKRSKKVLAIRGLNLNHNHDLKNIFKGAATRAAAVGPFKNFYEACVARGMKPHLARLTLARKIAAITLLVWKKGVRFDAKHLKQQAA

SEQ ID NO: 406578 - protein, 370 aa, unidentified
MGEYSGAFVGFDTSKTKHAVAIAEGGRGGEVRFLGEIASSPVRVERLVGKLASRYDKLHFCYEAGPTGYGLYRQIRELGHDCTVVAPSLIPKRPGERIKTNRRDAVTLARLLRAGELTAVWVPDAVHEAVRDLVRARAAAAQDLRGKRQQLLSFLLRHGRIFSGRQHWTLAHRRWLAEQSFAHPAQQVVFQDAVEAIAEALARLQRLEQQLVAIVPSWSMAPVVEAYQAMRGASFLVAVTFAAEIGDVRRFDNPRQLMAFLGLVPGERSTGETIRRAGLTLAGNRHARRVLVEAAWSYRHPARVSPTLRARLEGLPKPVRDTAWKAQVRLCARYRRLSAAGKKLPVVIAAIAREMAAFLWAIVRHVAPAV

SEQ ID NO: 406579 - protein, 397 aa, unidentified
MNRLLYIGMDVHKESFTLSTYHVTLDESELTQDFIGAPLKITDATASGVEKYVKNLKTMLNIKATDNVWIQCGYEAGCLGFDLYFQLKAKGIECVILAPSTIQKSANAKKKKNDPLDSKAIAMALANKTYKSVHVPDKDDLNVREYLRMRNAHRDAVKKVKQQILAFLLRQGIKYSNTNWTKAHITWLHGLKFDHALLKETLDEYITSLENYVAKLERLDKRIEEFAQGDKYQEKAAELGCLLGIKTQAAMTMMSEISDFSRFRTASEFASFLGLVPGENSSGEKTQRTSITKSGNSQCRKTLIEAAAGICRGKVGHKSKELMRRQALCNNPIAISYADRANERLRSKFYRLNLRNGKPANVAKTAVARELACFIWGIMTDTYNGKVPRNDEYALGK

SEQ ID NO: 406580 - protein, 312 aa, unidentified
MTQYTIGVDISKAHLDAHRLPDGVARQFANDRRGFVAMIEWIGKLAVDRIVYEPTGIYHRGFEDALARAGLPLAKVNPLQARRFAEARGTRAKTDKVDAAVLAHMGVALQPGICPVPSKILRDLKELQVARQALIKDRTAAKNRSKSLHVPMLKKQSTLRLRQITHSLEAIEKAMLTLINDDHKTARAFEILCSIPGISNITAATLVVEIPELGTLEQKAVASLAGLAPFSRESGKWKGKRFIGGGRKFLREALYMPALVACTYNPDMKVVYKRLKGAGKPSKVAITAVMRKLIILANTLVKNNRMWAEIRP

SEQ ID NO: 406581 - protein, 367 aa, unidentified
MRDSITVVGLDVHKNSIEIVTADTFGAMEVRRFGSIGGTMNALDQAVRKLASRGSTLHFVYEAGPCGYEIYRHLTGKGYSCKVVAPSKTPRKSGDRIKNDRRDAETLARMERAGELTAVHVPTEEDEAMRDLTRAREDSVKALKTAHQQLGAFLLRYGKRYPGKKSWTPAHMRWLSDIALAHHSQQIVLQEYITAVRECTERTARMTDQILQLLPEWRWNPVVKALQALRGVAPIVAVTTLAEIGDLSRFENPRRLMAYLGLVPSENSSGESISRGSITKTGNGHVRRALIEAAHAYAFPARVSRHLLKRQEGLPEPIRAIAWKAQVRLCGKFRRLTAKGKLGNKVVTAIARELSGFMWAIAREVKA

SEQ ID NO: 406582 - protein, 355 aa, unidentified
MISTKYIGMDVHKESISIAVMNVAGKVVMECVIETKASMILQFIDGLRGDLQVTFEEGTSAAWLYDLLKPHVSKLVVCDPRKNKSMREGNQNDKIDARRLAELLRLDHLTPVYHGEHGLRTLKETVRSYLTITKDLARVKSRVKAIYRSWAIPCTGKQVYARCHRAEWLGRINEPGVRRRAECYYEQLDALRMLRQGVRRDLLIESKKQKAWKRLCEIPSIGPIRAAVLLGILQTPHRFRTKRQLWTYGGLAIEMHSSADHRSVDGQLQRSRKNVLVRGLNRNCNHDLKNLLKGAAVIASSKPGPFQEFYAALLATGMRAEMARLTLARKIATIVLIVWKRGVCFDAQHLKPQTA

SEQ ID NO: 406583 - protein, 356 aa, unidentified
MTKVTTNFSEQTIYVGLDVHKRSWNAALYLNDQYLRNVHQPPSPQALYKFLQTNYPGADYVCAYEGGKFGYWIQRQLKSKGVNCIVVNPADIPSTHKDEVNKTDPRDARGIAMALQCGQLWGIYIPPVQQESDRCLVRHRKKIWRDLVRCKNRIKGFLDYTGVELPDKFSNSNWSKNFLTWLGEIKFEYSSSRTTLDYMIREAELLRKELLAISNDIRKLMRSKEYKKLYYLLRTITGIGPLTAAQLITEIGDMKRFPSFYELNSFIGLLPSEHSSGERESKGRLTIRRHRQLRSDLIECAWTAKRTDPALSLFYSEQLKRGKEPKLIIVKIARKLLSRIRYVWLNETPYERGLTK

SEQ ID NO: 406584 - protein, 337 aa, unidentified
MKYSGIDLHSNNCVVVVTDEEDRVVVEKRLPNELEKILALLSPWREELVGVVVESTFNWYWLVDGLQAAGFAVHLAHTTAIKKYDGLKHSGDQADARHLAHLLRLGILPKGTILPPEQRAVRDLARKRMQLVRSRTTHILAVENILARQRGARITSNQVKRLTADLIDQLGLAEDVALAIKANVAIIASLNGQIDLLEKRLQERVGERLEYALLTTTPGIGQVLATTILLETGPIERFGATGNFVSYARCVDSVHTSNGKKKGEGNARNGNKYLAWAFVEAANFALRYCPEAKRFYERKKARTNNVVAVKALAHKLARASYHILKERQPFDVTRCFA

SEQ ID NO: 406585 - protein, 339 aa, unidentified
MSIQTLGIDLGKPYFHLHGVDEHGRAVLRKKLTRSKLEQFIANLEPCLVGMEACGGAHYWARQLQGYGHEVRLMSPQFVKPYVKSNKNDFLDAEAICEAVSRPNMRFVPIKTVEQQAIQHRHRTRSQAVGQRTAQANQIRGFLLEYGLVVPQGISNLRQRLPMILEDGENGLLDETRRLLAGLQDELVHLDERVKDLDQQIKILSERHEGCRQLQTIPGIGPLIATALIGAVGDASVFHNGREMAAWLGLVPRQHSTGGRTVLLGISKRGDTYLRTLLIHGARAVMRFADKRDDRPSRWVAAVERRRGKNVAAVAVANKNVRIAWALLTQGTTFQTSAA

SEQ ID NO: 406586 - protein, 420 aa, unidentified
MQVIYERCAGAGVGKDVIAVAVRLPGKGQGGRKTEKREYRAFYGVLREMARWLESLGVTHVAMEATGSYSMPVYHALMESGFEQVLVCNAGHVKNVPGRKTGLADAEWLAQLLECGLLAGSFIPPAQVKAVRDLVRYRAKIAGQRTGEIARLGDVLQDAGIKIDSVASSIATKSGRAMIEALTDGERRGQVLAEMAIGRMRSKIPDLSMALQGRFGEHHAMLCRLHLDHIGYLEKTISELDARIEAMMQPFRAARDLLITIPGIAPLSAAAVISGIGPSPREFFPTAAHLASWAGLCPGNHESAGKRHSGKRRHGNQHLQPVVVEIAWAAVRHEGYLRSLFRRHVTRNGGWRSTAARNKAIITVAHAIIVIIWHVLATGKPCTDLGADYFDRRADPDREARRLIARLEALGRHVTLDDAA

SEQ ID NO: 406587 - protein, 402 aa, unidentified
MEADQLWAGADVGKEHHWVCVVDDKGTAVLSRKLTNDEQPIRELIDEIDALGCDVSWTVDLTTVYASLLLTVLADAGKSVRYLTGRAVWQASVTYRGGEAKTDAKDARVIADQSRMRGADLPVLHPDDDLITELRMLTAHRADLVADRTRTINRLRHQLIAVCPALERVAQLTQDRGWVVLLTRYQRPKAIRHSGVSRLTKMLGDAGVRNAATIAAAAVTAAKSQTVRLPGADVAAGLVADLAGEVVALDDRIKSTDADIEDRFRRHPAAEVITSLPGMGFRLGAEFLAAVGDPTLIGSADQLAAWAGLAPVSRDSGKRTGRLHTPKRYSRRLRRVMYMSALTAIRCDPHSKAYYQRKRDEGKRPIPATLCLARRRTNVLYALIRDNRTWQPESPPITKSAA

SEQ ID NO: 406588 - protein, 331 aa, unidentified
MLYAAIDIHKLVFQAAVLESETGELSEQRFAAERGALDDWAMRWQGQLAAVAVEATTGWRWVVARLQAHGFEVRLVDPGQASALQGRRRRPKTDRLDARWLALLLSRQLAPEAWIPPAEIQHLRDQTRLRKALSDERRRWAQRLHALLLQEGWPCARGRLLTREGQRWLQALKLAPEARAYVESVLAVMAALEQQLQTLEGELRRFARSDRRCQALQTIYGVGPIIASHLLAEIGDVGRFRRPRQLVRAAGLDPVVEESGERRRRGKLSKQGSPHLRWALVEAAQHAHRTTSPDRALQRAVAARAGGGRAKLTVARKIARRAYHVLQAETA

SEQ ID NO: 406589 - protein, 325 aa, unidentified
MQATRFSVGIDVSKSKLDLALRLNGKVRNKVITNNDAGFKSLLEWLEEHVPGGAAAAHVCVEATGSYHEAVALFLCDHSVLVSVINPFVIKRYAESRLQRNKTDRADARVIAQFCEQEVPAAFVPPSKSVRSLQALVLRLQTLEVMEHAERNRLDVAHDVVKPSVQTVLDSLTEAIADVRRQISDTIDKDPDLKNRSDLLDTIPGLGERSIPQLLAFIGRPERFESGKALAAFAGLCPSIKESGSSVRRRGAISAFGSHSLKRCLYFPAMVAGRYNPVIQPFWRRLMAQGKPGKVVVVACMHKLLCLVYAVLKSGRPFDPALSRA

SEQ ID NO: 406590 - protein, 347 aa, unidentified
MEVTTVGIDLAKNVFWLHGCDARGRAVVRKQLGRRGLLAFVARLPRCVVAMEACATSHYWAREIEKLGHQVRLINPRFVRPYVKANKNDASDAEAICEAAGRPSMRFVGVKSAAQQDVQAVHRVRQQLVKSRTALMNQVRGLLAEQGIVIPQGSAQLRRALPRLLEDADNGLSGIMREILSEIGERFKFIEDRLRQYELLIQRLFRQDERCRRLAEVEGVGPLIATALVAAVGNAAEFKSGRELAAYLGLVPRHRATGGRTTMLGISKRGDRYLRTLLIHGARAALRVNQRKRTRRSVWVGRLKLRRGSNVAAVALAHKNARVLWALLRKGECYRPAPFSARVPQAG

SEQ ID NO: 406591 - protein, 420 aa, unidentified
MPDDRCRLGSDDVVIGLDLASAEHQVVVLTADGQRLTRFKIPHSRVGLEELLRRTIPAALSRPGGSRVFAFEATGHVWEAVAYILRARGERYVVINPLTTFRVREARQLSREKTDLTDAEQIAELCRTGLVTRTQLEARPYLALRRAWGEYRRLREERARLKVLVAHQLYGLFPEFLRVWANLLQPGALAVLRTGLTPAMMAALSLGEFVARVREHRAGRRVWRFKLTQVHRYAEQTIACPDGVDVLAREVQRAVARIDVLTAQMTTVATEVDALLADLEETPYLRTIPGLGWASVAGLLAHVGAITKYRHGRQLIKLAGTNPSRRDTGQTVGRGQRMSRRGRAGLREVMYLATISCLQHNPRIRAHYDRLIQRADRPLSKMQALGACMNKLLLYAFAVMSRREAFQLDHDWLRPMSRVA

SEQ ID NO: 406592 - protein, 409 aa, unidentified
MRLFVGDDWAEDHHDVEVMDEAGKVLARKRLPEGAAGIAQLHALVGVHLGEDGDGADVLVGIETDRGPWVAALAAAGYLVFAVNPLQAARFRDRHGVSGAKSDAGDAHALADMVRTDSHQLRAAAGDTPEAQAIKVLARAHKTMIWERTRAVQRLRHQLREYFPAALEAFDDLDAPDALELLARAPEPARAARLTRAQVSAALKRAGRRNITDRATAILAALRGEQLGQPPALTAACAAAVRSLVAVLVTLNEQVKILQGQVEEDFGRHPDAEIILSQPGLGPILGARVLAEFGDDPGRYADGKARRNYAATSPITRASGKKKVVAARFVHNDRLVDALNAQAFAALTASPGARAFYDQQRAAGRGHNDALRRLANRLVGILHGCLKTRTLYDEDTAWAHRQAQTQQAA

SEQ ID NO: 406593 - protein, 393 aa, unidentified
MYLVGIDIGKLKHSFCLLEKETGEILVEPVFFENNRDGFNVLLSSFKHLPQKDILIGMEDTGHYNLALLKFLLDRNYQVALINPVATNLTRKMQGGISKNDKLDTLTICDVLSSSQRVKSYRISKYSSFDLYEQKLLTRKHHNLKEEENQLTNRLQKCIDVVFPEFNSLFKSKYGIVYMNILKEFGSADAIAHADIRTIRKCFDTGRGKHISLTAEELKEAARNSIGFPSSSEATQIKHLVARIELIKEQIAEIDKKIEEFSIQNNSPILSIPGISHFSGTSILAELGDIHNYSKPSQIIKFAGVAPLTYESSQFTAQHTAITKKGCKYLRKTLYQIITPVIQYNPVFRKFYLLKIAQGKGHRCAQGHCVRKLMRVIYHLLSTGTQFDPALLR

SEQ ID NO: 406594 - protein, 426 aa, unidentified
MFSESYDDEQIIERVAALDIGKAEVVCCVRLPAAAGTKRRVQEVSTHTTMVGSLSELANRLVDLGVERVVMEATSDYWRPPFYLFEAHGLRPWLVNAKDVKHLPGRPKSDVLDAVWLCKVAERQMLRPSFVPPADIRRLRDLTRYRVDLVGVRNAEKNRVEKLLEDACVKLSVVASDIFGVSGRAMMAALIAGERDPKKLAEMARSRMRPKIGLLEEAFAGLPMGTFDDHHRFLLNRMLERIDRADGDIAALDVEIEAHLVPFANAVARLDEIPGIGPTAAAMIIAEIGTDMTRFPTPGHLASWAKFAPGVKSSAGKNKGNGSTGHGNRYLARVLGEAAVATSRTDTFLGARYRRIARRRGKKKAIVAVGRSLLVVLWHVLSDPETRFVDLGADHFDRHVDTTTKKRNHVRGLEALGYRVTIEPAA

SEQ ID NO: 406595 - protein, 321 aa, unidentified
MDKYTEVFGVDISKDHFDVFSERYGHERFSNNDDGFHRFLEGLYDTDLVVMEATGYYHVLLLEFLNGFGVPSSLLNPLSVKRFIQMRLKRVKTDKSDAEMIRSYGLQEKVAIYQNKSVESKAMLQTCSMLEVYLKQRTMLKNKLHGEKTLGEPSEVLVKSLQCSITHMDQQIQVLENELADLVKMLYGNQKAHLCSIPGIGDRTAIYLLALTDGFSRFQTASQLISYAGMSPVIRESGSSVRGRSRISKMGNRRLRNLMFMCAFNACKHNPGCKAMYERITAKGKSKKLALIAVGNKLLRQAFAIGKSGLPFDPAYVSRVA

SEQ ID NO: 406596 - protein, 342 aa, unidentified
MAEATIIGIDLAKRVFQLHGATADGSVVFRKRLSRMQLLAFLAQQPACTVAVEACATSHYWGREIEQLGHTVRLIPPIYVKPFTKRQKNDAADAEAIAEAASRPTMRFVAVKNEEQQARALIFRTRDLLVRQRTQLINALRGHLAEFGVVAAQGIVHVDRLREAIDAPETDLPPMLRDIGRMYLDQIAICSDRIAALEKSLRLEAARGETTARLQTMPGIGPICAMAIEAFAPPMASFRRGRDFAAWLGLVPRQRSTGGKQILGKTSKMGQRDIRRLLIIGAMSRVRWAVRKGAPEGSWLARMLARKPRMLVAIALANKMARSVWAMLTKQEDYREPMVAAA

SEQ ID NO: 406597 - protein, 318 aa, unidentified
MIKKIPPCFVGIDVSKDRLDIACRPDHRCWSVANDPLGIAELITRLRQLKPTLVVLEATGGWQLAVAAALAVAKLPFAVVNPRQVRDFAKATGQLAKTDQLDAGSLAHFAEAVRPEPRPLPDETTQCVEALLTRRRQLLEMLVAERNRLALAHASVRESVEHHITHLKRLVGETDDEISTALRSSPAWREKDDLLQSAPGVGPVMSATLQAALPELGVLNQREIAKLVGVAPLNDDSGARHGARHIRGGRAEVRAVLYMATLTATRFNPVIKAFYRRLLAKGKTHKVAITAAMRKFLVILNAMVKANMPWGENLNYSS

SEQ ID NO: 406598 - protein, 387 aa, unidentified
MTARTVNNQPAAPHDEAVRCHFAIELSKTSWVIAVITPLCDKISRYTLKGCDGKGLIELIERIRLRVGRDTGRAVEVMSCYEAGYDGFWLHRLLEAHGVRNYVIDPASLQRDGRARRAKTDRIDAERLLRSLLAYLRGDPKVWSVVRVPSVAEEDARRLHRERDRLIKERVGHVNRIKGLCATQGIYDYHPLRRKRRAELEQLRTAQGEALPARLKVEIGRELQRLELVLEMIAALEAERDAMVRNRASAHLHAKKIQALHQLKSIGPELSTVLVGEVFYRNFDNRRQLGSYVGFTPSPFQSGGMAREQGISKAGNGKARTTMVELAWLWLRYQPDSTLSIWFRERVGAVKGRIRRITIVALARKLLVALWRYLETGVIPQGAVLKA

SEQ ID NO: 406599 - protein, 410 aa, unidentified
MELLHPHCAGLDIHKETVVACVRHLRNGKVMTGIKTFKTTTEELIALSDWLTTEGCTHIVMEATGVYWKPVWHILSDGEFDLVLANAGHVKNVPGRKTDVNDAAWLAELMAHGLVKASFVPDQPTQQMRDLLRTRKQFGRERSSHIQRIQKTLEDANIKLDLVVTDVLGLSGRRILQALIAGQTVPQALAALADRRIHATSAQLEAALRGRVTDHHRFMLKLHLDQIDAQDAAIARIDKEVDGNVEPFRVALEMLNGIPGVSSLSAEVIIAEIGVDMSRFETAGHLISWAGLCPRNDESAGKRRSSRMKKGAPWLKTTLVQCAWAAARTKDSYFQAQYHRLRSRRGPKKAIGAVASSLLTAAYHMLKSGTLYQDLGANHFNHRAKDKQALHLIHRLKNLGFNVQITPSAA

SEQ ID NO: 406600 - protein, 435 aa, unidentified
MWIGLDVHKEDAFVCELGDEGEVLREFRLPSNREAVREYASRLGPPDRVALESTTHALAFVDLFREHVGKVVLADARRTKAALRMHRKTDRKDARALAELLRAGLVPEVWVPDPKTRWWRRRVAHREALVRHRIRVKNRVHGLFHRNMIPVPAELDLFGPDGEEWIRPARERRLPMPDDDREQLEMELELLEVLDRQVAVADRRLAAAGTGHPDVKLLLTIPGVGPAVASGLVAALGPAERFPSPKHLVSYLGLAPSVAQSGRTVRLGRITKAGRKHARWLLLEAARRAVRLPGPLAAFYERIEDRRLRNVARVAVARKLATLTWHVLTARTPCRWTGPLLSREKLRSLERRAGEVARSRNSPRPEGELPYHQQRRAERQSAQEAQDDYVALTSNWSQRPAPLNFRRAPKAASSRPSGGPRTPSHDAPTLQCRGR

SEQ ID NO: 406601 - protein, 342 aa, unidentified
MRYLGEFDTTEAATRKLVAKLAAKYRRLTFCYEAGPTGYGLYRVIRSLGHDCVVAAPSLIPKKAGDRIKTNRRDGVNLAKLLRAGELTAVWVPDERHEAMRDLSRAREAARKDLKGKCQQISSFMLRLGRHYPGKRTWGPAHMNWLMKQKLEHREQRIALEELLGAVRQESERVERLEQAIREAVPEWSLAKVVTALQAMRGIDLVAAVAVLAEIGDLSRFQNPRELMGFLGLVPSERSTGDTTKRGGITKAGNGRARRILVEAAWSYRHPPRVGREKQAKVAAAPRRVREIAWKAQMRLCGRFRSLTRKGKRPTVVAAAIARELSAFIWAINREVMASRQI

SEQ ID NO: 406602 - protein, 359 aa, unidentified
MLRIEIQDSQSYYQGFKEAHVNDCEKLLTMGQYKQIFGVDVSKKTVDTAYVNGDQMSHRQFSNDTDGMGALMQWLADLQLNFSEILFCMEATGLYCFSLTQFLTSNCIAMWIEHAAHIKKASSLARGKNDKVDSMRIAQYASKNLDRLRLWKPVSSTMGKIKHLASLRERLVETKKRLAAPIKELEGVGNLSMAKLLAKTIKSSLSAIDKDLKNVEAKIIDIVNGDENLKQLYELVTSVVGIGFVTAINLIIHTNGFTVLKDTRKLACYCGVAPFEYSSGSSIRGKTKVHHMANKKLKCNLHMASLTAVKLDADLKKYYERKVAEGKNKMSVLNAVKNKLLARIIAVVNKQQEYVRKVA

SEQ ID NO: 406603 - protein, 373 aa, unidentified
MPKYSTAFGMDVHLRSTTVCALDADTGEAVTRRFPGNPWGEIAGWMDGFPGPSLAAYESGYLGFAPQRELAGLGVECVVAAVSKIPRSAADSASKNDRNDAARMAKAILAHDISPVWAPSPEVEGIRDLAGAYDGATARLATAKQRLLAFLAKRGYAYGGTTPAGNPRKYWTYDFLRWLDKVRPEDDGGVRTLAALRNEVEAAAEARADLLSEYRAAVDASPIAAEVAALQSIKGCAFALAAAFSAEVGDFTRFRSGRQVTAYFGLAPSQRSSGDSVRLGGISGAGNALVRKLAVEGSWCYAAARHQPKLMPRDTGVPLEIRMHGRKGSERLLRRREEMLARGMPAAKANAATAAELVRWLWALGMMCREGAE

SEQ ID NO: 406604 - protein, 410 aa, unidentified
MDTLIERCAGLDVHKETVVACVRVPTRGGGREQCVQTFGTTTAQLLALRDWLVAHGVTRVGMESTGVYWKPVYYVLEDAVECWLLNARHLRNVPGRKTDVADAAWICQLVEHGLVRPSFVPPKPIRELRNLTRYRKAQIEERTREAQRLDKVLQDAGIKLSSVASDVLGVSARAMLRALVAGTRDPELLAELARGTLRKKIPALREALHGRFGPHHALLVGTILAKLEFLDEALAQLSAEIAQVIAPFTAEAALLRTIPGVDRRTAEALIAEIGVDMTRFGAAGRLASWAGWCPGNHESAGRQGSGKTRKGSKWLRTYLTEAAKAAAGAKGTYLAAQYARLRGRRGSARATVAVGHSILVAAYYILDRHQPYRDLGPDYFRRRHSREHQMRRLVRQIEALGFRVTLEEAA

SEQ ID NO: 406605 - protein, 313 aa, unidentified
MSNLLPQTIGIDISKATLDCHVHPAGIERQFANTTKGHKALIAWVGQWEVERIAYEATGTYHRALEVALGHMPCVKLNPERARRFAQATGTLAKTDRIDARLLARMAVTLKPPVRPARSPQQNQLAELVNARDGLVRDRTALKNREKNLTVTLLKRQCSQRLEQIARHIDALDAEIASLIAADEKLARRHDILTSIAGLGTLTANQIIATMPELGSLDNKQAASLAGLAPVARQSGQWKGKSFIRGGRANVRQALYMPALVAARFNPDLKAKYQQLIAAGKPAKIAITAVMRKLIVTANALLKADRLWLQSPA

SEQ ID NO: 406606 - protein, 351 aa, unidentified
MVIIGCDFHPVFQQISVLDTGSGEVRDLRLAHKEEARRFYASLQGQEVLVGVEACGYTQWFEQMLEQMGHGYRIGDAAAIRSSYVRKQKTDRRDAGHILRLLVEGRFPALWVPTASERDARQLIVHRHKRVQMRTRVKNQLHALALNQGLRLGWQLWTRGGVEQLCALPLLPYAAARRADLLEQLEGMNTDIERLDRMVRKEAEGRAEAVRLMSHPGVGPVTALAFVLTIGDVRRFEKSRQVASYLGLIPSERSSGGKQRLGHISKQGNSLLRFLLVEAGHTAVRGDAELRRCYQRLQHRHSTGVAKVAVARKLALRLYWMLRNQADYAQLRGPYAGKPVSFCGRKTRPAA

SEQ ID NO: 406607 - protein, 338 aa, unidentified
MRNGSSRRFTNDRQGHKALIAWIGDNDRRVVFEPTGPYHRAFERRLAAAGLALVKVNPRQARRFAEATGKLAKTDRLDAAMLARMGTLLELQARPVRNKTLSELKDLHMARQALVKDRTAAKNRAKTIVLALLKRHNGQRLRQIERQIKAIEDAILAIIKTDPGLARRFAILTSIPGVCAITAFALLIDMPELGTLQAKQAASLAGLAPVVRQSGKWSGRAFIRGGRADVRQALYMPALVACRFNPDLKAKYQKLIKAGKPAKVAITAIMRKLIILANTLLSDDRKWAKSLPCPTRILIALAEAPCVVFFRIGHSVFFAPCFATFLSWRGYRIYDHDN

SEQ ID NO: 406608 - protein, 346 aa, unidentified
MKINRVGVDLAKNVFQLHGADYKGKTLWKRQLSRAKWLPVLCDTVEPGTEIGMEACAGAHHWARQLMQRGYPVKIIPPQFVKPFIKSNKNDANDAQAICEAMGRPDMYPVKVKTVEQQDLQAMHRIRDEVKGHRIAKANQIRGLVTEYGLVAPLQLPALRRAIPEWLEDADNGLTFLFRQLLQGLWGDLYALDQRMTELDKQIAVVAQEDPTARRLQQLRGVGPLIATALVATIGDGKQYRKGRDMAAALGLTPRQHSSGGKDRLLGISKRGDAYLRCLLVHGARSAMRTAKDKDDRLSRWIIDLQSRRHANVVAVALANKMARMAWAMMTRDVDYDPDLAAASVN

SEQ ID NO: 406609 - protein, 356 aa, unidentified
MLYTGVDLHRRLIVVCTVDENGSIVARSRMKTDPALVSEYFRQWPDQHRAVVECTTGWYWFSDLLRSLGVGIVLAHAKYLKAISYAKVKTDAVDALTLAQLLRMGYIPEAHQLPPEYRAMRDLLRQRVVMEHKRTTIIQRVTSILAQFNITDLPCSPYQSGFAEFLDQCQIPEEYRMTLMMYHQQCLQTTEHRKQLERYFKTQLRPTAAVKLLSTIPGIGDITGSIIAMETGEIHRFADDKHYCSYCRLVPGAKDSAGKRSHRSGSKDGNPYLKFAFTESAIKAIQFYPEIKHFASRLERRSGKTIARTVVAKELAKITYFVLNRQQGFKTFKGIEINKLRNWPRSRKPVRLTGGL

SEQ ID NO: 406610 - protein, 353 aa, unidentified
MKTYYVGMDVHRASIMIVVLNGAGKVVMQLVIETGAERVRGFLKQLRGKVYVTFEEGTQANWLHEIVRPLVTEVVVCDPRHNKLLQSGNKSDRVDAQKLAELLRNGSLKRVYHGDHGVRTLKELVRTYDCLVSDTTRVMNRLKAIYRGRAIACSGHDIYRQDRRKKWLEKLKEPGAKQRAGFLYEQLAALKPLRHKAKLAMVKEVRRQAAYRWLMSVPQFGSVSVAQLIAVVDTPHRFRSKHQFWTYVGLAVVTRSSADHEVVQGVLRRSQRPVSTRGLNRNHNHLLKRVFKNAATSACHSGPFKAGYEARVLQGMAPSLARLTIARQLAATTLALWKRGEQFDPERKKQQTA

SEQ ID NO: 406611 - protein, 412 aa, unidentified
MQIVYERCAGLDVHKKSVMACLITPAANGERRKERQTFSTMTSDLVRLREWLTEQQCSQVAMESTGVFWRPIFNILEGHVEVMVVNAQHIKAVPGRKTDLKDAEWIADLLQHGLLRPSFIPPAWQRIVRELTRSRTSLSEERSRVIARLHKELEDANIKLAAVASDLMGKSAQQMLQALIDGELTPETMADFARGRMRSKRELLVQALTGHLQAHHRFLLAEHLKHLSQLQEGIARLSTEITERLQPYEKLLARLETIPGIKRRLAEVILAEIGPDMQRFPSAQHLASWAGMCPGNHESGGKRLSGKTRKGSQWLRTALVEAAHAASHCKDCYLSAHYHRLAFRRGKKRAAVALAHTLLIIVYHLLTHEEDYQELGGTYFDTLDRDKKEKSLVRQLQRLGFEVALTPTPPQG

SEQ ID NO: 406612 - protein, 337 aa, unidentified
MKYFAGLDVSMEETHVCVVDRDGKVILEARTPTALKTIATALAQGPAVERVLFETGRMAPTLFHGLTALGLPVVCVESRHAYQALRSLAAHKTDRNDARGLAHLARTGFFKPVHVKSLPSHAIRALLIARKKLVGQRVTLENQIRGLAVAFGVRLPRGLSSGFAEKGMAAGRGIPGLDGAMRGLLAARDAILKAIVAINADMKNLERSSAACRRLMTIPGVGRLTALAFAATIDDPDRFRRSRDVGAYLGLVPRRYQSGEIDYTGSISKCGDGRLRTLLYEAANAMLTRYRGSLALKTWALDIARRSTMRKARVALARRLATIMFAMLKHGTEFEPV

SEQ ID NO: 406613 - protein, 430 aa, unidentified
MKSNTQNAKIEAITEKTLVLGIDVGSETHYARAFDYRGIEYSKKPFKFSNTEAGFVTFKEWILDLKERHEKDKVVPGMEPTGHYWFNLGKFLQDNEMKPVLVNPHHVKKSKELDDNNPTKNDRKDPKVIAGLVREGRYMIPYLPDGVYADLRTASNIRFQLQAELTRIQNRISRWFNIYFPEYKTVYGKPDAKSGMLILKAAPLPEDILTLGIDGVNQIWRDAKLRAVGKARAKTLIEAAEHSVGSKEGAVSARMEIRMLLEDYESRNMRLQEVMVLIEELVKGIPMAEKLLEIKGVGIRTVSGFLAEVGDISRFNNPKELQKLAGLALVENSSGKHKGGTTISRRGRKRLRYLLFEAAMSLVAKNPEFRELHNYYTTRRRNPLKKMQSLMAVATKLIRVFYAMLTKGVDYDPKKMVSGIRRPEAYLQAA

SEQ ID NO: 406614 - protein, 415 aa, unidentified
MSSPDSLVAYFAGLDWAKQHHYVIIVNAGGQIVAEFSFSHTLEGWQQWRQQAARFAPLVVAVETSQGAVVDQLLHTPDCTIYPLNPKAARAYRNRKAPSGTKSDHLDAWSFADALRLDGSNWKPLSKQDPLLEQLHLLCRDEIALIEERTALVNQLIAALHEYYPTALAAFEDWTLPAAWAFVEAFATPQALVNAGKRRWEKFLHTHKLARPDTYQKRLELFAKGTEFGASEALTLAKSRLAVTRARQLRVLQTQLEDYRQQIEKLFALHPDHELFGSLPGAGPKIAPRLLGELGQDRHRFESPQALQCYGGTAPVSYQSGPVHQVRLRTQCNLVLRSTIHLWTDRSRHACPWADTYYQSLRKRGKTHACALRCLGQRWLKILWKMWQTRTRYDAELHQKHQIQHGSWVIKLHNA

SEQ ID NO: 406615 - protein, 342 aa, unidentified
MTHYAGIDVSLEQASVCVVDANGKIVAEGKVASEPAALLAWFRSLGVELARIGLEAGPLSQWLYAGMTAGGLAVELLETRHVHAAFQAMPVKSDRNDARGIAQLMRLGWFRPVHCKSLAAQETRALLTARKLVQSKLHDVEMSVRGILRGFGLKVGKTTACGFAGRVRELVAGHPTLEVVAAALLAVRATMMRELSGLEKRVRTIARSDARARLLMSTPGVGAIVALTYVAAVDDPTRFKSSKGVGAHFGLTPRKYQSGETDITGGISKIGDASVRAALYEAAHVILTRPIKGCTSLKSWAMRLARRAGMKSAKVALARKLAVILHRMWVDGTTFNAAAAAA

SEQ ID NO: 406616 - protein, 384 aa, unidentified
MNNDSIIFIGLDTHKSFIQVAVLQGHRGAQPQHLGRIKSNKSALVKLALQLQSKYPKATLHFVYEAGPCGYWTYRLLTSIGHCCYVVAPSLIPKKPGDRVKTDKRDAAKLAKLFKAEELTPIYVSEAEDEAIRDLSRARETAMKDLKDAKFQLKGFLLRNNVQATVNDNWSKKHLRWLTDLILPHYSQQIVLQEMIMTISERIQRLQRLDNELLHQVKNWRYYPVVKAIQAMRGVRLLVALGTIAELGDLRRFDHPRKLMAYLGLVPTESSSGGKTRRGSLTKCGNSRARRLLVEGAHTYKHKANISVELQLRQEGLPKEIVDIAWQAQQRLCRRYQRLLQKGKNRNVVVVAIAREMIAYIWAIAREVIVSDVDPKTRIARLPA

SEQ ID NO: 406617 - protein, 390 aa, unidentified
MIYVGIDVAKDKHDCCILDDEGRKVYPIFTISNNKVGFDELFSRIEEVTTDKAKIKVGLEATGHYSNNLLASLVDMGFPTYVINPLHTNLYRKGLSLRKTKTDKVDASAIAMMLMTDRTLKPYSETSYHNEELKSLTRYRFDKVHERSKLKASLARLVNILFPELEELVPSLHLNSVYTLLEELPGATYIADCHLTHLKKLLEASSKGRYSRDKAIEIRNAATVSISAPMAAKSMELVHTIRLIRMLSEEIEEIEGSIKSIMDELNSPIMTIPGISYRMGAMIIAEVGDFKRFDNADRILAYAGLSPSTYQSGQLDSSYSHMEKRGSRYLRYALFNATKFVCKWDESFGIYLGRKISEGKHYNVAVSHATKKLTRTIYRMELTGEAYSPR

SEQ ID NO: 406618 - protein, 403 aa, unidentified
MSMTGQRVAGIDWASDNHALCVIDAGGQPVQRLVVPHTKTGIGRLVTVLRKHQVTGVGIERPDGPLVAGLLAAGVEVLVIPPSQVKSLRGRYRSAGHKDDRFDAYVLADTVRTDRRRLTPLQPDTQATTTLRTLVRARTDLVVHRVAVANQLRAHLQTVLPAAVGLFTKPHSPISLAFLSAFATQDAIDALTIDTWTSWLRAHRYRKTRPEILLQRLRDAPAGVTGPAAQALAAVTAAYLTALTTLVDQIQALQAQIAAALAAHPDGPIFTSLPRCGTVRAARLLAEIGDARGRHPTPQSLTGLAGVTPSTRQSGQVRIVAFRWAADKQLRGAVCDLADDSRHANPWAADLYAKARARGHRHPHAVRILARAWLAIIWKLWTTHTPYDPARHNALQKLLTQTA

SEQ ID NO: 406619 - protein, 446 aa, unidentified
MRIVYQRCCGMDVHKDSVTACLLVINEGGKDRNEKREFGTMTRDLRELASWLASEGVEAIAMEATGVYWKPVWNILDAEKKFKMLLVNAQPIKCVPGRKTDQKDSEWIAELLQHGLLRASFVPPVEIRQLRDLTRMRTRIRQTLASFANRIQKVLEDANIKLGSVASDVLGVSGRHMLKALLAGEQDPQKLANLAQGHLRKKLEPLQLALEGHFTEHHRLQLKFLLEFIEFGEKQLSNLDSEVQLLLTRVQPKASLPDPDDGALAESKGSPPQATSLQTAVQLWDSIPGIDQLAATTLVAEIGANMDQFPSARHLAAWAGLCPGNNESAGKRRSAKIRKGSVWLRRALCQAAWAASRTKNTYLAAQYRRLIVRRGKKRTIVAVAHSMLIVAYCLLKRQCVYQDLGANFFDRLDERALTHRLVKKLIGLGYQVTLKPGRAEAAPETA

SEQ ID NO: 406620 - protein, 435 aa, unidentified
MFFVSQFLNDFVVGIDVSSEFSIVAMLAPTGELIRKPFRIDHNPAGFHKLLDILKKEEERLKRKPIYFVESTGIFHLPLFFFLKSNDLKGFVLNPLCVHSTKNFDLRKVKNDNKDSEAIARLAKYQDVKVSTMPEPQILVLRMMTREYYAVSDMLTVMKNRLCTDLYLLFPGFLNVFSGPFGKTALAVLKNYPSPRAIRDADTDVLTLLISKTSRKSSEGASNKVALLCDCARLASSMPSEFSLLDTKIKFHIDGIEHMQACLNGIEAQVHTMIESSQFPANAKRNIELLDEIPGVGFFTAATLLAEIGDFSLFNSPKALTAFFGLDPSVNQSGKFKGDQNKISKRGTRIGRRVLFTVAMASIRRTRNGKQINPVLRDFYASKCVSKKKKVALVAVMHKLLHYIFAVLRDQKTFKFRKPEDHQSWREDKPQPVAA

SEQ ID NO: 406621 - protein, 460 aa, unidentified
MGELRLGIDLACREAHRAALADETGRLLWINHCFYSRPADLERLWAAVQNAASGGEAVVVVMEPTRNAWVMLAAWQRARGATVRLVPPEQSADLRKYYNKHTKTDRLDAVLLARLPLLHPDGLVATPGLGPAESLRRAVGRRAALVARRAAAGHRLEALLELLGPAWTAVLGTDPGKVKAACSVLERYADPHALHRLGRARLARLLIRASRGQWREDKADALLAAARETLALWPEGSIDFAELAEDIAAETRLLRGLLNEIDQLDDRIAASYQHADPTGIVASAPGLGPVLAAAILGRLGDPARFRDLAAVRAYTGLVPKIDQSGTTERHHGLTKAGDHVLRYALFFAADHARKTDPTLADRYQRLRDRGKHHNSALCTLAAVLITRIAACWRAGQHYQLRDLHGHPITDAEGREICNKINTAASRARSATNTTTGRRRKESHSAPSTGPSTPQPTTSPA

SEQ ID NO: 406622 - protein, 398 aa, unidentified
MAAVMIGVDPHKGSHTAVAIDAAEVPLGTVRVAASASQAARLVDWAAGWPDRTWAVEGAGGLGHLLAQQLVAAGEQVVDVQPKLGARVRLLSTGTPDKNDPNDARSVAVAALRSPSCPQVAADGHALVLRVWSRRHRQLSSLRTQAACRLHAVLCELIPGGVPQVITANRAASILDAHRAAGPAGQAWHDLAAEHLADLRRIDTQLREARAKIRTAVRASGTSLTGIFGVGPVVAATVIGDVADITRFPTAGRFASYNGTAPIEVSSGGRKIYRLSMRGNRRLNHAIHMAAVTQIAHKHSDGRAYYDRRLKEGKTPSEARRALKRKISNAIYARLQADARRAAAGPGGQPGNDSHAGATGSHPERQLFGQATPEPGHHPTPAPITAEPRKPRKLRQTP

SEQ ID NO: 406623 - protein, 308 aa, unidentified
MSAHPIHLGVDFAKEKFDYHGADLRGTLPNTPAGHRRFLSMLPEGAQLVCESTGACHRALVAAAHAAGVAVTVANPRQVRDFARGLGRQAKTDPIDAQSLYDFGRLTVPKADLAPSPAQTALQELVVARQQAVLERSTVLLQAAGHQLPLVKALHRARLKLLTAQIGKLEVAIAKTLAAEAALAARAARLAEVQGVGPLTAATALALCPELGTLSRGQAAALLGVAPFNHDSGALQGQRHIAGGRLRLRGAIYMAALSAARANPILRVFYQRLRAAGKPAKLALTAVMRKLFILLNHLLKHPHFQLAT

SEQ ID NO: 406624 - protein, 423 aa, unidentified
MKEWKEITHYAGFDWARDHHVVVIVNQQGQIVADFEFEHSVEGWKSFGEKTAGFANLAVAIETSQGAAVDQMLQRDYTVYPVNPAAAASYRQRKAPSGTKTDHLDGWSLADALRVDGQGWRALQPADELSTQLRLLCRDEVALIAQRTLLVNQLQQALVEYYPAALEAFEDWVSPATWDFVLEFPTPEALTKAGKRRWEKFLHTHRLWRPETVEKRLAIFSQADQFKASAPVTKAKSQLALSLCKLLRTLQQQLDQYREQIEALFKNHPDHDLFGSLPGAKKMLAPRLLAAIGSDPGRYGTFQVLQSFAGTAPISFESGKIHKARIRWNCDKFMRHTMHLWADCFHRVSPWGQAYYRKKRQEGMTHACALRCLGQRLLKILFRMISDKKSYDAELHARNQKKHGSWVLALIEKPAAQIGEQPL

SEQ ID NO: 406625 - protein, 424 aa, unidentified
MKVTFQTCCGVDVHKSFLVATIIKTSSGIEPSYQKRRFSTFNNSILEFKKWLLENECLYVCMESTGKYWIPVFNLLEDEINVTIANPKWVKSVKGNKDDTKDSKWIGDLFRLGLVRGSYIPCKKIRILREFTRYRYKLVSCCSSEKNRYQNALTVCNVALDSVVSDIFGKSSTSIIDYLLEQSGTSIDHEVIASKLLKRLKAKEDAVIESIEGYQMTDSQKYRMHLIRAHMDYITAAINDVDSEIESLIASDPDYENAVELLCTIPGVKYDSAITIISEIGIDMSQFYSSKRLCCWAGLTPGSNESAGKKKSVRITRAGVYLKPALVQCAHAAVKSDKSSYYKKKYESLVKRRGKKRAIIAIARMILTAIFQMLTTGETWNPCDLYKIDMPEALLEKQKQKAIKQAQKLLIREGLLPPTEPIAS

SEQ ID NO: 406626 - protein, 411 aa, unidentified
MQRVIGMDIHRTFAEVVFWEAGRLRPGGRVDMTRSGLEGFGRSLSKEDEVVVEATGNAMAVVRVLSPYVARVIIANPLQVKAIAHAHVKTDKIDAGVLASLRAAGFLPEVWLPDADTELRRRLVARRNQVVRHRTRIKNEVHSILQAHLIPPCPHADLFGRLGRNWLGRQELPVDERAAIERHLRELDRLGEDLELLDREIAERVIEDQSVKRLLTITGVNIIVAAGLVAAIGDIQRFSSPQKLVSYVGLNPRVRQSGLGLAQHGRISKRGRSHARAMLVEAAWAASKAPGPLRSFFLRIRARRGHQVAAVAVARKLAVLCWHLLTKDADYQWARPALVANKIRAMQLQAGQPARKGNKRGAAYAYNIKELRDREIDVARHAEHAYEQFVSRWQPRGPGKRRTGAGNEERR

SEQ ID NO: 406627 - protein, 338 aa, unidentified
MSESALIGIDLGKHTFHLHGQDKSGREVFRKKCSRAQMMQFFASSQSCVVAMEACAGSHCVARQLAAIGHTPKLISPQFVKPFVKGNKNDFVDAEAICEAASRPSMRFVTPKTESQQTLSVLHRMRESLVRDRTRTANQMHGFLLEFGVSLPRGLAIMKRLAVVLAEHELPVRLTVLLQRLHNHLIYLDEQIKAMDKELACQVADDDLGSRLLSIPCVGPITASLLAVEMGDGKQYRCSRDFAASVGLVPKQYSTGGKANLLGISKRGDKHLRQLLVQCSRVYMQRLDHQKGALADWVRSLLSRRHSNVVACALANKLARIAWAIAAHHTQYEAGPGA

SEQ ID NO: 406628 - protein, 331 aa, unidentified
MKPTIFVGIDISKLTLDFAVIKEVDFVLTKKIENSAKGINEFMGTLKSDFRSTRGNTVYCAEQMGIYAKFLKEVFWRRKAHICFETPLQIWLSLGIQREKSDVLDAMRIADYARKNAGTLKFWSPPRSCIEKLRTLRSIRKKLLKIRAMIMSTKTVESHFLTGVRRDEVWKYSNASLKSVESDVKIIEKEMAEIVDHDEQLRELVGLITSVPQVGEIIAIEMIILTNEFRDITSPKKFACFCGIAPFSRTSGTSVNRKPKISPIGNKDMKKILHLAAIQSAKPGKTSIKTYYARKVGEGKNKMSVLNAVRNKLVRVIFACVREKKPYEERV

SEQ ID NO: 406629 - protein, 384 aa, unidentified
MPADYRHDQTAIRIDLGAIFVSLELSRATWLITSLSPGRQKMSKHRVRGGDIAGLLACFAELRAKAQTRTGQLFPLIVIQEAGLDGFWIHRVLQSEGIESHVVDPASIATSRRRRRAKTDKIDGEALIRALLAYKRGEPRVCAMVKAPTCREEDDRRICRERSVLTAERVAHVNRIKGLLFAQGISDYEPMHRCRRARLDELKTGDGRPLPPQLKAQVSRELDRLELLIQQIEAVEAERDALLASTESADKPAPTALLLGLKGIGPEFASVLWSEGLCRSFANRRQVAAYAGLAPTPWQSGTVDREQGVSKAGNPRLRTTMIQLAWLWLRHQPDSALSRWFHERIERSRGRRKTIIVALARKLLVALWRYVTAGIVIEGATMKA

SEQ ID NO: 406630 - protein, 420 aa, unidentified
MVYLERGYNLKELPWSKIVSNSFLFKEACMILVGVDVAKDKHDCYIMTSEGEVLFKSFTIANNMEGFNQLYEKILSVIDNFDNVKIGLEATGHYSYNILGYLLDKGLTPYVINPLHSNLYRKSLSLRKTKTDKVDSHIIASMLMSDVSLKPYSNTLYHNEELKSLTRYRFTKVQERAKLKISISRLVTILFPELEKLVPTLQMNSIYALLYEFPSAHAISKAHLTRLTNLLNTTSKGHYTKDKAVLIREAAKNSIGSNMPAKSLELKHTIKLIKELTSEINEIEEEIKIIMNKINSPILTIPGIGLSTGAQILAEIGDFKNFSSPDKLLAFAGLSPSTYQSGNMYSSNAKMEKRGSKYLRFALFNAAIYVSYWEPTFSQYLKKKRVEGKHYYVAISHVVKKLVRVIFHLEKTNERYSTVI

SEQ ID NO: 406631 - protein, 391 aa, unidentified
MTMYFVGIDISKYKHDCCIISAANQKVVSKFTFKNDKSGFEQLNLILNSLSTPEDIKIGFESTAHYALNLELFLENANHSFMEINPVLIKDFKKSQTLRRTKTDSIDCELIARWLMTVEYKPHSKGFYHAYSLKSLTRLRDMLVRQRSFYLVKITNVLDHTFPEFKPFFHERLSKTALYLLENYGSAEKIARMNSASYEKLRSISRGKFSPQQFIRLKELAANTVGVNNSIFDVELNSLLTLYKSLVDEIKTLESEINRLVDEVHPHYMSIPGIGPISAAIIYAEYGDISNFSSPNQMLAFAGIEPSVHESGTEAYNGKMVKHGSSQLRYVLINCCLPLIRFDVTFATYYARKRSENKPHRVAITHVAKKLVRVIYALESQDIDFDPKKLR

SEQ ID NO: 406632 - protein, 344 aa, unidentified
MEYYAGIDVSLEASSVCVVDASGKIVREAKVASEPDALALFFGDLDCEVTRIGIEACPLSQWLHAGLSAAGFAVVLLEVRHVKAAISAMAVKTDRNDARGIAQLLRMGWYRPVHCKSQPSQDIRALLTARKQLLIKAIDVELCLRGLLRGYGLKMGVTTGPRFAGRVRELTSGHPVLEPLGETMLRARDVLRREIAVLHRQLLTIARTDGVCRHLMTVPGVGALTALTFKTAVDDPTRFTSSKRLGAHFGLTPRKYQSGTVDVTGRITKAGDAMVRSALYEAAHSMLTRVKSFSSLKRWAMAIAKRRGLGRATVALARKLAIVLHRMWIDGTDFRFGKEQVATA

SEQ ID NO: 406633 - protein, 355 aa, unidentified
MKKVLKQVLGVDVAQGELVVTLGRMFDDLRVDLYAHKVCRNTENGILTLLDWVKKLTDPEVNVRFVMEATGVYHQKFAFYLYAQNYEVSIVLPNKISNYMRTLENKTITDKSCSEAIAQFGLERNLDRWYKPKKTYRSLQQLTRERDQIVMERVIVKNQLHAEQAEAEPNERSVARLNERMRLLNKHEKEIKSDLTEIINSDRILKSEITNICSIPGIGELTATIVLAETNGFEMIRNKKQLTSYAGLDVKEKLSGTSVKGKPSISKKGNRHLRKAMHLPALSAVKYDENFRNLYVRIVSRQGIKMKGLVAVQRKLLEMIYVIYKSKNEYQKDYIDLKRSSALSQKDKYATQTGS

SEQ ID NO: 406634 - protein, 344 aa, unidentified
MDHFAGLDVSVKETSICIVDDTGRIVREVKVASEPAALLKVLGNPTYRFKRIGLEAGPLSQWLFSALAEAELPVICVETRHMQAVLKAQINKTDRNDARGIAQMIRVGLYRPVHVKTLRSQKLRMLLTHRKLLQSKAIAIENDLRGTLRNFGLKVGMVGKVRFEARIQELVENIPDLAVLVEPLLIVRRVLREQIVILHRRLLAIVREDEVCRRLMTTPGVGPVVALTYRATVDVPARFRKSKSVGAVFGLTCSRYQSGEIDWSGKISRCGDEMMRTMLYEAAQSMMHSKKWSWLKAWAMQIARRRGMKKAIVALARRLAVIMHRIWIDGTEFRWTREQAAAAA

SEQ ID NO: 406635 - protein, 343 aa, unidentified
MNITITGLDLAKSVFHVVCFNNQFKEVKKRMLRRSQVLHFFTQLPSCRVAMEACASSHYWGRELRALGHDVKLIPPQHVKPYLRGNKNDYNDARAIAEASTRPGMPFVAIKSTEEQDMQAIHRMRSQCIRDRTALSNSTRGLLGEFGIALPKGLATLRKSIHGILEDADNGLSDRFRKLLARRYDQFVALDDHIAFYTNELEILSQQDDACQRLQTIPGFGPVISSAFRSVIGDGRAYDRGRDASASLGRVPRQHSSGGKNVLLGISKRGDRYLRSQLVHGARAVVIQAARKDDPLSKWINRIREERGWNKAVVATANKMARIGWAILRHNTIYQPDSEQSIH

SEQ ID NO: 406636 - protein, 347 aa, unidentified
MHKINVIGVDLAKNVIQVSVVSGSNRELSNKSLTRKKFAEFLARQKPCLVAFEACATAHYWARFSRRHGHAVKIIPAKVVAPFRQGHKTDPNDALAVAEAARRPNVKLAPMKSIEQQGLQSVQRSRELLVQNRTALSNHVRGLLMEFGLVIPKGWAALHRRIPDILEDGENELPDMYRPTLHLMWQRLRDLREDIDQLTKEIDTLVKQNAACRELLAMEGVGPISAVLLFATLGTGEAFVNGRQFSAYLGLTPKQFSSGGKVNLVGISRHVANKRLRAVLIQGARAYVTHMKEPKSSKDRWLQALIERAGAGKASVALANKNVRTAWAMLTTGESYQRHYQAVQQAA

SEQ ID NO: 406637 - protein, 355 aa, unidentified
MNSEKYIGLDVHQATISVAVMDSMGKLIMESILETKAATILEFVAGLRGTLSVTFEEGTWAAWLYDLLKPHVDELVVCNPRKNALLKDGNKSDRIDARKLADRLRLNDLKPVYHGETGVRMLRELARSYLNLVKDQTRVMNRLKAMYRSWAIPCAGRDVYYARHRAEWLGKIREAGVRRRAEHLYQQLDMLQHLRQQARRELLAESRQHAITAKLRQIPSLGPIRSALAVALIRTPHRFRTRRQLWAYSGLGLETRTSGEYRCVEGQIRRSKKQISIRGLNKDHNHDLKGLFKGAATRASVQPGPFQDFYQRSLAKGIKPTMVRLTLARKIAAITLTLWKKGENFDAEKLKSQAA

SEQ ID NO: 406638 - protein, 352 aa, unidentified
MKTASKKMNYKGAKVYIGIDVHKKTYTFSAYCDGAIVKTATVPADSRKFVESLKKWFCGAEIYSIYEAGFSGFKLHRVLESAGIKNRVINPASLEIAAKDKVKTDKRDSKKLAEQLGVGRLKGINIPTEQEELARLITRTRGQVLKDRNRVGHQIKSRLHYFNLIEAEDDRVISDKLLREYEAEDYPSELRLSLQMLIDHWRFLTQQLEDLKIEMKAQSFEDSYNEMVYQSIPGVGDVSARVLSNELGDLSKRFKNQQALFQFVGLTPSEYSSGENQRLGHIDRQGSARVRKILVECAWRAVTIDGALKECFERIAARRGKKRAIVAIARKLVGRTRACFVSGYEYNLGVAV

SEQ ID NO: 406639 - protein, 285 aa, unidentified
MKYHIGIDISKRDFHVCFDEGEIIEKFGTTEIGIDFFLNALKKKNMTTGKTLIGMEATGSYHLPVAYRCTKAGYTVNVINPLITKRQNQTNLRRVKTDSSDAKLVRQCVKNGAGYPFRETAETIKLKTLVRQRARFSMLRHRTRLRDEEIQNRERYLEVEITALDKDLYDFLDERIKTLDAELRTHESPTQKLLQSIPGVGPQTAVTCLSEIGDIHRFSDGQKLTAWVGLDSRVHQSGTSINGKGYITKRGNKLLRTRLFNAASVVVNNDLNFIFIIQIACSDSY

SEQ ID NO: 406640 - protein, 358 aa, unidentified
MQRNEITFKGQSIFIGIDVHAKNWEVAIASEVGVVRRHSQKPSARELFDYLKKNYPDGEYQAVYESGFSGFSTYYALKEVGIGCMVIHAADVPTTQYEEVMKTDRVDAAKLARSLKAGQLRGNYIPEKQFIDDRSVVRIRRTIQKQLSGYKSRVKHLLHCHGVEMPERFSKVQTHWSRAFITWLKNDVRLMSDTRASLDLLVRQVEVIRGTLLEATRQLRKMSQTERYRRRHDLLRTIPGIGPVVSMSILTEICDVKRFHNEKEFAAYLGLIPTSHSSGEKTVHGEKTFRGNRLLGPMVVEAAWVAISWDAGLEAQYFQYRKRMKPQEAIVRIARKLSNIIFSVLKNEKEYVPYQAGN

SEQ ID NO: 406641 - protein, 338 aa, unidentified
MNKFSEIDLHSNNSVVVVSDEADRVVYQRRLPNDPVQIRAALAPHRADLVGVVIEATFNWYWLVDELMNDGYHVHLANPAAIRQYEGLKYSGDFTDAAHLAHLLRLGLLPEGYIYPAEERPVRDLSRKRRQLVQCRTAQILAIENLFSRHTGAQMQGERVKCLDQTQVNGFGFEPDVTLAVQANLAVMQTLQEQIGIIEKRLKERVKLHPDYALLNSVPGIGPILATTIMLETGTISRFADVGNFSSYCRCVDSRRESNSRKKGKGNAKNGNKYLAWAFVEAANFAIRSCPEARRFYERKKRARNGIVAIKALAHKLARACFHILREHKPFEVTRCFG

SEQ ID NO: 406642 - protein, 340 aa, unidentified
MEGLYAGSDLHGNSNFLGIIDAQGKRVFKKKLPNELVLIRQTLQPFQGELVGIAVESTYNWYWLVDGLMEEGYKVHLANPSAIQQYSGMKHSDDKHDAFWLAEMLRLGILPEGYIYPKEERPVRDLLRKRGHLVRLRTSLVVSLQNILSRNLGRKVDVKDVKALREDRVSLLLEMSEDLALAGRVSKEAIDHLTRQIYRIEWAVQKRIALKEEYGYLLTLPGVGKILALTIMLETGPIGRFETVGDYVSYCRKVPSQWISNGKWKGSGNRKNGNKYLSWAYAEASEFARRLYPEPRAYYYRKMQKTNAAVAHSALSNKLARAGYYVMRDQVPFRPEKLFG

SEQ ID NO: 406643 - protein, 378 aa, unidentified
MSNCTRYLGLDVHAETITAAIAEGRGRIRSLGKFPNRPEAVRKLVEKLGGGKNLKVCYEAGPTGYALYWQLVKLGVDCEVIAPSLIPKKASDKVKTDRRDAEKLAQSYQSGDLTPVWVPTPEHEALRDLVRQRAAAKADESRAKHRLVKHLLRRGLREPDESRAWTHPWWRWVQALKFEHEAQQVALADCIAEVLHMGERLARLDKAIDRLVESAPPHMRAVIEALQALRGVAKLTAVTIVTEVGTFKRFRRATEMMGYTGYVPSEYSSGGRESKGRLTRAGNAHLRHVLGEAAWHARHRPWLNLRMRKVLPTLPPGVAEIAWKAQERLHRKFTRLTYCRKPAGKVAAAVARELVGFIWAIGTLVESRQNHSTKTRAA

SEQ ID NO: 406644 - protein, 424 aa, unidentified
MNLTQNDKIEQIKDETLVVGVDIGKETNYARALDNRGRELKKHVKFTNSREGFRAFDKWVSEISLANEKTDVIVGFEPTGHYWFSFGDHCKKLGHKLAIVNPMHVKRTKELDDNSPTKNDKKDPKTIAMLVKDGRYREVYIPEDIYQELREAVYEKERLTDLTVSINNQVIRWIDIRFPEFTKVFSKWYGHAALMALKNFPTPEKVLKAGVDNIVSKWKEEISRAVGRKHAERLVNAAAESIGRKTGIISSEASLKNLIDQYELIMRQMKEQEALMLELLLRVPNADKLLGIKGIGLIAVATFVSEVGDIRRFESPKQIIKLAGMNLKEDSSGKHKGKTRLSKRGRKRLRHSLFKAMITVLAKNTEFKAIHRRNITREINPLNKMQSIFALCGKLIRVFYAILSKGTEYDPNKLMIEIPSMKAA

SEQ ID NO: 406645 - protein, 459 aa, unidentified
MNDKQHSKKKHQPAVVTMTVVNPDAAGIDVAAAMHVVAVGPDRDPNPVREFGAFTEDLYKIADWLQACKIATVAMESTGVYWRQLYLVLTERGFDVVLVNAKHVKNVTGRKTDQSDAQWIQKLHSCGLLQGSFLPDDGISILRTYVRHRSSLLKDSSKYVLRMQKAMELMNIKLAEVINDIMGKTGREIVEAIIRGERKPENFLRYVDRRIKADSATIMKSLTGNWRAEQVFLLQENFELYKYVQERIRRCDEEIEKSLQLLAAIANEGVIEAAPADNDLKKKKPTKKKKSKNHPEFNVRQYLKKIHGVDVIEIFGISESTALTILSETGTDLSKWEHEDKFVSWLNLCPNNKISGGKLISSKVLKRKPGLASEAFRMAANGLQRSDNWLGDYFRRMKSKGGNKFAIIATARKIAIIYYKMIKEKIEFMPVEVEAYRKLHNENKIKYLEKKLAKLREVA

SEQ ID NO: 406646 - protein, 436 aa, unidentified
MDIVHPRVAGIDVHKKVIWVAVRLPGDVPGERKVIVKSFRTFWRSLQKMAAWLAELGVTDAAMESTGVYWWPVYHALAGVGIEVCVCNAAHMRNVPGRKTDLKDCQWIAELHEHGLLRPSFIPVAEVAALRQRTRYRKRLIEARTAEGQRLSKVLEDAGIKIDSVASSLNTASARDMIEALIAGERDPALLARLARGVMRKKIPELQMACDGRFTASHAQMCRLHLGAWDHLTAQIAVLDELVAAAAAPFERVIARLVTIPGIGQRTAEVIVAETGGEMSRFASSARLAAWAGLAPGDNESAGKRKKAATRQGGRHLRPAMVESAWSVSRTATRPGARFRRLARRFGKGNEKKAAVAVAHTLLCIAWAVMKHDSDYTEAGADYYDHRDRRNHEHLARHHQQALVRLGYQVTLHPPDDGSPPPGPGTPAAQPPQQAA

SEQ ID NO: 406647 - protein, 370 aa, unidentified
MNRLFVGMDVHKEKIVSVGLPQEQNVPVFREVFAGTDFPRLVKRLLRLSKSYQVEVCYEAGPSGYGPARALGKAGIPCRVVAPSLVPRRPGDRVKTDIRDAMELALALRAGTLKFVRIPTLEEEEVRGLVRCREDIAKEVRRAKQIIAHWLLLHGHRVPQGVRTWTPAHWRWMRGLELSSLDRTVLDHYLDVAHMLGERLKLIEGQVVALADTEGFRNRVARLEAFKGFSKLAAMRVIAEVMEFARFPKATSFMKFTGLVPSEYSSSDRIRRGKITKAGNSHLRHVLVEAVQRARTAARPGRSLARRLSAICGPQRQVALSALTRLHHKFWRLTARGVSAGKVKVALARELAGFVWAMMTIPETPEAAAA

SEQ ID NO: 406648 - protein, 337 aa, unidentified
MKYSGIDLHSNNNVIVVSDETDRILCKRRVPNELKTVLAVFEPHRAELAGVVVEATYNWYWLVDGLQAAGYRVYLANTSAIKQYEGLKHSNDDSDAMHLAHLLRLGIVATGYICPREERALRDLARKRLQLNRSRTAHILAVENIVARQTGGRMSGFAVKQLTVEELKKLGQLEDVTLAMSANVAVIQTLTAQIEKLEARLLKQVKPRAEFKLLISVPGIGEVLATIIMLETGAIERFAQVGNFASYARCVDSKRLSNGKKKGEGNVKNGNKYLAWAFIEAANFARRFCPEAKRFYERKKAHTNTIVATKALAHKLARACYHMLKDQVPFDVKRCFS

SEQ ID NO: 406649 - protein, 465 aa, unidentified
MKRHRRRRSPKPRTSPAALERLQPDAAGIDCGSAEHFVAVPPDRDAPPVRAFATFTGDLHRLADWLTACRVTHVAMEATGVYWIPVFEILEARGFQVILVNARHVKNLPGRKSDVSDCEWLRDLHILGLLRGSFRPADAIVALRGYLRHRATLIENAGALVQRMQKALIQMNIQLALVVSDITGVTGLRIVRDIVAGQRDPVHLAQHRDYRCHASEAEIVAALTGNYRAEHVFVLQQNLELFDVYQTQLAACDTAIEAHLVHLTATATAPTTPLPPARRRQKPRDNEPRFDLRTPLHQLTGADLSQIDGIGPYNALRLLSEIGTDMTRWPTDKHFTSWLTLAPNNKISGGRLLSSRTQPSANRAAAILRLAAMNLGRTQTALGAFYRRLAFRVGKAKAITATARKLAILVYRTLKDGLVYADPGAEMYDAQHRTHVLRRLRQRAQNLGFGLIDLSTGEVVDGSVS

SEQ ID NO: 406650 - protein, 321 aa, unidentified
MTYVGIDVSKATFVVAYSSAKSSETKTFKNTTKGIREFIRTISSEENHCVLEATGNYSMLLVYLLSKAGFTVSMENPLKIKNFARVMLSVVKTDEIDARLIALYGERMQPAPFKLRSDSLLLLKQKRTVLRQLKKQLTANRNLEGSLKVLPFIDSKCKKVLEKTIKFLEKQIQEMEEELTSLAEIEYKKQMDLLTSIKGIGATLAAALIIATGGFTYFDNAKQLTRYLGLSPTYQQSGTSVNVKGHINRNGDAYLRSQLYIGAMASLRCNTECKACFDRLRSNGKPGKLAIVAVANKLIRQAFAVVAHEKKYIDGYKSVKP

SEQ ID NO: 406651 - protein, 346 aa, unidentified
MTIVETRAITGGVDTHADLHVAAALDPIGGLLGVREFPATAAGYARLLGWLGGFGPVCLVGIEGTGSYGAGLARHITTAGIRVVEVDRSDRQDRRRQGKSDPLDAVSAARAAQSGRARGASKGRDGAVEAIRALMVAKRSAAGERTQTINQARALILTGPEDLRARFTGHTVAALVAELASLRPRPGSTVGYATRIALRELGRRAEFLDAQLGRLDELIGPLVAAHAPGLLALYGIGPNTAALLLIAAGDHPGRLRSEAAWAHMCAAAPIPASSGKTVRHRLNPGGDRQANHALWRIVFTRMGSHPATRAYVERRTAEGKSKKEIIRCLKRYVAREVYPHLRASAR

SEQ ID NO: 406652 - protein, 383 aa, unidentified
MQPTRIDNFTPAEDVLAVSLELSSGAWKIAFHDGKREKPAIRTVSSDSPSSRLEETVQEIEKIKAKWGLGLGIRTVVLYEAGQDGFWIQRALSKLGYEALICDPGSIPVERHARRAKTDRLDAIKLVLCLRAWLRGEVDRMHVITVPSVEDEAQRQLSRDRGVLQKEAMQHGDRMRKLLRTVGCWQSVEGNVAARLAKGEFRCYDGLALSPELHERLRRECERLVLVDQQLSVLEQELAYQLPEGTQERIANLERLKAVGTVGATRLVLELFWRHFDNRRQVGSCVGLVPQPYDSGASRVDQGISKQGNRRVRSLLIEMAWFWVRYQPDSTIAKWYRQRTQSSGQSKRGKRHAIVAVARRLAIALWRYLEHGVVPDGAVLKRS

SEQ ID NO: 406653 - protein, 342 aa, unidentified
MKEVPHVIGVDLGKSVFQIHAVDGTGRVIARRRLRRSEVLSFFSRCSPTIVAMEACATAHYWAREIGGLGHEVRMIAPQYARAYVKTNKNDAADAEAICEAALRPTMRFVRPKSLDQQAMQMLHRARDLLIRQRTMLVNALRGHLAEFGITTGHGIGNVKSLLIKFEDVREKLPSLAGDVIDAVTHQLGALQGEIEKLDGKMLSWHRSSEASSRLAAIPGVGPVIATALIAKVGDASQFASARHFAAWLGLVPRGSGTGGKIRLGSITKRGDGYLRRLLIHGARAVLRWTGRRPAASSAWLRQLLARRPVNIAVTAYAHKIARVAWAMLYRNETYRSASAVA

SEQ ID NO: 406654 - protein, 344 aa, unidentified
MKNTTIAIDLAKSVFEVGVSDRPGHVAAKHRLSRAEIAVFMANQPATTVIMEACSSAHYWGRTFQGFGHEVKLLPPLYVRPYVQRGKTDRADVKGMLEAWRNSDIRPVPVKSESQQQLTSLHRIRAGWMTTRTMRINSARGLLREFGMVFPLGAAGLADRVREVIADDKTNLTMPVRELLHQLVVEIGELEERIEMVEQQLQALAAQTPVVARLRTIPGVGLLTATAMVGFIGEVQRFPSGRHFAAYLGLTPREHSSGSRRRLGRISKQGDVYLRTLLIHGARAVLVAARSKSNPDRFFAWALQLQRRCGHNKATIALANKLARIVWAVWKLDQPFESRPQSTD

SEQ ID NO: 406655 - protein, 326 aa, unidentified
MNLSCVLGVDIAKLKFDVCLIKENGKAKHKVFANTTHGFEQLVVWLVSHQAGSLHVCLEATGSYGDALATHLFDAGLTVSVVNPAQVKAFAASRLTRTKTDKVDAELIARFCLAHAPQAWQPPAPEVRGLQALVRRLESLIEMRVSEENRRSSGISIAAVRDSLEEHIAYLREQIKLTEQLIREHINNHPDLKEQSDLLDSIPGIGVTTAALLLAEITDFTRYQSARQVAAYAGLVPRERRSGSSVRGRTCLSKIGNARLRKALYFPAITALRCSGFFQQWASGMRERGKSKMAVIGAAMRKLIHLAYGVLKTGKPFDPEWMTKTA

SEQ ID NO: 406656 - protein, 471 aa, unidentified
MSTTPTSSKQRRGVRIVSKTKVPLPPQLKRVNLDAAGIDIGAEEHWAAVPPGRDTEGQDVRRFGAFTGELCALADWLKQCGIQAVAMESTGVYWIPLYELLVERGFEVRLVDARQAKNVPGRKTDVLDCQWLQELHTYGLLRGAFRPVDQVCILRSYLRQRSMLVAYASHHIQHMQKALEQMNLKLSHVVSDITGLTGMGIIKAILSGERDPVKLAKLRDPRCKSSEATVARALEGHYREEHLFALRQAVELVEFYQQQMTACDRQIEACLQQFEEKSSETPVTTRRRKRRRGGIAFDACSYLYRMTGVDLTQIDSIEANTALTVISEIGLDMSRWPTEKHFGSWLGLAPGSKVSGGKRLSGRTKPSANRAAAALRLAAQSLNQSQSALGAYFRRLKARLGAPKALTAAAYKLARIVYRMLKYGAGYVDQGEAAYEERYHDRLLRNLKRRAAELGFQLTAIELNSGQAALT

SEQ ID NO: 406657 - protein, 350 aa, unidentified
MEIYTIGIDLGKTVFHMVGLNVRGEAGVRKKFSRTQLLRFTAKLRVELIGMEACRGAHFLGRALREQGHEVRLIPAQYVKPYVKTNKSDYIDAEAIAEAVGRPTMRFVPIKTDDQLDLQSLHRVRERWVMRRTAVINQIRGLLFERGITLRKGRCHLETALPDILEDADSKLSSAVRLLLVQLKMELAQLAMRLEEADALIQKTAQESEVCRRLDTIPGIGPVTATALLAAIGNGRAFRKGREFAAWVGLVPREHSTGGKQKLLGISKRGNGYLRRLFVQGARAVLQFREKQSPGLRAWLAQLTSRTHYNVAGVALANKLARIAWAVLAKGEVYRPPLLVSSASADLACR

SEQ ID NO: 406658 - protein, 345 aa, unidentified
MFTEKISTKDRIINNDKYDYYIAIDWSQRNMAIATLRKDSNKPRITDVDSDVKILKTYLSSLKGSKIVTIEETTSTHWLYVELYDYADKILICDPYKNKLLSDGAKTDKLDAVKLCKLLRGGLLYEVFHNLGKTYELRQLVSDYEQLVKFGTRVKNEKSAIYRSAGKSYKKLEAIDDKTLDWIISHKDRRIELYENQKAEYEKIFNEKIKQSKDLKHLKGVNGIGIIGAVKILSSVIDANRFENAGKYLSYCGLVQHQKMSGGRSYGKRKTRYSRRLKSVYKTAAMSVINGNNSLREYYDSLLKKGTSQDNARHRISRRIAIITYGILKTETKYEPYKWRESAAK

SEQ ID NO: 406659 - protein, 339 aa, unidentified
MNITTVGLDLAKNIFHVVCFNEHNKEVKKRMLRRNQVGQFFAQLPPCLVAMEACATSHYWGRKLCLMGHDVKLIPPQHVKPLVQGNKNDYNDARAIAEAVNRPRVSFVAIKTMEEHDIQAIHRIRAQCLRDRTALSNSTRGLLAEYGISFPKGIATLRRRIPELLEDAENGLSLRFRNILARRYEQLAELEEHIAFYTKELELLSQQDEACQRLQTIPGFGLITASAFRSTIGDGQVYACGRHAAASLGLVPRQCSSGGKNVLLGISKRGDKYLRKLLVHGARAVVRHAATRDDSLGRWIVRLQERRGWNKTVVAVANKLARIGWAVLRHNTRYEMNLA

SEQ ID NO: 406660 - protein, 358 aa, unidentified
MRIIGVDLHARQQTIAMLDPETGELVEKTLKHEGETVREFYSALPHPVLVGIEATGSMYWFLELLEELGIERQVGHPAEIRAAEPRKQKHDRRDAALLLKLQVENRFPSLWVPSAELRDLRALLRHRHQWVRMRTRVQNTLQAIALSHGLRRGQSLWSQAGQQAIASLPLAPHAAHRRTELQALNCKLGKQIDELGERVMDQALQRPGAKLLMTHPGVGPVTALATDVFLGDPARFDDGKEVASYVGMIPSEYSSGGRQRLGGLSKQGNPLLRFLWCEAGIHAVRRDPELKRFYRRKLQQKGLGKTRVAVGRKLGIRLWIMLRDQIDYQEFCRRGQMRQKSGGARAGMPEGVHSPARS

SEQ ID NO: 406661 - protein, 325 aa, unidentified
MEKAVLGIDMAKKNFDVVLWQAGKQVHRSFANREEGFEQLSHWLQKQGVEQVHACLEATGRYGEALAHYLYERKHSVSVVNPAQIRDYARSKLTRNKTDKLDAGIIAQFCLKEEPALWAPLAPEIQELQALVRHLEALQDMRTQENNRLKSANPSTLVQTMLEEHLHFLDQQIQDVQKRIEEHIRRHPNLKQQRELLLSIPGIGKKTAAKLLGENIQSFSDGRHLAAYAGLNPSQSRSGSSVRKRTKLSRIGRTGLRKALYFPAISAMRFNPVIQNFCDRLVDRHKQGMIVIAAAMRKLLCLALGVLKSGQPFDPHYRHPKLAHP

SEQ ID NO: 406662 - protein, 341 aa, unidentified
MAEVCTIGLDLAKHVFQAHGADASGAVLFRKKLRRAQVLSFFATQPPGTVAMEACGSAHHWAREIGKLGHAVRLIPPAYVKPFVKRQKNDAADAQAICEAAQRPTMRFVAPKSEQAQAAALVFRARDLLVRQRTQIINALRGHLAEFGIVVAQGPAHVSSLVRAVEDPAEPVPEIARAILSVLIEMLHTLDGRISLLDREIAQRAKEDVTARRLMTIPGVGPITATALTALAPPAETFKRGRDFAAWIGLTPLQHSTGGKQKLGATSKMGERTLRRLLIIGASAVLRWAARHGAPAGSWLSRMLARKPPMLVRVALANKMARMVWALMAKGGVYRAPAVSV

SEQ ID NO: 406663 - protein, 340 aa, unidentified
MGQITTIGLDLAKHVFQVHGVDADGATVLRKQVRRSQLLAFFSKLPRCLVGMEACATSHYWARELRALGHEVRLMPAQYVKAYVKRNKNDAADAEAICEAVLRPTMRFVPVKSADQQAALLLHRGRERLVSQRTTMANALRAHLAEFGVIAPQGLRNVGELIAIVRDESDARLPDLARQVLQVLATQIEQLEAAVAALEKQLMAWHKSNPVSQRLATIPGIGPIIATAIAATVVEPIAFRSGREFAAWLGLVPRQNSTGGKTRLGGISKRGNQYLRRLLINGASANLLRSKATNADPWVIGLRRRRPSLVVAVALANKTARIAWAVMHRQENYQRMAAAA

SEQ ID NO: 406664 - protein, 344 aa, unidentified
MEISTIGLDLAKNVFQVHGVDAQGTAVVRKALRRSQMLVFFEQLPPCLVGIEACGTSHYWARELVKLGHEVRLMPPAYVKPYVKRGKTDAADAEAICEAVTRPTMRFVPVKSEEQQAALSMHRTRDLFVKQRTQLINMMRGLLAEFGIDIPQGINRALEKARAIVDGEALDVPPDALRIVERLSQQALDVHAQVREIERDLIVWQRKSDVATRLMTIPGIGPIGATALAASVSDPSQFRSGRQFAAWLGLTPLQKSSGGKERLGRISKMGDRYLRKLLVVGMTAVVRTAKRKPEAVDPNVLALLARKPVRVVTVALANKTARIVWAIMARGEVYRERHVPALTA

SEQ ID NO: 406665 - protein, 354 aa, unidentified
MSNKYIGMDVHQASTVIVVLNEAGKTIMETILETKTGTLLDFIQGLRGRLQVTFEEGTYAAWLYDVLTPYVERVVVCDPRKNKLLPSGHKSDKVDARKLAEWLRQGQLVAVYHGNRTLRGLKELVRSYLCLVQDVTRVMNRLKALYRGRGISCGGRAVYRLRQRDSWLALLSEPGVQQRAALLYQPLDVLQALRQTARQALLTESRKQAAFPILRQIPGLGPIRAGVVLALVQTPHRFRTKRQFWVYLGLAVVTSSSAEYRIVQGRVQKSGKPVSTRGLNPNYNRALKDVFKAAATGVSQREGPFKTLYARWLDRGLAPELARLSLARKLAALTLTLWKKGARYHPEQVTQQAA

SEQ ID NO: 406666 - protein, 340 aa, unidentified
MGQVATIGLDIAKSVFQVHGVDAEGAVVLRQKLTRRRLLGFFSKLDSCLVGIEACGTAHYWARELIGLGHEVRLMPPSYVKPYVKRQKNDMADAEAICEAVTRPTMRFVPVKSPEQQSVMVLHRTRLILTRQRTQLSNAIRGHMGEFGLAAGVGRQGLQTLIEVIADPADERVPQEARGCLSMLVDQLRLVNEQILETDRLIRTSARSTEVGRRLMEIPGVGPLLASALVATIADPKAFRSGRNLAAWIGLVPRQNSSGGKERLGGITKQGDRYLRQMLVVGALAVVRYAVRNGTRRPWLVQLLARRTPKVAAVALANKTARMVWAIMTSGERYREPAAA

SEQ ID NO: 406667 - protein, 430 aa, unidentified
MYNKNYISVGIDVGSAFSFMTIVAPDGSVIQKPFKITHNKPDSLEKAVSAIKKAEELHSLESRTFLESTGIYHFPLFCYLVNCGFHVSIINPIITHSANNTSIRKVKNDKVDSIGIAKLGLSGDIPVSQFPAKLVLEIRSLTRKYYDLTDERSAHINKLKGDLHTVFPQYLDIFCDVTGKTSTMILRQYGTPDKILRGHKKTMIEKISKASRKGLSKAAERYEKLCAAATAAKTFGCQIDSIYFNISLTLDLIEKLDSALDSILQRIHQLVTFNKSEKFIQQIKWLDTIKGVGFLTAVTIMCEIGDFSAFRNPKQLFAYFGLDPEVNQSGKFVGTEMHMTKRGSRIARRAVFAVALASIRTKRNGEGINPYLREYYEKKSGQKPKMVALGAVMHKVCNIIFAVLRDEKEFELRSPEEHCRQYQRPALQAA

SEQ ID NO: 406668 - protein, 411 aa, unidentified
MEVMYPKSSGLDVHLKFVIACVFATNEKGESKAIKQRFGTTTNQLRELVSWLQGHEIKQVAMESTGVYWKPVYNLLHPHFEVWVVNAQHLSRVPGRKTDESDAEWLTRLMQYGLLNRSFIPAEWQRDLRDLTRYRTRLIQEKSSGVNRLHKILEDANIKLSSVVTDIQGVSARAMLEALIADEMDARQMAELALGTMRPKIPLLVEALTGFVRPHHRYMLEEILQHLDELKQRISSLDRQIHLVGTPYATLLERIRELPGLDRRTTEIILAEVGPTVEKWPTAGHLASWACVCPGNHESGGKRYSGKRRKGQKWLVSALVEAAHAASRSKDTYLSAQFHRLRARRGAKRAAMAVAHSILTIVYHLIQKPEERFSELGGDFFLKKNKEQEERRAVRMLESLGFQVALTPLPA

SEQ ID NO: 406669 - protein, 347 aa, unidentified
MNNISRVGVDLAKNVFQLHGTDNKGKTVWKRKLSRDKWLDVLCNTVKPGAVIGMEACTGAHHWSRLLLEKGFEVKMIPPQFVKPFVKSNKNDANDAQAICEAMMRPNMYPVKVKTIAQQDIQAIHRVRTEIKAHRVAKGNQIRGLVAEYGLVAPQQLSSLRRAIPEWLEDADNGLTMCFRQLLHGLWQDLLSLDKRMEELDKQITTIAQQDPIAKRLQQLRGVGPLIATALVATVGDGKQYRKGRDMAAALGLTPRQHSSGGKDRLLGISKRGDAYLRCLLVHGARSAIRTAKDKDDRLSRWITSLQERRHANVVAVALANKMTRMAWAMMSQGTDYDPDFHVVSVN

SEQ ID NO: 406670 - protein, 396 aa, unidentified
MRNDVTIYVGIDFSKEKFNACLLMEQGVMGESEFPNSKTGYLKLTKWVKNTSELGRSFDSSLVLFCGEHTGTCSIGLCEYLYAKGMKIWLESALKIKYGSGLKRIKDDKADAEMIAYYAKRFYEPGSCALFEPDSADLKTLRTLYQFRNRVVCDRVAIGNRISSGAFDCSTLVRNRMVKHHKEAQKDEKDIEKEMVRLMETSEELASNYQILISFKGIGPITAAALIIYTSNFKKFDNPRKFACYCGIAPFGKQSGTSINTKPHVSRFAHIGIKAAMVQACKSAMQHNAVIKAYAQRLYAKGKHEGIVMNNVKNKVMHIIFKMIQTQTLWEQEYQQKHPKECKPIPGKNGIGATEAAPIINATLKTSSSVVECTFLEEHSFQKNGKKTSSFSCVET

SEQ ID NO: 406671 - protein, 356 aa, unidentified
MNEGSCVGLDVHARSVVAGVIDVGSGEVRSLRVPPGPEATVAWLKTLPAPVRVVYEAGPTGYGLARGCAEAGISCVVAAPSKIRPAADRVKTDRRDAERLARLLRLGEITPVRVPGPEEEAARDLVRAREDARGDLMRARHRLSKLLLRHGVVYEATAWTRAHDAWLRRNRFGGGPLAIVFDECYARMLDAKTRRDSLDAAIVELAASEPYVDVVERLVCLRGVSTLTAFALTVELGDWNRFRPESLGAFLGLTPSENSSGERRRQGGITKAGNSHARRLLIEAAWHQRSAPRLSVTLERRRTGKSLAVRAQADRSARRLHGRWGALEARGKPRLIVVVAVARELAGHCWALATME

SEQ ID NO: 406672 - protein, 344 aa, unidentified
MEQVYYVGLDIHKKIIAFCIKQADGTIVAEGKIDANRKALKQWAESTPGPWIGAMEATIFTGWVYDFLKPYARQLQVGNPLMMKAITAAKKKNDKLDARTIADLVRCNLLPCCYMASEEMRDLRRVLRYRNLLVRQAVRMKNRMATLLMETGQEYNKKKLHGAKYFRGLLEKIQDVPESFKEILQMSRGALELFESCQKKLLKELVNNEVLRERVERLMSIQGVGEVTALSWALEIGDVQRFTSIRKASSYCGLCSAQVESGGKITRMPLSKQRNKHLQSVLIEAAKLAPLYNQELADVYNKEQQRGNNHNQATITVARKLVAFLLAVDKSGKAFVKKAEQQAA

SEQ ID NO: 406673 - protein, 387 aa, unidentified
MTQVDDLSRSVDAFDQDTSLTVVVEMSEASWLVTGMVPGVDRRPLKKLKPDPDALLRLVERWRSEAEKTGRTIERVALAYEAGRDGFWLARWLRVRGIEVHVIHSTSVAVSREHRRAKTDRLDTEMLMRVFLGWLRGERGHCGMVAIPTLEEEDAKRPSRERESLVGEHTRIVNRMKSALARLGIRGFKPKLRKAPERLAALRTPEGSAIPANMLDEFRRDMARLAVVREQIEEIEQARLERLEQAPAARPNAMVHLLARIIGVGIETADMLVREVLSRNLRDRRAVARYAGLTGSPDESGSKRREKGLARAGNARVRRGLIQLAWRLLMFQKDSALARWYRARTEGPKGARKTTMIVALARKLLIALWRMVTTGVVPEGFVLRQIA

SEQ ID NO: 406674 - protein, 503 aa, unidentified
MRAPPIRLSCYCMIWKTKADGVEETVRKLVSSSHQPSAWGERTPVCLRCERPKRIVPPGSPDCIVESVLHRECLNRNTKHRRLAMGLQSALKEVHMEVYIGIDWSQSKHDVAMMNEAGAVVVQGVIAHSEEGFLKLELLRRRLGVQPEQCMVGLETAHNLLIDFLWSRNYSHVYVVPPNVVKSNRGRYRQSGARSDASDAVVLADLLRTDRGRLQPWHPDSALTCQIRAKVSLICFLTREIVALSNRLRASLLRYYPAAVSVFSSLRTRIALQFIQAYPTPEAAAALTFSDFASFARQHGYHRPKDLPACFERLQAGHPPTMAHTLLAYKDEGPFLAQRLLQTLEAKASLLSQLQLLFQQHPDYPVFSSLPGAGQFLAPALLAKFGDDRQRFPTPGAVQALAGTCPVTDSSGQYKVIRFRYACDHEFRHITQQWAVAATWHSPWARGYWQQVRPRCRSDSQAYRCLANRLLAIAWKLWQTRKPYDEAYHWQQCILRRKPRENS

SEQ ID NO: 406675 - protein, 366 aa, unidentified
MKKISTMQAFSNEILKEQELTIGVDLGDRWSFYCVLDEAGKIILEQKVATTPEAMKQTFGKIPRSLIALETGTHSPWVSRLLTELGHEVIVAHAQKVELITKSNRKDDRHDARTLARLARIDPELLGPVRHRSAKAQIHLTVIRARAELVSARTALVNAARGLVKSFGERLPKCGTYQVDEKLAEGVSAELRDVLAPLLREVESLNERIKEYDERMEKIAKEVYPEVFLLKQVKGVGTQIALTYVLTIEDPYRFPKSREVGCFLGLRPGRRNSGESEPQKKISKEGDRYLRTMMVQGAHYILGPFGEDSDLRRWGLKLAERGGKNAKKRAVVAVARKLAVLLHRLWVSGEVYEPLRNSQKAMRAVA

SEQ ID NO: 406676 - protein, 475 aa, unidentified
MNLKGTKKKNQVSNANIFEQQELLKKIEVVRENLTASTWHELETKGKFDKNAKLSFICDDMLILGCDVGNETHYLRAIDTRGRELSKSDFSFSNNADGFSKAKEWAVKIAAEYDKKQIVLGLEPTGHYWFCLATWMISNGISVVQVNPYAVKQTKELEDNSQLKDDTKDPKLIANLVKDGNFGMPYLPEQLYADLRRLSMFRDQLNEDRIRSINRLHRELKIYFPEYKEALGKTEGTFSLELLKQAPFPDDLAALKEDGIRQIWHNAKLRGRGYSRAGEILEYAKASVGIREGKETGKLVVQWFVQKILELDAELALIETQINQKCLEIPHTDKVLEICGIGENTLSSMVAEMGDISRFDDVKEIQKLSGLGLVASSSGKHKGETKISHRGRKRLRYWLFQAAKSAVAHAEEFKKLHVYYTTREQNPLKKMQSLIAIACKLLRIIFTILKKGIKYDPRKMLKDIRRESRQESVAA

SEQ ID NO: 406677 - protein, 345 aa, unidentified
MHYVGMDCHITTLDFAVVDDAGRLVKSCKVDTSAKNFMEFVKSVAAPRIVYMEESALAAWALETCIRFGEKLVITDPKQNHWIGSSTQKDDPLDAFKLAQLGRGGFIKEIRHPVGDRRRFRELMDCYHDTVKSTTRIKNKIKSKFRQNGIHCTGMTVYSETYREEWRQKLPQDQTLLLIVEGLWNQLKESEQTEKNLLKAARNFAKHYPEIKLFEDIPGIGFISAATISAILETPHRFANKRKVWMYAGLGITIRSSGGKTYSEKLSKDYNRLLKYTLKQVAETAVQAKDNPFCQKYLAMTILRGIAPHRAKLTISRDLLATMWAMWKNGEKYNPEIRRSLVLNK

SEQ ID NO: 406678 - protein, 402 aa, unidentified
MNAVGIDVSKGKSMVAIMRPFGEIVSTPFEIKHTSSDINSLVKLIKSIEGESRIVMEHTGRYYEVLAHQFSEANLFVSAINPKLIKDFDNDSLRKVKTDKADSVKIARYALDKWQNLKQYSVMDELRNQLKTMNRQFGFYMKHKTAMKNNLIGILDQTYPGVNTYFDSPARSDGSQKWVDFASTYWHVDCVRKMSINAFIDHYENWCKRKKYNFSKSKAEEIYGKAKELVPVLPKDDITKLIIKQAVDQLNSASITVESLRTLMNETASKLPEYPVVMAMKGVGTSLGPQLMAEIGDVSRFTHKGAITAFAGVDPGVNESGSYEQKSVPTSKRGSSDLRKTLFQVMDVLIKTHPQDDPVYQFLDKKRAQKKPYYVYMTAGANKFLRIYYGRVKEYLASLPES

SEQ ID NO: 406679 - protein, 345 aa, unidentified
MKVTTVGIDLAKNLFQVHAVDERGNAVLRKQLRRRQVAVFFGNLPPCVIGMEACASAHYWGRTLQRFGHTVRLMAPQFVKPYVKTNKNDVADAEAICEAVGRVNMRFVPIKSVEQQAILSVHRVRQGFVKARTAQANQIRGLLGEFGLVIPQGIINVAKRVPEILEDASNELPVPFRHLIDRLTKHLKDLDRQVKEFEREIIAWHRSSELSRKLEKIPGIGPLAASALVASIADAHSFDNGRQVSAWLGLVPRQSSSGGKPTLLGMSKRGDAYLRTLLIHGARSAILAAKNKADNTQGWLTNLLKRRHPNIAAVALANKNVRTVWAILAYGREFKADYMPTPMTA

SEQ ID NO: 406680 - protein, 389 aa, unidentified
MIYVGIDVAAEKHACCILAESGKVHKQFTFSNDISGFEKLHKALLAPSETKIGLESTGVYGNNLAEFLRRNGYETHIFNPLLVKKSIQATTLRKTKTDKSDAKHIAQYTKEHSQPNLEPSYHISELKSLSRGRFSLVRERSKVKTQAKSLLVQLFPEFSQAFSDVFGAAASAVLRQLPSARMIAQCPVDVLTDLLRTVSHGRLGKVKAELLIDLAEHSVGIQSMALELQMQMFLQQIDLFTLQINRYEVEIKSEMEKIQSPITTIPGIGSVLGAVILSEIGDIRRFATPAKLQAYAGVDPSVGESGSSVSTPGRMVKHGSHYLRWALCQAARCVSLYDPIFAAYMKAKRDEGKHYCVACTHVAKKLTRVIYSILKNNTAYSLTYSQIGA

SEQ ID NO: 406681 - protein, 344 aa, unidentified
MAALERSSWELMCTRIFTWWSSRRGGSNPKPPQRFPKAAFLHWAAKLKSQATEVYAVYEACGFGFSLQRKLSALSIKCYVVCPQKLDEQNRRVKTDGLDAKALCLKLDRFVQGNRDALAIVRVPSEEEEQARAIHRQREQLVKARKQLEAQGRSLMVNHGLEPVPNWWKPRTFTALPAPQWMKELLANSQPILVGLQQKIAALTVQLQSAASPEQPRGLGKMTSVVIDREIGDWNRFSNRRQIASYTGLCPGEYSSGNSRLQSCVTKHGNPRLRAALVELAWRLVRFQPNYKPIRKWNATLRKGALDTGAARKKAIVAVARQLAVDLWRIKTGRLRAEELGLIN

SEQ ID NO: 406682 - protein, 364 aa, unidentified
MKKLYIGMDVHCKTSFFVVQNEQGEVVKEKEVLTREEEIEKFLRDLGGGELIRGTEIGMESGHQATWLSRFLSSLGMKPIVIDAREVRAKARRIGQKSDWRDAFEICDGLRRGIYQTIVYIPDKKIQRLRNIIRKRRHYVRVCTGEINAAKSMLRANGISVSERFLKQSRNWEMMIGSIGEEDLVKYAKMHYELWKIAIKKVRELEEELKKALEPYEEIVDILMSAPGVGLITAATYIAIIGTPERFEDSSRVVSYVGLAVSTYNSGGKERHGHITKRGSAELRAMLCEAAQQARNPQNPLNPYFMRICAKHGYKRAIVSVAHRLAQILYRMWREKRRFDINKLNIEKGEYHKIRKIYYKIKTR

SEQ ID NO: 406683 - protein, 344 aa, unidentified
MITAPRIVGIDLGKNWFHLIGFDERGTTVLRRKLNRQQLAEYAATAPRSVIATESCPGSQYWGRVFTQAGHEVRILPAQFVKPYLKANKNDFNDAEAIAEAAGRAHMRCVPLKTDEQLELQALHRVRRRFIIERTAVVNQMRALLLERGIAIPVGRALFARRLPTIFEDAENGLSSRLVMLLHRLRQRWLALDTEIEAVTHDLTAWAGDSDLCRRAATCPGIGPIISTAVVAAIGDGRMFARGRDMAAWLGLVPRQYSTGGKSMLGRISKRGNSYLRQLFIQGAHALYVHMKRDRSSLGEWLRQIEARSHRNVAIVALANKMVRICWKVLTSQQVYEPYPARLA

SEQ ID NO: 406684 - protein, 391 aa, unidentified
MKNRYASVAYGGMDVHRKFSNVTLRDAQGEVVSRERLDHVDRRKLREHLARWPQGTLLVMEASFGWPWVSDEVEAAGHEPRLSNCYKIEQMRRARGLPKTNERDADLVSLLPGERERWWEVWRAPPEVRDLREWMRHRMGLVAMQTEVKNRVHALFHRHGIFYEEATDLFGGQGRRFLFALCQRGRHENGTLPEGALEALRSDVRVLTMLRAELATIAWRLRGRLKRDPLVRRLMTIPGIGLILAHVLASEIGDIGRFRNHRKLASYACLAPQCDDTGEPDPTRAPLGRHLGDRGNRTLKWAFIIAAHGAVRKGGKWRALYDRHTEGGKKNRGRGFIKVARGLAQVAFVVWSKGMEYTETPPSRPGSRPARRRRKDSRPGTGQLDVAMVQA

SEQ ID NO: 406685 - protein, 388 aa, unidentified
MIYCGIDVAKRKHAVSLLDEKGAQVKPVFMIENTRDGFDRLNLELEAVADSPLTVGLEATGHYWLALYEELSQRGHTLIVLNPLQVAAYRRSGVRKVKNDRHDALWIADFIRIANLPATSQNIPVILQMRELSRFRYRLSEQIGDCKRKILTILDRVFPEYEQLFSSVFLKSSRQVLKTAVSAQEFADYDLSELSFLLHKTSQGRFGDAQAERLQTAARQSVGIGFLTNAVRVEMGCLLDQIDLLEEQRSQVDQAIEQLMQQIPQYITSIPGIGPVTGAAILSEIGDIQRFDAPEKLVAYAGLDATVYQTGQFEATEAHISKRGSPYLRHAIWQAAMMAAQYDPDLIAFYQTKRQQGKHHNVAIGAVCRKLIARIFIVLKEQRPYIIR

SEQ ID NO: 406686 - protein, 402 aa, unidentified
MVSDFMKVRYNLMIYVGIDIAKLNHFASAISSDGEILMEPFKFTNDGDGFSLLESNLASICDDKDNIIIGLESTAHYGGNLVRYLIASFYKVCVLTPIKTSTMRKNNIRKTKTDKVDTYIIAKTLMFQESLRFVTFYDLDLMDLKQLGRFRQKTIKQRTRLKIQLTSYVNQVFPELQYFFKSGLHQKSVYTLLKEAPTPKAIASMHMTHLANLLKVNSHGHFTKEQAKELRVLAQKSVGASDSAISIQITHTISQIELLDSQLEQVEAEMTDIMKFNDSIIMTIPSIGYINGGMILGEIGDVHRFSNPNKLLAFAGLDPSVYQSGNFQARRTRMSKRGSRVLRYALINAAHNVVKNNATFKTYYDRKMAEGRSHYNALGHCAGKLVRIIWKMMTDSVEFNID

SEQ ID NO: 406687 - protein, 409 aa, unidentified
MRVLYPRCAGLDVHKDQVVACVRRVEGRQATHEVQRFATTTRGLLELSAWLESRACTHVAMEATGAYWKPVWHVLEEDFELVLANAAHIRNVPGRKSDVNDAMWIADLLAHGLIRASFVPPRPIQELRDLTRTRRQLVREIVQHTQRLQRVLEDANVKLGSVVSDVLGLSGRRIVRALIDGETDPEPLAELGHARLRCSRTELAEALQGSVREHHRFLLRQHLRTIEQLEHTVGEFEARIEALLAPFHADVARLTAIPGISTTAAAVLLAEIGADMTVFPSAGHLLSWAGLCPRLDESAGKHRSTRLRKGAPWLKPVLVQCAWRAARTKNTYLQSQFLRLKARRGPKKAAVAVAASILTAAYHMLRDGVGYQDLGPAHLSRRDSARVAAQLARRIRELGYEVDIRTAAA

SEQ ID NO: 406688 - protein, 423 aa, unidentified
MKKRTYRGVEVKKVNQERVAEALAGGDLVVGVDVGKEVCFGSLVGVEQEVLVTVKWKSPWEDRTFVEWLGGLGCRSIEVAMEPSGSYGDPLRSLLWEAGRGVYRVSPKRSHDAAEVYDGVPSWHDAKSAAILAKLHKDGASEPWPFRSEQERDLRAVVRTMALLDEQFHQNVNRLEGHMARHWPEVGAWLDFSSVTFLELILRFGGPAQIALRAQEARETMRTVGGRFLKAEKIDAVIACSGQTIGVSMTAQEAEELSRLAEHTLDLYRRLKEAKRKVERLSLEQPSIEALSRAVGKGTAAVLVVEGGDPRQYGSSSEWLKTFGLNLKERSSGKHIGRLKITKRGSGKARKWLYLATLRLIQKDLVVRTWYERKVARDGGTKRKKAIIAVMRKLVRALWHVSRGEPLDTSKMFDVKRLGLACG

SEQ ID NO: 406689 - protein, 400 aa, unidentified
MYNAVGIDVSKGKSTVAVLQPGGTVIRKPFDVSHTSQNLNELADYLGSLEGSTKVVMECTGRYHEPMVKVLTEAGLFVSIVNPHLIKNFGNNSLRKVKSDPADARKIARYTLDNWTELRQYSGMENTRTQLKTLNSQFSFFMKQKVAAKANLIALLDNTYPGVNKLFDSPTREDGSEKWVDYAYSFWYADCVRKIGLKTFTERYRAFCKKHHYIFQAEKPEKLFNASKELVAVFPKEKTYKLLIQQLNLASEHVERLRREMNELASTLPEYDTVMGIYGVGKTYGPQLIAEIGDVSRFTHREALTAFAGVDPGVDESGQHKSKSNRASKVGSARLRKTLFQIMTTLLQNAPDDDPVYRFLDKKRSQGKPYYVYMTAGANKFLRIYYGKVKECLRNLEQAE

SEQ ID NO: 406690 - protein, 401 aa, unidentified
MNAVGIDVSKGKSMVCVMRPFGEVVLEPFEVLHTAQNLNDLAGKLKALDGETRVVMEATGNYHKPVAFVLHDAGLFVSVVNPVLIHDYDNNSLRRVKTDRKDAVKIANYTLDKWTRLRQYLPEDDTRLALKNCYRQYQQAVAVRTMLKNNLISSLDLTFPDANKLFSSPAKSNGCEKWVDFIGDFWHSECVSSLSSDAFAKKYLKWCQKHGYNFTRSKSDTIHACAVNAASLPKSPTSKLLIQQQVAQLKAVSQSVAAFQQEMLRLSQQLPEFDTVMEMYGVGPSLGPQLMAEIGDVRRFSSKKSLIAFAGIEPQPNDSGKIVGNDSGISKVGSAVLRRTLFLIMTVILKTQPQDEPVFQFMNKKRSEGKTYKVYMMASANKFLRIYYARVKAVMDSKHSK

SEQ ID NO: 406691 - protein, 359 aa, unidentified
MTSIALERSDVIVGVDTHKDQHVAVTLDGLGGRLEQRCVPATNDGYAELLAWADAQGRVVAFGVEGTGSYGIGLARFLRRHARCVIEVSRPPRKDQRRAAGKSDPVDAEHAARQVLAGTATVAPKASDGDIETLRLLKVARDTAVKAQSQTMVTLKATLVTASDDLRAELEALSNFKLVTACAAFDSDDELACPDTAMRHVLGVLARRWLALHAEAKTLARQLTQRTQAAAPQLLDAFGVGPDIAAELLIAVGDNGDRIRSEAAFAKLCGVCPIPASSGKTTRHRLNRGGNRQANSALFRAVVVRMRWHEPTRTYVARRTAEGKSKREIIRCLKRYLARELYHLLPPTQTTDERLHLAA

SEQ ID NO: 406692 - protein, 340 aa, unidentified
MNITRLSIDLAKDVFQLYGVDGKQKCVLTKRITSRAKLIEFISRLKTCEIYMEACGSSNYWARSFQGYGHTVKLISPQYVKPYIQRNKNDYRDAQGIMEASFWAGTPYVTPKTVEQQDIQSLLRIRSNYIEIRTTVSNQLRGLMKEYGVFVVAGYQKLKQALPGIFDRNIENGLTPQMKELIESQYDMLLIFDEKIDKLDIQIEQISKQDEVCQRLQKIEGIGPITALAIIALVGNGQGFKNGRHFSAYLGLVPRQHSSGQKEKLLGISKRGDTYLRELLIHGGRSVVMYCSQKSDARSIWVNKIKDTGGMNKAAVAVANKNARIVMAMLLSGENYQKVA

SEQ ID NO: 406693 - protein, 339 aa, unidentified
MLYVGLDVHVKHITICVLNKDGKLLQRCQLPCLDDVIQFLMNLPGRYEVCFEASTGYGIYFEALSKIASRVAVAHPGLLKLIFRSKQKNDRADAEKLAKLLFLDEVPTVHVPTADVRAWRELITFRGKLIQKRTRAKNGIRSLLRSVGCRVPKEFGLWTIRGMEWLKQKDLKQPMQNLKRDMLVEEIETLTRQTRLVETELARYSKDNIAVQQLQSIPGIGLRTAEAFVAFVDDPHRFANSKKVGAYFGLIPIQDQSGSTNRLGHITREGCAEVRHLVTEAVWQGIRYSPTIKAYYERIHRQEKDRKKIAIVATSHYLVRVMWSMLKNGTLWKERNLAV

SEQ ID NO: 406694 - protein, 345 aa, unidentified
MANFNVLAIDLAKNVFQVCKTTSRGKVIYNKSFTRKKLKELLIKEPMSLVAMESCGGTHYWARYAIEHGHKVKSMSARRVKAFRQGQKTDANDAAAIAIAALQPQVKSTRLLSIENQCQQGLVRIRELLVTQKVATAKQIRDLLLDFGFPIPKGDSALFEALSGILEDAENSLGTDFRMAIESQSKHLNQLLALLTDIDTRLGTQIKADETCQRLQKLEGIGPVNAIALKLTLNTVEHFRNGREAAACVGVTPIQHSSGGKDKIGSISKSSGCKGLRSTLFEGALSVIRQLDKREARTTKERWVKELVSRRGKKVAAIALANKNVRTAYAMLKHGTDYQPTMLAA

SEQ ID NO: 406695 - protein, 359 aa, unidentified
MMYVGIDLGVDACSASIVDEQGGIKSFLEFSNDENGWKDLMNAMGTDVKVAMEAGSAAYPIHDYLVTRGYNVQVGHPAAIKAITQSKSKTDEKDSVILAQLLRLNYLPLAYIPSPENMRIRELLRMRIKIGQETTCIKNRIHGFIVVNGLRPQFKNKSDMFGVSGQKKLHEIRFGDQRDCVFQVLLDQLKSFNRQKKELEDAIAKISIKNDQVVLLMTIPGIDYYSALIILNEIGDITRFKDYEALCMYAGIVPSVRSSAEITRMGRITKRGPSALRWILTVVADCMLKFDNPIRQFYQRLAKRKKSSKLVHVAAARKILVMIYHMLKNNEPCRWAKDGLTERKMIALRKACHRKVLKA

SEQ ID NO: 406696 - protein, 345 aa, unidentified
MSEVYIGIDVGSKTCAAAVRSKGGDIQMEREFPTTESDLVEFVSGLDGEVSVLFEEGELAGWMYRLLLPHAESVEACDPKRNAWVYKEKPKGDPVDAKKLSELLRMGSYKVVYHTDDENMATFKIVVQHHQQMVKNTTRIKNQIKSRLRQQGVIITGTGVYTKDGRHEAIARVNNAPVQHVLLQVFRLLDDAERQRDKAKRLMVRESGAFSAIGRLKKIPGVATIGAARFFAYVQDSSRFNVSELCKYSRLAVVGRESGGNPLGPEHLNKDGNGTLKDVSRKAFDGAMRTKGPNGIKEFYRRSLQRTGDRTNARLNTQRKILAVMLAIMRDGVEYSDDRVNGKGA

SEQ ID NO: 406697 - protein, 410 aa, unidentified
MDLLRREVPASSLVVAIDPGKAFNRVWLTTGERGLIGEPVSLPVLRDGIEELQRLIVSSGVPGAPVIGLEATGALHRAWATEIEQRWPGSLRLFAPSETTAARAQLGSRRFKTDDRDCAALVWLLRQGAGRPAEPDKLEALLGTVRHRSQLVDAGRVLRQRLHDQLNALCPGLSAPPRHGRAVKLESPTGQAVLACAAAFAGRAPSKRSLLARAPGRMTNATAEFWCERWKQLLAPPGDAELRAERLAQDLRRFSQLRADIALADTQLAGLLAETDGQVLTSLPGVATVRAAEFSAYTLPIERWPTPEHLYSATGLSPASYESSTITRRGRISRQGLAEHRNALMGIAWGLSQCSGAFRTRDAELRARGFRPIQARVALARNACRLAWRLLQSQHPYDEERYARTRRRGR

SEQ ID NO: 406698 - protein, 348 aa, unidentified
MQYGLYYVGMDVHKRTISYCVKSADGGIKEEGVVRSSREGIIELLGKLDFPWIGAMEATMFTGWIYDEFTDGGHIVKVADPYMLRAIVASKKKSDRIDARKLADLLRCNLLPEVYMASSETRELRRVLRFRNLMVHMAVRMKNKAATLLMEVGAEYNKSKLHGKRYFSELLSKLDEVPESVVELLKLSRSGVEIFDGWQKRLLKGLREHPRIRERMKLLMSIPGVGEVTALTWVLEIDDPRRFSSVRKATSYCGLCSAFKESAGKVRRGPLSKQRNANLQTILIEAAKLAPRWNPQLKAVYEKEAADGNNNHATIAVARKLVAYLLSVDKSGESFELRQTACVPTGGL

SEQ ID NO: 406699 - protein, 341 aa, unidentified
MRKTLYCGVDLHSNNAMYVVTDQRDKQLLRCRLPNQLPVVLERLEPFRERLQVVAVESTYNWYWLVDGLQEHKYPVVLANPSEIEQYDGIKEADDRTDAAFLARLARRNVLPTGYIYPKEDRPVRDLLRRRTLLVQQRTRIILSLQNLAMRQTGQKIGWRDLRRLEEAERTALLGDHECLTFVAAQQVELIDALSAKIAAFEKKVLEHVQVKPAYECLLTLPGVGVILALTIMLETGDIGRFATVGDYTSYCRCVRAAHRSNGKKKADNNSRNGNGYLAWAFVEAVHHAIRVCPSARSFYDTKRAKRNGTLATKALAAKWSKAAYYLMKRQENFDLKRVFG

SEQ ID NO: 406700 - protein, 366 aa, unidentified
MKKISTVAMRGNEIFRELKLTVGLDLGDRASHYCILDEAGNVIVEHSLPTTPKGIHQVFSRIPRSRIALETGTHSPWVSRQLTPMGHEVIVAHARNVRLIGESSRKDDQLDARTLARLARIDPGLLGPVRHRSAKAQIHLTVIRARAALVSTRTALVNAARGLTKSYGERLRKCGTGQMNREIAKGLSQELRDALDPLLGEIESLNKRIAEYDRRIEQIAKEVYPEVALLKQVKGVGTLIALTYVLTLDDPHRFHRSRDVGCFLGLRPGRRNSGMSEPQLHISKEGDRYLRTLMVQGAHYILGPFGQDSDLRRWGLQLAERGGKNAKKRAVVAVARKLAVLLHKLWVSGEVYEPLRNSHQVVSAVA

SEQ ID NO: 406701 - protein, 480 aa, unidentified
MSSGIQARIINSVRTAFQAQISGAVSPHANHCFSTLLNVWRFSQCFPFAHFLKEGKMVNVVYPICCGVDVHKKFFVATLITTDGIQPKYKKRRSSTFNNQILAFKAWLLENNCRDVCMESTGKYWIPVFNLLEDSINVTIANPKWVKTVKGNKDDAKDSKWIGDLFRIDLVPGSFIPCKAIRILREFMRYRFKLVSCKSSEKNRYQNVFTVCNVALDAVVSDMFGVSASSITDYIVNSDTFDPAHCVLLLKKTLKKKVDEVVASIDGFQMTDAQKVRARMVKEHYDYLLGHIEKLDAVVDELAKPFEPAIQLLCSIPGIGRHSAITIISEVGTDMSQFDSSKRLCRWAGLTPGNNESAGKKKSVRITRAGVYLKPALVQVAHAAVKDKKNPYYRIKYEAIAKRRGKKRAVIAIARMILTAAFHMFSTGEVWNPSDLNQIDMPPELREKELQKSLRRAAKLLVAHGLINPDAVKIPQTVPA

SEQ ID NO: 406702 - protein, 457 aa, unidentified
MAQRRKKAKSQTFKMTNLPAELQHINLNAAGIDVGSERHLVAVPAGRDDISVREFGTFTSDLEALAAWLKKCSVTTVAMESTGVYWIPLFEVLERHGFEVKLVDARHVKNVSGRKSDVLDCQWLQQLHTYGLLAGAFRPPDEICVLRSYLRQKEMLTQASSMHIQHMQKALQQMNLLLHNVVSDITGVTGMKIIKAILAGERDPHQLARHRDGRCHHSSTTIAKSLVGNYREEHLFALGQAVDLYETYQKKITDCEQAIIKHLEKQPNVSDDEPPPATKETPERGRVRAGVDVRDLLYQKSGVDLFAIPGLAADTLLTLASEVGFDMRPWKTEKHFASWLGLCPGTRRSGGKVLNSKTKRNPNRAAQAFRIAANTLSRSATALGAFYRRIKMRTSGQQAVTATAHKIARIYYALLTKGANYIELGQQAYEERYKQRRLDHLKSQAKLLGFKLVPGAA

SEQ ID NO: 406703 - protein, 390 aa, unidentified
MPANVQGLRTDIESTPPAGGTSESTKTVGPQQRAALMKRTTKYVGLDVHQSATVASVRQEDGRVIARAILPTEEHAILEFLKGMRGSLQVTFEEGTQAQWLYDLLVPRVDRLVVCNRRKKDRLTNKGDQVDADELSELLRRGALRPVYHGSPQHATLRELTRTYQNVVEDATRVMQRLKALFRARAIKTPGKRVYNPTYRQEWLARLPDRGVRFRAETLYAELDVLRHMRPKVKDAMLAEARRDPAWSVLHTIPFFGPVRVSLLLATLRTPWRFRTKRNLWSYCGLAVRTHSSSDYAIVDGRPARRRRAPMTRGLNRHHNRVLKNIIKGAAAAATGRPGPLKDFYLDLIERGMREELARVTLARKLAALTLRIWKTGERYDPTKLTLQAH

SEQ ID NO: 406704 - protein, 423 aa, unidentified
MRGFGLDVHRDFCEVAIAEGSEVRSAGKVPTRVPALELFAESLVASDVVALEATSGAEKVTSVLQARGIRVIVANTRRLRSISQAKAKTDKLDAQTLARLLMSGLLDEVWTPDERTRTLRRLTNRRERIVRARSRAKNEAHGVLARNLCERPPVTDAFGKAGRRWFATLELPVDERLTLDGCLRQVDFLEAEVEALEREIARHALAWPQILRLMSVPGVNVNTAATFLASVGDIRRFSSPRKLVSYLGLDPRVHQSGGTPARHGRISKEGPSEARHMLGEVAWKVTLTAGPLRAFFERIRARRGSQVAATATARKLVVLFWHMLTSEEDYAFARPAMTRNKVRQLELTAGAPSQKGRKGIAGRKSKRLFEAERELSRQAEVAYRRFISDWTASGPSKGGAGATPGRASQKPLKGKAARQATSP

SEQ ID NO: 406705 - protein, 410 aa, unidentified
MNLTTLFVGIDVSKRSNVVRFMDGSGDTLSLFSVPNNLDGAIVLQEKLKHTLLHTDYRKVVIGMEATSVYADHLATYLHNDEFLHKWECEVHVINAKYIRKFKESYPELPKDDNVDTYIIADFLRFGRIPKSICHDEKYLALRNLTRARFQAAQSLSCEKSRFIETLFQKFSSLDSAKVFSDTFGATALAAACDFLTVDEIIYTSVNDLADFVNQKGKGKFADPEAIATALQAAARSSYRISKTVNDSLNQLLAVRLVGIRSIEEQIKSLDKAISSYMAAFQNVLISIPGIGPVYSAGLMAEIGDIRRFAGQASLAKYGGITWKKHQSGEYEAANTKMIASGNKYLKYYLLEAANKVRMHDAEFARYYQKKCREVPKHQHKRAVALTARKLVRLVYSLLRTNRLYTPPQR

SEQ ID NO: 406706 - protein, 405 aa, unidentified
MFCGIDWASQTHAVCVLDQAGRKVSAFQVPHTAEGFQQLIGRLRRLGDPSTMPVAIERPDGRLVDLLLEAGHPVVAVQPAAIAAWRKAEVPSGAKHDPRDAETIADYLRLRRHKLRELVPFSAHTRALRAVVRTRDDLVDQRVAATNQLSACLEAFWPGARHLFADIESAIALAFLARYPTPESAGGLDQRRMQAFLTKHGYCGRRPAAELIKRLRAAPAGVAGTVEVEARRDAVLALVGVLRALNSAIKDLDRSIVAHLGEHPDGPIFTSLPRSGRINAAQVLAEWGDCRPAYDSPDAVACLAGAAPVTRRSGKHTSVSFRWACNKRFRKAITTLADNSRHASPWAAKVYADAIARGLDHPHAIRVLARAWIRVLWRCWIDQVPYDPSRHGNAHKLTETAESAA

SEQ ID NO: 406707 - protein, 344 aa, unidentified
MKNCNVIGIDLAKNIIQVCIINKHGEVRSNKAMSPLKLKEFLTKSSPSIVAFEGASTCHYWGRFASNLSHDVRVIGPRKVKAFLQGQKTDANDALAIAVAATQPGMLFSQLKNEEQQVLQSLETSRRFLDKHRVSLENHIRAFLYEYGITVARGAKYLRQSILDILSDGSDELPHHLLAPLLSLWEQYRDTVKRVAAIEKELTQLVKKTDACQRLKALEGVGDVCALKLFTSLGNGEGFKNGRQASAYIGVTPKQYSSGGKVSMKGIDKVGGNKALRANLFMGARAVIKVLPEKPRTTKEQWLIALIKRVGEKRACIALANKTVRTAWALLASGEKYKSTALVA

SEQ ID NO: 406708 - protein, 392 aa, unidentified
MSQHFRFDSSRSLTALEQDSTIIAVIEPSQTKWLVAALVPGVERQPLKKFDANEEVLLKLLHRWRREASQAGRNIKRIVVAFEAGRDGFWLARWLRARDVEAYVIHPTSIAVSREHRRAKTDRLDTELLMRVFLGWLRGEKRHCSMVAIPTIEEEDARRPNREHQNLITEQTRIINQIKAIFTRFGIRTLRPTMRKLAEGLEDLRTAEGTPLPQNTLSELRRHLARLRFVRDQIRAVEQERLRKLAVAPAAEKKSPDAMVRLIARVFGVGVETADMLVNEIFLRHLRDRKAVARYAGLTGSPDESGSRRRERGLARAGNVRVRSGMIQLAWRFVRFQKNSALAQWFAARTTDGRASTRKTMIVALARKLLIALWRLVTRGEVPQGVVLRPAS

SEQ ID NO: 406709 - protein, 345 aa, unidentified
MTYYTGIDVSLRSVSICVVDDKGEVCLEAKVAAEIDAIVDRLRRFSGDVKSVGFEAGTLTQYLTYGLQAAGFEVICLEARQVSVTLAAMRNKTDRNDARGLAQILRTGWYSRVHVKSLHSHQVRALLASRKAILKKCVDLENELRGLLKVFGIRLPSRVGHGSFDAELRETVCSDEMLACALVPLLDARTVLYKTYLKLDNAVKGRVRLDPICRRLMSIPGVGPVTALTFKAAVDDPNRFKSSRTVAAHFGLTPRRFQSGEVDNPGHISRAGDADVRSALYVAAHSLLTRNAQWSTLKAWGVRLAKIRGHRRAVIAVARKLAVILHRMWIDGSEFRWGSQPQTVA

SEQ ID NO: 406710 - protein, 385 aa, unidentified
MTATTRRFDPIAHESMLYLSFELGEGSWTLSFTSGFAAPVHRRRVPARDRNAVLWQIEAMKERLGLATSCRVVSCYEAGRDGFWLHRFLEAQGIENLVVDSSSIEVSRRSRRAKTDRLDGESLLDLLLRHRAGSQKKVFSVVRVPTVEQEDRRHLHRELRSAKQDRTRVTNRMKGLLANQGLPLDLKRDVPAQLASLRRWDGSPLPAGLRARLSREWERVVFYTALIEGLEAERREILQRGKDPVLEKVRQLNLLRGIGTNSAWLYAMELFGWREFRNRKQVGAIVGLTPTPHTSGMQERERGMSKAGNRHVRAMAIEIAWGWLRFQPRSALSQWYQRRFGMGSKRLRKIGIVALARKLLIELWRYLETGVVPEGAELKTDVRVR

SEQ ID NO: 406711 - protein, 447 aa, unidentified
MESIVAVGIDVAKEKLDVAVFNGKKFVTRIYPNTKEGIERFLKDVEEKYVEKPDDSNEINNTESQNRTSQTIKNININPEKSNNVSKVSKDSIHFVMEATGSYNTKVLYAISDRGYPVYVLNPIVSRRYSEEQMKRTTTDKEVSKLLAGYAYSSILSFKSGIPSESYNTLMSFKFDSSKKDNLELRVLIKTLESLMRTRTRILNEIEALNQYPDGFVDSAIESLKRLLQEIEIEIKNIQHKIDEIVNREENKDLYGRLTSIPGVGKRTASAIIAYFGEFSTFDNFKYVASYIGLTPSIKESGKSVKKKGYSISKIGNPYLRQILFMASLSASKHNPQCNILYERLLEKGKDKKLIQIAVAHKLLRQIFAIAKYGRVYDPHYGVEVKEKEGRDKGKENEDKRNTNKRKVNTSTSPSKNTNTKQNISIHTKFPYDSPFIQDTYPNITDY

SEQ ID NO: 406712 - protein, 339 aa, unidentified
MTMKRFGVDLAKSVFQVHGVDDDGVLIRKRLSRQKLSEFFANQPPSLIGMEACSGAHYWARQLRDLGHDVRLIAPQFVKPYLFGNKTDGNDAAAICEAVGRPSMRFVAIKTPEQTSILMLHRVRERLIGQRTALINQVRGYLAEFGVTIRKGAAWVRRELPSLIDDQDNGIPFLARETLRDLYRELCDLDRRVADHDKKLKAVFDATPDCKRIAAVDGVGVLTATAFIATLGDPKAFKNGRQVAAWLGLTPREHSSGNRQSRMGITKRGDRYLRKLLVHGARSALRVTPKRDDPKSRWIERLRGRTHENVASVALAAKNARTLWALLAYDTEYDPAPVG

SEQ ID NO: 406713 - protein, 429 aa, unidentified
MSGKETMQPQLEFVAFVGIDWADEKHVWCLQEAGSRQREYGELEHKPETVEAWVGELCRRFGPGPIAVAVEQVKGALVCMLRKYECLHLFPVPSTMSAAMRKALYPSGAKDDPRDADLLLDLLVQHRERLRHLQPDNEGTRRVQNLVEERRKLVEEKAAQVNRLIGYLKIYFPQMLQWFARLDTKLVCEFLERWASLEELKKVPPAELRKFFRQRQGRHHELTEDRIQGIVQAMPAIQDRAVIEAKQVVVQVIAQLLRSLLEGIANLDRKIEEAAGAHPDFFIFQSLPGAGAALAPRLLAAFGSQRDRYDSADEVLKHSGIAPVTETSGKKKWVHFRWACAKFLRQSFHEWAGHSIAQSVWARAYYQQQRERGQGHHAAVRALAFKWIRIVFRCWQDRVAYDENRYLAALARRGSPLNSTLIAATATTV

SEQ ID NO: 406714 - protein, 350 aa, unidentified
MKIIGCDYHPGFQQIALVDTETGELEERRLEHAEEAERFYRDLGAQGACVRVGMEASGHARWFERLLCELRFELWIGDAAKIRAKRVRKQKTDRQDAELILKLMLKDDFPQIWVPNGENRDLRQLLWHRHRMVQARTRIMNQLQAVALNEGLLCKKRLWRETGRKQLEAFPLAPWASRRRQDLLELLDRLTPTIAELTQAIEREMENSPEAQRLRTHPGVGPLTALAFVLILGKADRFQCGKQIASYLGLVPLEDSSGKRRRLGHITKQGNSLLRFLLVEAAQVTVRSDPEWRSKYFHLTMRRGRKIAKVAMARRLAVRMYWMLRKGWDYEQLNKFGSHAGQPGNRHGVQ

SEQ ID NO: 406715 - protein, 416 aa, unidentified
MKSARNTLPDEPPNALTCGIDWARDDHDVSVVDARGREVHRCTVEHSAAGLRELLTVLARTGVCEVAIERPDGPVIDTLLGAGITVVVISPNQVKNLRGRYGSAGNKDDRFDAFVLADTLRTDRARLAPLTPDHPATVALRRVCRARKDLVAHRVALANQLRAHLRNVFPGAVGLFADLDSPISLMFLTRFDCQDRADWLTPKRLATWLSGVSYSGRTDPAVLHARLTAAPRGAVGDDGSAHAHITRALLAALRTLVEQIKLLTEQIGTQLAGHADAHIFTSLPRSGTVRAARLLAEIGDCRARFPTPESLACLAGVAPSTRQSGKARSVGFRWAADKQLRDAVTDFAGDSRHSNPWAADLYRRAVARGHDHPHAVRILARAWLFVIWHCWQDNLAYEPDKHGALQRLIAHQQPAA

SEQ ID NO: 406716 - protein, 425 aa, unidentified
MKVSQIKQEINSEKVLDVAFDVGKDKLNPVFEMGQLRYADDCGNRSNPINTKLKEIMQIAREHGYETLRILCEPSGGYEKVLLRIAHQLHCRTAYVSGEASSKFRMVVHGDPGKSDERDSQPLLAIASQGKLLTHRVLPAEYELLRELNREYNWVSNSRVAVRCEIHTLLVRLFPDLPVGSDFLYEPSGRALAREYGWNPRRIVDAGPGQLEQCLKTACRFVRRQTIAKIWQAAWQSTQYHEDESGILDYVTERLQRRYEEIERLDQQRQALCSRLEEVYLRLREKDPRLPRAVAGVVKLYMLARIVGETGPLSDFQSIRQLYRFAGLNLCERKSGKYEGKTKISRKGRVSLRRILGRAVLPLIHKGGLYDAWYHLPEGKTKKGKSLAALMRKFLKLLFGWSRSGGEFDFKRVFTSASEYGVHAA

SEQ ID NO: 406717 - protein, 335 aa, unidentified
MKEITTVGVDLAKSVFTVHGVDGMGRPVLRKTVRREKLMELVAGLPPCLIGMEACGGAHEWARRFEGCGHRVGIMMARFVAPYRKSSKNDGNDAEAICEAVARPNMRFVAVKSAEQQAVLSLHRVRQGFIEQRTATLNRIRGLLAEFGIVLPQRADQVRRAAMIAAEELPVLARAAVADLRGHLAYLDDWIGRYEQQLVALAKQHQPARRIQQVSGVGPLTASAITASIASGHEFANGRQFAAWLGLVPRQYSTGGKARLGRITKRGDAYLRTLLMLGARAVLQSAAKKTDRLSRWAQALRARRGYHRAIVAIAAKNARIIWALLANNREFALPV

SEQ ID NO: 406718 - protein, 422 aa, unidentified
MDEERKWFIGIDWGSQEHVVSLCDDRGKKIGQRKFAHGGVGLSDMIAWLLQASGGEPGEMHAAIETPHGPIVEALLERGINVYSINPKQLDRFRDRFSVAGAKDDSLDADVLADSLRTDMRLFRKLTIAEPLIVELREWSRIDEELKVQRVRLTNRLRDQLWRYYPQMLELADDLGADWVLDLWEAVPTPEKAARVREAAVSRILKTYRIRRFNAARVISELRKPALSVAQGTTEAATAHIRVAVQQLRLVNRQLANAELQLDGLCKKLAEPVDGDEGEKVPGQQQEHRDVTILDSLPGVGRTVLVTMLAEAQDALQRRDYHALRNLCGSAPVTRRSGKSCIVMRRRACSRRLSNAVFYWGRTAIQRDPTSRAKYEALRARGHGHARALRSVVDRLLYVACAMLENRTLFDSSVMEKKNAAA

SEQ ID NO: 406719 - protein, 347 aa, unidentified
MIIVGIDAHSRAHAAVAVDEQGRLLDALEVTAGPAGLERLCAWVQGFERPRLVAVENARGYGLALARRLLSEGEELVDVPASLTSDGRRRSGQRGKHDAGDALVVARIALRDRERLVRLDAYLLDDELKLLVDAREQLIIEASRWRNRAHALLRVAAPGYQTRTGALASAGAVRRAQAVARRAAEHDPLRGRLALDALARLTALERDAAKLERELSQLLKARGCANLLAIRGVGPIVAARIVGETRGITRFRSAAAFAAHTGTAPIPASSGRVQRHRLNRGGNRQLNRALYTIAMVQARWEPTARAYLDRKISEGKSATEARRCLKRHLANVVYRALIADTHSLALT

SEQ ID NO: 406720 - protein, 388 aa, unidentified
MPAAETPVAYLGIDVGKSSHSACALDAGGGVAFRAELANRPDDIDRLLERAGSGALVVVDQKRNIGALVLARAHAHGNPCAYLPGYAEKQARGMFPGTAKTDAIDAEVIARTALGVPRALRPAPEEPEGAASLRILSSQREFASSARTRAKNRLRATLLEADPALEGAVDPSSRWQVSVLAEFGGAAGCSAAGWRRFSNAARRAGAPAAGARRLWEALLASSRSGRRLPAGEDVAVRMLAREIASLDADIEELDSLVADSLAGDEVYECLLTVPGIGPKTAAALVTSIDISAFRGHDELASYCGVAPSDRRSGSSVRSTSPQRGGNRQLKNLLIFSCNSLIGTDNRFGRYYGECRARGMRHSKALKAVARKRLKVIYAIMRDAVPYAA

SEQ ID NO: 406721 - protein, 403 aa, unidentified
MNAVGIDVSKGRSMIAVMRPFGEVVIRPHEVRHTASELQNLANSLKNLDGETRVILEHTGRYYEPVAQMLHDAGIFVSAVNPLLIKEYGNNSLRRVKTDKADSVKIARYGLDNWGELRQHTPMDTIRYQLKMMNRQFGLYSKNKVALKNNLIALLDQTYPGVNALFDSPAREDGSQKWVDFATSFWHVDCVRSMSKIAFTERYRKWCKRHRYNFSVTKSAEIHEGAKALVAMLPKKAPAKMLVYEGIAQLNATSKTVEVFRAEMKLLAQQLPEYHVVMTMYGVGGSLGPQLMAEVGDVSRFAHKGSLTAFAGVDPTPNQSGTYEAKSTASSKRGSPELRRTLFLIMAALIKNAPYDDPVFQFLDKKRSEGKPYYVYMTAGANKFLRIYYGRVKEHLTSLNHSE

SEQ ID NO: 406722 - protein, 386 aa, unidentified
MKTQTQSTSNTATEDCATIFVSIELSRKGWLIGIHTPLADKIGLHKFEAGDSAGLLALVGRIAEKVECATGNPSRVLSCYEAGYDGFWLHRILDEAGVVNHVIDPASLQVNRRARRAKTDRIDAVGMLRALMAFHRGEDQVFSVVRVPSVEEEDARRVHRERERLITERIQHVNRIKGLLATQGIYDYQPLRQKRIDRFDALKTAMGTAIPRHLRDELMRHLQRLDLVLEMIRAAEEERDRVVEAEMAVNESARKIQNLVAMRAIGPQLATVLVGEVFQKEFANRRQLASYAGLTPSPFNSGSVVREQGISKAGNPRARTAMIEMAWLWLRYQPGSALSHWFRKRAGTGSGRIRRITIVALARKLLIALWRFLETGLVPDGAELKA

SEQ ID NO: 406723 - protein, 380 aa, unidentified
MDVHSTNYTLCAMEPTIGAEDRIFGEVQVAPDYKEIISFIASLKKKLGLDNDYSIECGYEAGCLGYTLYHQLNGAGIKCVILAPTTMLTQQGKRVKTDKRDAYLIAQCLCYGGYHPVYIPTGKDDSVKEYLRMRDDHKIALKKLKQQINAFVLRHGHKYIGTTWTIKHVTWLKNLQLDPMYRETLNEYMASYDEQEAKIERFDKRIKEIASEENYKENVEKLGCLLGMRTHTALSLIVETGDFMRFAKGNIYGAFLGMAPGEHSSSTNLNRLGVSKAGNSHLRRLLVEASKGICKGVIGYKSKELRSRQKGQSADVIAYADRANTRLRSKYYKMIRHGKKKNVAVSAVARELACFVWGMMTGNILPTSLAGASAPVVCQG

SEQ ID NO: 406724 - protein, 385 aa, unidentified
MKCLYSNVACGGMDVHYKFSNVTFRDSAGNVVRRERLEHPQRDQLRARIARWPKGMPVVLEASFGWGWLSDLMAQAGLEVHLSNCYKVEQMRKARGLVKTNKKDADLTSLLPLETTNWWEVWRAPPDVRNRREQMRFRSDLIALQTTIKNRIHAMFHRHGIFHEFSDLFNGKGRLFLADICINGSNCLSQEAMQAFRGQLLLLDHLRKQLASVERILKRQLEKTPLIRRLKTIDGFGLILSHVMMAEIGQIERFRGHKTLASYSLLAPRANDTGEADTERAPLGRHLGTRGNKTLKWAFIEAAHSAVRHGGKWRAMFDRVTSGGKKNRSRGYIKVARELVKAVYVVWKKDVDYTDNPLPRPGQGSKKSRSGTGQLYRPMVHALRH

SEQ ID NO: 406725 - protein, 314 aa, unidentified
MQALRTHVAGVDVHKEILAITILIGGGDEDPKVEQLTCSTFTEDLLAMGLVLKERGVKSVAMESTGVYWKPVYNVWAPLGLQVIIGNASHIKNVPGRKTDMNDSHWIAQLHRFGLIRASFVPEGEFQRMRLMSRHRTNLTEDLARVKNRVQRILEDGNIKWSSIVSDVFGVAGIAVLDLIADGVTNPKVLSQAVRTRIKRKEETEKALTNCFTKDHCWLVKELMQQYRDIQTRILEVDNQLTEKMLPYVAIIDELKKIPGIDTVLARGIIAEATTKMENFADERKFAAWAGVASGNNESAGKKKDQNVVKEIPH

SEQ ID NO: 406726 - protein, 359 aa, unidentified
MQIADRMSVETKITLGVDTHKDTHVAVALDGLGRHLGTLSVPTNTAGYRELLGWARELGIIEQVGVEGTGSFGAGLARLLKAEDIPIREVIRPKRRDQYRSGKSDPIDAEAAARAVLAGTATGKPKDADGQVEMIRALRATRRSAVKARTQAANQMKALLVSAPEELRAQLRDLSTARLVCRASRFRLGENPHSVMAATKLSLRSVARRYQHLCEEIHELDEQLDRLVAEAAPELMAVDGVSTDTAASLLITVGDNPERLNSEAAFANLCGVSPIPASSGKTVRHRLNIRGNRDANRALYVIALGRMGRDERTKAYVAKRTAEGKSKREIIRCLKRYIARELYRILVQPLSPLPSVSAP

SEQ ID NO: 406727 - protein, 363 aa, unidentified
MGTEDITRIERFRQFKNEIRGNAKFLIVGIDVAKSVHRAFFGTATGQTVLKGVRVTNDAHGFLHLITQVQYYMNRDGFEQVVFGVEPTSVYHKPLAEHLVRMGHMVVYVTNQAIKYNRSLLDGRWDKNDTKDSANVADLISQGKCHYYDFADGDLRDLRSLLLFRKRLRKQIHSCQVRIKNNLVAQYFPELDPLWNKAEDENFAIVRWCLSPQKIAQMEFDKFVSLFPAKPKKIVQRNRLRKIWEASKHSIGCQGALAMELEAGLMVEQARFVKEQIGQVEKAIHRICSKYEGYKYLLSIPGFGPYVSAVVLSSIGNPFRFENTSQLIRLAGLDLGANRSGTKSQQAIVIISKNGKSEVRYAL

SEQ ID NO: 406728 - protein, 395 aa, unidentified
MERLFVGVDISKDSFSAAGLDSEGNESFAKFYSMDFEGFHQFFETLTSRCKELPKVLVAMESTGCYHVNLFSFLTSQGIRALVVNPLLIANFAKLSLRKTKTDKKDALTIARFLSDHHEEISQLSISQDHQDLRDLSRERESLCHLISATKVEIKRVLRTTFPELESIGNLYTGVMLRFLQQYPSARLVRGAKLKAIVKALKGPYVGDKLTFTAEDIVKAAQRSVAVVSPAKEIILQGKIATLLHLQGRLEGLTKLLTDLCKATRVEDLKILRSIKGVGPNTAVPFLAEVGEVKHFTSSKKLIAFAGLDPSIHQSGKFVGVSKLSKRGNRHLRRAIYLMTTSVVSQNAFFKAYFLKRKKEGLPPQKALFAVAHKLIRVIFAMLSQRTYFKVKDAI

SEQ ID NO: 406729 - protein, 426 aa, unidentified
MNEVEDTRLKEFRQFKKEVRGSKEYLIVGIDVAKEKHHAFFGTANGETLFKRLIFDNNIDGFERLLTQVRAIQVAQDLPKVVFGLEPTANYHKPLGEHLIKCGRMVVLVSGVAVKRNRELLDGRWDKHDTKDASNIADLISQGKCLFYDYPEMELRDLRTLLSLKKKLKKQEHGYRVRIRNHLLAQYFPELDRFSGRPEVEPIVRWCLDPSELAGLEFDQFVQRVVPGRKTLAQQQRLQTIQQLAIDSIGCEMGAGAHFEAEVMVDGLRQLRETIKTTDERIRETCRQFPEYGYLLTLPGFGPDISAKVIGAIGNPFRFQNRKQVLKMAGLDLGAYRSGETSNTAIPVISKKGKADLRYALYQAAFIASTRYRPWIEKYTDQLQGRAKEPGIRTKRCVKLSAKLLIIAWTIMKKKEPYNPRYINPA

SEQ ID NO: 406730 - protein, 348 aa, unidentified
MQATTVGIDLAKNVFRVHGCDAHGKPVLRKQLGRRQLLSFIANLPRCLVAMEACASAHYWAREIEKLGHQVRLIGPRFVRPYVKANKNDASDAEAICEAASRPSMRFVSVKSVAQQDVQSVHRVRQQLVKNRTALVNQARGLLAEYGIVVARGVSRLRRALPAILEDRENGLSGVMRELLGEIGERLRFIDDRLRKYDVTIQRLFRQDERCRRLAEVEGVGPLVATALVAAVGNAAEFKSGRELAAYLGLVPRHRASGGHTVLLGISKRGDRYLRTLLVHGARSAMRTIERRPGARGVWAARLKLRRGANVAAVALANKNARVLWALLSRGQNYQPTPFSARVPQTGA

SEQ ID NO: 406731 - protein, 333 aa, unidentified
MQFTQLLGVDIAKNKIDVALSQNKANAPMVNHQFANSLGGYKKMLIWLKKQGIAFDNLLVCMENTGIYHRSLVDFLQKEKVFAWVENPVTIKWSLGLARGKTDKMDAQKICLYAFRNQDKAKAYSAKDQSIQKVSHLLAARERLIKVRKMLLAPIEELKEMGLKEEEKMSRKACKQTLAALDKEIKAINIDLENLVQQEGELQASYHYIRSVEHVGPITALQLLVYTHGFERFDSGKKLACYAGIAPFAYQSGNSIRGRTQVHSMANKTLKTSLHMCALSAIRQGGELKNYFDRKVKEGKNKMSIINAIRNKILQRVYACVKAQRLYVRYQPN

SEQ ID NO: 406732 - protein, 344 aa, unidentified
MQITTIGLDLAKNVFQVHGVDATGQVVVRKSLRRAQMLPFFAKLPACLVGIEACGTSHHWARELIKLGHEVRLMPPAYVKPYVKRGKTDAADAEAVCEAVTRPTMRFVPVKSPEQQAALSMHRTRDLLVKQRTQLINMIRGLLAEFGVDIPKGLERALLMARQIVDGKAPDVPLEAAKIVGTLSQQALDTHVRLREIDRDLLVWLRGNDVARRLTTIPGIGPVGATALAASVTDPHQFRSGRQFAAWLGLTPLQKSSGGKERLGRITKMGDKYLRKLLIVGMTSLVRRAKQNPGKIDPRLADLLARKPARVATVALANKTARIIWAIMARGETYRTDHRPALAA

SEQ ID NO: 406733 - protein, 343 aa, unidentified
MSEISMIGLDLAKNVFQVHGIDASGGVVLRRQLRRSAVEKFFAQLPPCTVGMEACGSAHHWARVIGRYGHQVRLMPPAYVKPYVKRNKNDGRDAEAICEAVCRPTMRFVPVKSVEQQATLAVHSTRSLLVRQRTMVANALRAGLSELGIVAAAGLEGLHELMARLEAPSTEIPEMMRGALLVLARHWQGLDTDERALERQIARAARADREARRLMEVPGVGPIIASTVLAKVPDAQVFRSGRDFAAWIGLTGRDHGTGGKHRPGRISKQGDRMLRALLISGASAHLRQQKRRGISDPWLRELLARRPYKVAMVAFAAKTARIIWAMLVKGEQYRARASAPAAV

SEQ ID NO: 406734 - protein, 337 aa, unidentified
MMYSGIDLHSNNSVIAIIDDGDRVVAQKRLPNDVTMIVGFLVRWQEQLAGIVVESTYNWYWLVDGLQDAGFHVHLANTAAIKQYEGLKHSGDETDAQHLAHLLRLGILPTGTILPREHRVVRDLARKRMQLVQSCTTHVLAVENIMARQLGGRMTSNQIKRLTDDTIDSLPLEGDVGLAIKANVAVIATLQSQIEVLEKRLQERVKPRPQYGLLTSVPGIGQTLATVIFLETGPIDRFAQVGNFASYARCVDSVLTSNRKKKGEGNVKNGNKYLAWAFVEAANFARRFCPEAKRFYERKKAKTNNVVATKALAHKLTRACYHILKEGKPFDVTRCFA

SEQ ID NO: 406735 - protein, 391 aa, unidentified
MVCVGIDVAKDKHDCCILDSDGTVRADCFTIPNNMDGFKQLLQTIRDCTKKSDKIKVGLEATGHYSYNILGFLLDNGLPTYVINPLHTNLYRKSLSLRKTKTDRVDARTIATMLLSDVDLKSYTDTAYHNEELKSLTRYRFDKVRERAKLKQSVSRLVTILFPELEKLVPSLHGVSVYALFSEYPGARQISEAHLTKLTNLLSIASKGHYGKEKAIQIREAAKSSIGSVMPAKSLELKHTIKLIKELTSEIDEIEDSIQQIMDELHPPILSIPGVGIQSAAMILAEIGDFSNFESPDKILAYAGCSPSTYQSGKLTNCYAHMEKRGSRYLRYALYNATKYVCHWNPVFAKYLAKKRAEGKHYNVALSHATKKLVRLIYALQKSGKAYLTAA

SEQ ID NO: 406736 - protein, 484 aa, unidentified
MAAKKKDARTGPDRTTADAAAEHGGEGAEVAEDRVQVVEYAAAIDVAKGSGMVCTRVPGSRPDRRRQTVWRVEATYAQVTALMDHLRCEGIQRLVLESTSDYWRIWFYLAEAAGLEVWLVNAREVKHLPGRGKSDRLDCVWHCKLNERGMLRRSFVPPEPVRDLRALTRTRARLAQDQARHQNRVEKILEDAQLKISVVISDLFGASGRRFLDALVAGERSPKALAALGDPRLKATRQQLEDALTGRFRDIHAFEISTHLRIIDAINEEITRLDGKIEEQLALVPRTAPACVACGLAGGGHAPGCADEQVPLLGLAARLDEITGIGECNARAIIAELGTDPSQFPTPGHAAAWARLTPRTRQSGETARPGRTGKGNRYIRGALGQAAMTAAKTDTRLGAMYRRIARKRGKQKAIVAVSRVICEIAWILICDPGARYQELGPDYHTPRSRARQTRDKIREIERLNPGKKVILAPIDPGPEAGAAA

SEQ ID NO: 406737 - protein, 331 aa, unidentified
MNFKEVIGIDVSKNTIDVCIHLSEKSSEFANTNKGIKGFLGWVKEHLKDLSGVLFVYEHTGMYSHTLTVVLQEMGCHYYIIAPALDIKRSMGIVRGKDDQVDAKRIALYGYRLREEITPTKERFESITTLKSLMTLRSKLVRQLSAHKTTLKEQKGIYRAKDFKFIFETQQRLIHYLTKQIKSVEAQMQEVVNSHIALKTNMDLMLSIKGVGRQMATTMLIVTENFSKFDSSRKFASYCGVAPFAYQSGTSIKGRNRVSPLANKNIKSLAHMCAVSAIQHNSEMKIYYQKRVEKGKSKMSTLNIIRNKLIARIFAVIQRQTPYVDTLRFVA

SEQ ID NO: 406738 - protein, 404 aa, unidentified
MIFVGIDWSEAHHDVSVLDAQGGVLDQGRVRDGVAGVARLHEMVAAHAEEPSEVAVGIEIDRGLLVGALIAAGYAVYAVNPLSVNRYRDRHRTSGAKSDPGDARVLADLVRTDRHLHRKVAGDSELAEGMKVLARAHQSLIWSRQRHLNQLRNALREFYPAALAAFGTDLGSADALAVLGAAPTPATGRSLSLARIAAALKKGGRRRRLTGRAEEIRTALRTSQLEAPAVLSRAYGEVVRSTVRIVAEMTAQIEVLASELEARFEEHPDAEILRSLPGLGVVLGARVLAEFGDDPTRYRDARARRCYAGSAPVTRASGSRLVVIARVARNRRLADACYWWAFSALSSSPGARRHYDRHRASGSTHHQALRALANRLVGILHGCLRHRQPYREEVAWPAPIETAA

SEQ ID NO: 406739 - protein, 315 aa, unidentified
MSDTIVQSVGVDISKDTLDVHLHPAGKARRFANTRKGRSGLIAWLAEFTITRIVFEPTGPYHHGFERQLAEAGQPLAKVNPRQARRFAEAVGQHAKTDAIDAAMLARLAALLEPPVRPAVSQALDDMKELIVARRALVKDRVAALQRDGVHRSTLLKRQAAQRLAQIERQIASIDAALRTMLASDAALKARFDILVSIPGVGETTALIMLVEMPELGDLDQRSAASLAGLAPVARDSGQHRGKRFIRGGRASLRQALYMPALVAVRFNADLKAKYEALRIAGKPPKVALTAIMRKLVILANALVRDGRTWSTKPA

SEQ ID NO: 406740 - protein, 428 aa, unidentified
MTAQQKCSAEMTLVAIDVAKAWNTVLVENPDGKRQRFRVANTRPDHDRLMLFLKNQPAQCRVAMEPTGNYHRPLAYRLLSEGFKVHLVSSVTAARFREAMFNSWDKNDPKDAAVILDLLKQDKVLRYYDPLVEGIHDLQEISKTYVQVTLARTRLQHSILTHHLPLYWPEFGRYWHSSRAGWFASFLIRFPVPQAVRQLDRQSFIQEAWPLVGRKVNKRAKLEEIYELASDTIALPINPESFAVQAFRLQLERYLSLNALRGQLERWAEEALGSNKDSQLLQSIPGIGPVLALIILAEAGDLRRFSHHRQFLKFCGLDLAKRQSGASRGREKLSKRGNARLRCAFWMAGTVAVRMRENSFRDKYQRYIKPNPTDPDLKRKALTAVMAKMARVAYAIVNIGVPYRAYFEAAVPSGSIPLKRAVGAKRTS

SEQ ID NO: 406741 - protein, 400 aa, unidentified
MISVGIDVSKGKSTVCILKPYGEIVSKPFNITHTQKDLSELSSMLFRLNDEVKIVMEATGIYHLPILTYLHEKGFFVSVINPYLMKSYRNESLRKAKTDKIDSRIIANYGIDHWFKMKEFQISGVIYEELKLLGQQYRHYMKLHLLSLAELTHLLDLTMPGIKNLLASWNETNRKDKRSDFVERFWHYDVITSMSEQEFTEKYILWAKEKKYVPSQEKAKVIYTLAQESIPTLPSETSSVKMLVTEAVRVLKEVDATLGLILSRMQEIAKTLPEYSVVREMGGVGNTLAPKLIAEIGDVRRFRNGKALVAFAGIDPPPYESGQFVGCNRKISKRGSASLRKVGYETMRSLKMRSRPEDPVYRYVVKKESEGKSKKSAKIAGLNKFLRIYYARVTELYKNI

SEQ ID NO: 406742 - protein, 345 aa, unidentified
MDHIGIDVHKRESQICILTPEGEMIERRIQSTRQKFTAMFMDRPPARVLLEATTESEWVAQTIEALGHEVIVADPNYAPMYPERRRRVKTDRRDARMLAEAARLGSYRPAHRVSAGQRQVRRQLLVRDLLVRARGRTISLVRTLVRSDGLRVRAGDADQFGRYVKALELPDELLATIAPLLALWEQLTAQLADADAQLEATVANNPVVQRLTTAPGVGPVIATAFVATLDEAGRFGGAHQVESYLGLVPSEDSSADRHRRGHMTKARNPRMRWLLVQAAWAALRSRRADAAGLRAWADQLAKRRGARIATVALARRLAGILFAMWRDRTTCAGAHFRAVDPARAR

SEQ ID NO: 406743 - protein, 341 aa, unidentified
MKQVSVIGLDLAKNVFQVHGVDEQCKVVLRKQLRRSTMLKFFARLRPCLIGIEACASGHYWHRELTRLGHDVRMMAPVFVKPYLKSNKNDRNDAEAICEAVQRPSMRFVRPKTVDEQSILHAHHARRLLIQQRVALGNHIRGMLLEFGLTITAGSKALNKRIPEILEDAENQMPMLSRHMLSLLKEQYDQLVEQADQLENQIKARNQQDEVSQRLMDIPGVGPLNASALSATLGNGSNFRSGRQFSAYLGLVPRQWSSGGKDRLLGISKRGDSYLRTLLIHGARTVIRHIRRRLEAGLDGGNVWIENLLQRCHPNEVAVALANKMARIAWALTVHKQAYAG

SEQ ID NO: 406744 - protein, 344 aa, unidentified
MDNATRWIGIDLHRRRSQIATVDEDGEITQQRISTGREAFAEALGRPDGTHVAIEATYGWEWLADMLDEAGFDVHLAHPLRTRAIAAARVKTDAVDAATLAHLLRADLLPEAYVAPPELRDLRDLLRHRAMLVHMRTSLKNRVHALLARQGIPPTHSDLFGKAGREFLTALELPGGPRRRLDSILTLIDDLDREVRTATREIDARARADERVATLCGIRGVGRYTAMLVIAEVGDVSRFPTARHLCAWAGLTPTIRSSAGKARLGHISRQGSSILRWALTEAAQKAPTGGGPLRSRYERIAKRRGPKVAKVAVARQILTLCYYGLRDGEIRCLAEQGAEEAIAA

SEQ ID NO: 406745 - protein, 319 aa, unidentified
MNEIVLGIDVSARTLDAALIFEGRIFSKQFKNSTDGFKLLAGWLESLHVTGVHACLEATGIYGEAVALFLHGRGHQVSVVNPLRIKGYAQSNMRRNKTDRLDARLIADFCLTQEPDKWQPPSKEVKHLQSLVRRVEVLAEMRQAEENRLSNASLEIKPSIERMCGLIKEEIKELEQQIKQHIDHNPNLKEQSALLQTIPGIGARTANLLLSEIEFERFTSARSLAAQAGVVPRQKQSGTSLKQTSLSKLGNVRIRRALYFPAITAKQHNQIVKEFAGRLKKSGKTPMQIVCAAMRKLLHIAFGVLKHKRAFDASLAFSA

SEQ ID NO: 406746 - protein, 404 aa, unidentified
MWYAGIDWADTHHDVLVLDEKGHQSGSLRVDHTPEGLAKLNTFLETITGPLEKEQMACIIETTHGLLIAFLLEAGWPVYPVNPRTVDRRRSASGAKTDTIDAYLLAKTGRADLADLHRLSPDSELVQELKTLTRDQDALIQMQTRLVNQLTACLKAYYPVALQLFAKLQQHSTLIFLQTYPTPQAAMAASVEQITEVLKHAGHTTVEKVAPTIFQTLHQPQLTANAIVTRTKSRLMLALVAQLLPPVEQITAYDKEIKRLFLMHEDNAVFSSLPRAGKRLAPRLLAEIGDQDTRYADAASLQALAGTSPVLFQSGNYAKAHRRVGCIKPLRNALHQFAWQSTQQEGWARNYYLRKRAEGKSHTVAVRALSNVWARIIFAMVDKHEPYDSATFEAAQRLHARRVA

SEQ ID NO: 406747 - protein, 453 aa, unidentified
MRKKRSPRSRKQNRRVLDQINHNAAGADIGSDSVWIAVGEHVANEPVKTFGTTTAQLRASAEWMVSVGVDTVAIEATGVYWVSAYEIYEGYGLRPILINSRSIRNFNGFKKSDFIDCQWIQLLHTFGILQPCVRVESLMIELRGYMRQRKSLTDQCSEQIQRMQKALTLMNLRLDQAVSDITGVTGMAILREIVKGERDASKLAALRDPGCSKSEQQIAEALTGHYREEQLFALDHAIRLWDFCQALMVECDGKIKAVLEKLPIRNDKAKGNKAPKRRKNQVRFDGQTLLNERLGVDLTLITGLQVLTILVVISECGVDLSRFPSAKHFASWLGLAPGTHKSGHRNLSTRSRRTTNRASTALRLAAQSLLKSNNSELGAFGRSLKSRIGPQKAITAVAAKLAHRIYHSLQTGRVYQDRGSQYHDTQHWERNLAVLRKRALRLGLQLVPMDQVA

SEQ ID NO: 406748 - protein, 387 aa, unidentified
MTKTIMIGCDLHDRWMLVRFAIEDSEPQQKSFRNDREGRLKMVRFFWEFARKHQAPKIVFVYEASGQGYGLCDLLDGQGIECHVLSPTLLPTTPKSRKQKTDAKDAQMLLEQLRGHVLAGNPLPVVWTPPQRLRDDRELVRRRIDAADDSTRVKLQIFAMLKRRGIEKPDWYSTWSKRFLCWLRDVARGLDEVVTPVLETLVDRYEMYRDEMRKLERHIQKLAKAPRYAKAYRELCKLPGVGLLTAMTFLTEMGDLTRFDNRRQVAAYMGLCPASFESGETNNRKGRITRQGPSRLRWMLCQAAWISLGRDDEALAAYVRIKGGKSQRNKKAIVALMRRLGIKMWHRAFMMGVSSELLGRSGPGNMRTSARAQQRGDVPFDSPSLRP

SEQ ID NO: 406749 - protein, 351 aa, unidentified
MDRYIGLDVHMQSCTMAVMGPTGRRLREEIVPTNGRELVEAIRKVNGRRHLCMEEGTQSEWLYELLQPQVEELVVTAPQENRGQKSDSRDAWARAEELRVGSIETKVFKPAGRYTELREAMRGYRLIVQDTTRVKNRLKAIFRSRGVWGMEDAAYDPSKREKWLAKLGPSQRRLAELVSQELDGLGPLAQQAKERLQAESKKHSIVRRLATVPGLGPIRAAQVVATVVTPERFRTKRQFWSYCGLGIMMRTSADWVREGGRWVRAPVTQTRGLTRKRNPVLKSVFKGAALTVVQMTDHPLKRAYERLLEAGTKPNLAQVTIARRIAAIVLAMWKHQEDYDPAKQELPPQTP

SEQ ID NO: 406750 - protein, 389 aa, unidentified
MEARTVNNLPPAGIDDDAVRCLIAIELSKKSWIVAVNTPLSDKISRHTLKACDGKELLDLCERIRTRAARETKKRVEIVSCYEAGYDGFWLHRLLEAHGIRNYVIDPASLQVDRRARRAKSDGIDVEKLLRSLMAYLRGEPKVWSVVRVPSVAEEDDRRLHRERGRLINERIQHVNRIKGLLAIHGIYNYQPLRRDRMQQLERLRSADGRTLSPRLKAEIRRELQRLELVIGMIKTIEAERDAIASTKTETEHTSAKKIQDLVKIKSIGPEFATTLVGEVFYRSFDNRKQVASYVGLTPAHFQSGAMCRDQGISKAGNAKARTVMVELAWLWLRHQPDSPLSVWFRERVGKLKGRIRRITIVAVARKLLIALWRYLETGLVPTGAALKV

SEQ ID NO: 406751 - protein, 451 aa, unidentified
MPVMGVPEQIEDEEHEQRLERVAAVDVAKASGKVCTRVPDESKPGKRVTLVWDVPATTHAICELAAHLVAHRIERVVLESTSDYWRPFFYLFEASGLTVWLVNANDVKQAPGRPKTDKLDAVWLAKLNERGMLRPSFVPPAEIRRLRDYTRLRSDLTRDRTRHKQRLEKLLEDALIKLSTVATDIFGKSGRDMIEALIAGNRDPEQLAQLARGRMRVKHAALVQALNGRFDDHHADLARILLDQVDGLDTQIRQLTATIDELITAMPTTTGTTTGTTTGTGTGTGHPGTLSTVARLDEIPGIAEHSAQVIIAELGLDMTQFPTAAHLVSWAKLSPRTIQSGPRTRGGKTGKGNPYLKSALSEAATAAAKTDTFLGERYRRLVKRRGKLKALIAVARSILVIIWHLLADPTARFHDLGPDYHTTRINTDRKIRNLIHQLETLGHTVTLQPTT

SEQ ID NO: 406752 - protein, 411 aa, unidentified
MSKTLLVGCDVSSQLNTVCLMDPEGKKIGSQTFSNTLSGAQALESWLLKTLKENDFSELKIATEATSFLDLHLVDFLASSQLLAPFRPSIYQFNPRIVRNFKKAYSEKEKTDKVDAFVITDRLRFGRLPEPYETHQPYLPLRRLTRYRFHIVKAINREKAYFLTHLYLKFSAFSMEKPFASLFGATSLAVITDFSPDELVHLPLEELTQFIIDNGKNRFKDPQKVVETLQRAARESYRLRPALASSIDLILATILQTLRALQEALKEVDRAIEKEFKAFPNTLQSIKGIGPVYSAGIFSEIGEITRFPREDALAKFAGLTWKRYQSGNFEAEETRMSKTGNDYLRYYFIEAANALRVHNAEYQAYYETKFKEVTKHQHKRALALTARKLVRLVYALLKKGQLYRANYQQEA

SEQ ID NO: 406753 - protein, 337 aa, unidentified
MKSYLYVGIDISKLLLDVSILCSSNTNDIHYRQFSNDSKGFIQLMKWLSQRSEGVGLEGWRVCMENTGIYSLELNCFLHEKSIWQSMENALQIKRSMGVTRGKTDRADSRIIALYALRFIDKLKPYILPGKTLLRLRALFAQRERLVSMHSQLLVGNQSMKGYSKELVKDIQSQNENLLKILAEQIKSVDKSLKECLQEDEDLKRKAKLIQSVPGIGQQTAAYLLIVSQGMKSFVTPREFACYSGCAPFDYKSGTSVRGKTKVHFIANRKMKVLFHMAAMNAITFNEELKTYYQRKVAEGKNPMSVLNAVRFKLICRIFSVIKRNEEYQKEYKKIAA

SEQ ID NO: 406754 - protein, 314 aa, unidentified
MSACTAGIDVGKNFFDIGMTPTGHNFRVPNAPKGVAVVIERLRRAQVRRVVLEAIGPYGAALIAALRHNGFEVGVVNPRRIKAFRDAEGRRAKTDRLDAGLIARFALIMNDIVRPLPSADQLVLKALATRRRQLVEIIAMEKTRLKQTGELLILASHRAVITALTLERRAIEREIEQRIAQDAVLMRRKEILTSIPGIGQQVATVLLTELPELGSADRRAIASLAGLAPHPNQSGLSHGRSQIAGGRPCVRAALYMGALASCRANPIARKNYRAMREAGKPAKVAIIAAARKLVILANTLIKIDQTFDPDHAIA

SEQ ID NO: 406755 - protein, 407 aa, unidentified
MEVQHLRCAGLDVHKDTVVACVRVVRERDVFQEVKTFDTTTQGLLALSDWLGEHGCTHAAMESTGVYWKPVWHVLEASIDLVLANAMHIRNLPGRKTDVNDATWIADLLAHGLIRSSFVPPTHVQELRDLTRTRKQLVREIAQHTQRIQKTLEDANIKMTGLFSDILGKSGRAILEAIIAGESDPERLVDLTSGRLKAPRVKLVEALRGRVRDHHRFLLKLHLAQVDALQLAVRDVEARLGEALQPFHRNIDLLTTIPGISATTARVMVSEIGFDMVRFPSAAHLVSWAGLCPRSDESAGKRRSTRIRKGAPWLKTTLVQASWAAVRAKDSYSRAQFLRLKARRGPMKAIIAVAASILTAAYHMLRDGVPYRELTAQHFDRRDKGKLAKRLIRRLEDLSLHVEVKAA

SEQ ID NO: 406756 - protein, 350 aa, unidentified
MNVNHYIGFDIHKKSVSYCVKGADGLIFEEGKLRATHQVLRQWAQKRREPWRGAMEATLFSGWIYDALKPFAAELQVGHPAMMKAIGASKKKNDKLDARKIADLVRCNLLPACYMAPAEIRELRQMLRYRNLVVRQAVRMKNKMSGLLMEAGAEYNKRRLHGKEYFTELLDTVAEAPESVKDLLRLSRGVLEMFETTQEQLLARLQKDPLLAKRVNLLKSIRGVGEVTALTWALEVSEPQRFSCVARAVSYCGLTSALISSAEKQQRAPISKQRNAHLQTVLIEAAKLAPRWNPQLAALHARELKRGNRNRATLAVARKLVAYLLAVDKSGQPFQVHRQAAAEPEVEMAA

SEQ ID NO: 406757 - protein, 359 aa, unidentified
MKIVGCDFHPSYQQIAVLDTETGEVQEKKLIHANGEAEKFYRELESPTLVGMEATGNARWFELMVEKFGHQLWIGDAAKIRASYVRKQKTDKRDAGHILTLLVEKRFPRLWVADAQQRDIRQLLTHRHKLVGVRTRLKTELQHLALNQGIQKKRQLWNERGRALLESLPLQGWTQQRRKDLLQLLAVVEPQIEQLDKAVEQVAKANPQAVLLMSQPGVGPITSLAFAVTIGEVSRFAHSKQLSSYLGLIPSERSSGSKRRLGSISKQGNVFLRTLLVESAQSVVRCDPQFRKEYQHRCHHKAKGIAKVAAARKLAVRLYWMLKSNKPYPEVLLIGGSPRHPVAAQAKAVQLNGHPRISH

SEQ ID NO: 406758 - protein, 399 aa, unidentified
MLAVGIDISKSKSVAAILNQDGSMHTSPFEFHHTQPELDAFIKYILNSKQSATILMENTGHYHYPVLKAFQEAGLPVCMVNAYQIKKFGDMDLRKAKTDKKDAVRIARYALEKSYSLVPYTSMEQKYEDLRFLARQYNQRMLTLKTNKVFLLNLLDETMPGITNILPLTTRTPETSLSVLFINRFKSYDRIKKMGKSRFLDAFEKIARKSRNRQTKTYGLAIYEAALRNITTRGENEYTLAAQDQCLELVCESQKAADSIIPKMQTLAETLPEYAVLRSMAGVGNRLGPLILAEIGDIRRFHSGKALNAYAGNDAPPYQSGTFESHNRHISKRGNAALRKYCFEVMQALKLTRPQNDPVYLFLLKKEQEGKPYNVAKMAGVNKFLRIYYARAMETLKQQ

SEQ ID NO: 406759 - protein, 392 aa, unidentified
MVVSVGIDVSKDKHDCFIVSSEGEVLADVFMIPNTMDGFRSLLQRIWECCDSQDKIKVGLEATGHYSYNLLGFLLDNGLPTYVLNPLRTNIYRKSLSLRKTKTDRVDARTIASMLLSDAGLKPYTDTAYHNEELKSLTRYRFDKVKERAKLKSSIARLVCILFPELEKLVPSLHFASVYALLEEFPGAKQIAAAHLTRLKALLETASKGRYKRDTALEIRDAARNSIGSWMPAKSLELQHTIRLIRELDNEITEIEEQIQTIMDELNSPITTIPGLGFRMAAMIFAEVGDFTRFDSPDKLLAYAGLSPSTYQSGQLKNCYPHMEKRGSRYLRYALYNATKYVCHWDPTFAAYLAKKRAEGKHYNVALSHATKKLVRLIFAIEKSRQPYCSAT

SEQ ID NO: 406760 - protein, 425 aa, unidentified
MNYKQNEKINQVKESTLVVGIDIGSTTQYARAFDWRGIELGKVFPFSNSREGFESFKAWMQRLQDKYKKSDAIVGIEPTGHYWFDLGAYLEDEGILLVMVNPYAVKQTKELDDNSQSKNDRKDPKVIAKLVTEGRYSAPYTPDGVYADLRIMVANRKRLIREITQIKNRFARWFAIYFPEYTEVFGDYEAQSSMLLLKKACTPEAIVELGAEKINQIWRDAKLRAVGMKRATTLCETAKRSIGLKKGSSAAQYEMKLLLEDYEYKKAQLDSVMEEIESLCKKIPESEQMLAIKGIGVITVAGFLAEVGDVRRFESPRQIQKLAGLSLRENSSGKHKGQTTISKRGRSKLRAVLFNAAIPLIAKNPEFRSLHEYYTTRANNPLKKKQSVIAISCKLIRVFYAILSNGVTYDPQKMLSDIHRPSQAA

SEQ ID NO: 406761 - protein, 355 aa, unidentified
MQTIYIGVDFHARQQTICYLTTESGEVVTHELKHQDKDEVRAFYAQFTGRVVVGLEASGYSPWFERMLEELGCEVWLGHAIEIRRRARWRQKNDRRDAELILDLMVHEEFPRLHRPPWQSREVLRMLRYRQKLVKIRTMSKNSLQSLALQSGLAKGSHLFSKAGQQELRTAAMTPAMQWQREQWLQLLEPLNQRLIETMLWLKQQSQGDVRISRLRTHPGIGLLTSLCLVHTLEPVSRFRNTRKVTAYAGFDPMERSSAERKRFLGISKAGSRVLRFLLVEAAHTAVRKDDDLKRFYHRLGERRGRPKAKTATARKLLIRAYIMLRDEIDYAEFRRRAVAARLARQNPRPPCLSL

SEQ ID NO: 406762 - protein, 348 aa, unidentified
MIVIGVDTHKRTHTLVAVDAATGGLLGERTIAASDEGALAALRLIAALGDERVWAIEDCRHVSGRLERALVAAGERVIRIPPALTANARRSAREPGKSDRIDALAVAHTALREGLERFPAAFLDEQAMEIRLLCDYRDQLVVERTRAINTLRWHLLSLDPELEASLRPSGLQGPRIRAKIARRLAKLGNGAQARIAKALLRRINEITRSELELRAEMNTLIAAHSPQLLAERGCGTITAAILIGHTAGAERFATDATFARHSGTAPIPASSGNTTRHRLHRGGDRQLNRALHTIALSRARTDPLTRAYLDRRAAEGKTKLEALRCLKRHLARHFWKLLYRNPQIPKLT

SEQ ID NO: 406763 - protein, 408 aa, unidentified
MNPLYVGIDVSSKSNVVYLMLPDGSKHSNFSVANSHDGSIQLTKHILSAVTSLSLDTVIIGLEATSVYGDNLVYFLREDASLVPYDRKIHVLNPKQVKKFKDAYNDLPKNDYVDSYVIADCLRFGRINKEVYQGDYRYKALQNLTRARFFAVQNLVKEKQRFINVLFKKYSTMTQEKVFCDTFSTTALAVYEKFDSAEALASMDLQELTDFIMEKGKNRFPDPDAVAKAIQKAARSSYRLPKTVNDSVNQVLSISITSIKALDAQIKEFDKAIKAQMELLPNVLTSIPGIGPVYSAGILAEIGDINRFPSQAQLGKYAGLVWTQNQSGDFESENTRLIRSGNRFLKYYLCEGALSLVRCDTEYSSFYHSKYKEVNRHQHKRALALTARKFVRLVFRLLKDNRLYRAAE

SEQ ID NO: 406764 - protein, 344 aa, unidentified
MEAHVSVVGLDIAKSVFQVHAVDSVGKPIIRRRLKREEVETFFRKLPPALVGLEACPGSHFWARLLREVGHDVRLLPAQYVRPYVKTNKSDAADAEAICEAVTRPTMRFVPIKEEIQQEVLVLHRVREMLIRQRTQLINSIRGHLAEFGIIAPNRAHNIGLLTKLIEDEEFDELPAVARHALRYLVEQLREVKTKLFRIDRDLMKIVKGSDACRRLMTIPGVGVVTATALVSSMREPADFKSGRHFAAWLGLVPRQHSTGGKESLGGISKRGDGYLRRLLIHGSRSIMRWRGRSWTWLAKLRDRRPANVAVVAIANKTARIVWALLKFGGTYGHPGDGATMRAT

SEQ ID NO: 406765 - protein, 329 aa, unidentified
MYIGADVHERESQLAIFEPSGTLLTEKRLPTTNLPTFIDSLPGEKHVAIESTGFIYPIYDKLSTLKSCHVSVAHPNKVKLIAKSKLKHDRADARILGELLRTNYLPASYMPDLETREKRLLINDRVRYGLRSGELKGSIRWLLKRRGIQIQYTFKPEGKRTLRELGLQEINIRLDELELIEAIVRRLNIQIAKTVQEDPNAKLLDTLPGVAPYTALFLASEIGDVNRFPDSKHLCAYLGLVPSLHQSGDVTFTGHITKEGNKWLRRNLTECSRVAVRKDPHLRRFYLKLTHTRGEKKAILAIARKLVAYAYWMLKRNQTYEELSPWDGS

SEQ ID NO: 406766 - protein, 409 aa, unidentified
MDVLYERCCGLDIHKRTVVACVLGPGAGGRPAKEVRTFGTMTDDLLALGAWLAAPGVTHVAMESTGVCWKPVDNLLEERFALSLANARLGKAVPGRKTDVRDCEWLAQLLRHGLLPASFVPDRAQRELRELTRSRVSLLRERAAELNRLQKTLEGANIKLAAVASEIDGQSARAMLAALAAGAADPAALADLAQGQLRAKLPQLERALTGCVGPHQRFLLARQLAHVAALDELVAQVSAEIEARLRPVAAAVARLDTVPGIGRRTAEVLLAEVGPEVARFPTAAHLASWAGMCPGNRESAGKRLSGRTRKGSPWLRSALVEAAQAAGRGRQTYLGAQYRRFARRLGAKKAAVAVGHAILVIAYHVLRDGTPYRDLGPEYFEERDREAHLRAAVRRLERLGHKVTLEPVA

SEQ ID NO: 406767 - protein, 340 aa, unidentified
MNATTYGLDVAKRVSQLYWVDAHTGEIVNRRFGRDELIGFLAQRPAGRVALEACGSGHWWARKIQALGHEVVLLHAKFIRPFVQTNKTDAADARAIWTAVQQPEMRTVAAKTEDQQAMLALHRMRALLVKSRTMQVNQLRGLLYEFGVTFRSGRLAGLAEMRARMAELEDALPAMLFDGLQDQLKRIDGLEQAIDQLEKRIGAWQKQEAACRAIAEVPGIGRLTATALVAMIGDARTFKSGREFASFLGLVPRQTGTGGKTRLGSISKRGDPYVRTLLIHGARSVMHHAKVPTPWLTEIQARRPANVAAVALAHKMARTAWAILAHGRAYQKDYVSVKPA

SEQ ID NO: 406768 - protein, 318 aa, unidentified
MNSQNNQSEINIGVDTGKHQLDIYIRPLDIYFSVANDDAGINEAIKAMKKHKPTRIIIEATGRLEHAFIYACSENNLPFVVANPVHVRRFAGAIGQLAKTDPLDAKLIAHFGEAVKPALSQLKADVLQRMSDLLSRRRQLMTMQTMEKNRLQIMPKGISSFIKPILTAIKNQILKTDNKLLKLVENCGEYKEKNEIIQSMKGVGNVVAFTLLSNMPELGYITNKQAAALVGVAPINKESGCYTGKSKIRGGRHQVRTVMYMAMLSAIQCNPVFKSLYQRLVADGKSKKTAIIACVRKMIVILNSMVRDGVKWDPEMGK

SEQ ID NO: 406769 - protein, 376 aa, unidentified
MKTIRFVGLNVHAQTIAVAVAEPSGEVRSLGVIANRIEAVRKLLRQLGRPEQLRVCYEAGPTGYVLYWQLTQLGVKCCVIAPNLVPMKATDRIKTDRRDAERLARSLRAGDLTPVWVPDAAHEALRDLVRARLVAKHDQLRARNRLSKFLLRHGQRPPEKVRPWTQFYLRWLQHLHLEYFALEATLTDYLHEVEHAAARIERLEQAIDSAVEQVPARLRAVIDALQTLRGVAKLGAVTLVAELGTLTRFAHPRQLMGYTGMVPSEHSSGERIRRGAITKCGNAHVRRIAVEAAWAYRYRPVISRTLAPRQRNQSEAVKAIAWKAQHRLHARYRKLVDRGKSNQQAVTAVGRELIGFIWAIGMEAERDAPTPTTIAA

SEQ ID NO: 406770 - protein, 320 aa, unidentified
MKQAMYVGVDVSKKQLDVAIRPLGKIFAVGNHRRGIAQLVRRLKKLEPVCIAIDATGGLEKELAYALAAENLPVAIVNPRQVSNFAKSTGQRAKTDAIDAAVLAHFAEVMKPEVRRLPDAASRELSALVTRHRQLVEMMTAESNRRDLASKSVRKLINSLLRSLKDQLAVVDREIRKAISASETWRHKAELLRSVPGVGKVTTATVLAGLPELGELDRRQIAALVGVAPFNRESGTWKGKRMIAGGRGWIRSVLYMSTVVAVRRNPVLKEFYERLRARGKPAKQALTACMRKLLVILNAMVRRQTHWSVPVSFPTLSVHT

SEQ ID NO: 406771 - protein, 341 aa, unidentified
MQKNRFFIGIDIACDNFVASIYESPEKPVITKESIKNNPDGFNMLVSWLKEHDIDRTNSVICMGATGVYSEAIAHYLATYGFKVSVEPPLKVKRAFDPIGHKTDAVDSKQIAEYAYRYADELRFWHPKGDIVEKIKHLLTAREQFTKQSTAIQNAMASYERHVVQVPLIIKAHQQTLKELKKHIKDIDKELDRLIRQNPTISQMSNQLKSIPGVGLLLASNLIAITGAFNDISGYKTLAAFLGICPYQHKSGKSICKKPHIRIFGPSYARKLLMLAARSVATHNELFKKYYLRMQAEGKAKQLVLNNIANKILKIACAMIKNDKPYIQNYRSINPLCLKSA

SEQ ID NO: 406772 - protein, 345 aa, unidentified
MELHTIGIDLGKTVFHLVGLNQRGEVVVRKKFSRKQLLHFTANLQVKLIGMEACGGSHFLGRALREQGHEVRLMPAQYVKPYVKTNKSDYIDAEAIAEAVERPKMRFVPIKSDDQLDLQSLHRVRERWVMRRTAVINQIRGLLLERGITLRQGRRHIDAALPGILEDASAKLSGALRVLLAQLRLELDHLQMRIDEADAVINKIAGDNEACRRLVAIPGIGPVTATAIIAAIGNGAAFKKGRGFSAWLGIVPGEYTTGGKQKLLGISKRGNSYLRRLFVQGARAVLQQSAKQSSGLSAWLAQLTTRTHSNVAAVALANKLARMAWAVLAKNEPYRPPMLAAAATT

SEQ ID NO: 406773 - protein, 346 aa, unidentified
MHYIGMDCHISTLDFAVVNEAGRLVKAHRVATSVNGFMEFVKAVPPPRAIFMEEGTLAAWALETCVRFREKLVITDAKKNHWIGSSGQKDDSIDALKLAQLARGGYIKEIHHPVGQRRRFRELMIAYHDTVRSTTRIKNKIKAKFRQNGIRCAGATVYSETYREEWKGKLPQEATLLLILDGLWRQLQQSEQTEKELLAAARAQAKQYPEIKLFKDIPGIGFIHAATVSAILENPHRFANKRKVWMYAGLGIMTRSSGGKTYSEKLSTDYNRLLKYTLKQAAETTIQAKDNPFRRKYLDMTLLHGIAPHRAKLTIARDMLATMWAMWRRGEKYSPEIREKAAYKQG

SEQ ID NO: 406774 - protein, 452 aa, unidentified
MNKTRHKRKLDCFEEMQRYVAGIDLAGHADHYVCGPRKDDGTHDIEHFGTTTEELRRMLSWLKERGVVSAAMESTSVYWIPVYDILESSGIKVVLVDTRTVRMVPGRKSDVKDCQWLQRLHSAGLLRGAFRPPERFNAIRMVIRERENVIAMRTQAIQSIQKSLDQMNVRLHHAVSDIDGVTGMKMLTAIVNGERDPFKLAAMRDYRCRKDVAAIAAELVGNWRDEHVFNLEQAYLMLVALDERLAAYDQKIVAMFADVSKDSGGEAVDVDKSAGESKRKGSIGERKMLARLMGFDMTSVTGIGIQSAYAIAAELGNDLSMFPDENHFVSYIGLAPPLGTSAGKRVRTGHKAKNTNRVGVILRQCAMGTMRTDSEIGARFRCIRSRSSTLTAVKATARRMAQLLYRGVKFGTKYVEEGEDAYEKRRRDRTIRSMSRKMKSLGISFEELAKAS

SEQ ID NO: 406775 - protein, 416 aa, unidentified
MPNPLFVGIDVSSKDNVVCCLSNDDEKKPLCRFTVLNNRPGILELKQRINQLVQKHSFNQIRFGLEHTGCYSAHAAMYLQRHLDFGCEDVKVYMFNPSLIKEFKKARFLDAPKNDRVDAWYIASKLMAGHLPHPFTWSEPLLALQRLTRTRFHLMQALTRESNFLMTNLYLKCSDYTLAFNNKLSATSLAVMEEFASAEALAEASLDELTQFLILHGKNRFDDPQAVAKELQKAARSSYRLPKAMADSVNLAMASSIRVVRTIQEQLKSLKKAIEDHLGTIPQTLDSVPGIGPVFASGILAEIGDINQFESHKQLAKFAGLAWTQHQSGNFTASQTRLIHSGNRFLRYYLIEAADSVRMHDPVFARYYELKKAEPKQFAHKRALALTARKLVRLVFSLLKTNQLYQPEGGGNRRIC

SEQ ID NO: 406776 - protein, 349 aa, unidentified
MTTVRMADGVSGVVVGVDTHADVHVAAALDPLGRHLGTLEIATTTRGYEQLLRWAKTFGPVTRFGVEGTGSYGAGLARHLAGAGCTVTEINRPDRRARRARGKSDPLDAEAAARAVLAGAAQAIPKADHDRVGMIRTVRVARRSALKMRIQVSNQMAALVVTAPDPLRDQLRSLSLAHLVRVCAMLRPGAVSTPTAASKLALRSLALRHQGLCSELEMLDRELARLTREAAPALSDLTGVGPDVAGALLVAAGDNPDRLRSDSAFASLCGASPVPASSGKTNRYRLNRGGDRIANNALWRIVMVRLTCDARTQAYVARRTAEGMSKREIIRCLKRYVAREVFHALLDKA

SEQ ID NO: 406777 - protein, 370 aa, unidentified
MLDTTTFVGLDVHARSIKAVSLDVMTGEVRCATFGYDAGAVAGWVRSVDPKARCVYESGATGFDLQKRLSGLGVGCVVGAVSKMIKPSADRRRKNDRNDAEFLARMLSVGNVVEVWVPDDECEAARDLTRALEDARDDLSRSKQRLSKFLLRHGLVFDERTPTGRRKGNWTRAHWSRIESIRFAEGADEEVLAYYVDAVRRAAEEKARLEGLVEAEARKPRWRRRVDSLRCLKGVDTATAADLVFEAGEFSRFRNARSFAAWVGLTPSEHSSGESDRRGAITKAGNKHLRKALVEAAWHYLTCSGRPKDPARGQAPDRVARRHAAKGVRRLVERREALLARGVHGNKANVATARELACWVWAVGLMAEEA

SEQ ID NO: 406778 - protein, 368 aa, unidentified
MKKNSTTQMSSSGITHANQKLTIGLDLGDRSSRYCVLDEQGEVIQEGSMPTTKKGLDRVFGTRIRCRIALEVGTHSPWVSRYLARLGYEVIVANARRVRLIAESTRKDDQLDAKTLARLARIDPELLSPIRHRGEQAQADLMTVRARAVLVETRTALINAARGLTKSFGERLPSCGTNQMGRDMAESLSPSLRTALDPLLAEVEAVTERIQEYDRQLEKLSKERYPDAERLKQVHGVGTLIALTYVLTVEDPHRFRRSRAVGCYVGLRPKRRQSGESRPELGISKEGDAYLRTLLVQGAHHVLGPFGQDSDLRRWGLQLAARGGKNAKKRAVVAVARKLAVLLHKLWVSGEKYEPLREASRKAQMPAA

SEQ ID NO: 406779 - protein, 318 aa, unidentified
MTQNLFIGIDISKAKLDVAASPGEHSWSVSNTEEGIQELIAKIRQLGTPKIVLMEATGGFERRPLAMLGAAGLPVAAINPRNARDFAKSLGLLAKTDKVDAKALALFAEKIQPPCRPLPDAQTRALQDLIVRRRQMVDMISAEQSRLAIVENPKVRRELVQHIAWLKKRIHIADYDLDQAIKNSPAWQPKSDLLKSVPGVGPVTTSTLLALLPELGALTNKQVAALVGVAPFNRDSGTMRGRRCIWGGRTSVRNVLYMATLAATRFNPTIRAFYQRLCKLGKLRKVALVAAMRKLLGILNAMVRDQTPWRSDNVEISS

SEQ ID NO: 406780 - protein, 342 aa, unidentified
MEVYIGLDVSLASTAICVVSGQGNIVKETTAVSEPEGLVAVLREIPGAIVAVGLEAGPLSQWLHRFLTDAGFAAVLMETRQVKGALMAMPIKTDRRDAEGIARLLQMGWYRPVHCKSMSAQEMRALLSARKAVQQAAMNLELSIRGLLRNFGLKMGPIAKGRFEARVQELTEGNPMLEAAANPILAVRRALRQELAGLEKVLRDHAREDSVCRKLMTMPGVGAVIALTVKAAIDDPERFRSSKDIGPWVGLTPRRNQSGERDIVGQISRAGDAGLRTALYQAATVMLHRGRKNWLTAWALNIAKRRGNKRATVALARRIGVVLHRMWKDGTDFRFTREVAVV

SEQ ID NO: 406781 - protein, 349 aa, unidentified
MIITRAFQQIARVDTDRGEFQEHRLEHSLEAEKFYRGLKEQGHKVRVGMEASGQARWFERLLAELQFELWIGDAAEIRSKRVRKQKTDRRDAQLLLRLLLEDRFPRIWVASWENRDVRQLLWHRHRMVQMRTRLMNQLQAVAFNEGVRRKKGLWREAGRKQLETFTMAPWASRRRRDLLEMLDRLTPMIAELTQAVGQEADKCPAAQRLATHPGVGPLTALGFVLIIGEAERFRCGKQVASYLGLAPGEESSGDRQRLGHGSKQGNKLLRFLMVEAAQVTVRSDAEWRRKYFHLAPRRGRKIAIVAKARRLAVRLYWMWRKQWDYEQWKKFGPHAGQPGTGVGVQSNTE

SEQ ID NO: 406782 - protein, 348 aa, unidentified
MSSMALCPEAVIVGVDTHKAEHYAVALDGLGRRLGQLTLAANPDGYSVLLNWTAEFGAVLRFAVEGTGSYGSGLARFLRRNGHMVVEVSRPPRKGDRRRAGKSDAIDAEHAARAVLAGTATATPKLADGVVEAIRLVKIVRDTAVKAKTQAMITLKSVLVTADDARRAELEPLSDFRLIQACACLDVADDLADPAAAMKHVLRALARRWLELHAEISVHSRQLKRLTNAAAPQLVAAFGIGPDVAAELLVTAGDNGDRIRSEAALAKWCGACPIPASSGQTTGRHRLNRGGNRQANAALYRVIVVRLRWHPPTLAYAQRRTAEGLSKREIIRCLKRFLVREIYRLLPA

SEQ ID NO: 406783 - protein, 340 aa, unidentified
MSTINIIGIDIGKSTFHLVGHDSSGREVFRKKLSRTKLILFLANTERTTVAMESCGGSHWLARKCQEFGHKALLIPPQYVKPYVKTNKNDFIDADAIAEAATRPSMRFVSIKTESSQVISVIQRIRSSYLKDRTACMSRIGSILLEFGMSFPKSHAKMKAIFQWIAEHGEPIPPMLLLELRDHHDYYLKLNQLILTQDKKLKDIVDHDERAQLLKTIPGVGNLTASRCLSDISNAADFKNGRHLAAWIGLVPRQFSTGGKPRLLGISKRGNKGLRELFIHGARAVLVRPEKAIAIFGNWILELLSRKPYNVVVVALANKLARITWSVLSTKQAFEVRVQT

SEQ ID NO: 406784 - protein, 364 aa, unidentified
MHSINNIELSSLEETRCQFNGGTGAIKLGIDVHQDFYVVIEQVGGSNPKPPQRFAKEAFLHWAARLKQKSSAEVYAVYEACGFGFSLQRKLSALWINCYVVCPQKLDEQNRRVKTDGLDAKALCLKLDRFVQGNRDALAIVRVPTEEEEQLRAIHRQREQLVKARKQLEAQGRSLMVNHGVEPVQNWWKPRTFAALPAPQWMKELLANSQPILVALQQKISALSVQLQSAASPDQPRGLGKMTSVLIDREIGDWNRFNNRRQIASYTGLCPGEYSSGNTRLQSCVTKHGNPRLRAALVELAWRLVRFQRDCKAVRKWRQILAKGALATGAARKKAIVAVARQLAVDLWRIKTGRLSAEELGLIN

SEQ ID NO: 406785 - protein, 407 aa, unidentified
MIFVGVDWAEAHHDVFVEGVDGRRLAGGRLSEGVDGISRFHEMVGAFAEEPDEVVIGIETDRGLFVGALVAAGYQVFAVNPMSTSRYRDRHSTSGAKSDPGDAKVLADMVRTDRHNHRPVAGDSELAQAIKVLARAHQAMIWSRTRQTNFLRSTLREFYPAALVAFDDLTSGDALEVLKVAPTPTLGEGLSRSKIAAAVRRGGRQRRVDQRAEDIQKALRAPQLQGSALVATAMGSSVSATVAVIATLNTQVAELAQELEAHFEQHPDAEVIRSLPGLGTILSARVFGEFGDEPNRYATAKSRKNYAGTSPITRASGTKRTVLARHVRNKRLADAIYFWAFAALSASPGARAFYDHRRAAGDTHHAALRTLGNRLVGILHGCMVTRTAYDENTAWGHRAELEQSQAA

SEQ ID NO: 406786 - protein, 378 aa, unidentified
MPSLTLETHARSDGVDAPRRHLCAKVTVSKLPPKEASMEQATTIGLDIAKHVFQVHGADAAGHVLFRKRITRGKLLGFLAAQAPCVVAMEACAGAHYWAREIGKLGHHVRLIAPAYVKPFIRRQKNDAADAEAICEAAQRPSMRFVPVKTEEQQANGIVFRARDLLVRQRTQCVNALRGHLMEYGHVFPKGITHVETLVAVVEDPRSSLPDSVRVILKLLVDTFTALEAQITALDAEINQRSKSDPTARRLMTIPGVGPIASTAITALVPAAEGFPAGRDFAAWLGLTPLQKSTGGKQKLGAVSKRGERTIRRLLIIGASAVVQQASRRGAPKGSWLAQMLARKPKMLVTVALANKMARIVWALLVKGGTYRTPTAAA

SEQ ID NO: 406787 - protein, 412 aa, unidentified
MEALYSRCCGLDVHKSSITACVLLEQSQKRSKQIRRFGCTTRELRELVIWLHELAVEHVAMESTGVYWKPVWNVLEANFHVVLANAQHIKAVPGRKTDTKDCQWIAELLQHGLLRSSYIPSVIIRDLRDLTRARTTLSQEHSRIASRIQKVLEDANIKLASVASNTLGKSGRAILQAIIEGEQSAERLADLALGHLRIKIPQLQAALEGQVRDHHRFLLQSLLRQLHFIEAEIALLDTRLDQLEKEHLELGEALSRWITVPGVDRVAAWSFIAEMGTDMTQFPTAAHLASWAGVCPGNNESAGKRISSKVRKGSPWLRRMACQSAWAAARTKNTYLSAQFKRLAARRGRKCAIIAVAHSILIIGYHLQSRRCIYADLGSNYFDRLHAEGLKRYLVKRLESLGHSVTLEPRTA

SEQ ID NO: 406788 - protein, 352 aa, unidentified
MAAKKRHVFGGVDTHGKTHHAAAIDQVGKILGDQEFPATAAGYRALLAWLRRFGLVVKVGIEGTGTYGAGLARHLASEKVELVEVDRPDRKTRRAQGKSDPIDAIAAARAALSGQASGAPKTRIGPVEAIRALRVARRGAVKARTAALNQLHGLIASAPECLRAELLEVPAAVLVAHCAALVVNDARMCDPVNATAAALQAIATRIHHFDAEVALADKRVRPVVAKTAPQLMALKGVGPEVAGQLLATAGDNPDRLRSEAALAHLCGAAPIPASSGRTDRHRLNRGGDRAANNALHTIVLCRLRHDPRTHAYVERRTKQGLGKKEIMRCLKRYIVREVYEALLVDFAALSAP

SEQ ID NO: 406789 - protein, 371 aa, unidentified
MGESSKTLYVGLDVHKDSIAVAYAPEDRGAEVASLGSIGTRQCDIDTLIRKLQSKGATLVFVSEAGPCGYWLYRYLTRKGLSCHVVAPSLIPKKPGDRVKTDRRDAITLARSMRSGDLTAVYVPQIEDEAIRDLSRGREDAMRDLKATKHRLKAFLLRQDIRYEGRANWNAAHLRWLSEVVCPTRAQQIVFQEYARAVTEQHERLQRLETELHEEVKGWRLYPVVEAIQALRGVELTGAVIVIAELGDLTRFDTPRKLMSYLGLTPSEYSSGERRRQGGITKAGNSHARRALVEGAWAYRYPAKVSRHLQLRLEKLPAEVQAISWKAQVRLCKRYRQLTARGKHLNQVVVAIAREMAAFAWAIARTVPLAP

SEQ ID NO: 406790 - protein, 415 aa, unidentified
MALKIVYKICCGIDIHKNFVVACIAKTDMQGVTTYERHHFSTYTKGLKQLLKWLLDRNCKDVCMESTGKYWIPVYNVLEHDCSIVLAHPKYVKAIRGKKTDKKDAKWIADLFKHDLVAGSFMPPADIRQLRDLMRYRFKLTCFKSSEKNRYQNCLTVSNIQLGNVVSDTFGKSSQKIIAKILENPDDTSFDIGSLIHGSMKDKLPELELAIDGYITPEQAAKLKIIKEHFDNLEARKAELEELTLALANPYQQEISIILTAPGFKNTFTAIGIISEIGTNMEAFPSAKHLCSWAGLTPTNNESAGKKKSVRVSKAGCYIKPLLVQCANAAIKSKKHPEIRDRYLRIKKRRGHKKAIIAIARMLLTALYHMLKNGENYNSDLYQKSDILPTTREITVEQAILMAQFQGFRIKSATE

SEQ ID NO: 406791 - protein, 340 aa, unidentified
MTIVAGFDVHRAQITFDALDQETGEVHCGRIAATPKAVEDWVKRFPDREIHVAVEACTGWLFVCQALEAQGATPHLAEPTETAARKGTKRRAKTDRADARHLRTLLAEDRLPESWMPPAHVREWRTRTRLRKTLIDERTAWLARVQATLFHHGIAGVPERLLCAQGREFLDKLCLPPAAIERIEVAMAIVDAIDRQMAPIERELRQLARRQRGCQALMTHYGVGELTAPVILCELGDVSRLSASRQAVRLTGLDIGVHRSDRRSRPGKLTRQGSPQLRWALYESAQAACRPTSPDRADYLALKERGLSHPRASLTLSRKLARRCFHTLRALGPEALEPVT

SEQ ID NO: 406792 - protein, 457 aa, unidentified
MMETKRRREQRSMLPVHPDAAAIDIGATVHVAAVGPARDPEPVRSFGTFTGDLHRLADWFAQCGIKTVVMESTGVYWIPIYEILEQRGFEVRVVNARDAKHVPGRKTDVSDAAWLQRLHEFGLLRGSFRPQGAIAALRAYLRQRERLLDYAAAHIQHMQKALTQMNLQIHHVISDITGATGMRIIRAIVAGERDPDTLASYRDIRCHSSAETVRQALIGNYREEHLFALAQAVELYEVYQAKVATCDEKIESVLERLKQPGRAPAKPLRATRHKTRQPNAPAFDARGALYAVLGVDLTQIHGLGPYLALKLISECGTDLSAWPSAKHFTSWLSLAPGNKISGGKILSSRTRPSGNRAAALLRLAATTVGRTETALGAFYRRLSARIGKAKAVTATARKIAVLFYNAVRHGMDYADPGASYYEERYRRRVLTNLQRRAKAFGYVLQPTEIKVVSMAVS

SEQ ID NO: 406793 - protein, 348 aa, unidentified
MRNRPIGAAIYGVDLGKNRFDVVACDAMGKPVQRLKLTRHSLLPFFGQVGKALIGMEACPGAQWLARKLSEMGHSVRIIPAQFVKPFVKSNKNDARDAEAIVEALIRPTMRFVEVKSTAQLDLQALHRIRDRIVANRTQLICQIRAFCLEYGVAIRQGTGMFKIEIASIIADETNDLTPMMRALLKELWNEFQAVDTRLAIITRNVEALAARNETARRLMTIPGVGPIAATALLAAIGNGRQFRKARDLAAWLGLVPRQSSTGGKTTLLGISKRGNPYVRRLIIHGARSCVAHLNRQRDKLGGWIDRLEARMHRNKVIVAMANKIARIAWAVLTRPGTLYERIDPAHA

SEQ ID NO: 406794 - protein, 417 aa, unidentified
MEPIYRCVAGIDVHKKMLAVVVRRERDGKTEYEKRKFGTTREEIAHLAAWLQHLQAGEVAMESTAQYWRPVWYGLEGLFKQHLCHPLKTRAPRGRKRDFRDAQRLADRWWAGDLEDSFIPDAEQRNWRWLTRTRVQLRRKLGVIHSHVEGLLEQGGIKLSSVVSDLFGVSAWDMLTDMARGVTDAEALAARARGILRRKDKQLRESLTGRLDAVCRLLLRQHMEQVTLIRRQIEEINSALADSMKEQIAVLHRLSRIPGVDVYSAQELIAEIGPKAAAFPTPEHLASWVGVCPGSQESAGVNYSQRSPKGNRYLRRLLCQIAWAAIHTKDTFFAGLFGRLKPRIEGKGAAWAVAHRIAKVVWLVLNREVEYQEKGSAPPNERTLMRKFRRLLKDFGSLGLDVRALLNHQLAQPPAVS

SEQ ID NO: 406795 - protein, 438 aa, unidentified
MRRVIGIDVHRTFGEVVFWENGRLRHAGRIDMTRTALEGFAKTLLASDEVVVEATANSMAVSRVLAPFAARVIIANPLQVKAIAQAHVKTDKIDAGTLASLHAAGYLPQIWTPDAETERKRRLVARRYQVVRHRTRLKNEVHSILHAHLIPKCPHADLFNARGRAWLAAQSLPDDERAAIARHVRELDRLAEDLALLDREIAQDAIDDPAVNRLMTITGVNLAVAAGIVAAIGDISRFNSPQKLVSYFGLNPRVRQSGLGAAHHGRISKIGRSHARAMLVEAAWTAAKAPGPLHAFFVRIRARRGHQIAAVAVARKLTVLCWHLLTKGEDYQWARPALVANKTRAMQLQAGHPQQKGSRRGPAYAYNIKALRDREMLIAAQAERSYERFVSQWKPRRPKNRRAGASARQDKIGSPVTLAADASRFATRSPAPDDHNRR

SEQ ID NO: 406796 - protein, 342 aa, unidentified
MQVTTIGLDIAKNVFQVHGIDAAEKVVVRKQLRRSQVLAFFKALPPCLVGMEACATAHYWARELTKLGHRVRLMPAKDVKAYVKRNKNDAADAEAICEAVRRPTMRFVQVKSAEQQGRLMLHRTRDLLMRQRTQVINALRAHLAELGIVAAQGREGIKELLKIIASEQDARLPVDAHTSLVVLAAELAALQTLIGSIEKRIMAQHRSSEASRRLESIPGIGVIGATAIAATVPDPKVFRSGRDFAAWIGLVPREDSTGGKQKLGPISKQGDRYLRRILVVGACAVLRYARQQPEKYPWLTQLLARKPFRVVAVALANKMARIAWALLAKGGTYRAPALAAAA

SEQ ID NO: 406797 - protein, 351 aa, unidentified
MSNPTRWVGVDLHRRRSQIAIIDEQGELALSRRIVNDRDTFKDLLGDPEGTHVAIEATYGWEWLAELLEEAGYDVHLAHPLRTQAIAAARVKTDAVDAKTLAHLLRTGLLPEAYIAPPELRDVRELLRHRAVLTRMRTAVKNRVHALLARQGIRQEHADLFGKAGREFLAALELPDGSRRRLDSLMSLIGDFDREITATTREIDARAKADERVPVLCQIRGVGRYTAMLIIAEVGDVKRFPTARHLCAWAELAPTVRSSDGKARLGHISRQGSPALRWALTEAAQKIPTGGGPLRAMFERIAKRRGRNIAKVAVARQILTLCYYGLRDGEIRCLKQQPIDDHDNHELAQAA

SEQ ID NO: 406798 - protein, 340 aa, unidentified
MKTTQVAVDLAKSVFQVAVSNTPGRVDEEHRLSRARFQRFFTERESVEVLMEACGTAHHWGRELEALGHTVSLLPPADVRRYRDGNKTDRADTKALLEAARNEAIDSVPVKTIDQQTITALHRLRSGYVQTRTARINAVRGLLREFGILIPVGARHLVPRVRAAIEDAALPTDLVPALQDALTEIEELKRKAQDIERSLKGLAQHMPEVALLMSVPGIGVLTATALVAYVGDVRRFRSGRHFAAYLGLTPREHSSGLSRRIGRISKRGNRYLRMLLIHGARSVLRAAKLTEHPDGLRTWALSIAARCGYNTAAVALANKLARIAWRRWRDGQPFEVRFTT

SEQ ID NO: 406799 - protein, 405 aa, unidentified
MDVVYERCAGLDIHRDTVVASVITRAGRELRTFGAVTDELLALADWLLGLGVTHVAMESTGVYWKPIYNLLEGTDLGLLVVNARHIKAVPGRKTDVKDAEWIADLLRHGLLRGSYIPDRGQRELRELVRYRRRLIEERSREAERLHKTLEGANVKLGAVASNILGVSGRAMLEALVAGRDDPEALAALAKGRLRDKHDRLVAALRGLVGPHQRRLLATQLRHIDFLDAEVVGLSAEIEERMRPFDPAIELADTIPGVGRRTAEAILAEIGTDMGRFPSGRHLASWARICPGTDESAGKRKSGAIGPGNTWLRSALVEAAHAAARTKGTYLAAQYRRIAARRGAKRAAVAVGHTILVAVYHMLRDGVVYEDLGPLYFDERDRRATVGRSVRRLEALGYRVTLEPAA

SEQ ID NO: 406800 - protein, 356 aa, unidentified
MDSTKYIGMDVHKEATTIAVMNSAGKLVMESIVETKAATIVQFIEGLRGELYVTLEEGTWAVWLYDLLKPHVTKVVVCNPRKNALLKTGNKSDRIDARKLAELLRAGLLSAVYHGETGLRTLKELGRSYLAISKDLTRTMNRVKALYRSWSIPCGGTSVYAPRHRKEWLSKITEPGVRRRAELFYQQLDGLQKLRQEARRDLLAESRKHGATEQLRRIPYIGPIRAALLIALMQTPHRFRTKRQLWAYSGLALETHSSAEYHYVQGQLQRSKRPVALRGLNQNHNHDLKSIFKGAANKAGSAKGPFHDFYTALVAKGMKPTMARLTLARKIAAITLIVWKKGVCFDAQQLKQQVSV

SEQ ID NO: 406801 - protein, 347 aa, unidentified
MNKRDEGGVEVSAERLLVGLQREGAARARREFPNTPEGHEALVRWLAASVSRRMRVVMEATGLYGLDLALRLDAAPGVEVMVANPRAVRHFAIALMKRSKNDPIDTDVLVEFAQRMPFQRWVRPSPAALALHALARRLESLTEMHAAEKNRLHAAQLSLALPVAVVRDLKRSLRSLERAVARLTRQAVEVIGQDPELNLRYQLLLSACGIGPTSAVQILAQLAVLSADLDVRQWVAQAGLDPRQYSSGSSVHKKTRISKTGNRHLRRALYMPALVAIRHEPHLRAFYLHLVARGKAKMQALVAVMRKLLHAIFGMFKHQQPFDGTRLYRLPEEPLLLQPTFSTAEAA

SEQ ID NO: 406802 - protein, 407 aa, unidentified
MAAVMIGIDPHKASHTAVAIGEAEEPLGELRVRACAAQADRLVAWAADWPERTWAVEGAGGLGHLLAQQLVAAGERVLDVPPKLGARVRLLATGNTNKNDPNDARSVAVAALRSTTRREVTADDYAAVLKVWSKRHRDLGRTRTQIACRLHAVLCELIAGGVCKQITAAQAAKILGQVRPAGAVDNARCELAAGFIEDLRRIDTQMSDTRKRLALTVRASGTSLTEIFGVGPVVAAVVIGCVIDVSRFASRDRFAAYNGTAPIEVSSGNRKVYRLSRRGNRRLNHAIHMAAVTQIRHRHSDGRAYFDKKIAEGKTRKEALRALKRKVSDAIFTRLQADARRAAANGKNTGPGGQPGSDSVASAAGSHPEHRLFGQATPGPVTSLRPATPRNRAVAFKRNPKNAQKSS

SEQ ID NO: 406803 - protein, 344 aa, unidentified
MVTIGIDVHKRTHTVVVVDEQGRKLAQKTTGTTSSEHLQLIAWAATHGDARLWAIEDCRHLSRRLERDLLGAAERIVRVPPKLMANARDAARTFGKSDPIDALAVARAALREPDLPSARLDGPERELRLLVDHREDLVCERTRMINRLRWHLHELDLGSEPRARSLKHPRNLDSLAAGLEEREGVVARLARELVRRCRELTVEIKQLEREIAALVEVLAPSLLAIRGCGPLSAAKIIGETAGVERFRSRDAYASYNGTAPLPVWSSNHARHRLSRSGNRQLNAALHRIALTQAQWHPDAKALLARRKAQGDGSLEALRVLKRRLSDVVYRALIADAAIELSLAA

SEQ ID NO: 406804 - protein, 348 aa, unidentified
MTLVGCDLHARDQQVAVLDTATGEIQERRLVHDGDSVEQFYTTLPGPVTVGIESTGYALWFHALLHRLGHEVIVGDAAKIRAMVVRKTKTDRRDAAHLLDLLRHDRFPTVWLPDPAVRDQRTLLAHRMRLVRMRTMVKNGVHAIALNYRLALGPSLFTRAGVAQLQALSLPPHTACRRSESLELLSWLNTRIKGLDDQIEEAAHAHPEAQRLMTHPGVGPLSALATVLVLGSLTRFPTSKHVVSYIGLAPAIESSAGKHRLGRITKQGNALLRYVLGQAGQAAIKRDPDLKRLYYAVLHRRGRSRAKIAVARKLLVRLYVMLRDQIDYPTFLHRAPAVARRKEMPPTS

SEQ ID NO: 406805 - protein, 344 aa, unidentified
MNISMIGLDTAKSVFQVHAVDPSGKVAMKRKLQRGELIPFFEKHEACTVVLEACGAAHHWARVLTGLGHDVKLIAPEAVRPFVKKGRKNDAADAAAICEAASRPSVKFVSAKSLEQQSVLTLHSARCLLVKQQTMLANALRGLATEFGLTVPKGIGKLEELAALVNADEAFPETARHVLTGLFDHCRATAASIETVEAEIVVQARQDETARRLATIPGIGPITASLIAATVGDIGMFKSARHFAAWLGLVPRQYSTGGRNRLGRITKTGNREIRRLLVLGATSMVYRAPQWKSAAGLWTRAVLERRPVRLVTVALANKMSRIAWALMTRKEVYHAKGRAAAAAA

SEQ ID NO: 406806 - protein, 344 aa, unidentified
MTYYVALDVGVRTLALCIVNEEGEVQLERNLPSDVEPIVKCLGNFGGEIEAIGLEAGTLTQYLVYGLRAAGFRTVVMETRHVKSALGAMRNKTDRHDARGIAQILRTGWYREVYVKSLESHYIRTILASRKALLRKCMDLENEVRGLLKVFGIRLPAGLPRGTFDKVVRKPIEQSPALAHALLPLLDARSELYKAFLELDRRVRAIANKDETCQLLRTIPGVGYITSLTFKAAIDDPSRFKRSKTVAAHFGLTPRRYQSGERDIQGRISKAGDAEVRAALYSAANSMMTRAATWSSLKVWGTKLIQAKGRRRGLVAVARKLAVIMHRMWVDGTPFFHGALEEPR

SEQ ID NO: 406807 - protein, 349 aa, unidentified
MNKGITVGLDLGDRYSHICVLDNQGEILEEGRVRTTEAALRRKFGTLEACTVALEVCGHSPWTSRLLEELGHTVVVAQAAKVALIHHNRNKGDRVDAQTLALLAHANPKLLWPIRHRGVHTQEDLQVIRSREALVEARTKLINHIRSTVKVHGERLPSCGSDAFAGKMAAELPEALKPVLSSLLEVIGDLTKRIRAYDRRIEELCGRYEETERLRQVPGVGPVTALTFVLSIEDPHRFAKSRDVGPYLGLTPRRDQSGDVDKQLRITKAGNTYLRKLLVGCAQYILGPFAPDSALRTWGLARAARGGKNAKKRAVVAVARRLAVLLHRLWVHGAVYTPFPQRSMAEEVV

SEQ ID NO: 406808 - protein, 319 aa, unidentified
MNTTSIAYKKSKERNVGIDVGKDLLDIYILELELHWQEENNAEGIKRLVSKLNRYKLTRVLAEATGGYERAVIEACAEKELPIVIVPPLKVRQFAKVQGILAKTDKIDARLIALFASIIRPEIRRMPTKKIRCIRDLLARQRQLNEARTQELNRQHKAPKVLEKTHARMLKFLDKEIVTIKKKLAKEVAEVTEWQRAHEVICSVPGIGDGVAYTLLGELPELGQLSHRQIAALCGLAPYNHDSGKLKGKRRIRGGRAPIRTVLYMAMLSSIQHNPIIKAFYTKLVANGKHKKVALTACMRKMMTILNAMVRDDLEWKMN

SEQ ID NO: 406809 - protein, 402 aa, unidentified
MPMLSIGIDVSKGKSTVCGMKPGGEIVYAPFEVQHTREGMSELVSLLRSSGEEVRAVLESTGSYHCPVVAALLENGIFVSVVNSLRMKRFCSQSIRKVKTDRIDAMQIALYGLAYWQELQPTRLPEDTYRELQLLARQYYQMTSLLIKAKVDFNAICDQVLPGMQELMSDHAGRHKLSDFVLRYRHTTHILEMGETRFRKDYCKWAEKKGYRNCERMAALIFATAQNGIPVLPNAPSTQIVITEAIRVLHTVEASRDAILTQMQALAKTLPEYSLVREMPCIGDTLAPRLIAEIGDVRRFHSKRALIAYAGIDAPPYQSGKFCANNRHISKRGNRYLRKTGYEVMQSYVMHKPANDPIFTFIEKKRGEGKSGKLAMVAGLNKFLRVYYGKVTELYRSLPAIE

SEQ ID NO: 406810 - protein, 449 aa, unidentified
MFKLLSLIVWQFSQWLLIFYERSLTMKVTYQTCCGVDVHKSFLVATIVKTTGGIEPSYQKKRFSTFNNSILEFKQWLLDNDCHDVCMESTGKYWVPVFNLLEDEINVVIANPKWVKAVKGNKDDAKDSKWIGDLFRLGLVKGSYIPCKKVRILREYTRYRYKLVSCRSSEKNRYQNALTVCNVALDSVVSDIFGKSSTSIIDYLLEHSGISINHEEIASKLLRSLKSKEDAVIESIEGYQMTDAQKYRMRLIRAHMDYITAEINDVDKMIENMISSNPDFKNAVQFLCTIPGVKRDSAITIISEIGTDMTQFSSSKRLCCWAGLTPGSNESAGKKKSVRITRAGVYLKPALVQCAHAAVKSDKSPYYKKKYDSLVKRRGKKRAIIAIARMILTAIYQMLSTGELWNPSDLYKIDMPVALVEKQKAKAIKQAKKLLQREGLLPPDKPLAS

SEQ ID NO: 406811 - protein, 401 aa, unidentified
MKYVLVLDVAKGKSMFMLSSNVGEILLEPAEYTHNKSNFELVDSSINKLNIKDNLTVVMEATSIYHKAPERFFKENNYHVIVFNPLIGKEITNTIRKTKTDKQDCIKLTNLFWKGSIPDRNYTEDEIYTKLNELSRQYYHLDEGLTRHKNRYKELLHLCFPEFELCFKNGKIYDLTALNLIKEFPHAYIIKEKRVDALAYNMANTNNRHLNYYKRKANTIKEYAQNSYPGVNENSKDVDNLKQLANIIIDITEQKDDVKNQMIELAKQTKHFNNIASIFGIADLSASLIIAELKDITRFNNIKQINASCGLDPTIVQSGKSINYHGPISKRGNRYARKILFNCSRNIVTISAKCDKENPIYVYYQKKKQEGKHYYACLTACSTKLIRIIYALCMNNSTSQN

SEQ ID NO: 406812 - protein, 352 aa, unidentified
MRKYIGCDAHQKYSVFVTMNEAGEYGKAVRVENRRPDLRAFLRRIPAGTPVAVEAGGGWYWLIDELEAAGLDARLANPTEAKKRMPGRNKTDERDARGLALLLRNQTLPEVWIPPAPLRDLRGLLRTRLALRNDRTRVKNRMHATIRRYGLRDDSFKDLFTGKARVRLSVYIGSLPEETREAALHEWMLVDELSGYLKQLEARLAERLKQEPQWRQLKTLPGVGLILGATLHLEIGDVGRFPTATHLASYAGLTPLVHASGGRTHLGPTSKRSNHYLRWAFVEAANCIVAQQAKLGDQHVVRLYRRLAAHKGHAKAAVAVGRHLAEASWWMLTKDEPYRAPPQRVATSSEIG

SEQ ID NO: 406813 - protein, 348 aa, unidentified
MAHFVGLDVSVKETSVCVVDDTGKVILEQKVPTEPADIITLLSSLGVSYGRIGIEAGPLSQWLVNALTVAELPVICVETRHMKALLTAQQINKTDRNDVRGIAQMMRVGLFKPVHVKTLVAQEQRMLLTSRKLLQRKLLDLESDLRGTLRNFGLKVGVVSGGRYEVRVRELIAGFPRLAAIAEPLLKVRQVMRQQLAVLHKMLLDTVRDDPVCRRLMTAPGVGAVVALTYRATVDQPQRFVHSRAVGAHVGLTPKRYQSGEIDYDGGVSKCGDALLRTMLYEAAQVLLTHGSKWSWLKAWGVRVVQRRGMRRAIVAVARRLAVVLHRMWVDGSEFRWSKDSAAVPTAA

SEQ ID NO: 406814 - protein, 359 aa, unidentified
MQTQSNALNFSGQNIYVGIDVHKTSWSVTIMSEHLEHKTFSQNPDVDILHQYLLRHFPGASYHSAYESGFCGYWIHRELQSRQMNCLVVNAADVPTTGKEKVNKTDKRDSRKIARSLSNGELTGIHIPTRQTQEDRSLLRCHYAISKNLSREKIRIKSLLNFYGIHHPAKFEKNGTHWSKRYLEWLKTVPMEYETGKDAIALLIKSVEELRKLKLEVNRKVRHLSCTDRYRENYQLMTSIPGIGLITGMTLLTEIENISRFSNTDLLAAYIGLIPSCHSSGENEQDGRITFRSHRLMRVMLVESAWKAAAKDPALHQAFLKLCKRMEANKAIIRIARKLLNRISFVLKNKQEYVCCVVK

SEQ ID NO: 406815 - protein, 342 aa, unidentified
MEYYAGIDVSLECSSVCVMDGSGKFVREAKVASEPEVLIGWFGSLGLGLERIGLEAGPLSQWLYAAMREAGLAVELLETRHVRDAFRAMPVKSDRNDARGIAQLMRLGWFRPVHCKSMDAQEVRAVLTARKLVQSKLLDVENSLRGILRGFGLKVGKTTPRSFAGRIQELVDGQPNLEAIGEALLSVRAVLQREFNAFERRVRAMARLNARTRLLMSTPAVGPIVALTYAAAIDDPARFKSSKQAGSHFGLTPKKYQSGETDRSGRISKIGDASVREALYQAAHVMLTKPVKDCSELKGWAMRIARRAGMNKAKVALARKLAVILHRMLANGTPFNPAAAAA

SEQ ID NO: 406816 - protein, 292 aa, unidentified
MDLHRRRSVLVRMSEDGQKLATARITNSPARLTAEIGRAGLHPKVVLEACYGWYWAADALAAAGAEVHLAHPLGVKAFACRRVKNDELDARDLADLLRMGRLAEAWIAPPEIRELREITRYRCKLVHIRTSCKDQVHGVLAKLGIQVTCPDIFGAWGTQWLDELPLPQPYSWKVASLRQLIGWLSSEVTVLEQVTADLLAGHDGYRAVQELPGIGPVLGAVIVAEIGDITRFRHPARLSSWAGLTPRHFESDTKVIRGRITKMVCAGGTVPLRRPGGVRWRWLEDSICTGVS

SEQ ID NO: 406817 - protein, 343 aa, unidentified
MSGVVTIGLDLAKSIFQIHGVDDAGRMMLRRRLSRHELVPYFAKLPPCLIGMEACSAAHHWARELSRFGHSIRLIPPQYAKPYVKRNKTDAADAEAICEAVARPNMRYVPIKSLDQQSVLSLHRVRSLFVRQRTAAINTVRGLLTEFGIIAGKGIGRISELRRRADQADSEALPDEARAAITEVFEHIEALTERIDATESKIVAWHKSSETSQRLASAPGVGPITASAIVASVGDARQFRSARHFAAWLGLTPRLHASGGKEHIGRISKGGDRYLRALLIHGARAIVGTSFRKDVPPRPWLKQLLARRSVNVAAVAVAHKTARALWAMITRKEGYRRIAVKTA

SEQ ID NO: 406818 - protein, 466 aa, unidentified
MENNYILYVGMDVSKGKADAAILKVSDRRSVKPKFLRKKLSFKFVKSEVTSFLETVRSYSDDNCTSICFALEVTGIYSTNVYDYIKANLYENESIKFLNTDFVNQWRIAHNIAKSDPLDAQTISTIIGTDSDVQYVNDNVFENKNGYQDLKALVHRHYQIKKIYSQEINRLIAQCDCLFPELQYVFEPKSAAFIAVLSSYPTTHDIINASRVEVFDVVYEATKHRCSMDKVDKLFELCQDTLVPNDISSYGKSIILDLVENIKNIKGQLKSIERYIKDIASLNPAYKLLLTITGCGPITAATVIAETGNIRRFKNADCFVSYSGTSPRNKRSGTSVETMGKISKKGSRYLRHAIYMIAEFARRHNPVLKQQFERIKNGNKKRHKLANIAIANKIARYIYSIMKNKSSFVILHDHIMRLPEETRDTFFNSISLDFPKNTRKQIYQYSDINGELHRFVYIKTDEMIPA

SEQ ID NO: 406819 - protein, 332 aa, unidentified
MLNCIGIDISKASINVHIPKNNQDLVLENNLKSFRSLFSKLKKLYKKEIDDIIFIFEPTGSYSEALRKYCSEKNIKCFIINPKQFSNYAKALGVEVKNDVEDARVLSKALHLAKEEQVKVPVFNEDVEQIKELMSFYKFSKKQTTQQKNHLEALTSKDGDKFSIKELQQSIEASRAKELRIIEQVQTLIDSTDEYRVAYENIISIKGVGQIAAIALLHLFLKYPEANQRQIISLAGLNPVYRQSGTSVQSAYRISKTGASLYRGTLFMATLSATQHDKNFKAFYDRLKAKGKHTTSAQMAVMRKIILTAHSLYKNNRKYDENFNTQVASKME

SEQ ID NO: 406820 - protein, 419 aa, unidentified
MQQVQPLHRWTGRAVGLDLHRDFCEVAVCEDGVVRSAGRVSMTPEALEAFASSLEPTDRVAMEVSGGAWEVARILEPHVERVVVVSPDDTGIAQARTKTDRLDARKLASLLWRGELGAVWMPDERARVLRRRLARREQLVRTRTRVKNEVHAVLMRRLKGKPPCSDLFGVKGRRWLRRLSLPPEEAETVQAALRHIVFLDREIEQVERMVAKQMLTWPESKRLMTVPGVNLIAAATFLAAIGDIARFRNSSKLVAYLGLDPRVRQSGEQPARSGSISKRGSVSARWALVEATWSVVNQPGPLRAFYLRIRSRRGHGKAIVATARKLAVLFWCMLSRGQDYAHQQPSLTAKKLRRLELAAGAPVRKGKPSGVWVTHEKMRRAEKQLAAQAQASYERAVRDWQATAPTKKDAGASVTAGRA

SEQ ID NO: 406821 - protein, 340 aa, unidentified
MNITTIGIDLAKNVFQVHGVDERGRAVLKKQLKRSRVMVFFGNLPPCLIGMEACGSAHHWARKLQGLGHTTRLMATQFVKPYVKSNKNDVADAEAICEAVARPNMRFVPIKSVEQQAVLSLHRARHAFVKARTAQANQIRGLLAEFGMIIPKGIAHIRTQVPEILEDANNELPGEFRSLIHRLTQHLMELGRQADEMGAKIEEWHRSNELSRKLTAIPGIGPISASALVASVGDARTFSSGRQLAAWLGLVPRQSSSGGKNVLLGMSKRGDAYLRTLLIHGARAVISRVRQKQRSNGWLLKLIERRNSNVAAVALANKNARVVWALLAHDRQFREDYAPA

SEQ ID NO: 406822 - protein, 341 aa, unidentified
MNEITLIGIDLGKHVFHLHAQDAKGHEVFRKKLSRVQLLPFFSNLKAVTVVMEACAGSHWLARKLNAMGHEAKLISAQYVRPFVKSNKNDYIDAEAICEAACRPSMRFVEPRTEAQQLLAALHRAREGLVAERTATINRIHGILLEFGIVVPLSRATLRRLPDVLAVHDLPPRLLQLIHRLHAHYCYLDQQVDDLERDLTVQLREDENAARLLSIPGIGTITASLLASEVGNVAQFEGSRNFAASIGLVPRQHSTGGRSVLCGISKRGDRHLRHLLVQGARAVIQRVEKRTDRLGEWIRSMLTRRHSNVVACAVANKLARIAWAVLTRHTTYDPARLKLAD

SEQ ID NO: 406823 - protein, 351 aa, unidentified
MEEYIAFDSHKRYTWVEHQEANTAKTRAYRLEHGTGAIRQALAGCAPGTAVAIEATANWYWIIDEIEQAGCFARLVHPRKAKLMMGLINKTDRLDAHGFNTLQRNGTLPTVWIPPGVLRELRELTRTRLVLVAQRTRWKNRITATLAKWGLPPSEYSDPYGKKARAELERQLERLPEQTRWATRQMLAQLDSLSEQAQQFEKRLEELVEVTPMMQWLMTLPGVGVILGATIALEIGEIERFANAERLASYSGTTPRVHSSGDRTRHGRTRSDVNRYLKWAFAEAANSVAVNHRRNPERHVSRLYTRLRASKGHARAVGAVARHLAEAAFHVLQRKEVYRDPSLNPRPERGV

SEQ ID NO: 406824 - protein, 351 aa, unidentified
MPKRTNAVAVSTIGIDTGKNTLHMIGLDENGEIVLREKVSRSRIAARLVNVQPCLVGIEAGMATHYMARELVALGHVVKQVPPAFAKPFRQGHKNDFRDAHAVAEAVQRPSTRCVPIKTHDQLDLQALHRVRSRLIGDRTAVINQLRGFLLEHGIAVRQGHRFLRQQLPQIVATRIDVLSPRMIRIIGDLIEDWAHLDERIERVTDEIESLARTDVSCGRLMTVPGIGPIIASAMVAAIGDGAAFAKGRDFAAWLGLVPKQMSTGDRTILGRITKRGNRYLRMLFIQGARAIQLHPAGWAKHSFGRWLTAAARRLHCNVLTVALANKLARIALTVLVQGRSYETRVRPFAA

SEQ ID NO: 406825 - protein, 362 aa, unidentified
MRIIGCDLHARQQTVAMLDTTTGEVLSMTLKHEGNNVREFYSSLPRPVRVGIEATGSMQWFVNLMEELGIECQVGHPAQIRAAEPRKQKHDRRDADLILKLLVENRFPAIWLPSKELQDLRALLRHRHQWVRMRTRIQNALQSIALANGLRRGTALWSQDGQHTIAALPLAPHTAYRRSELQAMYAKFEAEIEKLNQRVEEQACGRVGARLLMTHPGVGPVTALATEVFLGDPARFADSKAVASYVGMIPREYSSGARQRLGGLSKQGNPLLRFLWGEAGAHAVRRDPELGRFYRRKLNQKGFGKASVAVARKLGIRLWIMLRDQIEYNEFCRRGQKQQNGSEACAGMPETRHGAKCHRPVD

SEQ ID NO: 406826 - protein, 353 aa, unidentified
MAQPVRALVEGVDEFIGIDHHKKRCQVMVKDRQGHVLRRGNIPTRREALARFLGERNGAVRMAVFEAGPRYRPLYRWLVDLADEVVMANPGRLKIISETAYKDDAIDAEKLADFGMLGMVPEAYVCGDEAWDRRQGLRLRAALVKMQTSLKNRVHALVDQHPDACPARPEATDLFGSLGMAWLREVALPEADRQRLEQLLEVYEFLHGQVRRSDTQVRRMVKADVRCQHLATIPGIGDFFAALILAEVDDIRRFPRSKDFVSYTGLVPGRDRSDEVDKPRRIHKRGSKWLRWALVEAAVPATRSNLALKNLYDRVCRKKGPLAGPNVAKVAVARKLAEIVYRILAEGRPYEVR

SEQ ID NO: 406827 - protein, 412 aa, unidentified
MKDLLEISCGLDVHKEKIVACILTGPLGKPTHSEIREFTTLIPDMIALRDWIVSQNCRHVAMESTGIYWMPIYEILEDAFSGDITLLVVNARHMKNVPGKKTDMRDSEWISTLLRAGLLNGSFIPEKRIREFRDLNRYRKSVIRDITSQKNRVEKFLQSSGFRLSSFISDIFGASGRNIILHLMEHGQIDRAALDSCLKTKTRNRIDEILMSVNGTLSEHQKSFLKILMKHYDSLKEHLNEIEKGLEEDMAPFALQVEQLSSIYGISTTASCAIIAEIGIDMEPFKTAEHICSWAGLCPGNNESAGKRKSASVTKGNPYIKSMLCEIAWVIAGKRNTYLSAWYWRIKQKKGAKKAIVALARKLLVIIYTMLKQGTLFDESCFEARRKNCEQKQLSRYIRELEKHGYHVEVQA

SEQ ID NO: 406828 - protein, 343 aa, unidentified
MQIRSVGIDLGKTTFHLVALGDNGKVLLKKKFTQKQLIAFTANMQTCLIGMEACSGSHFLGRALREQGHDVKLIPAQFVKPFVKSNKNDFIDAEAIAEAVDRENMRFVPIKTDDQLDLQALHRVRDRLMARRTALINQIRAFLLERGIVFAKSPIRLREALPEVLENVNENLTPRMRNLVAMLWSEWKDLELQIVQMNDEVERIASSDAACRRLRQIPGIGPLVATAIVASIGNGAAFRKGREFAAWMGLLPKQHSTGGKARLYGISKRGNSYLRKILIHGARAVVLRSKRDRIAMGAWMTSLETRAPRNVLIVATAHKLARIAWAVLSTGQDYRAVPEAVTV

SEQ ID NO: 406829 - protein, 408 aa, unidentified
MVVQAAPVTSSTVVVAVDVGKVEFAFSVTDVRRIPLLKARTGCPMTGPSFAQVVAGIVEVLPVGAVVKVGIEAAGHYHRPLLNAGWPDGWEVLELNPAHVTEQRKVLGKRTIKTDAIDLLAMTELLLAGRGLPVRGHSLVLSELTAWSAHRTSRILLRTATKNQLLGHLDRTFPGLTLALPDVLSTKVGRLVANEFSDPARLAALGASRFIRFGKTRNVQIRKPTADKLIQAAKDALPTADSAVARAVLAADLALLADLDAQVEQATGQLARLVPLSPFSPLLTVPGWAAVRVGNYGGALGDPSRFDNYRQIYRTAGLNPIQYESAGKRRDSVISREGSVELRRALIDLGVGLWLNDPAAKARGLELRARGKKGLVIACAMANRANRIAFAMVRDQQPYNPTKWSHHI

SEQ ID NO: 406830 - protein, 345 aa, unidentified
MMVTLGTDAHKRSHTIVAVDTAGAEIGSVTVPATTDGHLRAVGWAAQYTKRQWAIEDCRALSRRLEADLLGLGERVVRVPPKMMARARSTARQAGKSDPIDALAVGRAALREPDLPVAQLDGPSREVRLLIDYRETLVHQRTGFQNQLRWRLHELEPGFDPPAGSLNRYCTLDAINELITTHDSMVADLARRETARIRELTAEINQLERDITRRVTDLAPSLLAIPGCGALTAGKLIGEAADITRFKTRDAYAMWAGVAPIPVWSANPNRFRLNRGGNRQTNAALHRIAITQARIHPDAQAFIKRRIETGSTKREALRLLKRKLANVVYRTLLTDTQTTPLAQAA

SEQ ID NO: 406831 - protein, 372 aa, unidentified
MTSIIYVGMDVHTTNYTLCCYSMEGDRFFVEVQVEPDAKNILKNLARIEKQQSRDCRIVCGYEAGCLGYSLYHQLHAHGIDCVILAPTTMMTKPGKRIKTDRRDARLISKCLAFHTYSPVYIPTEVDDAVKEYIRMRDDANSALARVKQQIIAFCIRHGKIHDGKSYWTNKHLEWLSSLDLGNKILSEVLQEYLIRYYQLREQVDMYDMRINELAQAEPYRQKVEKLGCFRGIAAHTALSFCVEVGDFRRFATAQQFASYLGLVPGECSSGDKQQYTGITKAGNSHLRKLLVETAQVFGRSATKSGISVALKERQAKCDSLTVAYADKANARLKKKYFKIAMRSKVNIAKTAVAREMACFIWGMMTDNISCA

SEQ ID NO: 406832 - protein, 343 aa, unidentified
MQIAVLGIDLGKNSCSVVGLNAVGQVVLRRRMRRDSVVQLVRRLPPCRVAMEACCGAHHLARQLASFGHAVRLMSPEYVRPYVKAQKNDDRDAEAIAEASTRPTMRFVETKSEDQLDLQTLHRSRSRLVSERTALINQLRAILLERGIVIAQGRRKLEQRLAEMLVDGEVLTISARMQILIEDMRTQWRELDRRIAEFDAEFERYARENAAARRLASIPGIGVMNATALVAAIGNAETFARGRDLAAWLGLVPRQATTGGKPRLLGISKRGNTYLRTLLIHGARAAMPSLSKSATPLGEWLRALLARCHPNTATVALANKLARIAWAVLRRECSFRIVPAPAA

SEQ ID NO: 406833 - protein, 369 aa, unidentified
MSKASTFVGLDVHKSSIVVALLRAGEDAPLEWKLANEPGAVHRLIRKLEREDGVQCCYEAGPTGYVLKRQLDRAGIACQVIAPSLIPVKPGSAIKTDRRDARKLAELLRAGMLTEVTPPTEDEEAVRDLTRSRDDAQRDLTRARNRLSKFLLRRGCVYAVDRRPTWSQKYRAWLRALTVTRVADQVIFEDYLQAVEQTEARLEALTDHIERFAEAAPWRERVQALRCFHGISTVTALALVAEIHDPRRFAHPRRLMSYLGLVPRESSSGLRERRGGITGAGNRHVRRLLVEASWHYRHKPVVGRDLRLRRQGQNPKAIALADRALRRLTLRQRRMLYQGKHPNLVNIAIARELAGFVWNVLHTYAAARA

SEQ ID NO: 406834 - protein, 429 aa, unidentified
MEYALVQVLPDIPAGRVCAGIDWATADHVACVVDMSGRVTDRFAAAHDKAGIEALVVRLRRGGVSEVAIERGDGVLVGALLEAGLTVVVITSRQVKNLRSRYGAAGAKDDRFDAFVLADTLRTDRARLRPLIPDTPATITLRAAVRARRDLLAHRIAVCNQLRAHLAVALPAAIGLFFDLDSPISLAFLARFGCQDAAAQLDEQAMGAWLKTIAVRGRPAPAGVLCARLRAAPPGITGQDGTAHAGITAALAAALTVLAAQVKILETQIAAQLAAHPDAHIFTSLPRAGTLRAARLLAEIGDCRSRFPDPGSLASLAGAAPVTRQSGTHLSHGFRWAVSRQLRDAICDFANDSRRASPWAASIYDAARARGKDHPHAVRILARAWIYVIWRCWQDGTAYDPAKHNALQRILDQHHHDSQPQATGPGQPR

SEQ ID NO: 406835 - protein, 411 aa, unidentified
MNDLIRIGMDTSKSVFVLHGVDAAERPVLRKTLRRRQVIEFFAKLPPTQVGLEACGAAHHWARELGALGHEVKLLPAQRVKPYVARNKNDTADAEGICEAMSRQRMTFVPVKTAEQQAALMLAGMRDQLVARRTQLSNTIRGYAAEFGLVAAKGLEKIEPLLARIAADESLPALARELFAVLGAEYAELKLKLRKIEAQLLAWHRQNELSRRLAEIPSVGPIGAALMVMKVANPRAFRSGRDFAAWLGLTPKDHSTGGKQRLGVITRAGDEALRRVLVLGATAVIQQVRRGRGHSSLWLVALLKRKPPKLAAVALANKTARIAWKLMVSGERYRGACATEVTHGNVCFEGASSQPRKPGAVLAAVKARPGSAAARRTGNATAGLDGGCARRPTTIAVGTKKRSMVEQRNEG

SEQ ID NO: 406836 - protein, 453 aa, unidentified
MPFRKVGVDLGLTGSHHISVADETGNIVRPALQVRTSAQEFDRIYAHALTDAAEDTQLKVIFEPTSLIWLPFAIYTRAQGHLVYRVKAQQLHDLREFYHRHRKNDPLDAKTGAKMPDDLLQELYLPPRDYCALDRATHQHERLINHLQREKTRLESLLEGLMPGITRAVGEAFCQVARVLYEHLANPFAIQQLTCQGFEQFLNEHCRNRIKSDKLQALWRCAQNASALYQHGLELVDFEQFAREIKRYYQHVVFLEGLLQEVDAEIQVYYQRVHPSRNIETIYGIGETLGPLFVAIIKDPHRFRHASQVKSFIGMIPKLDDTCGSSKKGLPITKTGPARARRAGFLAAETARHWDPQLAQIYYNCMMNKGQTHVEAVCVLISHIYARALRVLKEDRPYVLLDLAGQPITPQAAHAFIKEHLTVPEEIRRQRRNQKRVHDKINRGRRGSRRRRA

SEQ ID NO: 406837 - protein, 351 aa, unidentified
MDKPTSYLALDAHPGDSQLAVLSPKGQTLSCKNYPTAAPNLIEAVCAIRGSKILVVEESQIADWINRTLTPFVDKVIVANPKENAWIAKSKHIDDKVAACRLAKLLWGGYIKSVHHGDPQRQEFKELVLHYHDLTRQITRFKNKLKAEFIARAIVVKGPSVYDPVLFKTHLRKLSQSPIAQDQAKNYSAILNHIVELRLSVLKKIRSFSRSYPEINRLRAIPGIGQISAFSISAIIDTPYRFTNKRQFWSYIGLAKSQKITNGKVYYSASSSHGNKLLKWIFLQAAMVALRSKEPSRFKETADRLSKNGVTDKNIRRTVARQIASIIFTIWKSGEPYRHAETLKIESVKTL

SEQ ID NO: 406838 - protein, 342 aa, unidentified
MEISTIGIDLSKTTFHLIGLSPRGDIVLRKKLSRKQLLTYTATRKPMLIGMEACAGAHYLARALRDQGHDARLMPAQYVKPYVKTNKNDYLDAEAIAEAVQRPTMRFVPTKNDEQLDLQALHRVRDRWVARRTAVMNQIRGFLLERGIAIRKGPSYLMTQLQIIFSDGNPSFSERLLHLIHELKHEWDELERKIEEANTELARIAKEDDGCHRLMEVPGFGPIVSTALVAAIGNGISFRKGRDLAAWLGLVPRQHSTGGKTRLLGISKLGNEYLRRMMLHGARSVVMQMERKPSALGEWLTSLSARRHRNVTVVALANKMARIAWAILSKGTHYSPPAFVAV

SEQ ID NO: 406839 - protein, 371 aa, unidentified
MGETISFVGLDVHKATIAVCVAEAGRDGEVRFVGEIPNEPAALNKLVARLGRGDRILRFVYEAGPCGYGVYRHLRDRGHDCVVVAPSLIPRKPGERIKTDRRDATALARLHRAGELTPVWVPDPEHEAMRDLVRARADMVEALRKARQRLMGFLLRHGRSYDGKRWTWPHRKWLMEQTFPHPAQQVACQEYLDAVNELEARIERLTGRIRDLVPCWSMAPVVEALQAMRGVSLIVASALVAEVGDMQRFDNPRQLMAYLGLVPSEHSSGAKRRQGAITKAGSPLARRMLIEGAWTYRLPARVSAQLRPRLAGLPREVRDTAWKAQVRLCARYRRLQAAGKRPQVVVTAIAREMVGFAWAISRMVAPPAAAA

SEQ ID NO: 406840 - protein, 590 aa, unidentified
MITPLVVFEATGVYSLSLQAFLEDYHIKYLKLNPLKAKKLMDNNLRHNKTDKVDAYRLALIQFNAPQKLRDPQPREYHELQNASRYYEELTRSIVTTKNQLHRNLQSTFPQIEEILSHPSGRIYWALVSLFPHAGYVLEKNETQVTQMLNSISGIGQQRARYLTTRLYAFAREAYLHSGGYIMESQIIFGIDVSSKSSTVCVVNDRIKQGESFRISNDSFGYQKLYEQLNQYLITPLVVFEATGVYSLSLQAFLEDYHIKYLKLNPLKAKKLMDNNLRHNKTDKVDAYRLALIQFNAPQKLRDPQPREYHELQNASRYYEELTRSIVTTKNQLHRNLQSTFPQIEEILSHPSGRIYWALVSLFPHAGYVLEKNETQVTQMLNSISGIGQQRARYLTTRLYAFAREAYPYDSKDSIIVRAIQRNISNLFSLQQERDYVINYMEKLAKAVNARALSIYLSIPGVARITAVRLVAELGDLRRFSTSAQIDAFVGIDPGRYQSGEKDSSLGITKHGNHIARKILYRVIIQMETVKATQPCHITDYYDKKKRSSNSQGYKKIAIASVHKLIRTMFALIKHDQLYDYNIATENKRL

SEQ ID NO: 406841 - protein, 418 aa, unidentified
MKVVFPTCCGVDVHKSFLVATIIKTQQDSLQPSYQKKRFSTFNSDLNRFADWLHENDCLDVCMESTGKYWVPVFNILEKRGIRVVIANPKWVKAVKGNKDDTKDSKWIGDLFRIGLVKSSFIPDKDIRILRELTRYRYKLTSMRSSEKNRFQNAFTVCNVALDSVVSDMFGKSATAITDYLTSDEDFDAQHCVSLLQRSLRKKAEDVLQSIEGYEITAEQKTRIGIIRDHLHYIDALIARIDICINTMVDKYEGYIVLLRTIPGVDRSSAITILSEVGVDMTQFGSSKRLCCWAGLTPGNNESAGKKKSVRISRAGVYLKPALVQVAHAAVKDKLSPYYALKYERISKRRGKKRAIIAIARMILTAVFVMLSNLEEWNPVDLYRVDMPEHLKEKQLSKAVKQAIHFLKAQGLTVLDSA

SEQ ID NO: 406842 - protein, 325 aa, unidentified
MRPPKSQVKPQTQVGLDVSSQTLDAHIRVDGKAFSVPNTDAGFDQLCDVLSAYDVSMILMEATGGYEDNVACYLQLQGFDVVVINPRFARRFAQSMGRLAKTDRIDAAILAQMAFMIDSGPDRDRYIKPVTDEQRKQLSRMSSRRRQVVDLITIEKQRLTHADEYARESINEIISLLNAQLKRIESDILRYVKKNFSELANRLSSIPGVGSQAVTVLIADLAELGNVNRRRISALLGVAPFNHDSGKFKGQRRIRDGRQSVRNVLYMGVIAATRFNPVIKAFYDNLLLRGKPRKVAIIACMHKLIRIINAMIRTGKPFDTSLHGV

SEQ ID NO: 406843 - protein, 441 aa, unidentified
MNLHAAGIDVGAAHHFVAVPEGCDPDGRDVREFGAFTTDLQALAAWLTTCGVETVAMESTGVYWIPLFELLSQRGCDVKLVDPRQLKHVPGRKTDVLDCQWLQQLHTFGLLAAAFRPDDAICVLRGYLRQRAMLVRYAADHIQHMQKALEQMNVKLPEVVTDITGVTGMAIIRAIGNGERDAQRLATLRDARCHHDQATIARALEGTWREEHLFALRQAVDLFDVYQGKIAECDHSIEACLQGFADQRAGDALPPEPRPSKRPRNTPAFDVRTHLHRLTGVDLTRIDGIDGHGALKIVAEIGLDMTRWATDKHFASWLALSPGNKISGGKLLSSRTKASANRVAAVLRMAASTLHHSRSALGAFFRRLKARLGAPKAITATARKLACLIYNMLKFGTEYVDQGQHYYEQRYQQRVLSNLSRRAQELGYRLVKTPESSPVEA

SEQ ID NO: 406844 - protein, 332 aa, unidentified
MNESYLGIDIHKRKCVFVEIDGMGKVLRRSRFDNSREGVIDFLGSVGPNVHVVVEPTLNYLWLCDYLEPVVGSLHPANPLKVRVIAEAKCKTDRQDAWVLAELLRTNFLPESYYVPREIRGLREAIRQRDHLVKQRVMLKNRVRVLLFRHGYELRARDVGSKRAAAEITTFALAESVTAMIAQNQRLIGNLNAEIMALEKIIEESCREVSEVKLLMSIPGIGRLRAATVYAEVVDIKRFRSGKAFASYCGLVPTVHQSGDHFHTGHISREGSSLLRRTLVEAALTAHETPSLRSLYYRILFKQNRLKARVAIAHKLALVIYAMWTRQEPFHI

SEQ ID NO: 406845 - protein, 323 aa, unidentified
MKFTYIGIDIAKDDFVSFVRFSNSKPSAFKNSTKGINKFINKLPDNPWCFMEATGVYSIRLATALYEKGIRVSVINPLQIKRFAQTKLKRAKTDRVDAHLIAEYGDKMKPQLFTPIPHFIHQLQQKSALLRQLIKTSSALKNQLKTFKQLPNPDEQTLNGCQSMIQTITEQLENIELQMVDLTNLHCKKLFHQLQTIPGISTKASLELIIVSGMFKNFYSAKQFSAFIGICPSINESGKSIRGYRGISRIGSSYTRAILYLCTMNDFRYNAQCKALYDRLTANGKPGKVALIAVANKLIRQVFGMVKSGENYCSQTDLNTSKR

SEQ ID NO: 406846 - protein, 451 aa, unidentified
MSKQKRTPVVLEPDAAGIDIGAEEIYVAVPPDRDLESTRKFDTFTRDLNSLAEWLGFCRIRTVAMESTGVYWIPLFQILEERGFTVYLVNAHYLKSVPGRKSDVSDCEWIQYLHSVGLLRTSFRPPEHICTVRALWRHRASLLQMAAEHTMHMQKALTQMNLQIHHVLSDITGTSGLAILDAIVAGQRDPVALAKLCHARVRSPRETVAKALEGDYRVEHLFTLRQSLDGYRFHQNLIKDLDLEIAKLMQTLPSATEIPVLPTARTKTTAYRRQGNDPSFDLRGELHRISGVDLTDIPGVSTATAQVILTEVGPDVSRFRHASAFASWLGLCPEKRVSGGKVLSSRTRRVAHRAATALRLGAHSLSRAKGYFGDFFRRMRSKLGTASAITATAHKIARVIHHVLLTKEPYNESVFYQCEEQSRQRAQLRLRKYAHQLGYRLMPIPSERSVG

SEQ ID NO: 406847 - protein, 519 aa, unidentified
MPRVSFRRSAKKPRPFLLQKPNGVLTDRVQKVGPEHFGIVAIDCAKARSRYLCADFYGRVLLEPTTVPHTRGDFRAAIERVRQAITQHDLRDCVVAIEMTGDYHRPVQRAFRAANFDTRLVHPFTSKQYRQPADPGNKTDDTDLGGIFRATTHGFGLIEPDWSDDYRTLQVLRRHRRDLVDKRAQLFCQIKETLHALMPGYAECFCHLFEAPPPLVFARHTGSADAVKRLGVTGLKKIADDAQLFCRRATFHKIVAWAEQAPPGADPSPARRRMLEALDDDRSAKTQQITALERDLAHLVVRTPYVMLLAMPGVNIVTCADLAGELGPIANYANANGITGRAGLMPTRYQSDQVDHANGPLSRRGNRRLRAVLLQTADNLIHCNHSFQARADHWRRAGKDARWMRVKVAKIFSRLAFALVAGGQLFAHEACLDRHHLLGKILEFHREHRTTTAQVQQDLDAAIEHLPRRARRALAAPLQEELDKLARSRGPQPLADVLPLVLARLLGRVVQSKPEDADS

SEQ ID NO: 406848 - protein, 403 aa, unidentified
MARTPTAGIDWASEAHEVCLSQEGRATERFSVAHDEQGITDLAGKLLQLGVRRVAIERPDGILVERLLAAGLEVLAIHPNQLKAARSRYAVAHGKSDRFDAYVLAELARTDAHRFRAHCPDSDQTKALRVLTRAREDLVEAKVELASQLRAQLEAFWPGALLFATLDSPISLAFIARYPSPLDARALGAKRMAGFLARHSYSGRTDPAELVERMRAAPQGTAGSAECEARRAVVLGLVAALEPIVAEISQLNGQIRKALARHPDAALFAPLFRNPKTTICPATLIAELGDCRDRYPSEAALAADAGMSPVAVESGKLRIATFRRACDKRLRLAVATLADSTRHWHPWAGEVYRRARERGQDHPRAIRTLGRAWIRVLWRCWQDKVPYDPSLHGNLRGLQAAGG

SEQ ID NO: 406849 - protein, 418 aa, unidentified
MFKILKNNCCGLDVHKTWIYACIGITDSNKRTEYKQARFSSFTKGLNELCDWLAKYNCNDVCMESTGKYWIPVFNILEKNNIWVTLSHPKYTKPQKGNKTDRKDAKWICDLYMCGMVKPSFIPPADIRELRDLVRYRFKLTCMITGEKNRAHNSLTVSNLKLDDVFSDVFGKSSRSITEQILQHPGETFDVAPFVDGRCKTPIEEIQAAVDGAISTEQAVKLKQCLNHIDELEMHKAEIEREIFRLSDKYESVLNLIRTVPGFDKNPLTAIQVLSEIGGDMSVFPTAKNLVSWAGCCPRNDQSNHKIKSTRISRAGSYFKPVLVQVANALIKSRKHPEFTTRYRRIKARRGHKKAIIAICRMILTAIWHILTDLKPYTPEGFLESRPVNKSKVLTTSQALNLMKQRGYIIKDDVVSVT

SEQ ID NO: 406850 - protein, 400 aa, unidentified
MIAVGIDVSKYKSTVAIISNTGEILLPPKVYTHTYSALLSLVSLLKKQNDDIRIVMEATGHYHYPILKLLLGHHFFVSVVNPYIIKKYNDNNLRKVKTDKQDAIRLAFYALEKSYCLNAYVPAREKYADLKFLYQQYTQRIHIIQKEKINLCHLLEESMPGLYDMLSTSVRNPSKNLLYSFVKRFKSFNRIKRMGKERFLNSYFKMAAEIGSRRRKNYALDIYEMAKDCIATGSTEPYSTMAQEECLRSLILAEKAANRLCEQMNSIANTLPEYPLVRSMYGVGDKIAPQLIALIGDIRKFKSGKALNAYAGNDAPPYQSGQFESKNRHISKRGSTELRKVCFEIMCCIKVHKSSEDPIYKFMQKKENEGKAKKVAIMAGINKFLRIYYARVSEVYQKAL

SEQ ID NO: 406851 - protein, 343 aa, unidentified
MKYIGLDLHKKSIFATVLDGDGNILSKTQIGPKSRDITYYLKRQGEKDELSVAMEASYNWPYYYRAVEEAADNIVLAHPLKTRIIGEAKIKTDKIDSAALAYMLKADMLPAAYVPSRATMENKLLLRSRISLVRIRTQVKNKIHTIVDRNTDSYSYLENMSDIFTKTGIKILRDTKICPTDYSILTGYLDLMDEINKKIKDIESQIDERSIVDKDIELLKTIPGIGTFTAFLVKSEIDNIGRFTSKEKLSSYAGLIPSTHASGARLHHGRIVKQGNKFLRWALVEAAQTSVRCSEYFRYHYSRIRSRKNGNSATIAVARRMLEIIYAMLKENREYIEKPVDIK

SEQ ID NO: 406852 - protein, 405 aa, unidentified
MKRGAQKLFCGIDWATKAHAVCVIDERGQIRARFEVANSGKTFAGLVKRLVKLAVSGVAIERPDGPLVEAMVEAGLSVVVVAPRKLKALRERYSSTGAKSDPGDAFVLADVLRTDGHRLKVLTQDSAETKVLRALTRTRKDLVEARVALTNQLRAQLELCFPGAVDLFSRLDQPLTIAFLRRYPTAAKAAKLTEARLGAFLRRIGYSGRKPVEVLLQRIRQAPPDGLSELEAEGRAVCVLALLDAIEVANGRADELEAEIIERLEVHRDAAIFTSLPKAGRGVRAATLLAEIGDVRERFPDDESLAALAGVCPVTKASGKARSVGFRWACDKKLRNAIIDFADDSRHSSAWAACVYSAAIARGKRHPHAVRILARAWLRVIWRMWQDGAPYDVSKHGRAVALAAA

SEQ ID NO: 406853 - protein, 430 aa, unidentified
MKKTNHSVKRLEAITFRTLIVGIDIAKDTHWARFVDCRGMEHSKAIKFNNNRNGFNAILASIRQICNDEDYGDAIIGMEPTGHYWKALANFLMKQAKVKVVLVNPYHTKKAKELDDNSQTKSDKKDALTIARLVRDGRYFETYLPRDVYAELRGLATTRISMNKRKKALENTITAVMDEYFPEFITVFKHPFKGKASRQILKVCPIPKSILEQGEEGVLAEIKKATKKSVGRKKARHLVETAMDSVGVDYGEYAAEFKIKQLMKELELVDSQLEGVAKEMAAALKKTGLSEYLLSIKGIGVISLAMCLGELGDPLRFENARQLSRMAGYNLIEDSSGKNKSGTCISKRGRKNLRCVLYQMALTMVATNKEMKELYNYLKTRKENPLKKMQALVVISKKILTLIFILSKKKEKYNPGRVFGEARKSQLKAA

SEQ ID NO: 406854 - protein, 415 aa, unidentified
MKRVYDKCCGVDVHKKVIVACFLNGKEKELRTFGTTTRELLGMADWLTAGGCEMVAMESTASYWKPLYNVLESSGLNAMVVNAHHMKAVPGRKTDVKDAEWIADLLQHGLLQASYIPSKDQRELRELVRYRKSLVEDRTRELNRLQKMLEGANIKLSGTVSNINGMSARNLLDFIIGGGTLTAEKYDELFMARKISPMLKAPKQQIIDDLNGMLTAIQRKMLKELISHLDELNQHIRNLDDDIDGTMKPNEKEAAKSIQQIPGIGETSSQVIISVIGTNMERFPSGKHIASWAGLCPGNNESAGKRKSGRTRKGNAMLRTTLVNCAHAAVKRKDSFFAAQFARIQVHRGKKRAYVAVAHSMLIAIYSVLKSGGIYRDLGFDYYNQFNRERKIAAYLKKLKALGWEQSAAISPAPV

SEQ ID NO: 406855 - protein, 351 aa, unidentified
MPRATSSTNVIATIGIDIGKNTFHVIGLDDKGAIILRHKLSRGQVYARFANIPPCLIGMEACVGAHHLGRELSALGHHTRLMPARYVRPYSKGQKNDFRDAEAIAEAVQRPTMKFVAIKTVEQLDLQGLHRIRERLVCQRTSVINQIRAFLLERGIAVRQGLRTLRTEMPIALAKTDKLSPRMIHMIEDLCTDWRHLDKRIETVSKEIETLSEQDDGAKRLMTVPGIGPIISTATVAAIGTGEVFSKGRDFGAWLGLVPKQMSTGGRTILGPISKRGNRYLRMLFVQAARAVLLRPQSWEKHGLKLWIEAAARRLNRFKLAIALANKIARIAWGVLHGGRNFEVRPINQAA

SEQ ID NO: 406856 - protein, 384 aa, unidentified
MDPIYIGVDFHSRQQTICYLKTETGELVTCELKHQDKDEVRDFYRKFQGHVIVGLEASGYSLWFEAMLEQRGFEVWLGDATEIRRRARWRYKDDRRDAELIRDLMVHHEFPRLHQPTPQSRDILRMLRYRQKLIKVRTMTKNSLQAIAMQAGLAKGRRLFTLAGQTEFKAIAMSPVLQYQRDHWFELLKPLNQELLETMKWFKAAAKGDATVARLRTHPGIGLLTALCLLHTLQPVSRFRNQRKVVAYAGFDPMVRRSADSALHLGISKAGSRMLRYLTVEAVHTAIRHDKDLDRFYKRLTERRGRPKAKVAAARKLLIRAYIMMRDEIDYAEFNRRAVAARPARKSQGTPGVPEVLIGRSASPGAELAPLPASPELAEGAIGG

SEQ ID NO: 406857 - protein, 371 aa, unidentified
MGRDSTTKFIGLDVHSKTISVAIADEGRKGEVRHYGNIENTTEAIEKVIKSLTSTGTELRFIYEAGPCGFVLYRYLTGNGFKCLVTSPAMIPRRKSVRIKNDRRDALALARLYRAGELTGIYVPEPEDEAVRDLARARNDARVAERKAKQRLNSFLLRHNFIYPGKKSWTKTYLVWLGKVSLKHPAQKIALQEYIDAVHECTDRVKRLSEQIGLAVEEWRMAPTVKALQSLRGVSLISAAITVAELGDISRFQHPKELMAYLGLVPSEHSSGESIKRGHITKTGNSHARRVLVESAWTYKHHARVTPPLIKRQRDLPKNICQISWKAQLRLCARYRRMMARKKPMQVVVIAIARELAAFMWAIAKEVEVAA

SEQ ID NO: 406858 - protein, 390 aa, unidentified
MQAISDRSEAPNAIHTDIGAIFISLELSRSTWLITSLSPAGGGKMSKHSMPGGDISALLTRFSEFREKAFARTGKWFPIIVIQEAGLDGFWIHRVLQNEGFESHVVDPASIATSRRRRRAKTDRIDGEALLRALLAYKRGEPRVCATVKAPTPEEEDRRRLCRERKVLTNERVLHVNRIKGLLFSQGVRGYEPLRRDRRQRLDELRTGDGRPLPPHLKTQISRELDRLELLIEQIKAVETERDALLNSAVKTEGRPAPLAMLLAIKGVGPEFAAVLWSEGLFRHFDNRRQIASYAGLAPTPWQSGSVDREQGVSKSGNPRLRTILIQLAWLWLRHQPQSALALWFKERLGRNGGRFKKTTIVALARKLLVALWKYVTAGVIIEGAVMKTA

SEQ ID NO: 406859 - protein, 413 aa, unidentified
MVQAIIERCCGLDVHQETVVACLLVGAPGAHPMKEVRTFRTVTRELEALRDWLLEAGVTHVGMESTGIYWRPVYAVLEGHFELIVGNARHMRNVPGRKTDVKDSEWIADLVRHGLIAKSYVPPRPLRDLRDLLRYRRKLVESQAAERNRLLKLLETANIKLASVASDVFGVSGRAMLRALIAGEASPEAMADLAKGQLRRKRTDLILALDGRLEAHHRFLLAMQLRRLEAIEADIAALDLRIGERLEPYSAPHALLMQIPGVDWVVAAVLIAEIGVDMSVFLSVYHLAAWAGVCPGNHESAGKQKSGRARKGNIHLRTILVGAAISASRTKGSYLKDKFHRLKARRGGLRAALAIAHKILVSAYHMLAKYLPYRDLGAAYLDQISQTRTVANLKRRLERLGYRVTLEPNAQAA

SEQ ID NO: 406860 - protein, 347 aa, unidentified
MLADQVDYVVGVDPHRDSHALAIVHVLSGAVVFETTIAASSQGYAEALQLVDAHAPGRRAFAVEGSGSFGAGLTRFLGSRGERVLEVSRLRRERCSGGKTDALDAVRAARSVLGQERPATPRAGGERQALQALVAAREGAVNAKCAGLAQIRDLLITTPEPLRSELRPLTQAPLLRRLAATRPEGRRDPELRGSMLALRSVARRVLQLQAEERELGRQIEALTRKLAPQLLDQPGVGPHAAAQLVLSWSHHGRIRSEAAFARLAGAAPIPASSGQTVRHRLDRSGDRKLNRALHLILVTRKRTHPPTRAYIERRLQEGKTRREANRCLKRYLARSLYRLLEQPPMPA

SEQ ID NO: 406861 - protein, 422 aa, unidentified
MLEETQETEEIIQRVAALDVGKAELTCCVRVPGQGSSGRRAQEVRTYKTMTRSLLVMVDRLAELGVTRVVMEATSDYWRGAFYLLEAHGFETWLVNARDVKHLPGRPKTDTLDAVWLCKLAERQMLRPSFVPPRPTRQLRQVTRYRADLVAARTAEKQRVEKLLEDAQIKLSVVASDIFGVSGRAMLTALIAGERDPKRLAQLARARLRAKLSLLEEAFSGFFTDQHAFLLAKMLARVDQLDADLAELDAKLAELIAPLVAAVERLDEIPGVGQLAAHLLIAEIGTDMTRFPTAGHLVSWAKFAPGVKESAGKRKGSGSTGHGNPYLARVLGEAAVAASKTDTFLGERYRRIARRRGAKKAIVAVGRSILVIAWHLLSDPEAHFHDLGAGFYDTRIGPERAKRNHIRQLEALGYKVTLQPAA

SEQ ID NO: 406862 - protein, 368 aa, unidentified
MIYSLGTDMSKDEFSACLQSYDLRSQSHQVISRKTFKNKPSGFKACMSWLARHTRKDPAPVRLTMEATGVYYESFALFAGEHHRQIHLSVVLPSQSKKYIESRGLRSKTDKIDAYGLALMGAERKLDAWKGIDPFWRKLRVYTRTRAELLDQRTQLRNQLHALNHSGVQACQAEQALRECIQTISSQIDELTKLIGKKLRSRKDLRTQIRCLRSIPGIGTLTIACILAETNGFVEFHKISQLISFSGYDVKIKQSGKWTGQPKLSKQGSKYIRRAMFMPASSVKRSKKGPLYELYQRLLGKHNIKMKAHVAVQKKLLSYMYFLWNRQEIFDPEKIRRDQAIHQALQEQKKVASPKSEATVDTSLVLSQ

SEQ ID NO: 406863 - protein, 340 aa, unidentified
MSLYGGIDLHANNSVIVLLNEQDEVIYQKRLPNDLTTILGQLAPYHLELKGLVVESTYNWYWLVDGLMEASYRVHLANPAAMQQYSGLKYTDDHSDARWLAHLLRLGVLPEGYIYPKAERAVRDLLRKRAHLVRQHTANVLSVQNILARHTGARFSGKRIQELTKQDLTTLLADETQVLAVTSSLVVLDCLRQQIKTLEKTVHKRLHHTPSYAQLLTVQGIGTILAQTITLETGAISRFPTVGNYASYCRCVDSTKISNGKRKGTGNVKNGNPYLAWAYMEAAQFALRFQPAAQRFYQRKLAKSRNNTILARKAVAHKLSRACYYMMRDLVPFEATKAFG

SEQ ID NO: 406864 - protein, 325 aa, unidentified
MQGKDRSEQETKAKSTVGIDVCKLWLDIHILPSEEAFRVPNTKAGSKEIIHRLAHHDVQLIAIEATGKWHRDLHRNLVDHGYAVRVVNPLRARLFAEAMGLLAKTDRLDARMLAIFAASLTEARPPAPEIIEALKELVQARSSAVEEQTSLTNQCKSATTVFLCRQLKLRLTQIAKHIKTIETEALKRIKADPGLARRYDILVSIPGFGDIVAMTLLAWLSELGSCNDKQIATLCGLAPWPDESSDRVGARHIRGGRQLIRNILYMAALTAKSFNPPMKAFFRRLTANGKAKKLALVAVARKLIILANTLFRADRLWQPEAPKCA

SEQ ID NO: 406865 - protein, 343 aa, unidentified
MRFIGIDVHKEIYTACVLDEDEKVIDEMKDCPTSDEGLSELTSKYRPEDCVILFENLTRAHYVYHHLSAMGYSATVAHTGHGSLRAISCTNMKNDSVDAYKLALIAKDIYNERRFIRVSHITDEDNMRNKSLVRVYSECSKIHEEMNLRIQEYMSMHNMCLPENYKSFDSKRSMRFILSFSDATLNIMVKMMAAAIEQEEYAEKELAKAMKDNEDVKILTSLKGTAVRSAATVVTVIDGIERFGTPEKLVSYIGLGVRHSESAGKVKNGHITKEGDPLVRKVLANMVAKHVMFCPGSDLSKYYRRMKSRMPHWKAVTACMRKLVCIIWAMLTRKEVFRFHPGA

SEQ ID NO: 406866 - protein, 311 aa, unidentified
MTKHTIGVDISKSHLDVFRLEDDEAQRFENSAAGFRSLKKWLGPAAAARIVFEPTGPYHKAFETALGEKFPLVKVNPLQARRFAEAYGTRAKTDAVDAQMLARMGAAFNLEPQAPCSKETLVLRDLHVARAGLIKDRTRLRNRSQIQDIALLKRQTKARLTQVERQIAELDAEIAALIEAHGATARNRDILCSMPGIGAVTAAAMLTLLPEIGTLQRKQVASLTGLAPITRQSGQWQGKSFIGGGRKPLRDALYMPALVAMRFNPDLKAKYDALRTVGKPAKVAIVVVMRKLIEMANALVKADRMWAPKTA

SEQ ID NO: 406867 - protein, 463 aa, unidentified
MKKKQSTTTKKVKDRFIEMPVLNPHAAGIDIGDTIHAVAVPPGSDEQPVRSFGTMTSDLHEIVNWLEKCGVQTVAMESTGIYWKALFSLLSSKGFEVYLVHAQLVRNVTGRKNDQSDAQWIQQLHTCGLLKSCYLPDPEQEALRALTRHRRTMIHESSRYILRMQKSLEQMNIKIHTVLANLMCKTGIAILEKIIAGERNARSFLPLIDKRVQADKEVIVHSLEGNWLPEHLYLLEEHYRSYQFMQERIHSCEQQIIAQLERYEASLNEGEIVPKTMVPAVEVTDRFLARKIKKPHPTLGTMPYLQRIFGVNVLAIYGLSDVGALEILAETGTDLSKWPTEKHFVSWLNLCPNNKISGGKLISSKLMKKLPNPASQAFRAAANGVQKSDHWLGSYFRRKKAKGGQKYAIVATANKLATIYYKMVRDKKEFQPIDLLQYQEKYRLAKIQYLEKSLTKLKNAMVA

SEQ ID NO: 406868 - protein, 391 aa, unidentified
MIYVGIDVAKDKHDCFITNSDGEVLFQVFTIQNNREGFDGLFSRIQSVSHDMSNIKVGLEATGHYSYNLLGYLMDKGLTTFVINPLHTNLYRKSLSLRKTKTDKVDARTIAMMLMSDVNLKSYSDTSYHNEELKSLTRYRFDKVKERAKLKTSVSRLVCILFPELEKLVPTLHIASVYALLSEFPSAKHVATAHLTRLTNLLSESSKGRYGKDTAITFRDAARASIGSNMPAKSLELKHTIKLIQELDSEIDEIENEIKIIMDEINSPILSIPGINYRMGAMIIAEIGDFNRFDSPDKILAYAGFSPSTYQSGQLDGAYAHMEKRGSRYLRYALYNATKYVCHWDPTFAAYLAKKRAEGKHYNVAISHAVKKLVRVIYHLEKTKQQYIKVA

SEQ ID NO: 406869 - protein, 409 aa, unidentified
MEIVYRICCGIDIHKKQITVCLIIDGKREIRTFGTMTEDLLALLDWLLKAGCQSVAMESTGSYWKPVYNLLEAADFKKILVVNARHIKAVPGRKTDVTDSEWIADLFRHGLLRGSFIPDRPQRELRELVGYRRSLIEEQSREVNRLQKVLEGANIKLSSVATDVTGKSGRAIIQAIINGNTNAEEMSGLAKGRLRSKMDLLKKSLNGPIGPHQRMMLEAQLQHIDFLEQQIERLCREIEARMHPFDEAIGRLDELTGIGRISAEQILCVIGLDMSRFPSHKHIASWAGICPGNNESAGKRKSGKTGHGNRLLKTTLIQAVKSIARTKGNYLSTMYRRLAARKGTKKATVAVAHALLVIIYHMLKDGTRYCDLGGNFYDERDKQMVVKRTVKRLEALGYKVTVEPASSAA

SEQ ID NO: 406870 - protein, 334 aa, unidentified
MKQLVIGMDIAKTVFQLHSVDTNGEVNRLKLQRNEVMPFFTQLAPAIVAMEACGGAHEWGRKLSALGHQVKLLAPKSVRPFVQRNKTDAADAKAIWTAVQQPEARTVALKTEQQQGVLALHRMREQLMKFRIMQTNALRGILYEFGIVLPAGYPALTKAWAGALAEASERLPEALVVSLQEQWARVQSLDREMAVIERRLTDSLRRTEQCKRLIEIPGVGLFTATAAVATIGDPATFKSGREFASWLGLVPRQTGTGGRVRQHGISKRGNVYLRTLLMHGARAIIARRGHSPWTEALLKRRPYSVVVAALANKLARTIWAVLSHGTRFNAPVPA

SEQ ID NO: 406871 - protein, 407 aa, unidentified
MEAIYKICCGIDVHQKKLVVCLKKGKKQEIREFGAETKDIKRIAKWLKEEKCQMIAMESTASYWKPLVNIFEIEELEYMVINAKDYKNVPGRKTDAADSEWLADLLKHGLLRASYIPTREQRELREATRYRKSITEERARALNRLQKMLEGANIKITSILSDVTGVTCRNLIEYVLEHDEDIDLKKADDLVITNINAKLESVVTAMEGIVTPFQKIMMKEVFKHIDELTIRISEMDKLIDTYMIEYEKNKKKIEKMSGIGKRSAEIILAEIGQDMNRFPTEGHISSWSGLSPGNNESAGKRKSGKTRKGNKILKSTLAQCAKSAVKNKNTFFYAQYQRIAIKRGKNRATIAVAHSMLIAIYHMIKENLEYEDLGSSYYNQFNTEKKINSYLKKLKELGWEMPSTTAS

SEQ ID NO: 406872 - protein, 410 aa, unidentified
MNLVHRVCCGLDVHKRTVVACLRISGASGEIRRERATFETNMPGLLALVDWLSQHDCRVVAMESTGVYWKPVYNLLEGVCETLLLVNAQHMHQVPGRKTDQADSEWISELLAHGLLRGSFIPNPEIRDLRDLTRYRTKVVKQRADQCNRIQKLLETGNIKLASVASDVLGVSGRAMLEALADGETDAARLANLARGKLRKKIPQLKAALQGRLNQTQRWLLGEQLGHIAQLDGQIARLSDKIAELCVPFLSQLEKLEEIPGVSRRVAEIVVSEIGADMSRFPDDKHLASWAGMCPGNHQSAGKRLGGKRRKGNTWLQAALAEAGWAASHTKNNYLSAQYHQIRRRRGAKRACVAVGHSILTMIYHLLSKPEVDYKDLGADYFQTHDKVRLANQLLRRLGKLGYAVTITAA

SEQ ID NO: 406873 - protein, 355 aa, unidentified
MIVLGADTHKSSHTIAAVDSATGELLGDKTIGVGVRGFAALLVWARGLAGERVWALEDCRHVSGALERFLIARGERVVRISTRLMAGTRRSSRERGKSDQIDAIAVARAALAAGIETLPTAALAGPELDLRLLVDHRERLVRTRVALNSTLQWNLHDLWPELTLPGGALFSKKWSIKIARRLARAEQTMRVRIARDELRRLRELTTTIKALEAEITELVTAIAPQLVAEPGCGPLTAAKLVGEIAGADRFASDAKLARAAGIAPIPVSSGRTDRHRLDRGGNRQINAAIHRIAVTRARCDPHTQDYIARKKAEGKTNRDAIRCLKRHLARRVWNLLRTPIPKTGKALTQINSLMP

SEQ ID NO: 406874 - protein, 387 aa, unidentified
MQSVTSATVVATAARANDITLFASLELSKSKWVVTINSPGSGKFSKHVVEGGDGAGLLDLFSRSRAKAEQRYGVPIKAVVIQEAGLDGFWIHRLLVASGIESHVVDAASIAVERRHRRAKTDAIDGETLLRTLMAWARGERRVCSMVRAPSPEDEDRRRLTRERGTLLKERIRHTNRVKGLLSGQGVRDYNPLRRDRLERLEALRTGDGRELPPLLKAEIRRELERIALVTMQLAAVERARDALIRTQAEERNNPAAQLLKLKSLGPEFASLLWLETFFRSFDNRRQVAAYGGLSPSPWQSGGVERDQGISKSGNRRLRKTMIELAWLWLRHQPDSALSRWFRARVGVAKGRVRRIAIVALARKLLVALWRYVTQGVVPEGVVFKAA

SEQ ID NO: 406875 - protein, 341 aa, unidentified
MQITTIGLDIAKNVFQVHGIDAAEKVVVRKQLRRKQLIPFFESLAPCLVGMEACATSHHWARELTRLGHQVRLMPAKDVKAYVKRNKNDAADAEAICEAVRRPTMRFVGVKSAAQQGRLMQHRTRDLLMRQRTQTINALRAHLAEIGIAAAQGREGFKELLAIVANDEDPRLPVDARASLIVLAAQLEALQTMIGSIEKRIMAQHRSDQESQRLETIPGIGVVGATAIAATVTDPKAFRSGRDFAAWIGLVPRQDSTGGKHKLGPISKQGDRYLRRILVVGAHAVLKRARQQPEKYPWLTQLLARKPFRLVAVALANKMARIAWALLAKGGTYRAPALAAA

SEQ ID NO: 406876 - protein, 358 aa, unidentified
MKDLLEISCGLDVHKEKIVACILTGPLGKPTHSEIREFTTLIPDMIALRDWIISQNCHHVAMESTGIYWTPVYEILEEAFSGNITLLVVNACHMKNVPGKKTAMRDSEWISTVLRARLLNGSFIPEKTIREFRDLNRYHKSVIRDITPQKNRVEKFLQSSGFRLSSFISDIFGISGRNIILHLIEHGQIDRTALDSCLKTKTRNRIDEILMPVNGTLSEYRKAFLKILMSHYDSLKEHLAEIEKNLEADMTPFALQVEQLSGIYGISTTASCAIIAEIGIDMKPFKTAEHICLWAGLCPGNNESASVTKGNPYIKSMLYEIAWVIAGKRNTYLSAWHWRIKRKKGPKRPLSPLPENFS

SEQ ID NO: 406877 - protein, 445 aa, unidentified
MTGKRKKRHLTVVHPNCAGIDIGSREHWVAVEPDHEDPVRRFTSFEDDLEALAAWLSSLEVRVVAMEATGVYWIPLYELLAAKGFEVHLVNSRATRQVSGRKSDVLDCQWIRQLMSYGLLRGAFRPAQEICALRAVVRQRQGKVREQSRCVAHMQKALTQMNVQLHNVVSDLVGKTGLAILRAIVAGERDPHKLAKLRDGRLRAKEATVARSLYGNWRDEHLFALSQALAHYDFLTGQIAACDEQISRALAVLPSATETPAAPAAKLLPSRHRSRTQQNALRQALQRIMGVDLTAIPTIGVETALVLAAEVGADLSRFPNEAHFSSWLNVAPPTRITGGKPLRGPGPKILNRTGQALRQAASNARRSDSFIGASHRARLARMDSAPAIKATAHQLARIIYVMLTRGQPYVEQGIQAFEAQRRDRQLRALERNARRFGLALVEEAA

SEQ ID NO: 406878 - protein, 352 aa, unidentified
MDEKYVAMDVHKASVVIGVRDGTGKMIARAMVETKAQTLKDYVRGLSGTIHLTFEEGTQSAWLYDLLRPLVAECIVCDPRRNKLLEDGNKSDEIDVTKLSELLYLGRLRPVYHGAQGTRALKELAHNYEALVKDQTRVKNRLKAIFRGRGISYEGDEIYDCQEAEQWLAKLSERGVRERARQLYQQLAQLAEWVGGARRQMLAESRHQKAKKILQLIPTLGEISVAQLIATVDTPFRFRSKRQFWTYCGLAVVRHTSADYHFEQGELRRRLKPGPTRGLNRNYNRRLKRIFKTAAQTGSTKGPFKSYYQGLLGRGLRPELAQVTLARKIAAITLTLWKKGERFDPEKLVKSD

SEQ ID NO: 406879 - protein, 356 aa, unidentified
MQLQDTQTSPKLFIGLDIHKKSWTVSIQTDLFFHKTYSMPSTAEDLYQYVERTFPNHDINLVYEAGCCGFTAARYFLNLGWNVLVVNPADVKTGDKERYQKTDSLDSKNLSNQLKSGVLKGIHIPTEAEEQFTTLARHRTQVTKKLRQTKAHIKSMLLFHGIKIPDEYDNSNWSLDFIAWLENLKFSTPCGDLALQGKIRMFKFIKSEYLEIANQMRSYCRKSNKKDYNLLRSIPGIGGYLASVILAECGDLRRFNNESQFASYIGLIPGIYNSGGSEKCLGITPRSRSQLRSYLVEAAWIAIRKDIEMQNYYRKHHGKNVKSIIIKVAHKMARRILSVIKTETPYQINRNLIPTQ

SEQ ID NO: 406880 - protein, 367 aa, unidentified
MGKIRLVEGVGQQGPPPPRRPDPGSQVYMAIDISRTKLVYCVRWDGAEQRRLSTPMGLEHVRALVEQYRECCLHVAYEACGFGYEIAWWLQEHGVAVTVIAPSRVERVAGLSVKTDRLDAGKMARKLEKGELKGIYVPSRTLHEQRAVGRTYAQCLKERKRAQARIRALMQEHAKLGPLPAQGWTAYSDWLRLQPLAEPLDVSVHALLALRTLADQQARRLRAQLEGQAVSEPYAKLVQALREQSGVGTMSAIRLVVELGQIDRFPTTGSLPHYLGLTPSQYSSGDPDRRGHILKCGPGTLRALVLQCAWVAVRRSGDEELGKVFDGLAPRVGRKRAIVAVARRLAIKLRRRWLEVVQSAPAVAATA

SEQ ID NO: 406881 - protein, 416 aa, unidentified
MEEVEWWVGFDWASQKHWVCLLAGDGRVVAEREVTHGGAGLTELCDWLVEWTGAAPAKIAVAIETPRGPVVETLLERGFPVYAINPKQLDRFRDRFSVAGAKDDSRDARVLGASLRTDGHAFRRLAIGDPLIIELREWSRMREDLQQERTRLTNRMREQLWRYFPQMLQLSDDLGAEWFLALWHKVPTPATAAKLRKSAIDSLLQTHRIRRLAGEEVLRILRQKPLTVAPGATEAACAHIRTVAARLRLINAQLRNAHHYLDELSDRLGQAKESEPGQTYEQRDVEILRSLPGLGRIILATLLAEAWEPLQRRDYHALRSLCGVAPVTKRSGKACFVIRRLACDKRLAQALYHWARLATQLDPICRRRYAELRQRGHSHGRALRTVGDRLLAVACAMLQNQSVFDPTHSAKGALAA

SEQ ID NO: 406882 - protein, 355 aa, unidentified
MKRTTKYVALDVHQAMTVASVREESGKILARSIFPTEEQAILEFFRGMRGSIHVTFEEGTQAQWLYDFLVGVVDRVLVCDRRGEKRQGRRKDDQADADELSELLRRGGLRAVYHGSPHRSTLRELTRTYQNVVEDSTRVMLRLKAMFRARGIKTPGRRVYHPKDREEWLAKLEDDGVRLRAQTLYAQLDVLRELRPKVKATMVAEARRDPAWAVLGSIPFLGPVRIALILAIMRTPWRFPTKRNLWAYCGLAVVTHSSSDYEWVDGQVVRRRRAPMTRGLNRNYNRELKDVFKGAATAATGRPGPLLDYYEGMVARGMREELARVTLTRKLTALTLRLWKKGEHYDPAKLTKQAR

SEQ ID NO: 406883 - protein, 377 aa, unidentified
MLYVGMDVSSKSFVVHAIDEKKRVVRREEIEPSRRALKKLCVELGRGPKLMAFEAGNQMKWIADILKKQAGVTVHVVHPNEVKWIAESGGKKTDKVDARKLAELARGDLLPRKVHLVEGPTRQMRELVSARAKLMRQRVSLINTLRGYLKQEGVKLSEKYFGQDDWKEQLAKKKVSATLKAIIEAYRPAVDSLKQSELELVERLKRLSDNRTALLESVPSVGVLSARTVVSALDDASRFDNRKAVANYGALTPTIFQSGGEVHLGRINRDGRQEVRRVMLQCAHVLVRMKSPASAPLRDYFARLEQKRGKKKALVALARKLLVTCYGVLKSGQAFDPNKVLAKPPRVKATSALRQKPRGPRPPTYVLNTTAKKGRRQ

SEQ ID NO: 406884 - protein, 345 aa, unidentified
MDQISRIGMDTSKHVFQLHGVNAAEEVVLRKKLRRKEMVAFFEKLAPTVIAIEACGASHHWARLLQSFGHTVRLIPPQLVKPYVKRNKNDAADAEALCEAMSRPTMRFVPVKSPEQQAALMLVSVRDRLIRNRTQLANAIRGHAAEFGLTAAKGMAHLVPLLERIQADESLPALARELFAIQAKEYEQLQAQIAEADAQLMARHRADECSRRLAKIPGVGPVGAMLLRMKTPAPELFRSGRQFAAWIGLTPKDHSTAGKVRLGVITRAGDEGLRNVLVVGATAVIQQAQRHGRASPWLAALLKRKSPKLAAVALANKTARIAWKLMLTGETYAATPAPAAVAGAA

SEQ ID NO: 406885 - protein, 457 aa, unidentified
MPARGKQPRSGAGAPAHTIDPNAAGVDIGATEIYIAVPTDRDPHPVRKFSTFTEDLLAAADWLKQCGIKTVAMESTGVFWIPLFQILEAGGMKVCLVNARHVKNVPGRKSDVCDCQWLQHLHSAGLLRASFRPEQQICAVRSLVRYRDSLVQLSAMHLQHMQKALDQMNLQLHHVISDLGGKTGMAIVEAIVAGERDPHQLATLRDPRTRASKETIAKSLVGDYRRDHLFTLRQSLTGFRQNGQLIADCDVEIESLLKEFSSGEGPGAEAVPEPQAELKRKPRRNEMNFDLRTQLHRIFAVDLTEIPGIDTLTAHTLFTEVGRDLSKFANVAAFTSWMGLCPDNRVSGGKILHTQTRRVNNRVAKALRMAAQALSRSHGWMGQYYRRMRAKLGGPKAITATAHKLARIIYHLLTTGQAYDETVFAQQEAQNNQRNEKRLRRQARKLGFELTLIPTEV

SEQ ID NO: 406886 - protein, 407 aa, unidentified
MKHVIALDVSKGKSTFAIYDRYKQCELEGELTHTRIDFERLHHRIEEMTVLDKQAPEIVFEATGIYSKPLEKFLATKGHTYCRMNPLEANLQMAKMRRHKTDISDAHELAKTHFSMAREATYQQDDYFEQMRAITRYYDEIDEEMILLRSRMHAILHLSFPELEQLITPSSALFLNLVQLYPHSAQLRALSKTIIKNRLKENTRKNLSLKRAEEKAIVLLKAAENSYPAIDPSDIRCDQARDYARRIADLMEKKVQLVKQMVTISEGRKEYKVLRSFPGIGDSTACRLIGELGDIRRFKNAKQLNAYAGIDIMRYQSGNMQYRDRINKRGNKKLRKILFFMICSMLMAKGKPNHFVDYYYKLKKQPQSKPHKVAVVACMNKFLKVTFQLITHGILYDYESALPAQRS

SEQ ID NO: 406887 - protein, 338 aa, unidentified
MNIVFLGIDLAKNVFQLCGLNQAGKPVYTKRTGRKELLQTLANIPACLIGIEASTGAFYYWQREFEKLGHKVRVISPQYVKPFVRGQKNDGNDAQAIVVALMQPTMQFVPPKSPEQQDIQALHRARQRIVNHRTATVFQIRGLLLDRGIPIGSAVSRARRAIPLILEDAENGLSSRMRRTIAELYDLFNDPGRRIHFFDKEIETVFRQSEACQRIAKVKGIGPETATAVVAIGKGTEFKNGRHFAAWPGLVPRQHSSGDRQVLMNMTKKGDRHLRTLFIHGARAVVRVATNNNDGHMNQWVNQLKERRGFNKTTVAVANKNARIIWSMLRNETGYQVV

SEQ ID NO: 406888 - protein, 367 aa, unidentified
MTKVRTWVGLDVHAAKVVACVVDAESGEMSVRRLPGDTTKVVSFCAGLPGPTRVAYEAGPTGFGLSRALHAAGIGCVIAVPGKIERPAQDKVKTDRRDAERLVRLLMIDGLYAVQVPTSEEEALRDLVRAREDLRGDLMRARHRMGKLLLRHDVRYDGTSDTWSHRHRQWLSMVRLPERGAQATLLDYLGAIDALIIRRDQLEATIAELAPLSPWAEAIARLRCMRGIDTLSAVGLCAEIHGFERFEHPKQLMSYVGLVPSEHSSGQTRRQGAITKSGSQHARRLLVEAAWHYRHPPRLGTRLKARQVDQPATVIAIAWKAQQRLHQTWRRLDTKRRKRKTIVAAAVARQLAGFCWAIVTTETEHTT

SEQ ID NO: 406889 - protein, 403 aa, unidentified
MNNVAGIDVSKGKSMVSVLRPFGEVVAKPFSVGHTGSELKELADYLKSLDGETRVVMEHTGRYYEPVARFLHEEGVFVSAVNPKLIKDYGNNTLRKVKTDKADSRKIARYGLDNWAELRQHTPMDTIRMQLKTLNRQQSLYSKTKTMMKNNLIALLDQTYPGVNALFDSPVREDGSQKWVDFATTFWHVDCVRNMSLTAFAERYRKWCKRHGYNFSQSKAVEVHAGAQDLIAMLPKDALTKTMVRQAIDALNAISTSLERLKAEMQALAAQLPEYPVVMAMHGVGDSLGPQLMAELGDVTRFTHRNAITAFAGVDPGADQSGTHEAKSTRVSKSGPPELRRALFLVMDCLLKTQPQDDPVYRFMDKKRAEGKPYLVYMTAGANKFLRIYYGRVKEYLAQLENS

SEQ ID NO: 406890 - protein, 465 aa, unidentified
MAARKQKRMSAQVVEDEDYQLRYEVAAGIDVAKGSAVVCVRMPPAKGKKHRTSHLQTVPATVPAIGELAAELKAAGVQMVSMEATSDYWRIWFAVLEEAGLAVQLVSSSQARNLPGRPKTDKEDARWIARLTEMGMLRSSFVPPPEIRALRVYTRHIWDMTADRTRYWQRLEKLLEDALCKLTSVVSRLAGHQTARAIIEAMIVGERDPRALAALGQGRMRNEKLPALAEALSGMRFGPQHAHAAASLLRSIDLLDAELRDLQERVTAHLAAIPGSWGVDAGGVTGPQAGQAADAAMLPAAERLDEIPGLGREAAMALIAEIGLDMSRFPTPQALVSWAGLTPTARQSGPRKGRGKKGHGNTYAKRIAVLAAYAAANTDTFLGERFRRLSSRPGGGGRKKAGCAVGRSILIIVWHLLNDPAARYRDLGADWHARHTDRSRKARNARRQLEALGYDVIITLREDAA

SEQ ID NO: 406891 - protein, 335 aa, unidentified
MKEITTVGVDLAKSVFTVHGVDATGHTVLRKTIRRERLMELVAGLPPCLIGMEACGGAHEWARKFQGHGHRIGIMMARYVAPYRKSSKNDGNDAEAICEAVARPNMRFVPVKSAEQQAILSLHRVRQGFIEQRTATINRIRGLLAEFGVVLPQRAEQVRRAAVVVAEELPVLARDAIADLRAHLAYLDERISRYERQLVELARQREAAVRIQRLPGVGPLTASAITASISDGHEFANGRQFAAWLGLVPRQYSTGGKARLGRITKRGDAYLRTLLMLGARAVLQSAAQKSDRLSRWAMALRARRGYHRAIIAVAAKNARIIWALLANNREFTLPA

SEQ ID NO: 406892 - protein, 338 aa, unidentified
MKKYSGIDLHSNNSVVVLTDEEDRIIYQKRLANKLDEILMALAPHKEETVGVVVESTYNWYWLVDGLMDAGYQVHLANPSAIKKYEGLKYSGDFADATYLAQLLRLRLLPEGYIFPRELRAVRDLARKRMQLVRCRTAQILAIEGILVRETGGRMSGEKVKTMTTETVEAFGFMPNVTLAMESNRVVCQALHKQIKVLEKRLESEVQLQPGYQLIRTIPGIGQVLATTIMLEAGPMTRFADVGNFSSYCRCVDSLRESNGKKKGEGNAKNGNKYLAWAFMEAANFALRYCPEAKRFYDRKKNRTNRIVALKSVAHKLARACYHILREQQPFDVKRCFV

SEQ ID NO: 406893 - protein, 408 aa, unidentified
MEIVGIDWGRNKHYCYLLHEDKKLVLNNKEEDFAKLLKIKEAVYVIEDGNNRIVDYLLRNNRQVYILPSRRSSEARSFFVIEGKSDFIDSKVIAMTYEHNPDWCLQVKREGIACELDVLVEENAVINVSMMQDIGRLDAYLERYWPEVKEVFKGTSARKLAFISICPTAKDFLSVSDKEILQKLKEMGFLINSNLKSKLKELRKIALERYVPASIRTLIITFSRHAMEKKVMKEEIGKQMKEIIEKSEFSVLLTLPGVGVIIASQLIVAYLTHKFNSYRDLQRYAGTTPTYYGSGNKNTTKMRSNCNHYLRGTLHMASLAATNSSKWMKRYYDNKKSEGKSSAHALRALANTILKIAFAMLRDLTPYSEEKFLKRNPPSDYTPSRKERKQKPECSLKVSSVATCRSTA

SEQ ID NO: 406894 - protein, 398 aa, unidentified
MVKSSIGHLAAGEASGAQPPAKRSAASRDGSKRRRKADRDSVTKAVTKRGPRRPYGTNPNSRLGRRRRSPVSPHRQEREYAMSATLFIGIDIAKESFQVASRPAQLHGNYLNTCQGHKDFLHALADLSVTQIILEATGGYEKILAAELIQAGYNVVVANPRQVRDFARGLGRLAKTDPIDADTLAYFGEIVQPRPKPPQKPQTEALAELVTRRRQLTDLLTQETNRAQMIHHVKVRKSIRKMIKTIAFQIRELDELIQDHIQANDDFQQKDHILRSTPAIGPQTSAMLLSHLPELGRLNRHQIAALVGVAPFDRQSGKQTRGAHIAGGRKEIRAMLYMAALTARRCNPAIRSFAQRLEQQGKAFKVVITACMRKLLIILNALIRDQQVWTTEKFLHTV

SEQ ID NO: 406895 - protein, 320 aa, unidentified
MEQILGVDVGKVNFHAALLLDEKKSVGKAFPNNPAGFEQLAKWLANRKVQRVHACLEATGGWSEALAVDLHSRGHLVSIVNPARIKAFGQSEGIRTKTDAVDAAVIARFCQSQRPAAWTPPKPAVRALQALVRRRQSLVEMRTQELNRMQGPEVNATVVQSIQELLSHLDRQIQAIDEQIEQSVDDDPTLRSQRELLESIPGIARRTATTILGELPDLAEFRDVKAVAAQAGLSPRHYQSGTNTGHSRLSKAGNAALRHALYFPAIVAMKHNPTIRSFAGRLRAWKAANGHHRCLHAQAFDYRLRRFEVRPGVLAGRPDS

SEQ ID NO: 406896 - protein, 349 aa, unidentified
MSAKFNCEIAVIGIDIGKNSFHIVGLDRRGAIVLRQKWSRGQVEARLANLPPCLIGMEACVGAHHLSRKLTSLGHDARLMPAKYVRPYSRGQKNDFRDAEAIAEAVQRPTMKFVATKTAEQLDLQALHRVRERLVSQRTGIINQIRAFLLERGIAVRQGLRFLRAELPRILATPRDVLSLRMVHVIEDLAGDWRRLDERIERLSNEIEALARRDAGCERLMSVPGIGPIISSAMVAAIGGGDAFTKGRDFAAWLGLVPKQISTGDRTILGKISKRGNRYLRVLFVQAAWAVLIRPKSWDRHGLKSWLEAAKKRLHHNVLAIALANKLARIAWSVLAHGRAFEAIRIQAA

SEQ ID NO: 406897 - protein, 428 aa, unidentified
MDFEVKHLICAGLDVHKKTVVAAVCITDPVTLEATYKVKSFSTNNSQIAAMRDWLLSYNCLHVCMESTGKYWIPVFNILEPHMHVILTHPKYVKAIKGKKTDKRDAKWIANLFRFDIVKASFIPPADIRALRELSRYRLKLSYMRSAEKNRYQNSMTISRIRIDCVLTDPFGKTASSIMNYLLSDVPFDEKECAKLIHGGIKVSNEEIFDSIRGFEILSEQRFKMSHAKQHMELPSSYMDEIETELFRLSRPYDEVIKRISRIAGFTERSALFVISEIGADMGVFESDKHLCSWAGLTPANNESANKKKSTRCSKAGQYLKPLLIQCALAAVKSRKNPYYAIKYNRLAKRRGRKKAIIAIARMMLTSIYHMILNNEEWKPDDYEAIIHPSKPEKVALTLDNVIQFFGEQGADPETLKLLQQQCAVHSG

SEQ ID NO: 406898 - protein, 398 aa, unidentified
MDQDRFDVFVGLDVGKEHHHATALNSAGRRLHDKALPQDEAALREVFDKLTVHGSVLVIVDQPATIGALPVTVARAMGIEVAYLPGLAMRRIADLHPGNAKTDARDAFIIAEAGRTMPHALRRVGGDDDLIADLAVIVGFDDDLASEVNRVSNRIRGMLTQIHPALERAIGANIGHPAVLALLAKFAGPTGLAAAGRRRLTTTTKPLAPRMHTRLVDAIIKALTEQTVVVPGTRAAELVLPQLAAQLQGLLAQRAAAAKQVEEALDAHPLSQLLMSMPGVGIRTAARLLLDVGDATAFPTAGHLAAYAGLAPVTRRSGSSIRGEHPSRAGNKHLKRALFLSAFAALHDPDSRAYYDRKRAAGKKHNAAIICLARRRVDVLHAMLRNGTYYQPRPAVAA

SEQ ID NO: 406899 - protein, 350 aa, unidentified
MWIIGCDFHPRYQQVAAMNQETGEIVERRLSHQTQEAAAFYESLPRGARIGMEASCTAQWFERLLERCGHRLQVGDPATIRASVVRKQKTDARDARQLLDLLLADRFPSIWIPTPAERDSRQLLVHRHKLVSWRTQVRNQLSALARSQGVFPGTRFWTQAGKQKLEAVPLDRWAAQRRQDLLRLLSDLDAQIAELTRHVEQQAGARSDAVALMQQDGVGPIVSLAFVLTLGTAQRFRRGKQVASYLGLNPSERSSGGKQRFGHISKQGNRMMRWLLVEAAWIAVRKDPALQRVYQRLTFRRGSKIAVVAVARKLAVKLYWRLREFEAKNAAAAGSHAGQLGQRLMHSSTL

SEQ ID NO: 406900 - protein, 420 aa, unidentified
MERMFEVAAGIDVHRDTVVVSVRRRRAAGPDELLTQTFETFHDGLVAMTEWMQEKMVEAIGLESTGVYWLPVVRVIQRSMPKVVVWLVNPTEVRKVPGRKTDVSDSQWLSKLVMYGLVSPSFLASDELQELRKLTRHRTKLTGDQTRYKNRIIKEVESSGIKLASVCSDVLGKTGRALLDALLAGKPLDEPAIGELAQGSLKHKAAQLRRAVQGDISRSSIFVLRQLLRRLDDLSQDISQLESEVERLMRPMTSAVERLVQIPGFDEVAAAAVLAEIGADMSVFPSAKHVASWGGLSPGSEESAGKAKNAPTRKGNKYLRTILVQVAMSAKNTKGTFWQRKFRRLARLGPKKAAVALARSLLGVVYHMLADGTPYREPDTIPPPPHRLRARLSALAAQIEALGFKVALSQAVPAPETPVS

SEQ ID NO: 406901 - protein, 355 aa, unidentified
MKYYASTTEFNCGIDLHARQMYVCLMDRQGTLLLHTNIRNNDFEFFLKRIEPYRHDLTVCCECMFGWYWLADACQAAGLTFVLAHALYLKAIHGGKNKNDRIDSEKLAHLLRTNLIPPAYVYPADKRPLRALLRQRLFFVWQRSALLARIQSHQLAHNRTPVKQTRRNRDPWATQLLAQEAHPLRQLALQNELALIGHYDQHITALEAQLHRLTKQTLPRQYALIQTVPGIGEHLGLTILYEIGDIERFPTVKDFVSYCRLVKGTVASAGKIKGLRGAKLGNPYLRWAFGEAAVIAKRDSHLIGPLAQRLEARMNGNKFKANTVLALKLARAVYFMLKNNTVFDPERLAMALAKG

SEQ ID NO: 406902 - protein, 343 aa, unidentified
MEYFAGIDVSLEQSSVCVVDGAGKIVREAKVASEPEALVGFLRTLGFAVGRVGLEAGPLSQWLYAGLQEAGFEVVLLETRHVKAALSAMIVKTDRKDARGIAQLLRMGWFRPVHAKTAAAQEVRALLVARKLLQGKLLDVELSIRGILRGFGLKMGEATRTRFAARVRELASGHDMLVAISEAMLRAREGLRQEFNRLHAQLLRLTRRDAVSRRLMTVPGVGAVVAITFRSAVDDPARFAKSKAVGAHFGLTPKKYQSGETDVAGGISRAGDAMVRAALYEAAHVMLSRTTRFSSLKRWALAVAKRRGLRRAKVALARKLATVLHRLWRDGSEFRWSQAGAAA

SEQ ID NO: 406903 - protein, 424 aa, unidentified
MKVTYQTCCGVDVHKSFLVATIVKTTGGIEPSYQKKRFSTFNNSILEFKQWLLDNDCHDVCMESTGKYWVPVFNLLEDDINVVIANPKWVKAVKGNKDDTKDSKWIGELFRLGLVRGSYVPCKKIRILREYTRYRYKLISCRSSEKNRYQNALTVCNVALDSVVSDIFGKSSTSIIDYLLEQSGTSINHEEIASKLLRSLKSKEDAVIESVEGYQMTDAQKYRMRLVRAHMDYITAEINDVDKMMENMISSNPDFENAVQFLCTIPGVKRDSAITIISEIGTDMSQFSSSKRLCCWAGLTPGSNESAGKKKSVRITRAGVCLKPALVQCAHAAVKSGKSPYYKKKYDSLVKRRGKKRAIIAIARMILTAIYQMMSTGEQWNPSDLYKIDMPVALVEKQKAKAIKQAKKLLQREGLLPPDEPLAS

SEQ ID NO: 406904 - protein, 455 aa, unidentified
MAKAKSKDIDALSMVNPGAAAIDIGSTMHMAAINPEADNKPVRAFGTFTGDLHDMARWFKECGVTSVAMESTGVYWIPAYEILEGHGFHVILVNARYAKNVPGRKTDVSDAAWLQRLHSYGLLRGSFRPEAEVATLRAYLRQRERLIEYAASHIQHMQKALMEMNVQLHHVVSDITGVTGMRIIRAIVAGERKPGVLAEMRDIRCHASVETICAALSGNWRDEHIFALCQSLALYDFYQTKIVECDRKLEIALQNLAVEQGHDIGNLPKVRTKTKQPNTPDFEVRSALYRVLGVDLTQIHGIGPSLALKLVGECGTDLAAWPSAKHFTSWLCLAPGNKISGGKLLSSKTRRSSSRAAALLRLAATTIGRSDTALGAFYRRLSARAGKAKAVTATARKIAVLFYNSLRYGMKYHDPGATQYEERYRSRVIGNLQRRAKAFGFALHELPAAPEMAVS

SEQ ID NO: 406905 - protein, 489 aa, unidentified
MNDKRRLVGIDLGIASAHTVRVLDGEGNTVAKRKAWPTVESLTDVENAALAGCGAGTRLEVIVEPTGPAWMPIAVFFSARGHVVHRVSSAKAHDLRRFLSRHTKTNGIDADTLARLPLFDPAGLQPLVLPGVERAALDRRVRATDRLTQAGAEHKRRIKDLVRQVLPMTPLTGDLGVADLAVLERFADPNTLVRLGLKRLTALIAKSSKGHLGVERARQWLDAAESSLELYAGHPAVAFVDLAAEVATEVRLLRAVQTELAAHATERERCYRWVDPTGLARSLPGVADIGGPALVAAIGDPARFKRAKQFRSFTGLVPKASETGDTDRKGQPMSKAGSSLLRTTLVRAADTARKQDPQLARVYYVQMVERGKDHLGALCVVAAHLAERFWAVMHRAMPYVICDTDGRPVEPDEAIAIIAEHWTVPAEARARRRSKKVGKAPQNVLAGQSKPHAPSAGTRGDLPQQASSPPRNGPVKHHRPDAGADDAVA

SEQ ID NO: 406906 - protein, 415 aa, unidentified
MEKIYDKCCGIDVHKKLIVACLRSGRKNEIREFGTSTKEILSLTDWLMGESCEMIAMESTGSYWKPIYNIIESCGLQAIIVNAQHMKAVPGRKTDVKDAEWIADLLQHGLLKASYIPDKAQRELRELVCYRKSLIEDEARELNRLQKMLEGGNIKLSGTVSDINGKSSRNMLEVILSGEVLDLKKLESMVSEKKVSKRLKAPKQKIVDDMDGVLTELQRKMIRELLKHIDELERHIKNLSDDIDRFMDSGEKAAVKAIEEVPGIGKVSAEAIISVIGTDMNRFPTDRHISKWAGLCPGNNESAKKRNSGRTTKGNKTLKTTLVLCAHAAVRVKESYFAAQFARISVHRGKKRAYVAVAHSMLIAIYHMLRYGTAFMDLGSEYYNAFNRERKAEGCLKKLKQLGYAANIATIADLA

SEQ ID NO: 406907 - protein, 432 aa, unidentified
MPNFIGLDISKHTAEVAMLRGAARTLRRSRFPARPADIRTFARSLGANDQVVLESCTNAVAFHRLLCQHAGRVVLSNPLKTRVIAEAKVKTDKVDAEVLARLLAADFLPTVWVPDPLTDELRHMVFHRQGLVTQRTQAKNRVHAILHRNLIAPAMTDLFGKSGRAFLADVALPPAERQLLHSDLRTIDFLTTEIASSERSMAQAVGQDPHVRRLLSIPGIALASAVALRAAIGDVTRFASPTKLVSYFGLNPSVYQTGMKAYTGHISRRGRSHARTVCIEAAHQLSQAPGPLHAFFVRLRRRKPYNVAITAVARKLVTLVWHMLTHEEDYHYAPAALTSRKRNRLERLATGRPAHRSRTPAPAPAQDRESARRAETHYVEFLQERFGPDGPAGVEHPNRTNSEPRKTSRTADPESKSAGSHRSILRKPKKKS

SEQ ID NO: 406908 - protein, 341 aa, unidentified
MKQQYVGLDVSLEQTSICVIDDAGAIVWRGKCRSTPESIHAVIAKQAPKAARIGLETGQLSTWLFHELRARQLPVICIDARHAKAALSLQINQTDANDAHGIAQIVRVGWYREIAVKSIDTHGIRAMLVARAQLVTQKVKLTNCIRGLLKTFGMVLGGGKGRRFEAMVRERIAENPMLTTIIEPMLVVLLTTREQLAGFERLVRRRARVDHDVRRLMTVPGVGAVIALAYTTTIEDPARFKRSSSVAAYLGLTPRRFQSGEMDRAGHISRCGDAMLRTYLYEAANVMLRRSTRPSQLSIWGRALSQRIGARKSLVAVARKLAVVLHSMWRHRMEFRFEHAA

SEQ ID NO: 406909 - protein, 391 aa, unidentified
MVYVGIDAAKDKHDCCILGGNGQTVQEAFTFRNNHEGFEQLISAIQRSSEAEGSGQIRAGLESTGHYSGNLEAFLRSSGVELVVFNPLQVNLYRKSLTLRKTKTDKVDAKYIAQLLITAESNPVSVSYQIQELKALTRHRFRLVSQRTKLKISISRLVVILFPELPTICTSVTQAAIKTLLLELPGARQIAACRIDRLTNLLRAASKGRYGRTKAEEIKSLAQQSIGANSPATSLELQLTLQHLDFLQKQINQLDKAIRTAVTQIQTPILSIPGIGPTLAGIILAEIGDIHRFSSPDKLQAFAGLDPSTYQSGKFNADRTPMVKHGSTYLRWALMQAARLATVHCETFSRYQAAKQAQGKHYFVALGHTAKKLIRVIFHILNTNEVFVPQT

SEQ ID NO: 406910 - protein, 386 aa, unidentified
MQSFDANKSLVVLDQDSTLVAVIELSLSGWLVAGLVPGLKRQPRKKLDPDPDALLALLQRWRSEAIKAGRTIARIALAYEAGRDGFWLARWLKGRAVEAYVIHPSSIPVPREHRRRKTDRLDTELLMRAFLGWLRGEVKHCTMAAIATLEEEDAKRPNREHQTLTGERTRLINRLKSCLIRLGIRNFKPTLGKAAERLAELRTPEGVPLPDNTLAELYRDMARLDLVKEQIKAIERQRLQRIAKAPNHRPNVMVRLIAQVIGIGIETADMLVSELLSRNLRDRRAVARYGGLTGSPDESGSRRREKGLPRAGNARVRRGMIEFAWRFLKFQKDSPLAEWYRNQTASGRKDVRKRTIAALARKLLIALWRLATQGVVPEGIALRKAG

SEQ ID NO: 406911 - protein, 351 aa, unidentified
MPRKSNIEAIATLGIDIGKNFFHLIGLDHRGAIVLRQKLTRSQLSVRLANLPICLIGLEACVGAHHLGRQLKEMGHDVRLMPANYVRPYSKGQKNDFRDAEAIAEAVQRPTMKFVALKSVEQLDLQALHRVRERLVSQRTGVINQIRAFALERGIAVRQGAAALRIELPRILAATEKLSPCMIQIIQSLADDWRRLDQRIRAASSEIEAIAKNNADCTRLMTVPGIGPIVSTATVAAIGTGDLFTKGRDFGAWLGLVPKQNSTGGRTILGRISKRGNRYLRVLFVQGAHAVLMRPACWERHGLKHWIEAAAKRLHPIKLVIALANKLARIAWGVLTSGRNFEVIPIAARPQ

SEQ ID NO: 406912 - protein, 322 aa, unidentified
MCKIIGIDISKQTFDVGFKKDSTWHHFVLENNEKGFMKLLKEVEADDWIVMEASGPYYLPLALFFYKEYKNVCVLNPLIIRRYSQTRLYRAKTDKKDAQTIAEYGAQYELKHWKPEIEEISKIKHLYTALELINKEIHQSNRQLESFMSSGTLDKDLAKTLKGIIRFLKTKKKKLENQITNKAEKNYNPTLERLKSIPGIGTKTAIMLTVITSDFDKFENHKQLIAYVGFSPRLYQSGTSVRGKGHICKMGSSQIRKLLYLCSWSAKRCNQDCKKMYDRLKEKGKPERVIKIALANKLLKQAFSIIKNQTYYTENFVEKACF

SEQ ID NO: 406913 - protein, 391 aa, unidentified
MVCVGIDVAKDKHDCCILDSDGTVRADCFTIPNNSDGFKRLLQTIQDCTQKSDKIKVGLEATGHYSYNILGFLLDNGLPTYVINPLHTNLYRKSLSLRKTKTDRVDARTIATMLLSDVDLKSYTDTAYHNEELKSLTRYRFEKVQERAKLKQSVSRLVTILFPELEQLVPTLHIASVYSLLGEYPGAKQVSEVHLTKLTNLLVTASKGRYGKDKAIQIRDAAKTSIGSVMPAKSLELKHTIKLIRELTSEIDEIEDSIQQIIDELNPPILSIPGMGVNSAAVILAEIGDFSNFSSPDKILAYAGCSPSTYQSGKLTNCYAHMEKRGSRYLRHALYNATKYICYWNPVFAEYLAKKRAEGKHYNVALSHATKKLVRLIYALQKSGKAYLTAA

SEQ ID NO: 406914 - protein, 343 aa, unidentified
MHIAVLGIDLGKNSCSVAGLDDTGRVVVRRRLRRENIVKFTASLAPCLVAMEACCGAHHLGRILRAQGHQVRLMSPEYVRPYVKAHKNDDRDAEGIAEAATRPTMRFVELKSEEQLDMQTLHRARDRLVSERTALINQLRAVLLERGLVIPQGRRKLEQHLAAMLDEGGDVPLSPRVRALVEDMRAEWRQLDQRIRAFDDEFAGLARTNEAARRLATIPGIGVLNATALVAAIGTGAAFGRGRDLAAWLGLVPRQATTGGKPRLLGISKRGNGYLRKMLIHGARAALPSLANAQTGLSQWLRGLLARAHKNTAVVALAAKLARIVWAVLRSGQVFELRRGSAL

SEQ ID NO: 406915 - protein, 372 aa, unidentified
MSLSIIWIGMDVHKDTVMVAVFQGHAREAEVVQQLPNDLRKLRRFFQRWQARGEIRTCYEASGAGYVLHRELTDWGFHCDVVAPSLTPVRPGEQRKHDRRDAIQLGRLYRAGELVTIRIPTPAEERVRDLVRCRQCFQREILRSRHYILKFLRRRGFIFREASPWRRKHRRWLESLLHEEKLAAEDRAVFGEYLALLDYKISRRDDLDEQIARIALSTSYRPLVERLCSFRGISTLAAMTLATEIGDWRRFERPGQLMAYLGLVPKERSSGDRDRKGPITKAGNSRCRHVLVQAAWRYRLRPAMGVDLKKRQKGQPPRVIAHAWKAQHRLYKLYHRIANRKSNQIAVVAVARELVGFLWAVMKDLEEQQAAA

SEQ ID NO: 406916 - protein, 355 aa, unidentified
MKKVVKQVLGADVAQKELVVTLGCMFDDLTIDLYAHKVFKNNDKGIVALLDWVKKHTDPEVKVRFVMEATGVYHQKFAFYLDENGYELSVVLPNKISNYMRTLECKTITDKSCSEAIAQFGLERKLDQWHKPKKIYRSLQQLTRERDQIVMERVMVKNQLHAEQAEAEPNERSVERLNERMRLLNKHEKEIKSDLNEILNSDTVLKGEIKNICSITGIGELTATIVLAETNGFELIRNKKQLTSYAGLDVKEKQSGTSVKGKPRISKKGNRHLRKAMYLPALTAVKHDENFRNIYARILSRQGIKMKGLVAVQRKLLEMIYVIYKSKNEYRKDYTVLKRSSALNQQDQHATQTGS

SEQ ID NO: 406917 - protein, 343 aa, unidentified
MSKISIVGLDLAKNVFQVHGVDASGGVVLRRQLRRGAVEKFFAQLPPCTVGVEACGSAHHWARVIGHYGHQVRLMPPAYVKPYVKRNKNDGRDAEAICEAVSRPTMRFVPVKSVEQQATMAVHTTRALLVRQRTMVANSLRAALSELGIVAAQGIKGLRELMAKLEAPYEEVPEIMRGALLLLARHWQSLEADERVLEQQIAKAARSDREARRLMEVPCVGPIIASTVLAKVPDATVFRSGRNFAAWIGLTGRDHGTGGKHRPGRISKQGDRMLRALLISGASAYLRHQRTRGVSDPWLRDLLARRPYKVVMVALAAKTARILWAMLVKGEPYRDRASAPAAA

SEQ ID NO: 406918 - protein, 377 aa, unidentified
MNRIIKIGMDVHSTNYTLCAMEPVIGAEDRVFANVQVTPDYKNIILFIENLKQKLGLNDTYDIECGYEAGCLGYSLYNQLTAAGVKCVILAPTTMLTEQGQRIKTDSRDAHLIAQCLSYGGYHPVYIPTEQDDSVKEYLRMRDDHKKALKKIKQQIGMFCMRHGYSYEGTKWTIAHLKWLKKLELAPMYQETLDEYLASYEEQTSKIERFDARIEEIASQAEYAEKVKKLGCFLGIKTHTALSLIVETGDFTRFAKGNVYAAYLGLAPGEHSSAVKVNRLGITKAGNSHLRLLLVESAAGICKGAIGHKSKALKQRQQGNSAKVIAYADKANARLRSKYYRLIRHGKKRNVAVAAVARELACFVWGMMTDNIDCSAA

SEQ ID NO: 406919 - protein, 430 aa, unidentified
MGLVVQTAIHPEQDDHDMPYEWFVGIDWGSQQHQVCVLDRDRRRVGERAVDHDGASLARLATWLWSMSAGQPQRVAVAIEVPRGAIVEGLLERGCHIFAINPKQLDRFRDHHSVAGAKDDRRDAFVLANSLRTDRPSFRRLQLDAPQLLVLRERSRAEETLREAFRRSANQLRDQLHRFYPQMLQLCSAADETWLWDLIDLAPTPAHVALLNEEHVQRVLKAHRIRRVQAQEVLTCLQAPALPVAPGATEAAQAHCGFLLPCLRVLAEQLQACSQQVSALLHTLAQEPSEGEGPSDVAIVQSLPGVGRKITAWLFAEAAQPLAQRDFQVLRTHGGVAPVTRQSGKRRQVVMRRGCNPRLRQALYHMARVAMQRDAHFSQVYEALRAKGQRHGQALRTIGDRLLRILMAMLRDRICYDASRIHREPVVQRG

SEQ ID NO: 406920 - protein, 323 aa, unidentified
MDGFNANSIVSFVGIDVAKSKFDCVILPEGVHLSKTYDSAGITRLVEQLRERGECLVVLEATGGYERRLATELVDAGHRVAVVNPRQVRDFARGIGVLAKNDRVDARVLATYAQHVQLRLFEKPSKKQQELTALVTRRRQLLALRIAETNRLELTTAKLAAKSIRHVLDLLRKELAKLDAEITRLIAADDDWRDKSDLLQSVPGVGPATSASLVAELPELGRLNRQQIASLVGLAPFDRDSGKSHRQRSIWGGRSSVRSMLYMAALTARRFNPVIRAFADRLQRSGKRTKVILTACMRKLLVILNTMVRNRMAWNANYTFQNP

SEQ ID NO: 406921 - protein, 341 aa, unidentified
MALIGVDPHKASHTAVAIDADETVLDRLQVRSDAYQCERLLSWAGRFDERSWAIESAAGLGHLLSQQLVAAGEHVVDVPATLSARVRVLGSGRSSKNDPNDALATAIAALRHPGLRVVTGEDHTAICRLLASRYRQLQSDRQRTICRLHAVLTNLTPGGFSSRLNADRAGLALRRVHPANAVETERKQLALDYLVGLRRVDRDLAQLRARMSAAVTAADTTVTDVFGVGPIAACLILGHTGDVTRFATADRYASYNATAPIEASSGPTVRHRLNLRGNRQLNHAMHIAAIVQMSHDGPGRIYYDRKIAEGKRPKEALRSLKRRISDNVYRHLVADAVRHRA

SEQ ID NO: 406922 - protein, 328 aa, unidentified
MIEHYIGVDLHQAFFQACAVTASGDRAWEGRFPRTEVGVAALLARCDQRTAVAVEASTPTWHFADAIQGGVGDLRIVDPVKTKLKAGYAAKTDRLDARRLADALRRDSVVGIYYPPVAIRELRELCRFRHAVVHVRTALVQRLRAVLLRQGLVDRRRLARTISDAWLETLTLPPRAAESVAGLRRLLAAVRAEAVRADREVWAAAAADPIAVTLQQVPGIGSVLALMLRAEIGEIRRFPTPGHLASYAGLVPRVDASAGRVRYGRITRRGSPWLRWALVEAAIHGTRRPDRIGRWGRKLAIRKGALKARVALARTLCDEIYRHWSAIG

SEQ ID NO: 406923 - protein, 346 aa, unidentified
MKYSVGLDVSVKETAICIVDEAGKVVRESKVATEPQAIIAFLNGAEFEYARIGLEAGPLSQWLVNGLAEAGLPVICVETRHMKAVLKAQQVNKSDRNDARGIAQMMRVGLYKPVHVKTLASQQKRMLLTSRQLLRDKLQDMENELRGTLRNFGLKVGVVSAGHFEARIKELVAGQPPLEMIVVPLLTVRRVVREQLAKLDKMVLDQVRDDKLCRRLMTVPGVGPIVALTFRATVDQAQRFARSKTVGAHFGLAPRRFQSGERDYDGRVSKCGDAMMRTALYEAAQVLLTRTQTWSWLKAWGMQVARRRGAKKAIVALARRLAVVMHRMWVDGTEFRWRKEADTAAT

SEQ ID NO: 406924 - protein, 411 aa, unidentified
MLLLVGDDWAEENHDVEVQDEHGRVLGKAKLPEGIAGIDRLHALIGQHVGDEDDARVQVVVGIETDRGPWVQALLAAGYQVYPINPLQVARYRERHAVSGAKSDAADAHTLADMVRTDRHQLRPAAGDSPVVEAVKVVTRAHKTLIWERTRHTLRLRSALLEFFPAAVTAFADLTAPDALQLLAKAPDPTSAARLSITQISAALRQARRRDVPAKAAAIQAALRTRHLGQPPVVAGAYAATVRAQAAILTVLNAQIAAMQEQVTAHFGRHPDSELYLSQPGLGVVLAARVLAEFGDDKSRYADARSRKNYAGTSPITRQSGKRKFVQARYVHNDRLVDALGQQAFCALRGSPGARAYYDQLRARGTGHRAALRQLGNRLVGILHGCLKTGTPYDEHAAWAHHHQQDQQAAA

SEQ ID NO: 406925 - protein, 441 aa, unidentified
MRHSKGQRRSCRKIAQRRAAVHEGTLICSLDLAKKEHAYCCMDADRKVLEEGKVAHSSEALEALVVHLDGLRLKHGLKEAVFFMEGAGPYWMVVASTLERHGQTYRLVNNRSVRHERQLESLTHEKSDRRDAQHIGRLGCSFHFTSTQLPCGEPWISLRAAACEYQAIVDLKIKEKTRIRGLLQMAMPGYSDVFGKIESASFLAVLSALSWAEKEASFIAEARRHFAGKAFQVARAEEFRRRWVDPTSYGYANGRDSIAFRPSLSAQRYQLLSRQQGLVAECLCRYYGQVPYSGFIDSIPGSSTLQNAVTLGLAGDLRLYDESRCLTKLAGLNPCEYSSGFYQGSTRISKAGRNRLRRAAISSVMTILKSRLDHDFSRRFFYLRSRQENPLSSLQALVACANKYLRTVWWLAVHEAKYDPVISKRGLMWAKTHKETNLARA

SEQ ID NO: 406926 - protein, 326 aa, unidentified
MQSFKTFIGVDISKNDFSACFNELDKPLKFSNNLLGVATFFNHLKTKGYLKNNTLIGLESTGAYSLPLAITGAKKKYIIKIINPIITKAHLGASVRKIKTDQADAKVIRACLIDGAGAVFRDTAEETVFKNLIRQRYYLVKIKTELILKQQDITLKEECLKLPISNINYELLEIIEKKIIYLEQQLSACLPKQQELMRTIPGIGKITAMTFATEIGDIVKFDSAKKLVGFIGVDSKIRESGSSLKIKGHISKRGNKLIRKVLYSAALTAIQRPNLFRDFYQRKLAEGKAKNVCIVAVMRKMIHVIYAILKRQSPFVEKEERGLTST

SEQ ID NO: 406927 - protein, 648 aa, unidentified
MSDAQLDQKAWLARIGYTGPLTPTLETLNQLIFAHSHSIPYETLDIMLGRPPKLDVPTLQQKMIASRRGGYCFEQNMLFRAGLRSLGYSITSLQGRVVRGLEIDAPRPAIHMLLKVNLPDGTYLADVVFGNLAPTCALSVPQIEQETPHEVMRFIDVGGELTLQARLKHGWQHIYRVIPYPRYDGEYEITNWYTATHPETPYQGNIIVARPGPNRSRITMYNARVTVRDADGHAEKRWLATESEFRDVLRGEFGLNMSDEQVDQCVGIMKAKGTGDAPCKSKRRWSAIVDVAVTDGSPQTPRSLQAVGERGAPSVSPLNPNSRLGRKVRSPIRQGRVTMDIIAVGIDVSKDRLDVAVHPGGEAFVVERNGAGLEQLTARLKQLAPSIVALEATGGFETIAAAAVGGAGLPIVVVNPAQVRAFAKALGQRAKTDPIDASVIAHFAAATRPEPRPLPDEATRFLSDLVTRRRQIVDMIGAERQREKRATSQHLRKSITRLIKALEKELVSVDTDIDDAVRSSPAWREAEDLLASVPGVGPIIARTLMAELPELGRLNRKQIAALAGLAPYTRQSGQWRGKSFIGGGRQAVRTVLFMGAMTARRHNPVPKAFFERLVANGKPKLVALIAVARKLLTILNVMIRTKTPWQPA

SEQ ID NO: 406928 - protein, 416 aa, unidentified
MTRVGIDAHKKSCTTCVFGDDVLTSSTPSKTFVFKTTTRGVAEFMEKVPEGSRVVIESSTTGKAISRLLSSRYDVHMIAPPERKPTIKTDKRDAERIVKEDMLGYVKRSYVPSQQIEELRLIVAKQMEIGGKISAVKNQVHALLERNLLQSEFEDLSDIFGVEGLERLSSVELPRHEKLTLAMYLEELQLHTSQHKQIETAIAKTAEADSDCQSLMSHPGIASFVAVAIKARAGDASRFPTKKHFCSYAGVVPKADNSGEHVSGHNRVKHGDDVLKYALTCGVYGAVRAGTDSAVKRFYLKQIAKGKSPQDAEVAAARKLACIVWKMLTSKQRYVEEDRYLTARKMGKLSQIAGRSLEHTTRPEDVPTLVGNLKSRTEVLERCPEGAHRVTGHRGRRDRSKPSRERVSEVGGVVAK

SEQ ID NO: 406929 - protein, 455 aa, unidentified
MQAARKSNDPRGYGLFPLRTLQTHPCSNSKTVDFTCTATKCPGRPSDVEIDSEYQFERRRFSSSPEQLRSLAAWLLEQEAEEVVMESTAQYWKPVWEALERYWKPICETREGARWKSGTLHLAQTLSNRGRRGRKRDFPDAERVVKRLVAQELTLSFVPDVKQRLWRTVTRKKYQLRCERIRLQNQLESLLEEAHIKLSSLVSDLLGFSARRMLKAIAEGETNPATLAALADQRLRATPEQLCDALGACTELNAVYRRLLMMALEELRLIDEQIGQLDQEMASLLSAHQDAVQRLAEVPGLGVDSAQQIIAEVGPTAATFPSQKCLPSWVGACPGDDESAGVNYSRRSPKGNRHMRRLLNQAANAAARAKGSLFEIVYRRSVPRLGHNQAIGAIAHRQCRLIWLILHQGVRYQERGPAATKRSKQPRTWKMIRQLRSLGYRVEPPNPQPSQAQAQ

SEQ ID NO: 406930 - protein, 393 aa, unidentified
MRVTRIGLDIAKQIFELHGVDRRGRVAVRKTLRRERVLEYFSQLPACEVALEACGGAHYWHRELSKLGHTARLLSTHKVKPYLDGNKNNAHDAAAICEASSRPSMRWVEPKTIAQQDLPSLHRVRQVTVRQCTLLANHIRGLLLEYGIAVARGAAALQRALAQLLERDEQRLSPLLKQLIAGQWRMLKLHEQQVKVHDCRIANIARHDASCRALLKVEGIGPLTATALVATAGNGRQFKNGRHLSAYLGLVPGHSNTGHKTVMLPITKRGNRYLRTLLVHGARSTLYHARRKTDPRSLWLQRLQAKRGHNVAAVALANKNARIAWALLRFGQAYRPNLAHAPTAERGATPAASAPGRRAGLTLKLHRVSAASAASGILPSRPQRVKGGPEKCS

SEQ ID NO: 406931 - protein, 341 aa, unidentified
MQEKDLYCATDLHSNNNYLAIIDRSGHRVFEKRLKNDMSAVLSALAPFKERITAVAVESTFNWYWLVDGLEDAGYAVRLVNTSAVQQYQGLKYSDDRHDAFWLAHLMQLGILPTGHIHPREHRALRDLVRKRMLLVQQRTANILSIQNLQQRNEGARMTTSEIKAQTVKTIADSVSDPNRAMALRSTQAIILALDEQISQIERAVMRQVRPDPTWTLLNTVWGIGPILATTIRLESGDLSRFGEVGNYVSYCRCVKSERTSNGKKKGEGNVKNGNPYLAWAFIEAAAFAIRNYDVANRYYHRKANKTNTILARKALAHKLARASFFVMRDQTPFVPQRLFG

SEQ ID NO: 406932 - protein, 388 aa, unidentified
MIYIGIDIAKLNHFAAAISSDGEILIEPFKFSNDYDGFYLLLSHLAPLDQNSIIIGLESTAHYGDNLVRFLISKGFKVCVLNPIQTSFMRKNNVRKTKTDKVDTFVIAKTLMMQDSLRFMALEDLDYIELKELGRFRQKLVKQRTRLKIQLTSYVDQAFPELQYFFKSGLHQNSVYAVLKEAPTPNAIASMHLTHLAHTLEVASHGHFGKDKARELRILAQKSVGVNDSSLSIQITHTIEQIELLDSQLFSTELEMANLVTCLHSVIMTIPGIGVVNGGMILGEIGDIHRFSNPKKLLAFAGLDPTVYQSGNFQAHRTRMSKRGSKVLRYALMNAAHNVVKNNATFKAYYDAKRAEGRTHYNALGHCAGKLVRVIWKILTDEVAFNLE

SEQ ID NO: 406933 - protein, 388 aa, unidentified
MYYVGIDIAKYKHDCYICTSEGVTVLESFSFDNSNTGFKELQSALDHLDHSQQIKIGLEATGIYGKNLKLFLSSIGYDFHEFNPLLVKRFHDSLSNRKTKTDKIDARIIALYLSTGASRTYLYSSYHTQALKQLSRTRNKLIRSRSDQYVIITNVLDVEFPEFKAFFHNKLSDTALFLLNKYKTVDRMKRLTHQDCVLLHNKSRRIPTSSFEELRDLAKHTIGHHFNYNDLILSSALQIVNTLERQIESIEKEILAIMEELRSPIDTIPGISTLSAATILGEFGDFSKFSNPKQLCAFCGVEPAIYQSGTSSHKGKMVKHGSSQLRYVLFNAVPYLVIHNITFREFFYKKLHEGKNYRVAQSHVVKKLLRVIYHLELTGESFDPTLLY

SEQ ID NO: 406934 - protein, 383 aa, unidentified
MKDGPAAALPALVPPRVDRLGACRRPIRREEAHVQYLGIDWGTRKAAWCALDEQGSLIEGAIAADEDGLARLVHQLGVEVHGCIEMMSGAVWVRDRLAACGWTIEVADARKVKAIAPLACKTDRVDARVLAELVRRDLVPTVWVPSLDERAIRERLRRRSHLVRLRTSAINRTFGLLTQWGLRRNLTALRKPDALDELAQHGVPAVWRQSVATLLGVIGDLDRQLDPLERELRPLARADERAVLLMTIPGVAELLGLTLASEIGDISRFPTARKLVGYSGLTPTIKQSGQSSRTGRLSKAGPNTLRWAAVEAAQQAWRPNNPWHRLYTDTKKRHGKSNPAKAAVARKILIAAWHVLSLQQPFKASATGGADPAPASSSIRLAA

SEQ ID NO: 406935 - protein, 346 aa, unidentified
MGVVCRIGLDIAKNYFQAHGVDKHGKEVFNKKLKRADVLSFFANLPSCLIGLEACGGAHHWARELAKLDAGHTVRLISPRHIKPFIINNKTDAADARAICEVVGRPSTRFVNVKTVEQQDMAGWHRIRERKVKERTALVNQIRALLHEQGIILPQGITHVRKQLPHFVEDLNNGLSLSARDYLFELYSELVDCDVMVAKYESRIKKFAATNENCKRLLEIPGVGPLTATAIVAHVGTAKHFKNGRAFASYMGLTPKEYSSGGKQKLLGITKRGNSHIRCLLVQGARVVTRYWLQKLAEQSEQRIRWVQELVARRGKHIAAVALANKTARIIWALLARGEEYRPLSA

SEQ ID NO: 406936 - protein, 345 aa, unidentified
MQTMYYIGLDVHKRTISYCVKDGSGTIHAEGTIAATRFDLDRWMKTLPQPWTAAMEATVFTGWIYDYLQPHAVALKVAHPLMLRAIAAAKKKNDRIDANKICDCLRCDFLPECYMASTAIRERRRTLRYRNLLVRQMVQMKNKISGLLMEAGVNYNKQRLHKAGYFRELLATNPDIDEGLGSLLRLCRETVVRLGKTESALVRSLERDSLLLERVERLMTIPAVGPITALTWALEVGDPKRFSSIKKAISYCGLCGAEKSSANTVQRTPLSKQRNKHLQTTLIEAAKMAPRNSPELAMLSDKEKQKGNANRATLAVARKLVAYLIAVDRGQRNFEVMKTSNCIAA

SEQ ID NO: 406937 - protein, 348 aa, unidentified
MRFYQPHTRFYCGVDLHARTMYVCIVDRQGRKLFHKGGRCDRKWFLRAIRPYRKSLTVAVECVSSWYWLADLCREEKIEFVLGHAQYMKAVHGGKAKNDRIDAEKIARLLQAGVLPMAYVYPRENRSLRDLLRRRLRFVRQRAALMVHIQDLNQQLNLPELPRDVAKVKSRRAGVAEHFDQQDVRLSAESDVALIAYYDQTVAKLEKYILAKAKGCHAKTLSVLMSVPGIGKITALTIALEVDTIERFQTRQQFCSYSRLVKCLRESAGKKQGEGGAKIGNPYLKWAFSEAAVHSARHSEGIAAYLAKLQRKHGKGRSKSFLAHKLGRTVYHMLKENKVFDEAKFLAH

SEQ ID NO: 406938 - protein, 387 aa, unidentified
MNQTITPKEAFEPTVSVGLDVHKKTIRLAALQGREWLLERTFATNNLGDLKKALSKLSKLGVVRACYEASGAGFRLQRQLTEWGIHCQVIAPSMIPKKPGEKKKCDRLDARMLAEYFDRNLLTVIHIPTAEEEADRSLVRCRFAFRKEVVRGKHRVVKFLDLHGRHFSGSAWSQKHREWLEQQEFATESDRLVFRSYLDHLRLTEAQLREVDGYILSLSKTVKYKDQVQVLCAFPGVSTLTAMVFLTELGDLNRFPSPQKLMAYLGLVPGVHQSGESTRRTGITKAGNARLRHVLVQASWKYRRPRFPYKGTKASRKLLPCWVLQQALKAHKRLHKRLVHLSNTRGQCIAIPAVARELACFLHYALQTLNRVGIQEQPCGLRGNSLE

SEQ ID NO: 406939 - protein, 320 aa, unidentified
MNVNIDVFKEKLDVCALFDGKTRKKIVDNSVSGFKSLRNWISKNNIDDPHFCMESTGCYSEGVAEFFHKLEFKVSVVNPLQIKAFRNTKLIRQKTDSVDAQIIAEFCLQNDPDPWKPRSPEKKELHNINVRISALKTEVNRASNALENKNLSKVILKSIHDEIKFLKKQIVLLEDEAQKIINSNQNLKEQFDRITEIKGVGEKLALAIIADMPDVSNFQKSGQFSAFAGVSPSHFQSGSSVRGKSHISRLGSKSIRKVLYMSALVVKNHNSHFQKFVRKLQKKSKAPKVIIVAIMRKLMCILFGMLKNSSNFDPKLAFHN

SEQ ID NO: 406940 - protein, 352 aa, unidentified
MKKTLFVGIDFAKANFVASVLLGEDPDPVCLPKSFSNDDKGAKALISWIVKLLPETCSLSDVLVCGEHTGSYSLLLPRRLFDAGIDCWLENAVCIKNGSGRIVREKSDSADATMIAEYARTFYQKRVRLFVPECPVLSELRECNDIRQRLVKEQAGLKCKKHDAEVRLKAKPGSKAIMMNIKILEKQLAYIKEQINKVDRQMYILIRSEKKLSRIYDIIVSIKGVGPVTAIALIVLTSGFTTFFSKRSLACFLGIAPFRSESGTSIQHGSHRSRQADSYYSGLLYMVAVSAMSWSPEIALYKERLLKKGKPRLVIINNIKNKLITIIWAMVKNDTLYDPDHHLKVAQQYQTA

SEQ ID NO: 406941 - protein, 465 aa, unidentified
MKSKTAKKKKQSKKVILDATWQPINLHAAGVDIGSREHWACVPPEAAARNVRKFGTFTADLEAMADWFQACGVTSVAMEATGVYWLALFQILERRGLEVILVNARQTKNVAGRKSDVLDCQWIQRLHTYGLLQGSFRPEDAYCVLRTYLRYRDELVSARSTQCQHMQKALLQMNLQLPQVLSDVTGVSGLAIIEAILQGQRDPAVLATLVHRNVRASAATIQAALKGDYREEHLFVLRQAYELYHTYETKINACDEQLVREIASLPAKVDPVLQPLPPRKPGRQPGLDKLAGVDLRPELYEKFGVDLTGIEGIGVLTGLVLLTEVGPNVSRFRTEKHFCSWLGLCPDNRISGGKVLSSRTRRVVNRATDALRLAASTLERSQSALGGFARRMKARLGAAEGITATAHKLARIIYRLVKHGETYVRQGLEDYEKKFQVRKVNALKKTAKIMGFELVQIQPLPIGVS

SEQ ID NO: 406942 - protein, 374 aa, unidentified
MDAALLWSEEGEMPAKRKVVDPLEPERHRCARVEMSSNHSRDRGSAMNITTYALDLAKQVFQVHWVEPDTGEIRRKALLRAEVNAFFAQRPPGVVAMEACGSAHHWGRVLRGLGHEVRLVAAQFVRPFVKTNKTDAADAEAIWEASQRPGMRYVALKSEEQPAVLSLHRMRQQCIKVRTMQAHQVRGLLYEFGAVVPKGWRALLAQAVPLLADETRCAVPELVRRQLLTQLEGLRALTRRVTELERQIGSWQRGERECQRIAAVPGVGKLTATAVIATVGDARAYRSGREFAAWLGIVPRQSGTGGRIKLLGISKRGDPYLRTLLIHGARTVLNHQSRADRQLDPWLKGLISRRPKNVVIVAHDLGATGSWSRV

SEQ ID NO: 406943 - protein, 370 aa, unidentified
MPKCTPLFVGLDVHKETISVAYAAGGVAEPPQFVGQIGTRQSDVDKLVRRLQTRSSRLVFAYEAGPSGYVLHRHLTGKGLDCRVVAPSLIPKKPGDRVKNDRRDAVELARLLRSGDLTGVYVPSVDDEAVRDVCRARDATRITLKAAKLRLKAFLLRLGFNYVGRADWNDAHRRYLAQVVCPTPAQQIVFQESLRAVDEQVERLARLEDQLRELAPSWRLYPVVEALQALRGVQWIVALTVVAELGDLTRFDNPRQLAAFVGLTPSEYSTGSSRRQGGITKTGNPRARRVLVEGAWAYRYPAKISAHIQKRIDKLPKVAQDIGWKAQLRLCKRYRRLIGRGKHANIVTTAIARELLAFMWAIAKEVPITA

SEQ ID NO: 406944 - protein, 333 aa, unidentified
MYYSGIDLHSDNSYITTIDDNGAIVKQQRLDNIDDCVISYFHSLPGTHQAVVESTTGWYWLNDLLNDHGIDLVLAHAKYLKAISYAKVKTDKVDSQTLAVLLRQGLIPRAHKISRELRGLRDTMRIRLRLVQQRSDTLRRLKSIAAKFNGAVPNDYRFQLAVLEHTRDSLSEQILVLEKSLHPVLIPNDDIQRLLYIPGIGKLSAFTIYLEIDGIERFDSDKQFVSYCRLVPAADNSNRTVHHRSSKDGNKYLKIAFSDAAVHAIQYYPEYKRFFQKRAKRSGEAIARTCVAKELAKIVYYILKNKSHYKGLKGQPISRQKSAQWPRVQSPAA

SEQ ID NO: 406945 - protein, 427 aa, unidentified
MAATPTVELRVSVDVGARQHHVAIGLSSGAVLEEFAIAHQPEGFAHFFARVETHHQHYPGPVAVAMEGYNGYARPLDRLVQARGYRLYNINNLKLARFKEIFPGAAKTDRLDARKGLELFQLREHLPLAKAVLQEVGVVPAANARLKRLTRRRRRLVNERVRVLNTLQADLQAVCPGLLDITREVGNQWFLHLLVSAATLPQLTRLRQATILNIPCVGRTYARVIQDWQPRAQWSSEVEWVGAMIQEDAQRVLDLDMQITALETTMHHVAQESTIATTVASIPGFGPICTAELAGEIGTVTRFQQESSLALYLGMATLDNSSGTRHGSKPPKQVNVRAKAAMMTAVDRHRKSVPESQQYYEKKRQAGKSHNQAIRALGRHLCRIIYKMLKDERPYEMRAEEGDTTGHVASRSSRVGQLRRAKTLAPA

SEQ ID NO: 406946 - protein, 342 aa, unidentified
MEISTIGFDLAKSVFQVHAVDAAGRVVLQRRLRRSAVKAFFAQLPPCLVAMEACGSAHYWGRELSGLGHRVKLLPPSDVAAYVRRNKTDAADAAAICEAATRPHLRGVPVKTPAEQAVAVQHRTRDLLVRQRTALINALRGHLSEFGIVAARGPGGLRTLVAALAEAFDDELPGLARAALQEIVAAIAALEERLTRIDRAIVAANKESETARRLLTVPAVGPIGASAFAGLVGDPSAFRSGRDFAAWLGLTPREHSSGGRQSRGRISKKGDRYLRRLLVIGATSVLRRPDSAGPALAAWIRQLLARKPARLVTVALANKIARIVWAVMARNDTFRRTAQAAA

SEQ ID NO: 406947 - protein, 343 aa, unidentified
MDYFAGLDVSVKDTSVCIVDDAGKIVREVKVASEPDALLQVLRNPAYCFKRIGLEAGPLSQWLFSALGGANLPVICGETRHMRAVLKAQINKTDRNDARGIAQMMRVGLYRPVHVKTLRSQKLRMLLTHRKLLQSKAIAIENDLRGTLRNFGLKVGIVGRTKFEARIEELVEHVPDLAVLVEPLLVVRRVLREQIAILHRRLLTIVRDDEVCRRLMTIPGVGSVVALTYRATVDVPARFRRSKSVGAVFGLTCSRDQSGERDRPGAISRCGDEMMRSMLYEAAQSMLVRSTRWSWLKAWAMQIAKRRGMKRAIVALARRLAVVMHRLWVDGTEFRWTREAAAV

SEQ ID NO: 406948 - protein, 339 aa, unidentified
MKYTPVGVDIAKHLMQVHFIDEHTGEVIGKQIKRHALLEYFSNREPFLIGMEACGGSQYWARELEKLGHKVRLLQGKFVKAFVMGNKNDVMDARAIWMAVQQPAKAVAVKTEEQQAVLSLHKMRRQLVKFRTAQINALHGLLLEFGETVRKGRASLDKAMPGVLERLKEKLPPFLIYQIEDQHRRLSDLDMQVDGIEKQLAAWAKQNEACQRLMDIPGVGPLVATAAVAIMGDAGTFRSGREFAAYIGLVPKQTGTGGKVRLLGISKRGDAYMRTLFIHGARAATLLTKEPNPWVAELMKRRPTSVAVVGMANKIARTVWALVAHNRTYDQKHVSVRPF

SEQ ID NO: 406949 - protein, 390 aa, unidentified
MMLPNGDKHSNFSVASSHEGSIQLVKRIYSALTSHSLDTVLIGLEATSVYGDNLVYFLREDATLAPFNSRIHVINPKQVKRFHDAYNDLPKNDYVDSFVIADCLRFGRINKEVYSGDYRYQALRNLTRARFFTVQNLIKEKQRFMNVLFKKYSTMTQEKVFSNTFSATALAVYEEFDSAEALANMDLHELTDFIIEKGKNRFQNPDAVAKAIQKAARSSYRLPKTVNDSVNQVFSISITSMKALESQIKEFDKAIKAQTELLPNVLISIPGICPVYSAGIMAEIGDINRFDNQAALAKYAGLAWKQYQSGGFEAEVTRLIPSGNRFLKYYLCEAAFSLVRCDKEYSDFYHLKYKEVNRCQHKRALALTARKFVCLVFRLLKDNRLYCPAK

SEQ ID NO: 406950 - protein, 385 aa, unidentified
MQANTTKAPAAIRVDLAAIFVSLELSRSKWLVTSLSPGGGERMSRHLVSGGDIPGLLDHFAELQRKAEVRTGQSFRVISIQEAGLDGFWIHRVLEREGIESYVVDPASIATSRRRRRAKTDRIDGEALVRSLLAYSRGEPRVCAMLRVPTPEEEDRRRLVRERKALTNERIRHVNRIKGLLFSQGVSGYEPLKGDRRKCLDALITGDGRPLPPALMAQISRELDRIELLIQQIKDVEEARDALLVAADEPTPALLLSLKGIGPEFAAVLWSEGLSRKFDNRRQVAAYAGLVPTPWQSGQINCEQGVSKSGNPRLRSTLVQVAWLWVRHQPNSALSQWFRARVIQNGGRYKKTAIIALARKLLVALWKYVNAGVVIEGALLTKPSA

SEQ ID NO: 406951 - protein, 344 aa, unidentified
MDVLYQSCAGIDVHQANIVVCILHGPLTSTRPKREMATFDTTTKGLRACHDFLSQFHVEAVGMESTGVYWRPVWHALCDDFKLILAQPAHMKAIPGQKTDKKDAHWIAKLTRIGLLPRSFVPDEAIQELRELTRQRKHYVESRNRETNRIHKILQSGGIKLTTYIEDIMGLSGRNLLQLLVDGTPITPRIVHQSVYTSLKKKVPQLLEALDGYFSDHHRFMLKQSLEIYDFYQKQIELLEERMNVYLSQYENHVEILDSIPGIDVITASVIISEVGVDMSQFPTAGHLASWAGLCPGNNESAGKKRSTKIRHGNSYLKKCLCQAAFAIKKQKGSPLANVIKLSI

SEQ ID NO: 406952 - protein, 476 aa, unidentified
MARVVESLDVEDVLLLSLTGLVSQNSEEDVVVQGSGLSRGDRRRNARLARLRELVPVGHAIVAIDLADRKQAVAVCNHDSQVLARKTVRERAWDMGPVLDWALGAARKAGFAGVTVACEPTGHRWMVLNQLASERDMTLVCVNPMLVGKAREAEDYTRDKSDDKDAMLIARLTAQLHCYVPERADETWARLRQQGARRSRLVTESTACMQQIRDLLECAWPGVLEAAASPFESVNWCAAVAVALERCAGRPERLARWGLPRFEAAVRRELPRWGGKRCRRSIIEAVFVALVDRRGVLAQRPGMLERARWVLGDWRAATARLTQVQACMVAVLDELDLTAYVTSIPGLSTVGAAAILAETGDPTRFDSPRSLVKHAGLCPRDNASGTFAGRARISRRGRPGLRLAAWRAVWGALLHNPVMAERYRNLTTREANPLSDGQARAALAAALLRWIHVVVTNRVHWDAVRAGAEVVPLAAA

SEQ ID NO: 406953 - protein, 345 aa, unidentified
MTQYKRVGIDTSKAVFTLHGIDQHDRPVLRINLRRAQMIPFFKRLPPTVIALEACGGSHYWARELTGSGHTVRLIPPQYVKPYVKRGKNDRNDAEAICEAAGRPGMHCVPAKSVAQQAQGMVLKVRETLIGQRIALINTVRGHAAEFGIIAGKGTGQIMPLLSAIEQDTAIPSEAAEMFKLLGQQIAGLDARIKEVDTKLNAAHKASELSQRLVTIPGVGPITALTMAVEIDPAMFEPGRHLAAWAGLTPKERSTGGKQRMGGISRAGNERLRVLLVSGATSVINVARRPGSHQMTDWLRALLLRKPRKLAAVALANKIARTAWAMMKSGETYRRPSATTDAVAA

SEQ ID NO: 406954 - protein, 407 aa, unidentified
MAITCGIDWAESHHDVALMDDRGSIVARARIATGLSGFGELMSLLAEHCDDPRQVPVAIETDKSLIVVALQAAGLVVHAINPRAVARYRERHGQSGKKSDPGDAALLADVLRTDLHQHRPLPQVSEGGRAVKALARQHQEAIWAVHQTTSRLRSVLLEFYPQALHAFPNLKHKAALSILAAASTPELGTKMTARRVVALLHRCGRRNDESLVEQILADLRTPAIRQPAAVEAALGLAVAGLLGIITAMHASIAQLEDAMAAEFDRHPKSGVLRSAPGLGPVLGARILAEVGDDPNRFATADGLRAFAGTAPVTRASGRSRHVAARRVRNKRLADACHWWAFATLTKSPGAREFYDRRRAAGDHHNAALRNLANKLLGRLWWCLQHDQEWDDEAAWPARETAPAALAA

SEQ ID NO: 406955 - protein, 343 aa, unidentified
MSQQTIIGIDLAKHVFQVCMVTPTGTIKTNTTVARGKLLALIARPPPALIFMEACGGAHDWARRFRAVGHEVRLLAPQYVTPFRRGQKNDPNDALALTEAGQRPHIPTVPIKTVEQQDLQALHRVRERLVKHRTAVVNQARGLLLEYGIVIPQGIARLRKRLPRVLEEADNGLSFLMRDLLQRLQSELSALDTRITDITGQLARLSHELEACQRLQEMEGIGPLSATALVAALGHGHDFHDGWQVAAWLGLVPRPHSSGGTTRLGGITKGGNSYVRRLLIHGARSVISHVRDKPDAKSAWIRQLVTRIGVNKACVAVANKMARVAWALLHTGDHYRKPMVLLA

SEQ ID NO: 406956 - protein, 463 aa, unidentified
MEKNRNSEGSRVNRRQMGGLPVIRPQVAGMDIGSERHWVCAPMVDGSGREIADFGATTPELMRMAEWLKQRRVESVAMESTGVYWIAPHEILEGEGFDVLLVDTRQLARVPGRDKKTDPTDCEWIQRLHGCGLLRGAFRPQESICMLRTLVRDKANLVAECSDWVRRMQKSLDQMNVRVHRAVSTIEGATGMAIVRAIVAGERDPKRLAKLRDPHCRKSEEEIAEELSGHWREDHLFSLQQALKMYDAIQERIAAYEEEILRRLCEMEREAQRGMTAPPLRNANKARIIRNRGQEAKRQALYRMSGADVTQIDAIGVEAVEVVISEYGPDLSRFPSEKEFFSHATLAPRVPKSGGKPVKKKKRNSASTRVANVLRMAALSLRNSNTALGAYYRHTANRAGADVAVFASARKIATLIYRLLRWGQPYIDEGAEAYEKRYQQQRVKSLKSKAKQLGYEMIPLTAP

SEQ ID NO: 406957 - protein, 337 aa, unidentified
MHLQGKAEGATPSESFQILTQGIHMYKYIGIDVSKATLDVYDGKKSYKVNNETIGFKEIEKLSTKGKELCFIFEPTGIYSHTIILYCQKHKIKAIIVGSKEARDYARSIKQRSKTDKIDAKVLYRYHTQIEPEHIKVPFLDTHMRKVTQRRNVYEKYQKIILQLNNLIEATDKADKVLLNSLKKQISSLEKSSEKLLAGIEKLLLENVEHKEAFTHLQTIPGIAKKSALVILMEFLRYPEAKSNEMVALMGLDPVLKDSGVFKGKSRISKQGGKYFREKLYMSTVVAIQYNDRLKCFYERLVQNGKPKKLALIAAMRKLLRIAFAMIKNNEPYRALV

SEQ ID NO: 406958 - protein, 312 aa, unidentified
MTHACAAGVDVGRDWLDVGLAPSGKTFRIANAPAGIATLVARLRREGAGKVVLESIGSYGARLVRGLAQAGFEVGVVDPKRIAALRTAEGRRAKTDRLDAGLIARFALLMQDAARPVPSAKAFEIRALSTRRRQLVEMAAMEKTRLKQTLDEAVADSCRQMIALLSQERVRIEAQLQEELLAAQDGPARATLLQTIPGVGAAVSMTLLADLPELGSLDRKAIASLAGLAPHPNQSGTRTGHAHIGGGRPCVRAALYMAALSAARNDKGFKREYLALRAAGKPAKVALVAIARKIVIAANGMLKSGQPWQKPA

SEQ ID NO: 406959 - protein, 437 aa, unidentified
MPTKPITIMHDHAAGIDIGSDEIFVSVDGDTVKCFRTFTRSYRELLEYLRQHGITTVCMEATGVYWIPLYDLLEAAKIEVYVVNGAHVKSLSHRKSDVRDCRWLQQLHSHGLLRASFIAPEPIRQLRTYVRLRDDHIELAAMHIQHMQKAFDQMNIRLHRVISSLTGASGLRVIEAILNGERRPEALLALCERSIRDRKGEDVVASLEGTYRPDQLFALRQAYECWKFYQEQMRICEKQIEALLQEMTAELPEPPNIGKARKTRHHEPEIANLHTMMLKLTGGNDATKISGIVDQGVMRTVAETGVDMNKWPTDKHFTSWMHLAPNPRESGHMKKQARGVHQTRAGQLFCEMAQAVANGKHLGWVGFYRRVRARRGPKVAIKALARKIAVMYYHVLKDGVEYVEAGLEAYEEQQLVSRRRYLERLARKLNMQVVPMA

SEQ ID NO: 406960 - protein, 277 aa, unidentified
MTKRSVTMLGIDLGKSSCSLVGLDAAGAVVLRRWARRETIIDLSAKLPPCVVAMEACYGAHHLGRLLAAQGHTIRLMSPEYVRPYVKAQKNDDRDGAIAEAATRPTMRFVALKSEAQLDMQTLHRVRSRLVGMRTMLVNQLRALLLERGLAFAQGRRKFEAEIDALLVEAGAQIGERMRVLVGEIRDEWVSLDRRITALDREFVEQARVDEAARRLVSIPGVGPMTATALRAAVDDGSAFARARDLPAWLGLVPRQHSIRPGRARSYSAGRRRAALI

SEQ ID NO: 406961 - protein, 427 aa, unidentified
MKKDISKTTKTQKQGNATREQLREKKRNLAGLEAAKKRTANRKTRRSEVQQEEVKEGQGNDASQAAEEERAVAALKVGEGKGYTIGIDLGDKRSRYCILDKEGKIVRESSVATRPAALKTVFGKLAGCRIAIEVGTHSPWVSRTLGALGHEVIVANARQLPLIYGSRRKNDKLDAEKLARLARLDATLLKGIRHRGEEGQGELMLIRSRAQLVETRTGLMNMVRGLVKSRGERLAGCTSEGFGVELLKGLDEAAVRALKPVVVLIEQMTETIKGYDKQVEEMGKKHAEIARLDQVSGVGPLIAATYILTIEDPERFGRSRDVGGYLGLVPGQSDSGESQPQKRITKAGDGYLRYLLVQGAHYILGPHGPDTDLRRWGLKLGSSGGDRGKKRAVVAVARKLAILLLVLWKTGASYEPLRNSNKQKLVA

SEQ ID NO: 406962 - protein, 461 aa, unidentified
MAKKAKKVKTAKGAELRIVNPDAAGIDIADGIMQVCIPADRSKDNNRAFGAYTSDLHAISAWLRECGIKTVAMESTGVYWIPLFCRLQEDGLDVVLTNARDVKNITERKTDESDAEWLMLLHQYGLLKASFQPHNDAKRMRTLTRHRDTLSREASSMVLRMQKAMQQMNIKLTLVLSDITGKSGIRIIEAILAGERDPKRLAELADIQCKTPKEEITKALEGNWEEDLMFVLRQNYDTFKHYCTQLGECDAELEKLMENYRAEVAKVEDTSYSPAKKRRDYKKTRHTVSFDVERKAYEMWGVNVFEIPGISHLTALELMSELGHDFTRKFPSSKQFCCWCNISPNTKISGGKRISSHVPHRRNNVGLIFRSIASSLANAKNQLGNFYRRIRSRAGGKAAVIATAHKVAEIFFAMVANQTTYNPERVGIDEKVLLEKRITRYKRELERITGTHIEIGNACVP

SEQ ID NO: 406963 - protein, 362 aa, unidentified
MRIIGCDFHTRQQTLAMLDTETGELVKMTLQHEGNNVREFYSALPRPVCVGIEATGSMQWFVNLMEELGIECQVGNPAVIRAAEPRKQKHDRRDAGLILKLLMEDRFPAIWLPSKELQDLRALVRHRHQWVRMRTRIQNALQSIALANGLRRGPALWSQAGQHMIASLPLAPHAAYRRSELQAMYEKFEAEIEKLNQRVEEQACERAGARLLMTHPGVGPVTALATEVFLGDPARFADSKALASYVGMIPREYSSGGRQRLGGLSKQGNPLLRFLWGEAGAHAVRRDPALQRFYRRKLVQKGLGKARVAVARKLGIRLWIMLREQMEYNEFCRRGQKQQNSGAACAGRPGTRNGATSHRPVD

SEQ ID NO: 406964 - protein, 347 aa, unidentified
MNFYNHLHPYYCGIDLHARSLYVYIIDQDGNTRVHREIPANPVKLRTLLEPYIGNIVAGVECMHCWYWVSDFCEDIGVDFILGHALYMKAIHGGKAKNDRIDSFKIANLMRGGNFPLAYVYPKEMRATRDLLRRRMKLVRHGANMKAHVANTTSQYNLPPNKVNLKNLCAREQLRSTFPDPVVQRNIDLDMAVLECYAEELSKLEWYLEQQAKQHNPVHLHILKSISGIGRILALTIIYEVGDIRRFESVQKFASYARLVKCKAESAGKSYGTQGNKIGNAHLKWAFSEAAVLYLRGNKKAQLYLQKLQKRMSKAKALSVLAHKLGRCVYFMLKNEKVFDESRFITG

SEQ ID NO: 406965 - protein, 400 aa, unidentified
MMTPDDIDVWVGLDVGKSAHHAHALDHDGNTLYDKPLKQDEKAIRTMLGKLSKHGRVLLVVDQPNPIGSLPLTVARNMGIAVAYLPGTAMRRTAQLLPGDAKTDRRDAHVIAWAALKLPETLRDAGPDDETLAALKLLAGHDEDLAHESTRHVNRLRSLLLQIHPAFERALKGERITRDATLALLERYGGPMGVKRAGIEDVKDWAKSNGLRAGRIIDDMFKAIGEQTVTVPGTLMAETIIPSIAHDIKTIRDRRREVDRQVEKLLEDHPLLTVLTSMPGIGVRTASNILLGIGGDIANFKSSAHLAAYAGISPVTGQSGTSIKGERPSRRGNKRLKNALWQTAFVASTKHPPSVAYYKRKREQGKHHNAAIICLARRRCDVIYSMLKNGTLYQEPALVA

SEQ ID NO: 406966 - protein, 357 aa, unidentified
MTQVKKLDFGGTTIFCGIDTHKKSWRVNIQDSEFELEDFSQNADAVLLHKYLTRKYPGADFKLCYEAGFSGFAAQRWLSEQGLNCWVVNAADVATSDKEKRQKNDKIDARKLCEHLQSKKMKGIYIPSVQWEHGRSLVRARAKIVSNQTRCKNRIWQLLYFSGLTLPKGYEAAQYWSSRFIKELQTIDCSSEELKTTLGLYIKDYQQTKTLLLEATRAIRKLCKKPEYEKDITLLRSIPGIGEINAAVMLFELQDVSRFKHFDHLCSYAGLVPNTSDSGETKTTKGITNRSNYYLRTALVESSWSVIRKDPALLMKYKTYCRKMEKNKAIIRVAKHLLSRINYVLKNKKEYVTAVVS

SEQ ID NO: 406967 - protein, 349 aa, unidentified
MAIIGGLDVHRSQITYDWIDTDTGQRQRGRLAPANREHLRVWLEQFAGRPAAFALEGCTGWRYVVEELKRAGVDAHLAEPADTSAARGPKRRAKTDQADARHLRELLATGRLPESWIPPAHVLEVRTLVRCYKALADEHTAWLQRVHATLFHHGVPAERNLLAPDRRERLERGSGLSPAARQLVTVALRTLDQLDAELDLLRAELTRFARRQPGCRALDELYGIGPVTAVAIWAELGDVGRFSSSRQAVRHTGLDVTVYSSDGKRTPGHLARQGPPVLRWALFEAATCAARASSPDHAYYTQVKERLGGNRATLAVARKLTRRCYHTLGALGEQAYAPPSDTPDLEQVA

SEQ ID NO: 406968 - protein, 350 aa, unidentified
MNITHYIGFDVHKKWIFYCVKTVAGLVIAAGKIAAQRPAVRAWAREQAQPWMGGLEATLFSGWIYDELKPYATELKVAHPLMLKAIGASKKKNDRLDARMIADLLRCDLFPECYMAPSWLRELRRMLRYRNLMVAQVTRLKNRIAGLLMEEGVGYDARRLHGQRYFSELLDSLETPASVLQLLRLSRASLEMFQTVERRLLHELEHNSQLRARVELLRTIPGVGLVLALTWALEIGEVQRFGSIRRALSYCGLTSAQRESACKPQRGPISKQRNPQLQTILIEAAKLAPRWNPELAALHERELARGNRNRATLAVARKLVAYLMAVDRSGKAFEPRPTAVESTAVVAAEN

SEQ ID NO: 406969 - protein, 426 aa, unidentified
MRVMYERVAGIDVHKDMIKVGVRTPGDRAWTRASEVLEYRTFYGVLLAMAADLRKRGVTHVVMEASGVYTEPVYYALADQGFEQVAVINPAHAKALKGHKTDAKDCLRLAELFECGLLRGSYIPSQELKDLRDLTRYRAKTVQARTSEIQRLAKALESAGIKLDSVVSDLTGKSATLMVEALIDGERRGQILADLAMGRMRTPRKLADLSQALTGRFTEHHAALCRLHRDRIMLFNAAVDDLEQKIAVKAAPCQRELELLKSVDGFGDAVAQAWLAEIGPAPHEYFASHEKLASWVTLCPGNYISAGKRAHGRTGSAGAYIKPMLVQAAWAAIRHEGRLQARYHKLVRRFGGPKNRGAVKKAILAIAHTLLKIAYQVLKSGQPYQDLGADFYTRRESPEQRRAYLLRQLEKLSPGCTITITPAEAA

SEQ ID NO: 406970 - protein, 459 aa, unidentified
MELLHPRWAGIDISKRDGKVCVRIAGSGRRRAAETVTTWSSMTNQVLALRDHLTRERVTCVVLEAASDYWKPFYYLLEDASFEVMLVNPRHVKNLPGRKDVSDAAWLAQLGAHGLVRASFVPPEPIRHLRDLTRTRSAITRERAREVQRLEKLLEDSGIKLSSVASEIMGVSGRAMLEELIDGQRDPAQLAELAKRRLRSKIPALTEALTGRFSAHHAFLARMHLDLIDKHTEAIEQLTTRIEVVIEPFRWFRELVCTIPGISTGVADVLTAETGADMSRFPTPGHLASWAGTCPGSNESAGRVKSTKTRPANPYLKAALGTAALSVSQSKGTYLAARYRRIASRRAPIKAVVAIEHTMLTTIWHMAATGALYDDPGGDFYPAPRSQDADRKAATKTTTTDDQPARSFTSLLEHLATLTRNDLRVAGHDQSGFDLLAIPTPTGRRAFELLHAPIPLTLK

SEQ ID NO: 406971 - protein, 401 aa, unidentified
MSATHNTNSTASSAPVLYLALDLGASNWKLAFSVGLGQKPRIKTITARSTLGLVFEIRAAKKRFGLPEDGPVVCCYEAGRDGFWLHRFLLAEGIQNQVVDSSSIEVNRRRRRAKSDSLDAVKLVEMLIRWYNGERKVWSTVHVPTVEQEDQRQLHREMLKLKAERTAQGNSIKGLLAGLGLCVIVDETLPTQMQNLRQWDGAKLPPLLHQRLLREFQRWQLIDCQIRELEAERMAKIRDDKTPHVEKVRRLLNLKGIGDNGAWLLVYEFFAWRMIKNRRELASLAGLTPTPYASGESQREQGISKSGNRRVRFMITELAWGWLRYQPESELSQWYMRRFGQGNKRLRKVGIIALARKLLIALWKYVEGGEAPAGAEELGWDNKPRFRAVKSRRKQEVLQTG

SEQ ID NO: 406972 - protein, 407 aa, unidentified
MISIGIDIAKEKFTVCALEQGSKIIWKPFDVHLKKTKVEEFLKKLDTLNEEVKIIMEATGKYHLPILYELKDKGYFVTVVNPLKMKQFCRVLNFRKAKNDNIDAIQIAEYGLMYWKELQEHKIDSENFRVLKELNRSYQHYMDLRINQMNFIDQTISQTFPGIKKLIPHASGDFSKDKLLDFLEIWWHKNLVLEKPEEKFIEDFKNWAKEKRYHPNADKAKSIHKLAEESISTQPSSSSYIKTSIQEGIELIKHINQILHTILSQMIEIAEPLEEYQEAKKFSGISDKLAVQITAEFGDLSKFKNKKSLISFVGIDSPPYESGNFKADQRKITKRGNAILRKVGYQAMKCMMSAKDPENEIYLYMVKKENDGKAKKVCKFAGLNKFLRIYYAKVMASKQEKMLLKVA

SEQ ID NO: 406973 - protein, 348 aa, unidentified
MPRTPPKLVQLRGPRARIRKAEPVGNLSKGDGTPMNESVAVWIGIDVSKDTLEGAARPSGERWSLPNADPAFADLVERLRALAPSGIVIEATGGLEVPVVSALGLASLPVIVVNPRQVRDFAKATGKLAKTDRIDAALLALFGERLQPVPRPLRDDETRRLEALVVRRRQLVEMVTAEQHRHSSAPSHAVRQRIRKHIAWLQGELATIDQDLDSGVRHSPLWRAKDDLLRSVPGVGRVLSLSVLTQLPELGTLNRKQIAALVGVAPLNRDSGTLRGRRCIWGGRAPLRAVLYMAALVATRRNPRLAAFYQRLLAAGKPKKVALVACMRKLLTILNAMLATNTRWHATT

SEQ ID NO: 406974 - protein, 367 aa, unidentified
MKKISTVTTKKVEKNASQKLTIGLDLGDRFSWYCVLDEAGEVVLEQKVATTPKAMKEVFGGMPRSRMALETGTHSPWVSRLLSELGHEVIVAHARNVRLIGESRKKDDRLDARMLARLVRIDPQLLAPVKHRSAQAQADLMAIRARAGLVRARTSLINTARGVTKSYGERLRGCNPRNMNAEKAQELSPELQAALGPLLGEIESLSERIGEYSERIEEIAKRGYPEVGGLKQVKGVGTLIALTYVLTLEDAHRFGKSRDVGCYVGLQPGRRNSGQSEPQLHISKEGDPYLRTLLVQGAHHILGPFGADSDLRRWGLKLAERGGKNGKKRAVIAVARKLAVLLHRLWVSGEAYEPLRNQREVALPAAA

SEQ ID NO: 406975 - protein, 408 aa, unidentified
MNPLYVGIDVSSKNNVIYLMLPNGDKHSSFSLANSHDGSTQLVKRIFTAMTSNNIDSVLIGLEATSVYGDNLVYFLKEDTTLASFDRKIHVLNPKQVNKFKESYNDLPKNDYVDAFVIADCLRFGRINKEVYMDDYRYKALQNLTRARYFAVTNLTKEKQRFINVLFKKYSTMTQEKVFSDTFSTTALAVYEKFESAETLAKMDLQELTAFIMEKGKNRFPDPDAVAKALQKAARSSYRLPKTVNDSVNQVLAISITSIRALESQIKAFDKAITKQMELLPNVLISIPGIGPVLSAGIMAEIGDINRFQNQAALAKYAGLAWQQHQSGNFKAQTTRMIHSGNRFLKYYLCEAAFSLVRCDKEYSRFYRLKYKEVNRFQHKRALALTARKFVRLVFALLKDNRLYRPAE

SEQ ID NO: 406976 - protein, 446 aa, unidentified
MSLDCCYEHAGLCPGRGPSGPAPGGDGRLPEERRDAMEVMFDRVAGLDVGKETVAVCLRTPGPKGRRRAETRTFKTTTGSLQLMRDWLVEAGVSIAAMESTSVYWKPPFYCLEEVMEVWLLNAAHMKAVPGRKSDVRDAEWIAQLLEHGLLAPSFVPPPEIRRLRMLTRYRVQLMGDRRRDIVRLELMLEDASIKLSSVASSLKTVSARAMLTAMINGETDPLRLADLAKGRMRRKIPDLAQALTGHFDANHARLARSMLRQLDLVEQALAELDAVIVDACQPWAHQIELLQTIPGVGPKVAETIVAETGGDMTRFPTAAHLAAWAGLAPAMNESAGRQTPAGKRHGNKWLTAMLVEAAGSVGRMQGKNYLAAQHARLLKRRGMGRAQVAVAHSMLVAAYWMLKRDEPYHDLGADWHSRRSDEAHTRRLIAQLEHLGHTVIIDPAA

SEQ ID NO: 406977 - protein, 418 aa, unidentified
MTRKDDSKVIRIVHPICCGLDVHKESVSACVIFPDSTGEEQYEIKVFGTFTDDLTRLREWLLSHACPVVAMESTGIYWRPVHNVLEEAVQVVLVNARDMRNVSGRKTDIGDSRWIAGLLRHGLLKSSFIPPQTVRQWRDLTRLRKKYVQSAGDYRKRTHKLFESANIKIDSVVSDLFGVTGRNLMQLLVADRKLALADIQSCVRGKLRGKEVELFRAIQGFFTDHHRFVLKTILETINMLEAQIGTLDHEIRRAMKGHEALLDRMKAAPGISDISSCDILAEIGPTLDSFPTDTALVSWSGLCPGNNESAGKRKSGKSPVRKHHLKTIMLEVAWAAVKKKGSYFKDKYYRLKARRGAKKAIVAIAHRILLGIYHVIKDGATFRDLGEEYLSRRNKSRKLSHLHRQALALGFKLVPQTA

SEQ ID NO: 406978 - protein, 340 aa, unidentified
MAITTIGLDLAKSVFQAHGIDEAGQTVLVKRLHRKQMLPFFSKLPPCLIGVEACGTAHFWARTLAAMGHEVRLIPPSYVRAYVKRDKSDALDAEAICKAVQRPTMRFVPVKTVEQQSILMTHRTRSLLVRQRTMLANALRAHLAELGFVANPGIANLVKLAEQALAGQELLPSYARTALEMLVRQIMSISGEIAVLDQQLIAWHTEREASRRLTAIPGLGVITATAIAATVTDPDQFRSGRQFAAWLGLTPQQHSTGGRTRLGGISKQGDRYLRRLLVVGATAVMRHIKDKPTPMADWIRKLSEKKPFRLVSVALANKLARIAWVVLTRKEAYRPHQLAA

SEQ ID NO: 406979 - protein, 336 aa, unidentified
MNTNTLQSVQSNDTGLDNTVYFIGQDLHSNNVYVTVMVNQVREDGTSYGKVVTSRRITLRKGQKEYIDFMSRFCEGKQHIAVVESTYNVYWMNDLFEERGWNLLIADPSTVSRDKTKACNDKTDATFLADTLRNGSCHVTRLLPSEVRYPRDLVRTRQTLVQQRARAKTIIKNLWMNIKGYPLTTKEMNQFLDEYVVTHEVNEAFGGKYRSGPKARFYFEEIIFLTKEIEILEEEIKELVPLKGDVLRLMREMKGVGEVCARILITEIGDIRRFGSAGSFVSYCRLAPTAKLSNGKSKGMGNARNGNAYLSWCMTEVANLMVRYNEQARKCYERLR

SEQ ID NO: 406980 - protein, 370 aa, unidentified
MSVRRILAKTINTDLEYEAIGIDLAKNCVSAALLTTDGEVVCIDRLDYSELEKSAQALSSTTFAMEPCTEMNYLIQKLEAWGHRCLVIGGKNVQNYVENHFSGQKTDLNDAQALAFLAQDTQLRTIKAKDVEQQKYASLTTLREQYIKQYRQTIVSLKGICQAWGLNISKGISGKARLKDLIENHAAFPEELKESLVDMVTHAQTAQKALNKITKTLEELAKSDKVCQLIQTIPGLGSICSCRLRATVGDIKRFKSPKDFPAYYGLVPRSIATGHNERKGKITHRGDRTMRSLMVQAAGSLVNMATKGKLKSKQLTKWILKKQKEKMPWGKLVCAVAAKLLRIVRAVLISNKPYNSKIAGVAKCSLPKGS

SEQ ID NO: 406981 - protein, 309 aa, unidentified
MKEQLVYLGLDIAKSYLDAAIGNEKGHFSNDAAGHRELIKWIKQSKLAVQVICEPSGGYERTLVQALARAGLKISLVQANRVRQFARAAGILAKSDRIDAEVLCEFGKVMRPQTVTAATLEQEHLRELESQRRHLTHLLVMEQNRGARVSDPCVCRLNRSLVNHIKKQIERIDLLIKQHIEQSQELSAKAKKLTSISGVGARTAALLLAQLPELGQLNRREVAALVGVAPFNRDSGKMRGKRAIYGGRKRVRHGLYMAALVAARHNPILRQFYVRLRATGKPAKLALTATMRKLLIVLNSALKPDLNYA

SEQ ID NO: 406982 - protein, 343 aa, unidentified
MVAIGVDTHRASLAACAVDAAGRAVAERSFANSASGHRALLRWLRALPAPRCTGIEGSGGLGAALCARLLAAGEEVREVPSMLTCRERRRTGRAGKSDPADALAIARIMLREADLPRVRGPHDHRDLKLLVDYRDQLLAEQTRVRNRLHSDLQVLVPGYQGHVGEPIRASGLAAARQLLARRRGIAVELAEMRLARLEVLAAEISASKLRIEGLVAGEHPALTSICGVGALTAARLLGGTGDPRRFRSAAAFAMACGAAPIPASSGKTRRVRLNRRGNRQLNRALFTIAFTQVRGHEPARAYVEHKRAEGKSWKEAMRCLKRHLANVVYRAMLEDRRAQALTT

SEQ ID NO: 406983 - protein, 472 aa, unidentified
MSYRNIGIDLGVTAQHKVHVRDDQGQKVRSDLSIDTAKQAFDQTASHALYGAEPDTKLRWICEPTGMSWFPLACYVKPRGYELVRVKTQMSCDLRKFYNKHNHSDSLDAKALAQLPVVNQDALEDLLLPDKHTFALDRRNRQYKKLTQQIAGIKTRIRDLFNWLQPGLIKVFSDPYGTRARAYYRHFGNPFKVKELGLEKLTKFLADNGRQQMDRQLAQQVWQIALQACELYELADEYVDFDELQDEITVELDVLESLETTRLTVKKAIERLYDKVHPSKNIETIPGVGEKMGAALVAKIGDPHRFSSHTKLKGFTGIVPRLDDSGESSKKGLPISHEGPSDFRRDIYLVADVARQWDVEAAKIYYDCMMEKGHCHTQAVCAVASHWLGRILRVLKDGRPYEQRDLQGNAITKKDAKKYIKLHLTVPEEVRQRTRNKKRIHDKFMAKRNRGLKKNRRKHSLTHFNNISFDLN

SEQ ID NO: 406984 - protein, 318 aa, unidentified
MKKAFFCGVDVSKDKIDVCFLTSIMSEKAKFETLPNNYELIKVYFDSFKNDEILVVFEATSNYHLALQKALSDLSIRYCVTNPYKSSLFLKHLSTIKTDTSDSYGLAVYARTFKSEIAPDRYNAEYLEIKSYNSTLNLLQKINTQLKNFKSSQKTLNNKVIDDVIANLIKEIAKLQAMLQKLAFDLVKKAIPETEEIIKENKGFGIDLALNLFPQLHFNRDKSEKQFISFIGLSPRIFQSGSSVHKSQKINKMGNSNIRRILFMTALCAIRFNDKFKARYERLLANGKKKMTAIVAVMCAIVRYLKSLFPFNPEIKAI

SEQ ID NO: 406985 - protein, 456 aa, unidentified
MKRKKSKLGPKVPKLEALEQINFNAAGLDIGDEEIYAAVPEGRGEVSVRVFRTFTVDLYALADWLENCGVDTVAMESTGVYWIPIYDILETRGFEVYLVNARHIKNVSGRKTDILDCQWIQQLHTYGLLQASFRPAEEIRALRALVRHRENLIKSMTREIQHMQKALQQMNVKLTNVISDVTGVTGMLIIRDIVAGERDPRKLAQHRNEHCAKSEDEIAKSLQGHYKPEHVFELKQALAGYDFYQRQIKECDTEIKRRYTDLAPGNDGDAGSLPPPKRKRSKTSKNAPDFDLRLHLYRWAGVDLTQIDGPDVLTVQKVLTEIGVDMSPWPTVKHFTSWLGLCPHNDKTGGKVIKRSTKKTQNRAAAALRMAAQSLVHSKSALGNYHRRMRAKLGKPEAVTASAHKLARIIYAMLKNQTEYVDPGPDYYDEQARQRALLRLKRSAKTLGFEIVPSAP

SEQ ID NO: 406986 - protein, 321 aa, unidentified
MTYVGIDVSKATFVVAYSSAKGSETKTFKNTVKGIREFIQTISPKENHCVLEATGNYSMLLVYLLSKAGFVVSMENPLKIKNFARVMLSVVKTDEIDARLIALYGERMQPAPFKLRNDSILLLKQKRTVLRQLKKQLTANTNLEGSLKVLPFIDSKSKKVLEKTIKFLQKQIKEMEEELTSLAEIEYKKQMDLLTSIKGIGATLAAALIIATGGFTYFDNAKQLTRYLGLSPTYQQSGTSVNVKGHINRNGDAHLRSQLYIGAMASLRCNTECKACFERLRSNGKPGKVAIIAVANKLIRQAFAVVTQEKPYVDGYKSVKP

SEQ ID NO: 406987 - protein, 380 aa, unidentified
MTVLSVHSFRRGMSETAGKDNPMAKSKQTIPVVGGVDTHKDLHVAAVVDDYDQVLGTHSFATTRQGYKLMLAWMRSFGDLQRIGVECTGSYGAGLLRYMQVAGVDVLEVTAPDKLDRRRRGKNDDFDAQSAAHAAFAERRTVTPRSRDGMVESLRVLRVCRKTAVQARRVALQIIQTTIVCAPDRLRDLLRNMTRMQLIRTLAAWRPDLTGYRDVEEAYRIALKSLARRYLELHDEVADLDDMIDAIVTDLAPDLIACRGVGFNSAAQLLLTAGDNPERLKSEASFAALCGVSPVPASSGKTTRHRLNRGGDRAANSALHIIAIGRLRLDPKTKEYVARRTAQGHSKLEAIRCLKRYIAREVFNIIARRHKQINQAQIAA

SEQ ID NO: 406988 - protein, 345 aa, unidentified
MSIVGGLDIHRRQLTFDYLDTVTGQVARGQVAPADREHLRAWLARFTGRDGVAFAIEGCTGWRYVAAELAAAGAGVHLAEPAGTALARGRKRHAKTDKTDSRHLRGLLAEGRLPECWIPPEQVLEARALLESCHDLRREHTAWLQRIHSVFFHHGAPAMGEGILSSIGGPAAARTTAAAHLSPAGQQQVTIALAMMTCLEDQMHGLRHQLLDTARHLKGPRVLAAQLYGVGLLTALALTCWLGGAGRFSSARKAVRFAGLGITVSSSDRKGPPGRLSRQGPPVLRWALYEAGKARARASAPDHACYAQVKDRKTGKRAALSEARKIIRRACHILNDLGDDAFAAV

SEQ ID NO: 406989 - protein, 387 aa, unidentified
MPQPNDLSRSLVALDQNSTIIAVVELSQSSWLVGGVVPGIERQPRKKLEASPERLLALLHRWRDEAVRAGRTITRIALAFEAGRDGFWLARWLEAHGVEAHVIHASSVAVSREHRRAKTDRLDTELLKRGFLGWLRGERGHCSMARVPTIAEEDAKRPNRERDCLVGERTRIVNRIKSTLARLGIRNFKPTLRKAAERLATVHTPEGMPLPPNTLAELQRDMARLGFVVSQIKEIEDARQKRLEQQPETGPHAMVRLLARIVGVGIETADMLVHELLSRPMRDHRAVARYAGLTGAPDESGARRREQGLARAGNARVRRGMIQLAWRFLMFQKESALALWYRARTADSRIGTRKTMIVALARKLIIALWRFVTAGEPLEGVVLRPAS

SEQ ID NO: 406990 - protein, 425 aa, unidentified
MNNTQNKKIMQVTDDTLIVGVDIGSESHWARAILARGYEVSKKPFHFDNSEVGFEKFITWNYGLAADNNLKKIIIACEPTGHYWFNLYDFLKKYDVKLVLVAPQHVKHSKEMDDNTQRKDDRKDPIVIAKLVPEGRYMEPYIPEGIYAELRAAFNRRCDLSEALTRSSNRMTRWFDVYFPEYRTVFKGSDALSGYMVLKRAPLPADVLELGVKGICQIWREAKLRGAGEKRAQKLVEAATQSIGLKGGPAVRQELWQLIEERELLDKQYSDIMALIEEILKQIPGADRLLSVPGAGVVTVAGFLSEVGDINRFSDPKQIQKLAGLAVVENSSGKRKGLPGISRRGRSRLRWVLYLAAMNMVKNNKEMKTYHWYYTTRKKNPLKKIQSLMAIAGRIARIFYGILKNGTDYDPMIVMRDFNKEKATA

SEQ ID NO: 406991 - protein, 355 aa, unidentified
MDNKKYVGMDVHQATISVAVRDSAGKLVMESILETKASTILDFIRGQGGNLSVTFEEGTSAAWLYDLLKPHVAHLIVCDPRKNALLKVGNKNDRIDPRKLTDLLRAGLLSPVYHGESGVRTLQELARTYLTVTKDLTRVMNRLKGVYRSWAIPCAGQTVYAPRHRSAWLEKLVQPGVRRRAEQLYQQLDKLVEIRREARQELLRESRKHPAREFLSQIPRLGPIRVALLIALLQTPHRFRTKRQLWAYCGLALQTRSSGEYRYSGGQLQHSKRPPAIRGLNVNHNHDLKSLFKSTATQASGANDPWGDFYQNLLARGMKPAMARLTLARKMAAIVLRIWKKGEHFNPELLKRKSA

SEQ ID NO: 406992 - protein, 337 aa, unidentified
MKYCGIDLHSNNSVVVVSDEEDRMVLQKRLPNDLGQIRAALEPHREELAGVVIESTYNWYWLVDGLMDAGYRVHLAHPSAIKKYEGLKYSGDFADARYLGHLLRLGLLAEGYIYPRAERGARDLARKRMQLVRYRSAQILSIENILARQTGARMSTNAVKRLTAEQVEELGFMPDVALALEANRAVSQALGQQIETLEKRLKERVRLREEFKLLKTAPGIGEILATTIMLETGTLERFAKVGNFSSYCRCVDSLRESNDKKKGEGNAKNGNKYLAWAFVEAANFARRYCPPAKSFYERKKRKANAILATKALAHKLARACYHMLREQKPFDVSRCFG

SEQ ID NO: 406993 - protein, 335 aa, unidentified
MNQARMHVGVDVGKECLDICYPDGSKEHIGNTKRCRAKLIRKARAMSAIVSFEATGPYEENLADECLAAGVPAVRLDAWKTRKYAESQGMLEKTDAIDCEMIRDFAASLKPEQLRFVRPMSDGYRRLKRATSVRRNLIKAKTLVVNQLENILDKDVRASVSRVIDALERQIEKMDALCAEAIRSDAKMNALAVRFEQVVGVGPVLISTMLSSCPDIGSFTSKGIAKMAGVAPIENKSCTIRKKSKPRRGRRELRSALYMAAVSACHSNHLLETVYKRFTDRGMPRRVALIALARHIAILMNYIAKYPDFNPAADPKKAALLALPKRKPGRPRKNP

SEQ ID NO: 406994 - protein, 322 aa, unidentified
MAMLSFCGIDVSKDRLDVVVLPEQQCSSVRNDTAGWAELVEQLRGFSIATIGLEASGGYERGVLRALLAAGMSVRQINPFKLRQFAKASGVLAKNDRLDARMIASFVAIMPTRPAQRHAPAIEQLAEIVTLRRHLSDEKIAAENASRLLENAMLQRLSRRRIVRLAADIAQLDEHLVEIVAADAALAHRYRLLTSMPGVGPVLACTLIALLPELGQLSREKIAALVGVAPYDFDSGKLKGMRCIWGGRAPVRNVLYMAALNASNWNPALKAFHDRLAATGKKPKVVIVAVMRKMITALHAMLRHNTSWVDRCSDRHSVPTAR

SEQ ID NO: 406995 - protein, 372 aa, unidentified
MENIIYIGMDVHKESFSLCALHGTTGEIVGEARCASNVSLVKKFVEKLKTKYGEDIKIKAGYEAGCLGYSLHNLLEENGIDCDILAPTTMYSSSKNKMVKNDRFDAKMIALNLANGTYKEVYVPEEEDVAVKEYIRMLGDFKTSLKKIKQQIKAFLLRHGYIYEGKSSWTIAYMKWLKNLDLQGLFKETVAEYLLQYDVLVDKIERFSLRLEELSRTERYEEPVAKLRCLKGIDTTSAMTVHVEIADFTRFPTAKAFMAYVGLTPSESSSGEKISRSSITKQGNSTVRSILVECANALVRGTIGLKSKRVKARQKGQQSEVISYADQAVERLQRKYHRMIYQGKPRNIAVTAIARELGCFIWGLETGKIHRK

SEQ ID NO: 406996 - protein, 359 aa, unidentified
MQEKINENSFSGQSIYVGIDAHLKSWKLTVMSEHLTLKSFSAPPDCNKLGGYLRSHYPGAIFYSAYEAGFSGFWLHRQLLNLGIKSIVVNPADIPTTDKERKQKEDVRDSHKIAQSLRAGQLRGIYVPSEKTQHDRSLLRTRDALVKDLRRSKHRVKSLLYFEGIDYPDKFSSNKTHWSKVFIEWLDSISFANETGKASLNVHLESVRSLRTILLKVNRQLRELSRSTDYKHSVELLVSVPGIGWLTAIKLLTEIGTLDRFARFDQLCSFVGLVPSTRSSGEHDVTAGITPRSNSTLRAALIESAWIAVRNDPALLVAFQKICNRMPANRAIVRIAKKLLSRIVYVLRSNIKYEKNVVR

SEQ ID NO: 406997 - protein, 343 aa, unidentified
MHVSTIGVDLAKNVFQVHGVDSEGKVVITRQLRRKQVIEFFSKIPACLVGMEACGTAHHWAREISKLGHHVRLMPPSYVKGYVKRSKNDAADAAAICEAVTRPSMRFVPIKSADQQALLMLHRTRDLLIRQRTQLINALRAHLAEFGLVAETGREGLAQLAEIVTDESNRDALPPAMKQALQAIIDQLAALELQIGALDRAIHAHHRVNDMSCRLETVPGIGVIGATAIASTVTDPSNFKSGRDFAAWIGLVPRQHSTGGKERLGGISKQGDRYLRRLLVIGATSVVQHARRHPQKYPWIIRLLARKPAKLVAVAVANKMARIAWAIMAKGGYYRAPELAVAA

SEQ ID NO: 406998 - protein, 346 aa, unidentified
MLHVGLDLSRRRVDVCLLSSEGELVNRMRAPSDAEGLYGLAQRLAAYKQPVRAVIESMNGARFVHDELCGHGWEVLVADAQKVKGLAPLACKTDKIDAQVLAELSFRDLVPAIWLPTPELRAERELVRYRMHLVKHRSILKNRIHSALIAFGYHCPVSDLFGVAGRQLLQRMEFPEPWKGNVTASLELVDDLNQRIDQIARQLRRAGADHRYVPLLMTAPGIGWINGYTIASELGDIHRFATPKKLVGYSGLCPRVKQSGGVDARGPLSKAGPRYLRWGLMEAALNAHDHPVYAERYQATKRRLGRQRGAKVAQIDLARHLTEAIWHMLTRNQPFAPAGALFRLAA

SEQ ID NO: 406999 - protein, 423 aa, unidentified
MVKLKYSICCGLDVHKNVIVATIVITNNDGISEYKQKSFSTINSDIQKFHNWLIENNCFHVCMESTGKYWIPIFNYLENDIDVCLTHPKYVKAIKGKKTDKKDSKWIADLYKFDLVRCSFIPPKDFRQLRELARYRFKLVCMKSSEKNRIQNCMTVSNIGIASVLSDPFGRTATEIMSYLLEHTADSMDEKAVRKLIKKGAKAKSDEIIEAIRGYNIETDQAKKLELARGHLEYLDDMITQTEVELYVRIKPYYEFVEFVSTMPGMTELSSTIVLAETGVDMSIFDDAKHLCSWCGLSPANNESAGKKKSVRIAKAGDYLKPMMVQCALAAVKNKKQPYFAIKYGRIKKRRGHKKAIIAIARMMMVCIYHMVSEKKPFNPTDYEELMDPRNHVERVVLNETNVFAYLESLGYDSSKLVKRNDN

SEQ ID NO: 407000 - protein, 418 aa, unidentified
MTATDSTAATVLVAIDISKHRHEVLIGIPGKKRRRRMTITNSLEDFRRLSAALVSYDLPVRIGFEATGNYHRSLAHHLGQQGFELKLVSSVSLARTREALHNSWDKNDPKDAQVILHMLEIGAVQFFHDPLVVGIADIQELSKTHEIVSRSKTELWHRILTHYLPLYFPEAERFHRSSRTDWFLAFLEKYPTPTMITAMTREAFIADAWKVVGKKVSKERLLSDIYATAVESVGLPVHADSDAVRMFRLVLSEGRSLVRQRNEIEARAVELLSDLPDYRLLTTIPGIGPINAMTILAEAGDLRRFRHHRQFLKFCGMDLATVQSGMFRGQSRISKYGNARLRRTMWMAGQTAVLKRTNSFRDKFERYISKDRYNAHLRRKAYTAIAAKMARTVHAVVNRGEPYRPFFEGVSPGGRTSL

SEQ ID NO: 407001 - protein, 416 aa, unidentified
MKTVRKVSQIGCDCHRRFSTVTARDDQNRIVWRQRLEHANRQKLREQIRTWPKGTPVILEGTFGWGWLSDEFLDAGLDPHLASSRKVAAWREARGMAKSNRKDADLLSELWDQKPRWWEVWLAPPEVRDQREWLRYRMTLVQIQTGLKNRIHAVMHRHGIVHDYADLFGIHGRRFLNLLVAPKDRTLPRSARAVLKGYLQLLDHLRRQIASATREFRKQVKRSPAPRRLMTLPGISWILSYTILAEVGRIERFAGSKHLASYSLLVPRAYDSGDDDDDSPKGRHVGHVGRRTLKWAWIEAAHGAVRKGGRFRALFDRRTNGGKRDRNRGYIAVGHELCRVAYVLWSKELDYCETPPARTGSRKPSSLRRSAVSNQDQDQARAPTRARSRLRGSQTRSRRSRPGTGQPEHPMVPVVY

SEQ ID NO: 407002 - protein, 313 aa, unidentified
MPVALSNPIVGVDVAKNELVIYQADSDLLEAIPNTKTSIKQWLKALLGPVSIAIEATNIYHLEFADLAYAAGCTVYMVGGYELKHYREGVKIRAKTDALDAKLLARYLKNEAEELHPWTPPSPLYRQLLSLFRRRAALVQARVGLVQSWSNEPLLKAAFAEQIKSMQRLETMIEKTINDQLKQAGLLGQLKRCLKVEGIGFLTGARLLTAFQRGEFSNADAFIAFLGMDLRVSKSGQKDGRRSLTKRGDPEARRLLHNAAMSASRTIAWKGFYEAQRARGFSTTQALVMLARKLARVVFALLKGQSEYQAKVS

SEQ ID NO: 407003 - protein, 307 aa, unidentified
MSAFVGIDVSKATLDVAVLGVAEIRQFANTMRGYRALAAWLKPWRPQRVLLEATGGYEQAALDALHAAGLPMVRINPRQARDFAKATGQLAKTDRLDAQVLAKMAATIEAPLYAPREAWRLRLGQWQQRRGHLVQILLAERQRLERVDDAELRRAAQRHIAFLQRELRGLDTRIGEQLAAQPDLAPLRSLRGSGPVLQATLACELPELGRLDGKAIAKLVGVAPMARDSGQWRGRRIIWGGRAGIRTALYMSALTAMRYEPGLRQFYQRLRSRGKAAKVAIVAVMRKMLVILNARMRDAQKQTLEAH

SEQ ID NO: 407004 - protein, 361 aa, unidentified
MSIVGGMDVHRRQITVDYVDTETGRVRGGVIAPADRGCLRAWLVDRFAGRGDVTFAVEAGTGWRYVAEELASAGAWPRLAEPADTSAKRGPKRRAKTDRADARLLRDLLVKTDLPECWIPPAIVLDCRAILELYRDLREQHEGWIQRIRAVLFHHGCPDLGPAELTTTAGRTRLRQAVAAHLPATARYQVTTALRMVDHLEGELEPLARQIRQIARRMRGPRLLRDRLYGVGPLTALALTCWLGGAGRGFTSRGGVRFTGLDITVHSTDGKRAPGHLSRQRPPVLRWALYEAAKCASQHRAPDHTYYTQIRNRIDGKRATLSEARKIVRTAHHLLAALGDDAFELEQPHPGHRPIPALAIT

SEQ ID NO: 407005 - protein, 340 aa, unidentified
MNVSMVGLDLAKNVFQAHGADASGGVAFRKRMRRDGVLAFFARQPQCQVAMEACAGAHYWAREIAKLGHTVCLIPPAYVKPFVKRQKNDAADAEAICEAAQRPTMRFVAVKSEEQQASAVVFRARDLLVRQRTQTINALRGHLAEYGFVVAQGPSHIAKLIERIERCENDLPAPARRALCVLVESLQALDKRIEQLDVEIAQRAREDDEARRLATIPGVGPITATALIALAPQATSFKRGRDFAAWLGLTPLQHSTGGKQKLGATSKMGERTLRRLLTSGASAVVRQARRRGASEKSWLGRMLARKPPMLVIVALANKMARIVWALLAKGGIYQAPVVTA

SEQ ID NO: 407006 - protein, 412 aa, unidentified
MQVVRARCAGLDVHQKTVSVCVSVCEADGKKRQQVRVFATFTSDLMALADWLREQGVTHLAMEATGVYWRPVWAVLEGQFEQMLINPQHIKAVPGRKTDAKDCEWIADLLQHGLLKGSFVPPTPIQDLRDLTRYRVELRQSQTRVANRIQKFLEQANLKLSSVASNALGVSGRHMLEAIITGQESPEQLAQLARGRLKSKIPQLERALKGRVREHHRFLLAEFLEEWDWFEQRIARLDAEIDKQIRPFEQALALWQTMPGIDHVTACSLVAEVGVNMNQFPTAQHLASWAAICPGNHESAGKRKSGKMRDGNKWIRRTLCQAAWAASRKKDCYLSSQFKRIAARRGLNRALMAVAHTMLVIGYHMLKTGQGYHELGGSYLEQINKDQLQRYFVKRLQKLGLTVKVEPSLEAA

SEQ ID NO: 407007 - protein, 370 aa, unidentified
MAEYSEVFVAFDVAKRKHAVAIAEGGRTGEVRFLGEIENSAATIERVIKWLAGRYDRLHVCFEAGPTGYELYRHIRDLGHDCMVVAPALIPKRPGEHVKTNRRDAITLARLHRAGELTAVWVPDAVHEAVRDLVRAREAAADDLRRKRQQLLSFLLRRGRIYSGGGHWTLAHRRWLAKQAFEHTAQQIVFQEGIDAIEDAVQRLHRLEQQLAAIVPSWSMAPAVAAYQAMRGASFLVAVTFAAEIGDVRRFDTPRQLMSFLGLVPAESSTGDTVRRKGLTLAGNRRARRALVEAAWTYRYPARVSETLRARIEGLPKTVRDIAWKAQLRLCARYRRLSAAAGKKLPVVVAAIAREMAAFLWAIAREVAAM

SEQ ID NO: 407008 - protein, 373 aa, unidentified
MPKYSTAFGMDVHLRSTTVCALDADTGEAVTRRFPGNPWGEIAGWMDGFPGPSLAAYESGYLGFAPQRELAGLGVECVVAAVSKIPRSAADSASKNDRNDAARMAKAILAHDISPVWIPSPEVEGIRDLAGAYDGATARLATAKQRLLAFLAKRGYAYGGTTPAGNPRKYWTYDFLRWLDKVRPEDGGGVRTLAALRNEVEAAAEARADLLSEYRAAVDASPIAAEVAALQSIKGCAFALAAAFSAEVGDFTRFRSGRQVTAYFGLAPSQRSSGDSVRLGGISGAGNALVRKLAVEGSWCYAAARHQPKLMPRNTDVPLEIRMHGRKGSERLLRRREEMLARGMPAAKANAATAAELVRWLWALGMMCREGAE

SEQ ID NO: 407009 - protein, 430 aa, unidentified
MEQGNDSRLRAFRQVKTEIRGSTEYLIVGIDIAKERHNAFFGTATGRTLHKGMFFDNTYDGFQKLLIQTDALKVQQGLRKVVFGLEPTANYHKPLGEYLIKGGHLVVLVAAAATPKNRELLDGRWDKHDTKDSANVADLISQGKCLYYDCPGEDLRSLRGLLSLKRRLKKEEHGLQVRIRNQLLAQYFPEMDQHFGSVASLNVVQRCLDPSLISLMEYDEFCRTVAPGKVNLAQQRRLTQIWRAAKQSIGCSVGEAVSVEAQIMVAGLNRVRETIKTLEDKIEDICLKFPEYSFLLTIPGFGPDVSSKVLAAIGDPERFTNGKQVLKMSGYDLCADRSGKRSNSATPVISKHGKADLRYALYQAAIISSLNYKEFIVYHTKKIKGREREKGIGTKMRVKLAAKLLIIAWTLMKKKEPFDPKYLNQGDSKA

SEQ ID NO: 407010 - protein, 420 aa, unidentified
MSENQPEIQYAAFLAIDWADQKHVWSLQEANSSTRDRGEVGHMPEAIETWVAQMSQRFAGRPIAVAVEQTRGALVFMLSKYGQLHIFPVPPAMTANLRKAFHSSGAKTDPADADLLLDLVQMHREKLRRLSPDTEATRRVQNLVEERRKLVDERTAQSNRLEAHLKIYFPQIPHWFGDVDSPLVCALLERWPTLEALQKASLDTLRSFFRKQHCRKEELIESRIKAIREAKPALKDRAVVEAKVPVVKVLVQLIQVLYEGIEGLNQQIQEAAEAHPDFFIFDSLPGAGAVMAPRLLAAFGSQRERYQNAAEVQTLSGIAPVTESSGKSIWVHFRFACSKFLRQSFHEFAALSIPQSQWARAYYELQRRRGKKHHAAVRALAFKWIRVIYRCWKERVAYDEKVYLAALAKQKSPLLAATER

SEQ ID NO: 407011 - protein, 416 aa, unidentified
MNGSQNTRGYARYLAFDIHREYLLVGGQDENQEWVLRPRRVSVERFPTWAQKNLQKGDIVVLETTTNIWETYDIVAPLVGRVLVANAAAVGEIVGARVKTDKEDIKRLLRLLFGGIVPEVWVPPAHVRELRSFVSYRNRLVKTSTMIRNRLNSLLHKHNLIVPKGSLLDQAWWDSQGSISSLEKMQIRQELLLLAEVNNQKAAVDEELGRQSTGPVWGKQAIQLLQLPGVGVIVAMTVLSAIGDVSRFENAKKLVGYAGLGAGVHASGKTFKEKRITKKGRKELRWAMVEAAWRAVRMSDYWKSEYEKYLRRLRKPNQAIVVVARKLLVAVWHVLSKEETDIRASEEELAYKMLLLSWSLNENVRKGLSYKEFAKYALMKLGVEEDITRFERRGVPRRLAPKADVLARIAELELIF

SEQ ID NO: 407012 - protein, 427 aa, unidentified
MSYRVAAIDVHKKMLAVVVADVEEEGNYRFERRKFGATPGELHVLAQWLVQREVEEVVMESTAQYWRPVWGTLEQCWRPAHQQREGARQMSGTLHLCQAKSNHGPRGRKNDFLDAERMVKRLVAEELVLSFVPDPEQRLLRTVTRRKHQLTRAKVGFKNQLESLLEQGHIKLSSFVSDLLGVSARRMLKALAEGESDPAVLAAMADRKLRATPEQLRDALGASAYLSRAYRRLLKLALEELQLIEAHIEQLGREAMELLKGHEDVVQRVAEVPGFGPDCAVQMIAEVGLQAAAFDVAKKLSSWVGVCPGNEESAGESQSTRSPKGNRHMRRLLNQAAQSAVKVKGGILAATFHRLLPRLGYKQAIWAIAHRLCRLLWLILHQGVRYEERGPAVSAKSKRTRAARMIRELTKLGYRVEGGPRPAAARA

SEQ ID NO: 407013 - protein, 368 aa, unidentified
MNSCIGVDLHLRNATLCHRVKGRERSLRTLELHSAEWHAYWKSIPTGTDVFVEMSRTTWWFARWVQEQGHHAHVIDPTRSRAMAAGLPKTDRCDVRWLAEMGAKGVLNEVYVIQPETERLREFVRHRALWMRDQTRIKNRIHYQLAREQRRCPHRSVFTQKGLRWLEEQELCQPYARSLENHRMHFDYVHQAVEQTTERLLSTRTDPRVLALLLSIPGIGELTARTLLAEIETIHRFADPEKLISYAGLAPRVRQSSGMGRRGALTKRGSVWLRTALVESAQIAVRRPNQFQKIFRRVSFRRGRNVGIIAAAHRLIEVIWHVWSKDVLYLEPVSPGKESGMYKLPAATGLCLACLLERPNFDCRAQVR

SEQ ID NO: 407014 - protein, 332 aa, unidentified
MSVYVGIDVHRNRSQVAVIDEGGKVLVNRNVTNGVKPVLPVIGGLPAGTPAAYEAAFGWGWLLELLESYGFEPHMVHPLQCKAIASARLKNDKVDAATLAQLLRADLLPEAWIAPPQVRQLRAMLRHRAQLVRLRTLLRNRVHAILAGHGHGRPAGCWSGPGRQWLAAPELPAVSREIIDGDLALMDALQQPIDRLDREVRQRAKADPRVTVLTQLPGVGMFTALVLLAGIGDISRFGPARKLASWAGLTPTVRGSDRTVRHGHISKQGPAWVRWVLCEAAQTAKRHPDFAPGYEGTARRRGKKIATTAAARRLITRAYHLLTGAASDGAPA

SEQ ID NO: 407015 - protein, 347 aa, unidentified
MKYYVGIDVSLNSSNVCVVDANGKIVREDKVASEPVALIKWFRSLGVRLERIGLEAGPLSQWLYGALQESGLAVELLETRHVKAALSAMPVKTDRNDARGLAQLMRLGWFRPVHCKSMAAQEVRALLTARKLVQSKLYDIEMSLRGILRGFGLKVGPTTAQSFAARINHLVAGQASLEALARALLSVHAVALREFKSLEKSVRQIGRADARVRLLMSTPGVGPLVALTYVAAIDDPARFTSSKSVGAHFGLTPKKYQSGETDVSGRISKMGDGSVRAALYEAAHVILTRPIKGGGLKSWAMKLAKRAGMKKAKVALARKLAVVLHRMWVSASKFDADKASDCMRAAA

SEQ ID NO: 407016 - protein, 474 aa, unidentified
MFVLGCDVSRGYVDITVVNERGELALPPSQADASAQGESRIFRQISALRKNYPQETVIAVMENTGGYEANIAQCFRQHGVPVSVLNPKNIHSFRQLELHHAITDPSSARDIALFALQHLDAIKTEVEGTSERALKRLAHILDALSRDMTRLKNRLDNLLFTVRPELLSLTRGDKPRWLLQLLLQYPIPQKLARGRMSRVTRIPSITPDKARNLISLAKSSRGADNHPDFAPLIVYLATRLLQAMDQEKTLRKELEQRFNRIHPSCPLPTIKGVSSYGAAIILAHIGNVHRFHSAKALVAFFGLDPLVRESGDLQHRRHISKRGPGMVRRVLYMQCLSMCSDPDHSIGRFYARLTKQGNPHYYAITACMRKLTVILYAMLRSGNAFDPNYEDSSKALKQSERDRGRKKLRVAKHARTSLALDVPISTREAKRRKRIIALQNKKREGPHVSCDTSAGSCPKNLNEVTFPWYNVALS

SEQ ID NO: 407017 - protein, 416 aa, unidentified
MSVALPEALFFTGIDWACAEHAVCVLDAAGKITARFTIKHSAEGIASLVRRLARYGDPAGLPVAIERPSGRLAGLLLEAGHPVVPVSPNAIKTWREGEVLSGAKSDAGDAAVIAGYLRLRYHRLAPAAPYCDETRALRAAVRTREDLVQMRVAATNQLSALLEAHWPGARAVFADVESPISLEFLTRYPTPAAARHLGHKRMAAFLVKHGYSGRRPAAQLLARLHGAPAGTAGRALTEALQDAVLAVVAVLRALNGAVKDLDRSVAAHLGEHPDGPVFTSLPRSGQINAAQMLAEWGDCRPAYDGPDCVAALAGVTPVTKQSGKYRGVEFRWACNKRFRRAVTTFAGNSRHASPWAAQIYAEARAAGKDHPHATRILARAWIRVIWPCWVNGVPYDPARHRAAAALAGQTPSQPAA

SEQ ID NO: 407018 - protein, 328 aa, unidentified
MYLCVLSKDGEIVLHRNRRAEPGPFLEAIKPYRDDIVVSVECIFTWYWIADLCARENIPFVLGHALYMKAIHGGKSKNDRIDSRKIAGLLRSGMIPMAYVYPAKMRATRDLLRRLNHFVRKRADLLAHIQNTLSQYNLPEFGKKLTSKVNFESIIARFPDPEVKRSIAVDLELIEHYNHIITNLERYIKRVATEHDPQALHLLKTVYGIGTILALVILYEIHDIERFPRVQDFASYARLVKGTRESAGKRHSSSNKKIGSMHLKWAFSEAAVLFLRKNPNGMAYKKRLERKHGKSKALTILSHKLGRSVYYMLKRGKAFDMDLFLREA

SEQ ID NO: 407019 - protein, 341 aa, unidentified
MSDYSYFCGIDLAKNHFSLHAVDQNGKVILHKSVTRSKLLTTIANMPLMRIGVEACGGAHYWARTLNKLGHDARIMAVKYVIPYRTKGKNDLNDAVAICEAVQRPSTRFVPVKSPEQQAILSVHRMREHWVRERTALMNRMRALLSEFGLIIPVGRSSLMKHVPLMLEDAENELPHLARTVIADAYHHLGELNQRIADTEQVFESFAKVSANVQRVMKVRGIGPQTATAILASIGNGSQFDKSRDFSAWLGLVPKQYSTGGKPRLGRITKHGDKYLRTLLIHGARTVIANLGDKQDKLSQWCRGVLERRGMNRAIVALAAKNARIIWSLLHNQTEYENYAA

SEQ ID NO: 407020 - protein, 339 aa, unidentified
MRFFTQQHAYYCGIDLHAKTMYLCILNQAGDVLLHRNIKSDPEAFLHVIASYRTDLVVCVECIFTWYWIADLCARENLPFVLGHALYMKAIHGGKTKNDRIDAAKIAHLLRGGYIPMAYVYPTAMRATRDLLRRRMHLMRQRAQLLAHIRNTNSQYNLPPIGRKIAYKANREGVADHFPDEAVRQSMEVNLKLIDFYDPLLTQLELNWVSTAKIHDPQAFHLLRSIRGVGKILALVLLYEIHDIHRFPRVQNFCSYCRLIQGAHQSAGKTYCHSGKEIGNAHWKWAFSAAAALLIRCCPAVQKYKPKNLPSSPTNWDAVPTTYSNESSRLTKNACYPVE

SEQ ID NO: 407021 - protein, 430 aa, unidentified
MKSNTQNAKIEAITEKTLVLGIDVGSETHYARAFDYRGIEYSKKPFKFSNTEAGFVTFKEWILDLKERHEKDKVVPGMEPTGHYWFNLGKFLQDNEMKPVLVNPHHVKKSKELDDNNPTKNDRKDPKVIAGLVREGRYMIPYLPDGIDADLRTASNIRFQLQAELTRIQNRISRWFNIYFPEYKTVYGKPDAKSGILILKAAPLPEDILTLGIDGVNQIWRDAKLRAVGKARAKTLIEAAEHSVGSKEGAVAARMEIRMLLEDYESRSIRLQEVMTLIEGLVKQIPMAEKLLEIKGVGIRTVSGFLAEVGDISRFNNPKELQKLAGLALVENSSGKHKGETTISRRGRKRLRYLLFEVAMSLVAKNPEFRELHNYYTTRRLNPLKKMQSLMAIAAKLIRVFYVMLTKGVNYDPKKMVNDIKRPAVYLQTA

SEQ ID NO: 407022 - protein, 328 aa, unidentified
MTNAREPTAQPLQFVGVDMAQQLFEWAVHGVPGTQSVPNGEEGFETLLEALKKLRVGLIVMEATGGLERKLAGFLLRHGLPVAVVNPRAAREFARSMGHLAKTDAIDAAAMAHLAQTLAAKADQSGVAFCPPTVAVEHLQLLMTRRAQLITMRTAEKNRLVSAGRVLHKSVTTVIKTLDKEIARLERDIDAHLEQHFKEQARRFQAVKGLGPLTCAVMLAFMPELGTLKSARAAKLAGLAPLNRDSGKERGKRHIWGGRSAVRSALYMATLTAVRFNPVIKTFHDRLIAAGKPKKVVLTACSHKMLRILNAMARTGQPWNDSLHAIAP

SEQ ID NO: 407023 - protein, 351 aa, unidentified
MPRTTTLHAVTAIGIDMGKNTLHLIGLDARGAIMLREKVARGRIALRLANLPPCLIGIEAGMATHYVARELAALGHDVKQVPATYAKPFRQGQKNDFRDAHAVAEAVQRPTTRFVPAKTNEQLDLQALHRVRSRLVSERTAVINQIRGFLLERGIVVRQGPRFLRQQLPDILAKQTDVLSPRMARIVADLANDWRRLDERIETVTDEIGTLAKSDDSCRRVMTVPGIGPIISSAMVAAIGNGAAFARGRDFSAWLGLVPKQMSTGDRTILGRISKRGNGYLRTLFMQAARVILLRSANWPKHGFGLWLVRAAQRLHPNVLAAALANKLARIAWTVLAQERSYEARVTKAAA

SEQ ID NO: 407024 - protein, 341 aa, unidentified
MSLIKAAGIDLAKLVFSIHGVDAHDKCKLRKTVKRNKLLAEVAKLPPCIIAMEACSGAHYWAREFTKLGHDVRIMASKFVIPYRQNEKNDANDAEAICEAATRPKTRFVSIKSEEQQAVLCLHRIRQGTIKDRTARINRLRGLLSEFGIIIPKGRYPLQNTIGGILEDAENALPFLARELLNDLWQSIKGLNEEILKYDRKLYALANQMKDAKRLMSIPGIGEITATAVVATVNDAKHFDTSRSFAAWIGLVPRQYSTGGVVRLGRISKRGEKHIRTSLIHGARAVIANCKSKTDRTSLWVKDLVERRGFKRATVALAAKNARLIWALLHSEKEYQVDYVK

SEQ ID NO: 407025 - protein, 346 aa, unidentified
MNQIARIGLDIAKRWFQIHAVDENGREVLNRKLPRDKILGFLSALPACDVALEACSSSHYWGREIGRLGPRVSLISPSYVKPYLKRGKSDAHDARAICEAASRPDMRFVPVKSEEQQAALMQHTSRQLLIDQRTAVANSLRGQLAEFGVIVRKGIENVGELVQMLDKDDEELAQVPASALTVMKILADQLRAVDAHLSAIDEQIGAWQRENASAQALKTIPGVGALISAALAAHVPDPFMFRSGRDFAAWLGLVPRQNSSGGNERLGRITKQGNPYLRRLLVLGAPASLRWLHKRTDPLADWTQRLLRRRPARVVTVALANKLARVAWAIMTTGELFRLDAPTAAV

SEQ ID NO: 407026 - protein, 345 aa, unidentified
MEHFAGLDVSVKETSVCIVDDTGEIVREVKVASEPEALLAVLKSPAYHFKRLGLEAGPLSQWLFRALAEADLPVICVETRHMRAVLKARINKTDRNDARGIAQMMRVGLYRPVHVKTLRSQKLRMLLTHRKLLQSKAIAIENDLRATLRNFGLKVGMVGAVRFEARIRELVEDLPDLAALVEPLLIVRQALREQFGILHRRLLAAVRNDEVCRRLMTVPGVGPVVALTYRATVDVPARFRKSKSVGAVFGLTPARDQSGERDCSGAISRCGDEMMRTALYEAAQVMLTQSAKWSWLKAWAMKIARHRGKKKAIVALARRLAVIMHRIWVDGASFRWTREELATAA

SEQ ID NO: 407027 - protein, 354 aa, unidentified
MIIIGADYHPGFQQVAYVDTDTGELQERRLEHREDAEKFYRDLAAQEVKVRVGMEASGHARWFERLLAELQFELWIGDAAEIRTKRVRKQKTDRQDAQLILRLLLENRFPQVWVPSWENRDLRQLLWHRHRMVQARTRIMNQLQAVALNEGLRCKKKLWRDAGREQLESFRLAPWASRRRHDLLELLDRLTPTIAELTQAIEQEAENCPAAQRLQTHPGVGALTALAFVLIIGRADRFECGKQIASYLGLVPLEDSSGQRRRLGHITKQGNSLLRFLLVEAAQVTVRSDQEWRNRYFHLVLRRGRKIAKVAMARRLAVRLYWMWRKGWIYEQLKNFGSHAGEPGHPDGVQSSTE

SEQ ID NO: 407028 - protein, 377 aa, unidentified
MTKSTAFIGLDTHKKAIAVAIAEGDRGGEVRYYGQIANEPAAVLKLVKKLAGNHDKLFFCYEAGPCGYGLQRQITGLGHDCVVIAPSHIPTKKGVHVKNDRRDALELARLHRAGDLTPIWVPDEPHEAMRDLVRSRIAAMETLKRHRQHLQGFLLRHGRVYPGKCHWNKTFIRWVREQKFDLPAHHILIEENLAAIRDSQERLERFEQQIMHLLPSWSLAPVVQAIQAMRGVGQIAAVILVSEIGDFNRFAHPRQLVSYLGLSPSEHSSGSRVIRGPITKAGSKHARRVLIEAAWSYRLPARVGRYLGFRQSGLPKEILDTAWKGQVRLCQRFRSMAGRRKHHNIVVTAVAREIACFMWAIARMVAISGSRYAPQTP

SEQ ID NO: 407029 - protein, 448 aa, unidentified
MILRMPKCVLERVCECARTSDRYLPISGNGNMNAEKEIVCGADIHRDFLVATMISRSGLKLQEQFGMDQDGLLAFRSWILDHRCLRVAVESTGNYWYPIFCILEGHVEFILANAFQIRNIECKKTDRLDSERIAIYCLNNLIKPSRIYPKDYRDLRSITRSREALVNARSKLKNQIHQSLAVCCIKLSSVISDSFGKSGRYIIEQLLDGKTIEQIISKIPSKRVKKKADELRKAIRNGLDPVQILLIKTNLDAIDYLSEKIKLLDAEIAIKVKPFEEDLNIILSVPGIGLTSAATILAEMGDYRDFQNADKLAMYFGIVPAVYQSAGKLRTGKITKRGSKHMRRILVQVAKAITKTKKSSKLKRFFLRVFTRSGKKNVAAIALARKVLCIIYHLLMKREDYQEPEVKKNKPKIPSCVSPLSMMDIDEMIKTISQAGYLVKKGLKEGCG

SEQ ID NO: 407030 - protein, 338 aa, unidentified
MKTYAGIDLHSSNNYLGIVDDQDKRLFSRRLPNCIDTIVSALKPFRKTLTGIAVESTYNWYWLVDGLQDAGFKMHLTNPSAMQQYEGIKHTDDKWDSFWLAHMLRLGILPEGYIYPKRHRSIRDLLRRRMFFVQKRTSHIQSLQSMYTRHLGGKISSNEIKKLDPEHADKLFQDPYVALAVKNNIDAIGFLTTKIKNMETLILSKSKMKKPFQVLTSTPGIGPILGLTIMLEVGEIKRFAAAGNYASYCRCVRSVKISNNKKKGQGNRKNGNKYLAWAYVEAAHLIIRYCPEANAFYQRKKAKTNGALATKALANKLARANFYMLRDQVAFKKEKLFP

SEQ ID NO: 407031 - protein, 331 aa, unidentified
MKNFFIGIDVSKLTLDVALYSINGNERLNHLMIENNPDGFKKMISWIKKKKIDLKEVFICMEHTGVYANAIVSFLEKEEITYCRMSALAIKKSLGIVRGKDDGVDAFRISQYTYEKREKLSPSKLPPANIIALRNLLVERKGYVKSIAQYKQRKNEIAVHQEKRSIKRYTSVIKILTKKVEEIKLEIMELIENDPELLKTYTLISSVIGIGFVNAVSFIAYTNNFQDFTNPRAYACYISVAPFPYSSGTSIKKRTSVSKIGRLELKALLTMAARSAIINDPELKRYYQRKFNGKRKPESNHGQVLNAVKFKLICRVFAVVKRQEKYVVFKY

SEQ ID NO: 407032 - protein, 339 aa, unidentified
MNAVGIDVSKGKSMVAIMRPFGEIVSAPFEIKHTASDINSLVKLINSVEGESRIVMEHTGRYYEVLAHQLSEANLFVSAINPKLIKDFDNDSLRKVKSDKADSVKIARYALDKWQNLKQYNVMDELRNQLKTMNRQFGFYIKHKTAMKNNLIGILDQTYPGVNTYFDSPARSDGSQKWVDFASTYWHVDCVRKMSQNAFIDHYQNWCKRKKYNFSQSKAEEIYGKAKDLVPVLPKDDITKLIIKQAVNQLNSAAATVESLRTLMNETASQLPEYPVVMAMKGVGASLGPQLMAEIGDVSRFTHKGAITAFAGVDPGVNESGSYEQKSVPTSKRGSSDRS

SEQ ID NO: 407033 - protein, 317 aa, unidentified
MAKDCGVGIDIANATLDVALSTASGQPWQTTNDEAGWAAVVAYVAPLQPRVIVLEATGGYETGIATALTAAGLPVAIVNPRQVRDFARALGSLEKPDRLDAAVLAAFAARIQPTPRPLADDLQADLHARVTRRRQLVERCTAERNRLPLARGAVRKNLLAHIAWLENQVSQTDRDLRRRIEASPIWRVRDQRLQSVPGVGPTTSACLLAYLPELGTLTHRQISKLVGVAPLPDDSGPRSGYRRVQGGRSDVRSALYRATVTAITHNPTIRAAYRRWRAAGKLPKVAIVAAMHKLLIHLNALLKHQTDWHARPVAPTA

SEQ ID NO: 407034 - protein, 368 aa, unidentified
MKTKTKTPSVVSTSTPAVIGGFTLGLDLGDRAHYACVLDTSGQIVREASLPNTRPALSQLLTDFPRATVALEAGTHSPWISRYLTGLGATVFVANPRKLHAISRNERKCDRRDAQMLARLARADIALLHPIKHGTAQAQHDLLGLKLRDALVRTRVSLINAVRFTLKSLGHSVGNPSSESFHKTVLADVPADCLPVVQPLLTVLTQVTEQIKGMERDLVRRSKKDYPVTQRLQQISGVGPLTALCFVLKIGDPERFSRGRDVGAYLGLCPRRDQSGGTDKQLRISKRGDAMMRRLLVTAAHYILGPFGPACALREYGQRLAGTGSAREKKRAVVAVARKLAVLLLSLWKHNADYEPRATTPVLVMTPT

SEQ ID NO: 407035 - protein, 340 aa, unidentified
MKKVFIGIDFSKLKFDAAIYIVDTKAIVSEEEFKNEPSGYADFLEWVNENACCPKSSLLFCGEHTGYYSANLSTFLFESGYDMWLAPGLQIKKSQGIKRTKTDRIDACKIAEYAYRFRDKVLLFRPISKALDEIRDLLSYRERLVGKRKVLSTSAKEVNRVKDSASCDFIYQDSLEHIKTLSKSIRNCEKRIEALMHGDQLLNTNYKLLNSVVGIGPVNSALILVATSNFTLFTNPRKFGCYCGVVPFEYSSGSSIRGKSRVSKLANKHLKSKLTLAAQSSIRNDPELRDYYLHKRSEGKCHWLVLNNVKNKLIHRIFAVVRDGKMYDKEYLHPLKKGSA

SEQ ID NO: 407036 - protein, 427 aa, unidentified
MPHKIAGIDVHKRMLAVVVSDVEIDGEHEFERRQFGSNPAQLRSLAEWLVGQQVEQVVMESTAQYWKPVWGALERYWKATCLKRDGASPMSGPLHLAQAQSNRARRGRKNDFADAERLVKRLVAHELVLSFVPDPEQRLWRTVARTKCQLTRNRVQLQNRLEALLEEAHIKLSSLVSDLLGVSARRILHGLAEGETDPAVLATRADGRLRATPEQLCDALGACQELNPIYRRLLKMALEDLHMIEKRIEQLDQEMAEMLRSHQDQVQRLAEVPGLGVDSAQQIIAEVGVTAATFPSERDLSSWVGACPGDNESAGVSRGHKSPKGNRQMRRILNQAANAAVKYKGSIFQILYRRYVPRLGHNQTIGVIAHRLCRLVWKILNRGVRYEERGPSVNQRSRHQRAGRMIRELRSLGYRVELPSSPGPVPA

SEQ ID NO: 407037 - protein, 341 aa, unidentified
MNTLQYIGFDVHKKSISYCVKVGDGTVMAEGKIRARREELTAWAQGQPQPWVGALEATLFTGWIYDHLRPYAQQIRVGHPAMMRAITAAKKKNDQVDAQKIADLLRCDLLPECYIAPQPLRELRRVLRYRNLVVRQAVSMGNRLSGLLMETGTPYHQRRLWGRRYYEQLLTTLEVPESVRELLQLSRSSWEMFQGMQKRLLRELLAHPQLQARVERLQSIPGVGVVTALTWALEVGEPSRFTSIAQACSYAGLTPAQRQSADREHRGPISKQRNRHLQTVLIEAAKLAPRWNPQLAAVHDRALQRGNRNRATLVVARKLVAYLLAVDRSGRAFQLRTQPGS

SEQ ID NO: 407038 - protein, 395 aa, unidentified
MVYRLGWINGHQQFNLPHSLAYVHPCMLGRREQKIRQVGQAVLPWVPDAVDEQGRSTPDSESPNSCLVHDTVSLQGWARKECSMSDAVYAGIDVAQEWLDVALSFSETGKRWANDEAGIAAAVTWLKEQQPTLVVLEATGGLEVPVVAALACGSVPTAVVNPRQVRDFAKALGKLAKTDRIDAQVLARFGAAVKPSSRRLPDAQAQELNSLVARRRQVLEMHTAEVNRRHRALPVVRRCIDQVLRLLEVQLAELDKDLQDRLKASPLWREQEDLLQSVPGVGNVLTFTLIADVPELGSLNRKQISALVGVAPLNRDSGNFRGKRRVWGGRASVRAILYMATLAATRWNPIIRSFYQRLLAAGKPKKVALTACMHKLLVILNAMVKYKTLWNPRFV

SEQ ID NO: 407039 - protein, 424 aa, unidentified
MNCNQNFKISQVTEGTLVLGIDVGSDTHYARAFDWRGLELSKVFKFKNSFEGFQSFVLWVNDLCCKYNKSKVIAGLEPIGHYWFSLGELLKENNITIAIVNPYHVKQSKELDDNLQTKNDSKDPKVIAKLVIDGRYSFPYIPEGIYGELRVADKLKNDITQQIISIKNKIHRWLSIYFPEYEKIYSSIDSKSGFLLLKETPLPKDIVELGSERIVERWKQTKLRAVGLDKAKKLEEAAKKSIGCKNITSSARFEIKLLIEDYEYKQNQLNSITEELNKLCEKIPMIKEIAEIKGIGIATAISFVAEVGDIRRFKSAKQVQKYAGLALKENSSGKHKGLTRISKRGRKKLRTILFRATIPLIGFNKEFSSIYNYYIERKDNPLKKKQALTAICCKMIRIFFTILSKGIKYDETKMLHDIKRPVAA

SEQ ID NO: 407040 - protein, 482 aa, unidentified
MKAKQKEPTEKSTGQSSQLHWRQMNRKQRRDLERKIRSADLTLQLVHPDAAGIDIGNESHYVAVPPDPDSQPVQHFGCTTAELRAMADWLKQCRIRTVAMQSTSVYWIAVYDVLEQAGLEVYLVNARETKNLPGRKSDVQESQWLMKLHTYGLLRNSFRPPQEIRTMRTYWRQRNDLVRSAARHIQRIQKTLTQMNMQLANVLSDVSGVTGQAIIKAILAGERDPQKLAAFRDPRVKASEKDIARSLEGNWQEDLLFVLKQEQAAFEFCRKQMAECDRQLEQYLQKMEDRSQGATLPEEKRKDRPQKKKGNQPQFDLQQQLFRMTGTDLTQIDGIDVMTATTILSEAGWDMIKWKDEHHFVSWLRLAPDNRISGDRIIGKGRLPTSNRVTVALKLAASNLRTSQSYLGAQFRRLRARLDTPVAIKAMAAKLARLIYRMLRYGTKYVDNGSRYYELQQRTREIRRLKLKAATLGFHLVQSTAA

SEQ ID NO: 407041 - protein, 396 aa, unidentified
MISVGIDVSKGKSTVCIMKPCGEILESPFDIGHTADELDSLISLIKSFDEETRVVMEDTGHYHLPVATYLSSHNIFVCCVNALRMKKFCSQSIRRAKTDKIDSIKIASFGITYWNELVKAYPSNVIYDELKFLARQYYQVTGMLVKSKVNFSNLLDQVMPKINDVLSNQGENHKLTEFVSRYIHFQNILDMGEMKFTSDYCKWAKKKGYRLNERKAAEILALAQNGIPTLPNSQSVKIAVSEAIKLIHSVEESRNTILAQMQELCNTLPEYSVVKEMDCIGDTLAPRIIAEIGDVRRFKNKHSLIAYAGIDAPPYQSGAFHASERHISKRGNSYLRKTGYEIMQSLIKHKPADNAVYDFIQKKRSEGKCGKEAMIAGLNKFLRVYYGKVMEFYSEH

SEQ ID NO: 407042 - protein, 417 aa, unidentified
MRTLRGSSLEWTARTEEVPLRELVAVPVDVGKRSAMVMACDFTGRVLVPAVEFSLTREGVRQMLARVQAAVPAGVQLVRVGVEAAGHYHRPLITAGVWPEGWQVVELNPAHVSAQRRVNGQRGVKTDRVDLVAMADLLLAGRGAPVAAGEGPLIELAAWVAHRRRRGQVRTATKNQLLTQLDRAFPGLSLALADVLGTKVGRLVAAHFADPARLTRLGPERFREFAARRGVQVNRRVTARLVEAARTALPTAEAAIARQILQADFALLDDLETQIAAAEEQIAALLPATGYHVLTTTPGWGVTRAAEYAAALGPFTRWGSPAKIYRAAGLTPALYASAGWRHDGSISREGSVHLRRALLGLGIGLWQKDPAARAYATTLRERGKPGGIIACALGHRAGKIAFAMVRDQAPYDPSRWS

SEQ ID NO: 407043 - protein, 323 aa, unidentified
MKTSAILGIDIAKDSFDVCLLQADRLQRAQFSNDRSGFKTLRSWLHKRKAKPLHACLEATGQYGDDLAEYLHAEQYTVSVVNPLAIKAYGQSRLQRNKSDKLDAELIARFCQSEQPAAWTPPAPEIKALRELVHQYDNLQVARQQVRNRLQSGLHSDIVRAQLTAQLSLIDQQVAELKAHIHDHIDQYPDLKQQAALLDSIPGIGALTSAKLLAVDPRRFQSARAFAAYAGLTPMNRTSGSSVRKRVRISKLGDADLRRACYMPAIAAMKHNPLTRALYQRLVASGHAKLAALAAVMHKLLRLAYGVLKSGVPFDANFANQLA

SEQ ID NO: 407044 - protein, 396 aa, unidentified
MHKDTVVACARLVEERGVRQEVRTFATTTPGLYALSEWLAGCGVTHAGMEATGVYWKPVWHVLEEGLELVLANAAHVKNVPGRKTDVNDAMWLADLLAHGLIRGSFVPERPIQELRDLTRARKQFMRERTGHVQRIQKVLEDANVKLASVISDVTGRTGRAILDAMVDGETDARELAKHRHPKMKATLAEMEQALAGRVTPHHRFMLGLYLGQVDATDAAVAQIELEADGLLESFRAKVNLLITMPGVGETVAEAILAEIGSDMSRFPTAAHLISWAGLCPRNDESAGKRRCTRIRQGAPWLKVMMVQAAWSAIKVKNGPLREQFLRLKSRRGPGKAIVAVAATMLRAAYVMLRDDVAFRDTRPAHPAASEPDRVKNRLVHRLQSLGYEVQLKRAA

SEQ ID NO: 407045 - protein, 428 aa, unidentified
MKYNQNHKISQIAENTLVVGVDIAKKKHYARAFDFRGMELDKVIKFKANGGGFESFINWTESVAKAHGKKKIVVGIEPTGHYWYTFGRAVIDRGLMLVQVNPYHVKKTKELDDNTPSKSDYKDPKTIAFLVKDGRYQIPYMPDGKYAELRKANNLREEWVQKKIRVKNKVTRWLDIHFPEFLNAFSSWEGKTALMTLGKIALPEKIASKTPEEILCIWRKEVRRGVGIKKAEKLVKEAQNSVGIREGAQMAEYEIKLYIKEYMEIREVLEDMERKLEKIVLTIPGANRFLEIKGVGIKTVAGFFAEIGDIKRFTSAKQIIKLAGLNLRQNSSGQHKGETTISKRGRSRLRALLFRAILPIVATNEVFNKLHHDNISQKERPMKKMQSLIALCCRLIRIVYSLITKDQEFDPDKLIRDIHRDDALQGAA

SEQ ID NO: 407046 - protein, 364 aa, unidentified
MQKVITYVGLDVHAERIVMASLEGKSMDPVVRDIPNDAKVIRRTFQRLAKEAYELRCCYEAGPCGFELHRQLTAMGIACEVIAPGLIPVRAGDRVKTDRRDATKLARLFRAGELTSVAVPSADLEAVRDLVRLRDSIRRDLTAARSRLQHFLLRHGRSYRSGQGWTKSFWIWLRAQAFDRECERLTFESYVHEVEHQMARRADVDAEIERVARSEPYAVPVARLSCLRGFATLSALALLAEIGDFRRFQTPRELMSFVGLVPSERSSGASVQRGRITKTGNSLVRRILVEAAWHYRHRPVFGPLARKAVEGQTPQTVEYVRKAHTRLHRRYTRLVSRGKKSQVAVTAIARELCGFTWGLMVAIP

SEQ ID NO: 407047 - protein, 389 aa, unidentified
MFYLGIDIGKNTHVASLLDSKKKVVFKAFSFSNSIDGAESLICKLEPFKNELEIGMEATGHYWLSIYSYLSEKNFTVRVINPIQTDGWRQGIEIRKRKTDIIDSLLIADLLRYGDFVETSLSNEDYLSLRNLSRFRSYLISSIGDLKRKTIALLDQVFPEYASSFSNIFGKTSKEILSNFSSPSDFEAINSEVLQSFLNNVSKKKFAKRKLEELSRKASTSFGINFCMDSFALQIKMLIQQISFIQNQVLDVENEIEVFLKKLNSPIITIPGIGSVNAATILGEIGDIKRFSNPSKLVAFAGLDSTVSQSGEFESTSNHMAKRGSPYLRRALFQSALRAEFCDPVFSDYYQKKMKEGKHHLVATNAVARKLCHIIFAVLTKNEPYRVKN

SEQ ID NO: 407048 - protein, 390 aa, unidentified
MIYAGIDVSKDKHDCLISDSDGLVLAEPFTFPNNHQGFNDLFSKLESCSEDFTNIKVGLEATGHYSNNLLEFLISKGLNTIVINPLHTNLYRKCLSLRKTKTDRVDAHSIVTMLRTGSLKSYSQTSYHVRELKSLTRYRFSLVQDLAKLKSSYARLCVILFPELEKLVPTLHLASVYTLLSELPTAKAVAGCHLTRLKHLLASSSKGHYGDAKAIEIRAAARISIGSFSDVKALELQQTIQHIQMLEQQIKQVEAKINPIIDSLHSPLLSVPGISYRMAAIIIAETENFENFNSAEQVLAYAGLEPSVYQSGQLTSTHAKMVKRGSKYLRYAIFNAAKYVCHWDTHFGGYLAKKRSEGKAYNVAVSHAAKKLIRVIFHLVKSNQTFVSQS

SEQ ID NO: 407049 - protein, 344 aa, unidentified
MTYYTGLDISLRSVSICIVDAQGEIRHEAKVAAEVDQVTSCLRGFGEEVKLVGFEAGVLTQYLFYGLKAAGFEVICMEARQVNAALCAMRNKTDRNDARGIAQILRAGWFSQVHVKSLDSHQLRVLLSSRKAILTKCVDLENELRGLLRVFGIRLASKIGHGSFHAIVREQLLKDASLVRALLPVLDARLVLYQTYLKLDNEVRALARADRVCQRLMTVPGVGAVTALSFKAAVDDPRRFRSSRTVAAHFGLTPRRYQSGEMDNPGRISKAGDRDVRCALYTAAHALVTRTQTWSSLKAWGIRLAKTRGHRRAVVAVARKLAVILHRMWIDGTDFRWGSAGASV

SEQ ID NO: 407050 - protein, 407 aa, unidentified
MVVYCGIDWAEHHHDVAVVDAEGVVLAKRRISDDVSGFTRLTEILCSHADDPAGVDVALETDRGLLVAALRAAGYRMFAINPKAVDRYRDRYAVSGAKSDPVDALVLANLLRTDGDRHRQMPNDSEQVEAIAVLARAHQDAVRAGQRDANRLRSLLREFFPAAVAAFPRLSTRSALTILTAAPTPAVARALTPEQIRSLLRLAGRVGIRTSEVERLHRTFNAEQLHQPPPVEDAMGEAVRSIVTTLMATQAAIADPETALAARFDNHPDAEILRSLPGLGVVLGGRVLGEFGDDPTRFTDAASRRRYAGTAPVTRASGKSRVVLLRRARNQRLAEACRWWAFNAMLHSDGTMAYYRRPRAAGDTHEAALRRLSSKLVGQLHHCLEHREHYREDIAWPASSDSQPTAA

SEQ ID NO: 407051 - protein, 418 aa, unidentified
MKSMEITAVGIDVSKRKSTVAIRRPGGVIVACPFDISHSSHDLEKLVSILKTTGGDIRVVMEHTSNYWKPIALTLKNAGFYVSVVNAMLIHDFSDNSIRKLKTDRADSLKIANYALTFWNQLPPFNDEDETRLVLKEQSRMYERLASTATSLRNGLIALADQTFPSIDQAFGHAIKNADGHEKWVDFFSIYWHRDCVLRLSIEKFTESYRKWCLRRNYKFRTNTAHKLYALAQDAVPTLPKNNGTKALVLQACKSLNAVCEAKQSTQEEMNRLASLLPEYEVVMQMEGTGPITGPALMAEIGDVRRFKNKKALVAFAGIDAPPFQSGNFESKSRHVSKRGSPHLRRTVFLVANIILTLSHKDNSVFCFMDKKRAEGKHYYVYTIAGSAKFLRIYYARVTEYLRTQEIPVAASCLNGNS

SEQ ID NO: 407052 - protein, 360 aa, unidentified
MTGTMTWAAMDVHARSIHAASFDVLSGELSRRVFKSGSPDQVVEWLAALPSPVRACYEAGPTGYGLYRAATGAGVLCDVIAPSKTPRASGEKVKSDGRDTVHLLRQLMAGALTPITIPTASAEAARDLARAREQVRGDLMRCRHRLSKLLLRHGRVFDQSTWTQAHRRWLGAQSFEQVNTELAYLDAIAACEGLEARRAQLDERLSHVAREEEFWPIVSRLRAFRGIDTLSALVIVLEVGDFHRFPRATQLGSWLGLVPSRQQSGETDTHGPITKTGSRYARRILVEAAWHYLRAPRIGATLSRRHEGVPDHVLQIAWRAQHRLHRVHTRLRAHRKPPNVVNVACARELACFMWAAATAP

SEQ ID NO: 407053 - protein, 339 aa, unidentified
MGLHCAVDLHGDNGFYGIVDEQGKRLYSKRLPNSLEKILKVLEPYRDRLDAGVVVESTFNWYWLVDGLNEHGYPVRLANPAAMQQYDGLKNTDDETDTFFLTEMSRLGILPEGYIYPKEERPVRDLLRRRLLLVGQRTAHILSFENLVARQLGEKISSNQVQKLWPKEVEGLFEDERLVLMGQTNIEMIRFLTKHIRQIEAAVLREAKLKPEYEKLLTVPGIGKILALTIMLETGDINRFRKVGNYSSYCRCVKSSRKTNDKKKGENNRKNGSRYLNWAYIEAANFIRRHCPEAKRWYQRKLRRSKQVVATKALASKVCKACYFIIKDQVDFDVKKIFG

SEQ ID NO: 407054 - protein, 338 aa, unidentified
MRVYIGVDLHSNNSMIVVIDETGKVLYEKRLRNDLGLIVSELERYRKRCAGVVVESTFNWYWLVDGLMEAGYEVHLANTAAIQQYKGIKHTDDRSDARWLAEMLRIKVLPEGHIYPKEDRAVRDLFRKRHQLVRQKTSQMLSIEDIVSRNAGVGISGNDVKTITESGLDQLLPDPLVARAAKSNLRVYKCLAKEVIDLERTVLSRAKAVPGFEELLGVSGIGKTLGLIVLLEAGDMERFPGVGNFASYCRCAGSQKLSNGKRKGKGNTKNGNRYLAWAFVEAATFAIRYNPRVKRYYERKKAKTNGVVAVKAVANKLSRACYHVLKEGVPFQVERAFA

SEQ ID NO: 407055 - protein, 430 aa, unidentified
MKSNTQNAKIEAITENTLVLGIDIGSETHYARAFDYRGIEYSKKPFKFSNTEAGFMSFKAWIQDMKEMHEKDKVVPGMEPTGHYWFNLGKFLQDNEMRPVLVNPHHVKKSKELDDNHPTKNDRKDPKVIAGLVREGRYMIPYLPEGVYADLRTASNIRFQLQAELTRIQNRISRWFNIYFLEYKTVYGKPDAKSGMMILKVAPLPEDILTLGIDGVNQIWRDAKMRAVGKARAKTLMEAAEHSVGSKEGAVSARMEIRMLLEDYESRNVRLQEVMALIEELVKQIPMAEKLLVIKGVGIKTVSGFLAEVGDISRFNNPKELHKLAGLALVENSSGKHKGETRISRRGRKRLRYLLFEVAMSLVSKNAEFKELHIYYTTRRINPLKKMQSLMAVAAKALRIFYAILTKGVAYDPKKMINDIKRPKIYLQAA

SEQ ID NO: 407056 - protein, 337 aa, unidentified
MKYCGIDLHSNNSMVVITDETDHVLYSKRHANDLSQIVSALAIHGAELSGVVVESTFNWYWLVDGLLDAGYRVHLANTTAIKQYDGLKHRGDESDARQLAHLLRLGLLPQGHIMPKATRAVRDLARKRMQLVQQRTTQILSIESSLSRYTGGRMSSNSIKCLQETDLNAMQLGDMQRLGLKTNVAVMQALQVQIDSLEKVLAKHCRAEPGYRLLKTVDGIGDVLATVILLETGGIERFADVGNYASYCRCVGSAHVSNGKKKGEGNTKNGNRYLAWAFVEAANFAVRYCEAARRFYQKKKAKRNSTVAIKAVAHKLARACYHMLKSKTEFSVERCFA

SEQ ID NO: 407057 - protein, 360 aa, unidentified
MNNPSSFNHQGIVGGVDTHKNLHFAAIVDAYDRVLASNSFPTRRHGYKSMLNWMQSFGEVKRIGVECTGTYGAGLLRYLQQFGIEILEVTAPDKIDRRKRGKDDTIDAENAAHAAFAGIRTVTPKTRDGMVESLRVLKVCRKTAIVARRIALQMIQMNIISAPEAIRELLCTMTRMQLIRTLAAWRPDLSGYRDISTAYKIALKSLARRYLELHDEIVDLDAMISVIVDELAPELVAGKAIGYESAAQLLITVGDNPERLKSEASFAALCGVNPIPASSGKINRHRLNRGGDRAANSALHIIAIGRLRTDARTKEHVEKRVTQGHTKLEALRCVKRYIAREVYYTLRKRNNFINSTQIAT

SEQ ID NO: 407058 - protein, 337 aa, unidentified
MDYFAGLDISMDETHICVLDREGEVVRESKTVSTAQAIAGELVKAPSCRRIVFETGRMAPVLFHGLSQLDLPVVCIESRQAYQALKSLATHKTDRNDARGLAHLARTGFFKAVHVKSLSAHAVRSLIIARKKLVGQRVTLENQIRGLAVVFGVRLPRALTAAFIDQALKASEGIAGLSAAMRGLITARTAVITAVAAIDADMRRMTRASSACRRLMTIPGVGQLTALAFVAAIDDPSRIRRSRDIGAYLGLVPRRYQSGEVDYVGGISKCGDRRVRTLLYEAANVMLTRYKGQLKLKDWAFAIARRSTMRKARVALARRLAIIMHAMLRDGTEFAPT

SEQ ID NO: 407059 - protein, 372 aa, unidentified
MRDDSEVYIGLDTSKLKIAVALASAGRGGEVRFFGDIDSTPEAVEGLVRKLAKRHQRLSFAYEAGPTGYGLQRQIVALGHDCAVVAPSLIPKRPGERVKTNRRDALTLAKLHRAGELTPIWIPDPAHEAIRELVRAREAAMEDLRAKRQHLQSFLLRHGRVYTGRTAWSRAHTRWLGELRFAHPAQHLVLAEYRQAIVDAEKRLEGLSQQVAEMIPTWSMAPVIAAYQAMRGIALLAAVTFAAEVGDVRRFDTPRQLMAYLGLVPSESSTGEQVRRGGITKAGNRRVRRVLIEGAWTYCFPARKSRKLEERQANLPQAVRDIAWKAQRRLCGRYRKLMDRGKLKAVVTTAIAREVAAFLWAIGREVEPLRVS

SEQ ID NO: 407060 - protein, 347 aa, unidentified
MLHAGLDLSRKKLDVCLLSDDGEHLDQLAVPPDVDSLRTLARRIQEVHREPVCAVIESMTGARIVHDTLEACGWSVEIADAQKVKGLAPLACKTDKIDSMVLAVLSHRDLVPAIWLPDPRVRQERELARFRLHLVKHKSALKCRVHSTLINFGRACPVTDLFGAEGRRLLKRLEVPEPWRSNVTASVELIDDLEDQIAEVNRRLKEGHADHRYIPLLMSVPGIGWVLAFTIASEIGDIDRFSSPEKLTGYTGLCPRVHQSGESDRRGPLTKHGPTYLRWALLEATMHALKHPAYAERYQRNKRRLGKQRGAKVAQIDIARRLSHAIWHMLTRNRPFAPRGAAFRLAA

SEQ ID NO: 407061 - protein, 343 aa, unidentified
MQIRTIGVDLAKNVFQVHGVDSAGKVVITRQLRRKQVIEFFSKIPPCLVGMEACGTAHHWAREVSKLGHTVRLMPPSYVKGYVKRSKNDAADAAAICEAVTRPSMRFVAVKSTDQQASLMLHRTRDLLIRQRTQLINALRAHLAEFGLVAETGREGVAQLAALITDESDREALPFAMKQALQAIVDQLAALELQVGTLDRAIHAHHRANDMSSRLETVPGIGVIGATAIASAVTDPSNFKSGRDFAAWIGLVPRQHSTGGKERLGGISKQGDRYLRRLLVVGATAVVRHARQHPQKHPWVMRLLAKKPAKLVAVAVANKMARIAWAIMARGGYYRAPALAAAA

SEQ ID NO: 407062 - protein, 355 aa, unidentified
MAVTIVEEARPVTCRTAITGGVDTHADTHVAAALDPVGGLLGVREFPATAAGYAGLLGWLGGFGTVALVGIEGTGSYGAGLARHVAAAGIRVVEVDRSDRQDRRRQGKSDPLDAVSAARAAQSGRARGAPKGRDGAVEAIRALMVARRSAAGERTRTINQARALILTGPDDLRARFTRHTPAALVTGLASLRPRPGDVAGYAVRVALRELGRRAQFLDGQLERLDELIVPLVTAHAPGLLTVYGLGPRTAALLLIAAGDHPGRLRSEAAWAHLCGVAPIPASSGKVTRHRLNPGGDRRANHALWRIVFTRLGSHPATRAYAERRTAEGKSKAEIIRCLKRYAAREVYRHLRPAAG

SEQ ID NO: 407063 - protein, 413 aa, unidentified
MDILYACCAGLDVHKETVVATVRRRLDNGKLWQQTRTYGTMTAQLLELADWLEAEGVTHLAMESTGVYWKPIWNLLEDRFEILLVNAQHIKHVPGRKTDVKDSEWIAQLLQCGLLRGSFVPETPQRELRELTRQRRQLVHSKASVANRIQKVLEDANIKLGSVATDVLGVSGRDMLRALIAGEDDPPKLAELARRKLRAKIPALRLALRGRVTAHHRFLLGLLLDELTHLEGLIERLTARITEVLPSPFAEAIARLTTIPGIEVRAAENIVAEIGVDMDVFPTDGHLASWAGMCSGQRESAGKRQSGRTRKGNQWLRTTLVQVAWAASHTKHTYLSAQYRRLAGRRGKKRALVAVGHTILVMIYHLLREGTTYAELGADYFDHLDTDRLTRTLVRRLERLGHEVVLRPKEPAA

SEQ ID NO: 407064 - protein, 441 aa, unidentified
MAMRKRDDEVVFPNAAGIDVGGSSHWVAVPRQASDETVREFGAMTDDLNAMADWLLACGVDTVALESTGLYWIPVYEVLEQRGLKVWLVDARQMKYVPGRKSDVQDCQWLQKLMSLGFLRAAFRPADEVCVLRAVARQRDVLLTEQASWVQRMQKSLVQMNIQLTEVLSDVMGLTGQAIIRAIVAGERDPKVLARHRHSRVKAGAEEITKALTGNWREEHLFVLGQALAMYDDIGKHLLECDAKLQTLLGQLGQTKVDLGPTPRAGSKVRAQFDVRQTLANWAGVDLTRINGLGLAAVMKILSEIGPDISRFASVKHFCSWLGLCPGTKISGGKVLSAKTKRSTNRVRQALKMAAMSLSHSDSALGAFYRRLCSRTDKPRANTATAHKLARMVYFMLTRGEEFVDQGQQRYEDLQRQRSIVALKRRATALGFQINLTPVPA

SEQ ID NO: 407065 - protein, 370 aa, unidentified
MNKCHSNTELSSHEGTRCQFNGGRCAIKLGIDVHQDFYVVVEQEGGANPKPPQRFQKQAFLHWAAKLKRSGAEVHAIYEACGFGFGLQRNLTALSIHCYVVCPQKLDEQNRRVKTDGLDAKALCLKLDRFVEGNPSALALVRVPTQEEEQKRAIHRQREQLVKARKQLEAQGRSLMVNHGFEPVKSWWKRGNFGALQVPKWMRELLLNSQPILLVLQEKIAALTIQLQGAADAQQPRGLGLMTSVIIDREIGDWHRFNNRRQVGSYTGLCPGEYSSGNTRLQSCVTKHGNPRLRAALVELAWRLVRFQPNYKPVRKWRRILAKAGANRTGPIATGAARKKAIVAVARQLAVDLWRIRTGRCTPETLGLEI

SEQ ID NO: 407066 - protein, 314 aa, unidentified
MNAPVFVGIDVSQAQLDIALRPAGRFTAPNDDAGIAKVVDQLRAVTPTVVLLEATGGLELPLVGALAAAALPVVVVNPRQVRDFAKAAGQLAKTDALDAQILAHFAEVMRPAPRPLPDEQTHALAALLARRRQLVEMLTAEKNRLASARKLVRTSLQAHITWLERELTRTDTDLAHAIRESPVWREKDELLRSAPGVGPVLTTTLLANLPELGTLTGKQIAALVGVAPLNRDSGTLRGKRTVWGGRAQVRAVLYMGALVAARYNPVIRAFYHRLCAAGKAKKVALTACMRKLLIILNAMLKHRTPWHANVAACA

SEQ ID NO: 407067 - protein, 328 aa, unidentified
MDNYANIYGIDISKNTFDVVDLEGNHSDFKNTKKGFMEFKKTIKKDSLCVMEVTGIYHLNIAKFLFKKKIDVSVVNPLRIKRFSQMLLKRNKTDKADAKMIATYGDNQKPNLWEPCSEKMEQSKDIYKVMDQMIRFRAGLRNKLSTLTTKETMVFTIKEIKEQILSVSVSILNLESKINELVKEEDAELLTNLKSISGIGERTATLLIMSTDRFKNFDSSKKLSSYFGLAPTEHRSGTSVNGSNRISKMGNPDVRKTLYMCALQASRNNKTCSVLYNRLLDKGKPKKVALIAVANKLLKITFAIAKSGLKYDPNYVSKLDRSKIVSST

SEQ ID NO: 407068 - protein, 411 aa, unidentified
MRRVIGMDIHRTFAEVVFWEEGRLRPAGRVSMTRSGLEGFGRGLGKEDEVVIEATGNAMAVVRTLSPYVARVIVANPLQVKAIAHAHVKTDKIDAGVLASLRAADFLPEVWLPDPDTERLRRLVARRNQVVRHRTRIKNEVHAILHAHLIPPCPHADLFGRLGRVWLAQQVMPDDECAAIERHLRELDRLSADLGVLDTQIAQAGSDDPAVKRLLTITGVNLIVAAGLVAAIGDVRRFTSPQKLVSYVGLNPRVRQSGLGLAQHGRISKRGRSHARAMLVEAAWAAAKAPGPLRAFFLRIRARRGHQIAAVAVARKLAVLCWHLLTKSADYQWARPALVASKLRAMELQAGQPVRKGNKRGTAYAYNVKALRDAEIELARHAEKAYERFVSQWQRRGTAKQRTGAAIEERR

SEQ ID NO: 407069 - protein, 339 aa, unidentified
MELYSGIDLHSTNSLLAIIDENGKRVFKEKLPNDISMITGSLSPYSSNLAGVVVESTYNWYWLVDGLMAEGFAVHLANPSAIQKYSGLKHADDKHDAFWLAEMLRLGILPEGYIYPKDERPIRDLLRKRSHLVSLRSSLIISLQNIITRNCGIKMNTNDIKRLRENRVHPLLADNEDLALAGQVSKDSIDFLTRQIRTIETFIEKKLELKDAYKGLVTMPGIGKILGLTIMLETGPIDRFEKVGNYASYCRTVSSQWTSNGKSKGKGNKKNGNKYLSWAFSEAAEYARRYDDKARAYYNRKLRKTNFMIAHAALAHKLARAAYYIMKDQVPFMPEKIFT

SEQ ID NO: 407070 - protein, 317 aa, unidentified
MLDTETGEMTTRQLEHESGEARRFYAELGKASLIGIEATGYTQWFERLMAELGHELWVGDPAEIRARAVRRQKTDTRDAEHLLELLLTKRFPRVWVPTPEERDLRQLLKHRDKLVKMRTAVQNQLHFLAMSQGVCRKRRLWSERGRTELEGLELGRWASERRQELLALLDRLGPRIEALDGAVRREAERRPTARELMEEAGVGPVTALAFVLTVGPIERFPSSRHLVSYLGLNPREDSSGGHQRLGHISKQGNEMLRWLLVEAGHTAARCDPEFRHQYARLKFRRGGKVAKVAIARRLAVRLYWRLRRYYAAGSHVQ

SEQ ID NO: 407071 - protein, 395 aa, unidentified
MSGVCDSYKETAMRRNATVTHMGLDIHRNFTQASACDQQGQLLWRARLQHADRQALRQELAQWPKVPVVLESSFGWGWLSDELLLAGQEPHLASSRKIAGWRKARGIAKCNRTDADLLADLWTEKKKWWEVWRAPAEVRDQREWLRYRMGLVRIQTETKNRIHATLHRHGTVNPHSDLFGVAGRRWLSLLISEPASESLLRETGRQTLKGHLVLLDQLRKHIAQATRQLRRQIKDSPVARRLMSLPGISWILAYTIIAEIGRIERFGSGRKLCTYSLLVPLADDSGDEIDAPPLGRRIGHAGRLTLKWAWIEAAHGAVRRPGRFKAIFDRRSDNGKRDRGRSYIAVAHDLCRIAWSLWKNDVDYNDCPPPRPGSRSDTSRPGTGQPEHPMVPALS

SEQ ID NO: 407072 - protein, 389 aa, unidentified
MQVIADRPEAPSAIRSDLGAIFVSIELSRSSWVITSLSPGSGEKMSKHSVPAGDICALLTRFSSLKQKAFARTGKLFPIVVIQEAGLDGFWIHRALQKEGIESHVVDPASIATSRRRRRAKTDRIDGEALLRALLAYKRGEPRVCAMVKAPTPEEEDRRRLCRERKVLIVERVSHVNRIKGLLFSQGVSGYQPLRRDRRRRLDEIKTGDGRPLPNHLKVQISRELDRVELLLEQIKAAEAERDALLDAQRIVATSPAAMLLDFNGIGPEFAAVLWSEGLFRHFDNRRQVASYAGLAPTPWQSGSIDREQGVSKSGNPRLRTTLIQLAWLWLRHQPKSALALWFEERVKRNGGRHKKSAIVALARKLLVALWKYVTAGVVIEGAVMKTAG

SEQ ID NO: 407073 - protein, 364 aa, unidentified
MKILLYAGLDVHKETIDIVVYRENERPVYLERRIQNREGSIRKVFGRLLKEGSVVACYEAGCMGYRLQRMLEGMGVESVVVAPGKVPRRARDLIKTDRRDARRLAEQLRAGTLEAIHVPDVEDEATRDYIRSRDDVRLALKKMKQRLQMFVLRYGYVYESTRYWTGRHERWLQSLRFDLPMQKETFEGYYYRIQELKGRLQEMDKRIEQIAMSERYTERVSRLRCLKGIDYLTALAMVCEVGDFRRFGSAEAFMAYLGLIPRERSSGEVRRQGRITKTGNAHLRTLLIESSWHYRYRVAVGKRLREKREGQPAGVIAYADKAMRRLQEKFFHLHMNGKTSTVAVTAVARELAGFIWGMMVGQTA

SEQ ID NO: 407074 - protein, 308 aa, unidentified
MAQNDLVVVGIDVAKDKVDACIRSLSLRQTSPGTVQGQRKLIAWLCRHRVSKAVMEASGGYERGWAKALRGAGIEVRIVDPKRVRSFAKSAGRLAKNDAIDAEMIAWFAETFCEAPGQTYDAAREELQKLVNARQGLLEIQTKIQNRDEHVAPAPVQKMHARLLKRVTTELARLEAAIAATIKATPHFAERAEIIESVPGLAGTTAANLIVGMPELGQVSNKIAPALLGAAPYDDDSGRRRGERHIKGGRRKVRNAFFMPCLGAATQHNAVLKSFYQRLLAKRKGEEGRAHRLHAQADRDSQHHARAR

SEQ ID NO: 407075 - protein, 363 aa, unidentified
MKHLTGGSMKNITRVGVDLAKNVLQVCGVDALGKVVFNKSLSREKFLPWCSAELEPGCVVAMEACSGSHFWARELIKRGFNAKIIAASHVSPYRMEGKGGKNDANDAAAICEAVNRPSMRFVPVKSSNQQGILCVHRLREGLKEERTSCINRIRGLMAEFGIVVSRSPDKLRENLQDLIEDAENGLDWLARLAIQEQYSHWDAIDQRIAWSDQRINAHIAEDAQAKVAKQLIGVGPLTASALIATVVDFKQFKNGAQFGAWLGLTPRQSSSGGKAKLGKITKKGDTYLRTMLIQGAKAAVMTAHKRDDPISKWLLNLKEKSGWQIAAVAMANKNARIVWALMTKGTSFDPRHISVQQFRVSEA

SEQ ID NO: 407076 - protein, 335 aa, unidentified
MEHWIGIDVSKATLDVALLDEHGKVMAEEQIGNSEKGLRSIWKRWSKEYGLRKDMCMVCLEPTGHYSHLPLETLVALGVPTWLAHPSDINKSIGSTRGKNDRIDAMRIADYARRFQDKARLVTADHLRTNKLKQLLARRENLVRRKTMHHTQVRDLNRHVDQSLRSAFTRIDKALITALDKAIKQVETMIKAAIAEQPELQRKYDLLLSIDGVGPVLAAHLLALTEGFLRFTTARELACHAGVAPFEFSSGSSIRGKTRVSKQAQPTLKYLLHMAAVGVTARKGELQDYWRRKVSEGKHKMSVLNAIRNKIIHRIFAVIDRGTPYVKCTLAHVIE

SEQ ID NO: 407077 - protein, 371 aa, unidentified
MIPAVVERCAGIDVGKKTLAVCVMTGAASEEPQAELRKFGTVRAELIRLREWLKSAGCTHVVMESTGCYWKPILNVLEDDPEFQLHIIVANSQQVKAITGHKTDPHDARWLAHLLRHGMIRPSFIPSRAVRDLRDLTRRRKQMIETGSEERNRIQRVLEDANVKIGDVLSDVFGLSGQLMLEALLEGKATHLEIAQLAKRGARKKISELEAALEGHQMRNTHRVLISNALRHMAFLEREIEQLDGEIASLVRDAGLEQQWQLLQTIPGIRETAAATILAESGGDMKQFPAPSNFSSWSGVAPGNNESAGVRRRAPTVRGNPHMKAALVESGWSASRTKNSEFQCNYERLKPRIGHRRAIVSADPSQALVID

SEQ ID NO: 407078 - protein, 326 aa, unidentified
MANLEKKVIGVDVSLKMLTLNYKDSEGVIITRNIPNLKKDILGNLNFFDKEEYKIIVEATGAYSSKILYFSYELGFEVSMVNPVSIKRYGELKNHISKTDAEDSRLIREYGEQVEFRPYTPKSKTLEYLDQELNLWHDLEQSKKKYGLKLKALQQKALCSKETIKHYERLIRNHDCEIEKVMSRMSSLQDEELKRDVDLLSSISGIGEKTALLLLVATNGFKNFANAKQISKYFGVAPRLYESGTKKKSLGKCRTTKKHVRSILYVCSWTAMRFNSQCRELYQRILSKNKSKKVALIAVCNKLLRQCFGIMRSKTPYQKNYLQLNV

SEQ ID NO: 407079 - protein, 345 aa, unidentified
MKHFAGLDVSLEETAICVVDETGTMVREARVSSEPEALVAFFRGLGLVVERIGLEACSLSAWLHESLVAASLPAVCIETRRAKAAMGAMPNKTDRNDARGLAQIIRTGWYRAVHVKSPTCRSWRALLTARRLVLNKMRDLENGLRALLREAGLKLGTPARKEFAARLRELTAADPVLSIMTEPLLTIIAAMTRELAQLTKRVLDIVRDEPVCRRLMGVPGVGPLTALTFRATIDRPERFRRSRDVGAHLGLTPKRYQSGETDVQGGISRCGDELARTALYEAAHSLLIRSRKWSTLRAWGMQVAKRRGMAQARIAVARKLAAILHRMWADGTEFRWGEADAAVAT

SEQ ID NO: 407080 - protein, 407 aa, unidentified
MEVVIERACGMDVHKDNITACILTPEGKEIQTFSTKTVFLLQLVDWIKQHNCTHVAMESTSVYWKPIVNLLEAEDIELLVVNAQHMKAVPGRKTDVKDAEWIAKLLRHGLLKASYIPDRNQRELRELVRYRRSIIEERARQHNRIQKVLEGANIKLGSVVSDVLGVSARDMLDAIADGEEDPEKLANFARRTMKKKKEELELALKGYINSHQRLMLKTILGHIDFLTEQIEMLDQEVADRVSSHQEDVARLDSIPGIATRMAEQILSEIGTDVKKQFPTAAHMCSWAGLVPGQNESAGKRKSAKTKKGNKYLRSALTEAAHSVRGSKNYLGALYRRTASRKGKKRAGIVVAHAMLRISYYLLTRKEMYVDLGEDYFDKQRQQSIVRHSLRRLESLGYTVTLEEPKAS

SEQ ID NO: 407081 - protein, 377 aa, unidentified
MSKLRFVGLDVHAETIVVAVAETAGEVRSLGANPNRLESIRKLVHRLAPVQHLRACYEAGPTGYALYWQLTQLGVECAVIAPSLVPTKASDRVKTDRRDAEKLARCHRAGELTAVWVPDAAHEALRDLVRAREAAKKDQLRARHRLGKFLLRHGQQRPEGVKVWTKKHREWIKSHVRFEQPALEATLADYLEEVDHVGNRITKLETAIDEAIQQAPPAIRAVVEALQALRGVAQTVAVSIVAEVGSLSRFPNPRALMGYSGLVPSEHSSGNRVQRGGITKTGNGHLRRVIGEAAWAYQHRPNVIGFLAQRQKRLAIGEESKKIAWKAQQRLHKRYKALSARGKNKNQIITAVGRELLGFIWAIGVSIEKQHQVTAAA

SEQ ID NO: 407082 - protein, 372 aa, unidentified
MASIIYVGMDVHTTNFTFCCYTADSDRGFAVAQTEPDYRQVIKYMERVQKQRGEECKFVCGYEAGYLGYSLYHQLTRCGVDCVILAPSTMHQEKGKRIKTDRRDAENIARCLAFSLYSPVYVPTTEEDAVKEYIRMRDDIKADLKRVKQQIIAFTTRHGFAFDGKSYWTQKHLKWLETLVFEHPLYKETLQEYLILYYMLDEKVAVYDTRIEEMSHLEHYEENVQKLCCFRGVAAHTALSLLVEVGDFQRFRSAKHFAAYLGLVPGEHSSSDKQIRTSITKAGNTHLRRLLVEAAQSYNRGAIGKKSAALKARQGGNPAKVIAYADKANERMQRKYYRIAFKSRHNIAKTAIARELACFVWGMMTGNISNAA

SEQ ID NO: 407083 - protein, 363 aa, unidentified
MCKVIMIGCDLHDSTTVLKVADGPDQTVRKGFATSDRSAMIEWIKDFASQRGAARIVFAYEASGQGFGLYDDLTDAGIECHVLAPTHLPHTTHSRKNKTDDKDALMILDEVRAHVLAGRTLPDVWVPDHQTRDDREIVRLRLEVATQRTRLKNQIRNLAKRSRLAFPDDFTSSGDWSKRSVEWLREVAAGKTGTLREGVRTALASLVELYQAMSVQIQALDQAIKRLSRTERYARSYRKLKLLSGVGTLSAMVFLTELGDLARFANRRQLAAYLGLAPSAFESGERDDRKGHITKQGPARVRHVLCQAAWAALRVSPEWRAKYDRIRRGSKSRSRIAIVAVMRQLGSGDVAGCPFAGTRCAAG

SEQ ID NO: 407084 - protein, 341 aa, unidentified
MDKELYFGVDVSKKTLDLAYYDGETIDWKNAHIKVSNDDAGFKKIGSWVAKVGKDFDTFLFCMEYTGLYNQNFRLWLESKEYIYGMVEPRKMHHFEPDLDDDQRSLDRIKTDELDAFRIAIYCEQNHKKILRNPSKLPSPVYFKLKRLLAERKQNTKQSTLYKQQLHDICAYDTDLSVERKKLLLKNMKENQKAIDKEIDSYMNEDASISKNYDLLTSIPGIGRIIALETIVLTENFTAISNPRKYACYIGIAPFKKESGTSVRKRTSVSKKGFSEAKADLSIAVLSAIKNNPSIRDYWIRKRKEKCGGIVLNAVKFKLVLRMFAVIKRGTPYVETDAYKN

SEQ ID NO: 407085 - protein, 417 aa, unidentified
MKCFVGLDVSSTKLDVCIMLSDTSTPVTASLSNDLSGATEIKNHILDLNHTYHFERIVIGMEATSLYSFHPAMFFHEDSQLKELHVEIMVEQPNKIKKYRDAFEENKNDTIDAFYIADYFRIERFSPSFLKEEKYMALQHLTRTRLQIIEQLTRTKQHFIENIYYKCNTLAYQFKKEELSTNLWSSTMMTLMTDEMTLDELANMPLQELADWLQQMGKGHFKDSEKLAQTIQAAIRGSYRLSKLQQDSVNVILGLLAREIRNLEKMIKEIDKAIEDMVETIPEYQCLTSIPGVGKVYAAGIIAEIGQIERFKDHPQVVKFAGLNWREKQSGNSNSQHTSLVNRGNRYLRYYLVEAANSVRRYDDEYKDFYKKKYHEVPKHQHKRAIVLTARKFVRLVDVLLRNHQLYTPPRRLMEDN

SEQ ID NO: 407086 - protein, 410 aa, unidentified
MASRKEGAFGPHELYVGVDVGKSFHWAVGLTAAGEVVIDRPLPNRQADVDALVAEAGAGALVVVDQKNNIGSLVVRRCRAAGTDVGYLPGKAMKQARDLFPGTAKTDRIDAEVIARTAMGMRGVVLPIAESDDLGASVSLLSSQLSYATRRATMARNRLHAVLLESDPAFEAACDLKSAWLLSVLAELGGAAGVSAAGKRRYRSLCGRLRAREAARDALWEEAVASARDGFHPDAEDALVRSLAAEVLAADAEREALQADIASRLSGDETYRCLLTVPGVGVKTATALVTMVDVSLFGGDDRLASYCGLAPSDRQSGTSIDSASSSRSGNKDLKNLLVFTCNSLVGTNNRFGRYYEQCRSRGMRHNKALKAVARKRLGVIYAIMRDRVPYEEPPAPAPVENSCQAPLAEP

SEQ ID NO: 407087 - protein, 360 aa, unidentified
MNATTVAVDLAKSVFQLAVADEHWRIVETQRLTRAQFERWFVNRSVGLVVMEACGSAHHWARWLNSFGIEVRLLPAQYVRAYVRRNKTDASDAAALLEAARASDMRPVRVKSVEQQALQGLHRIRSLWMGTRTSRINALRGFLREFGIAVPVGARTGLEAISRVLADPASAVPELIRGSARLLVEEIRLLEARIAQLERELAALARLSPACTTLLSIPGIGLLTATALVAATSGDVTHFKDARHFASWFGLTPREHSSGSSRFLGKISKRGDRYLRMLLTHGARSVLRAAKVAEAAEREVCGVRRWALDVQRRSNHNKAACALANKLARICYATLRDKTPFGETERLNKKITRESFVMPA

SEQ ID NO: 407088 - protein, 394 aa, unidentified
MRFAGIDIASETQVVAIVSAEGAVELKATAFTEDAAGYEKVLALLGPAHEVLIAMEATGHYWKNLFAVLAAAGHGVALLNPLRTHRFAGVDLERTKTDALDALGIARFAAEKRPPATPLPDALTEELRELVHLRERLLQDFGDRVRQLHRLVDLGFPEFTRYVRTLDSELAVAVLRDYPTAAAFHGVSVRRLAALRYDGRHHVGLDLARTLIDAARRSVGQHHSATYRLQIRYACDDLDLLRRRLRDLDRDIEGKLREHEVGRLLTTIDGIGTNTAARVIAEVGDPAHFHSAGALAAYVGTIPGLKQSGKRQHARGSITPIGNARLRAALWMPTLTAVRTDPGLRAHYERLRARGKMPKVALVACMHKLLLAIYRVAKHHRAFVPQLGQPSAFR

SEQ ID NO: 407089 - protein, 273 aa, unidentified
MKRIKFVGLDVHAETITVAVAEQDGEVRSLGVIPNREEPIRKLVKKLGPAEQLRFCYEAGPTGYVVYWQLTALGAKCEVVAPTLVPVKSGERVKTDRRDALKLARNYRAGELTAVWVPDAVHEALRDLVRAREAAKKDQLRAKHRLGKFLLRHGRRPPTGVKPWTLKYLAWVKQEVHFEQPAQEATLLDYLHEVEHAEARIARLDLAIEEAVKSTPPKMKAVIEGLQALRGVAQVAAVTIVAELGEVSRFSRGRQLMGYAGIVASEHSSGESN

SEQ ID NO: 407090 - protein, 432 aa, unidentified
MEPSATTPGTSFAELTHYAGFDWSKDQHQITVVDRAGQVLLDLSFENTAAGWAALREKLRAFPKLGVAIETRCGPAVERLLDAGLSVYPLNPKAAQRYRDRKAPSGGKSDRLDARSFADALRTDGHGWRMLRPQDPLTQELRLLCRDEIGLIEQRTALVNRLQEALHEYYPAALQAFDDWISPAAWAFVVAFPTPQELGRAGKRKWEKFLHTHKLYRPQTAGQRLEVFARAAEFANPSSAVTRAKSFLAVALAKQLRLLENQLNEYRQRIAKLFADHPDHDVFGSLPGAGEKLAPRLLAELGSNRGEFDSPKALQCYAGAAPVSFQSGKMHRVHVRRGCNHWLRATVHLWADQSRHFCAWAQVYYQQKKQQGMAHAAALRCLGQRWLKILWRMWQDGVPYDEALHLRNQVAHGSWVIALVPPAACDSTPRQR

SEQ ID NO: 407091 - protein, 359 aa, unidentified
MRIIGCDLHARQQTLAMLETATGEVVKTTLKHEGNSVWEFYSSLPRPVRVGIEATGSMQWFVNLMEELGIDCLVGHPAEIRAAEPRKQKHDRRDADLLLSLLVEERFPKIWLPTKELLDLRALLRHRHQWVGLRVKIQNALQAIALANGLRRGSSLWTQAGQQAIASLPLSPHAAYRRNELQAMYVKFETEIEKLNQRVEQQARERLGARLLMTHPGVGPITALATEVFLGDPSRFAGSKELASYVGIIPGEHSSGKRQRLGGLSKQGNPLLRFLWSEAAIHAVRRDPELKQFYRRKLIQKGLGKARAAVARKLGIRMWIMLRDGIEYNEFCRRGQRQEKSGDACAGMPQRRYGAKVAG

SEQ ID NO: 407092 - protein, 318 aa, unidentified
MEPNVFVGIDVSSKNLDVATRPVNKPLRVSNDAEGHLAIVETLRGQAVLVVLEPTGGYERPLVVALVEAKIPIAVVNARQIRDFAKSRGKLAKTDKIDAQMIAAFAEANRPEPREIPDEETRGLEALVNRRRQLVDMRATEMARRDLASKIVRPSIEKVIKLLSDQIDDVDSDIGTRIKKNSVWRANDALLQSPKGVGPVLSRTLMALVPELGKLDRKKIAALVGVAPFNNDSGTKRGRRSCWGGRAAVRSVLYMATVVAVTHNPVIAATYKRLRGQGKLVKVALVACMRKLLTMLNAMVRDGRPWCPPLLAEGAGNA

SEQ ID NO: 407093 - protein, 469 aa, unidentified
MGKSIKSKQLNISGNKGSILISKLQSKNLENVMIIPIEIGKNQHKALIANYFGSLLKHPFEFHNSKEGLRFVHNSIIDVSKHQPVEEILIGMEATGHYYKKVAATLHEMGYNNLFIFNPLSTSYCRKAGLTWSKTDDIDLRAIGQSLIAGYGTVYRPEKPLWEDLKEVCRYRRLLIKQQTSLKNRVHFFFDLLFPGITKLAMFKDSHSFKPVSLDFFLKYPDLELIKQLRPKSIVNFFQRRGRRISDESANQLIKWSKDALHSHCPTNPCRQFIFKELIDQLKQLSHYICQVEIKSIGYLVKTPAILLLSINYIGPIRAAEFAGESTPLEQYPRSRALIKAAGMDPTRYQSATSESSHHPISKRGSKRLRYITIQIANSLMMHNQYFASAAKELMTKGKSKNCACVATGTRFIRIAYEMITNQKSFQPANGLGINSDPLNKITTFLENHQASDLTEEYISCANKYFKKG

SEQ ID NO: 407094 - protein, 377 aa, unidentified
MNFIGIDVHKKQSQICVLDEQGEVCFETRVPTSREHLKDAVLIYKGAKVLLESSTPSEWVARHFESMGMDVIVADPNFAPMYATRSKKLKTDKRDARCLAQACKLGAYKLAHRLSDEQRRVRMQLDVRQTLVETRTKLTNQIGALLLGSGYQVATGAAENYARRLEALDLPLELREQLAPLVNMLTPLNQQIGELDKQIEQRADAEPEAQRLQSIPGVGPVTALMFLAVLDGAKRFESAHSVMSYMGLVPREFSSGEKQLRGHITKAGASRARSLLVQAAQTLMRVKRPQTEALCKWAEGIAQRRGKRIAVVALARRLSGVMWAMLNRIQASAIREEHCADGAHTSCEPSESRAFPSGSSCLSDRSDCPACRRRGRC

SEQ ID NO: 407095 - protein, 429 aa, unidentified
MNSTQNKKIEQVKETTMIVGIDVGSEQHYFRAFNWRGIELTRKPVAFSNSMEGFNSFYNTIMELMQKSELEEALVGIEPTGHYWFDLGQFMGEKNIKFVMVNPHHVHKTKELDDNSPSKNDRKDPRIIAGLVRDGRYFYSYMPTGVYAELRNASNRRFVLVEEQTRAKNRLQKWIAVYFPEYKGIYTRIDAKGGLLVLKQAPTPEEITKLGEEGIIKIWKDAKLRGSGHKKAMKILNAAMRSIGLKAGLTEARMEIQDLIEDYELQTRRLERVNDLIKELCQQVRYADKLLEIKGIGITTVAGFIAEVGDITRFDSTKELQKLAGLELVADSSGKHNGRTKISKRRRKRLRYLLFEAAISVVGKNEEFKEIHRYYTTREKNPLKKMQSLIAVACKLIRVFHVILTKGVSYDASKMLKDIQHPGEQLKAA

SEQ ID NO: 407096 - protein, 354 aa, unidentified
MRKWKYVGMDVHKSTITIMVLNEAGKREMEVVIPTKAEAIREFFEMLSGNVKVVFEEGTYSAWLYQLIKPLVSEVFVCEPRHNKLIAVGNKSDSSDAYALAYLLRLKGIKTVYKGDQRQREIKELVRAYENLVSDATRVKNRLKALYRGRGIDCAGRAIYRRSQRDEWLQKLSEPGAHFRAQSLYTELEHIQGLRQAAKQRMIEEARQHPDYRILIRLPAFGPVRVAQLLAVVGTPHRFRTKRQFWPYSGLAVITRTSSDYQLINGKPVKRQKNFGTRGLNQNHNRQLKQVFKSAATTAMHIEPFKQYYQKQLDKGQRSELARLSLARKLAAITLTVWKSRSEFDPAQAIMVAE

SEQ ID NO: 407097 - protein, 407 aa, unidentified
MSQEKARPERFVGLDVHKHYLVAAAVDPDKNEVLSPRRVPLARLDTWVRKTLTPGDAVILEMTTNAFQLYDDLLPHVHSVTIVHPPHVALITRAQVMTDKIAARILARLHAVGLLPSVWVPPAEVRDERALVAQRSKMVRLSTQAKNRLHAVLHRHHLLPPAGKPFAAHNHEWWLELEISELERARVRCDLDTLAFAQAQVAHLEETMVALAAQDERVELLCQLPGVGLITALTLLAAIGDISRFPTAKHLVGYAGLGIRVHDSGLTRHSGRITKAGRRDIRAAVVEVAHVAARTHSHWQEELARLEPRLGKNKAIVAIARKLLVAVWHVLTEGCADRFADAEFVARKLLKHAYRLGRAHRPHGQTAAQHVRQQLDRLGLGQDLTAVRYGDRIVPLPPSGLGTEESN

SEQ ID NO: 407098 - protein, 335 aa, unidentified
MQIYGIDLAKEKFDVSFFDLTSKKVSNQPSHKVVTNNLKGIGKFFKSLPSDAVLVAEHTGVYGDTLLKCCMDSNVKIAFVGGYVIHRYRATPDRAKTDVLDCALLRDFGERYPDKLKYKTFPEEALYELRQLARHREMLVEQRKQLITADKSEDCRPIRSLAVKRSMDRIKEMLDTEIAETEKEMLKVINGHESIHHNYELVKSVDGVGLITAVELLVKTENFTKITTARQYAAYAGTAPYEKSSGKMDKGAHISKIGNRRSKTLLYICAESARLHNKEIKLYYERRTLIDKKPRHYVLNAIANKLLRIIFTLVEKGEYYDANFIRQDPRVVKYN

SEQ ID NO: 407099 - protein, 371 aa, unidentified
MKKNNSSQKRVKQDQEFWKGPITIGMDLGDQASRYCVIDGGGEVVQEGSVGTTRAAMTQTFAQMKKCRIAVEVGTHSPWVSRLLKGAGHEVIVANPRQLKLISTSSRKDDKVDAQMLARLARVDPELLRPIRHRGEEAQMDLMEVRARAALVEARTSLVNAVRGFTKATGERMESCDTDQMGVEKMAELPESLQLVLRPLLKQVEFLTAGIKQYDREIEQIARVKYPETKVLTQVGGVGTLIALTFVLTVEDKERFRHSRDVGCYVGLRPKRSESGESQPQLRITKEGDVYLRKMLVQGAHHILSNRSEDTDLKRWGLKLAERGGANAKKRAIVAVARKLGILLHRLWVTGEVYEPLRNSEAAERLQKKAA

SEQ ID NO: 407100 - protein, 328 aa, unidentified
MSKAVIYVGLDVGATELWISAEGIKPKKFNHDYAGIKSLRRWVIKHAGDNGIHLCMEATGVYSQHVAIRLLELSGIEVSIVNPACIKAFANVQLRRSKTDMIDAEVIRGYAQNQKPSAWQPASKTKRQLYELVRQADSIQASLQQWRNRNHRQEYIHDFPKAAIKAQRAIAKTLEKQLGLLELAIDQLCAADSDLAQQIMLLESIPGIARKSAVRVLAHGRDWLTDRTAKALTAHAGLAPHHYQSGTSIRGKSRIDKRGNKNLRRALNMPALVGIVHNPILKPFYNRLLDNGKQKMLALTACMRKLLLIIRSMLINKTIFNPEINNLT

SEQ ID NO: 407101 - protein, 341 aa, unidentified
MKKFIRIGVDLAKNYFQIHALASESGPAVTRKLKRSKMVEFFSQIEPCLVGMEACGSAHYWARKLKKLGHEVLLMPPDYTKPYVKRGKNDAVDADAICEAMSRPGMRFVPVKSAEQQATLMLHKTRELLVKQRTMSVNALRSHLSEFGIIAAKGIGRVDELLELAESDATLPAATRAAVEVLALHLEGLDKSIDDLEDTIASAHAQSEMSRLLDEVPGIGKLIASVIAASVPDAGVFKSGRDFAAWLGITPRQNSSGGKQTLGAITKQGNRYIRKLLVLGATSLLRVVGKRKGALRDWIVGLLAKKPARLVTVALANKLARIIWAMMKTGESFRTEMFAKA

SEQ ID NO: 407102 - protein, 430 aa, unidentified
MKSNTQNAKIEAITEKTLVLGIDVGSEMHYARAFDYRGIEYSKKPFKFSNTEAGFVTFKEWILDLKERYEKDKVVPGMEPTGHYWFNLGKFLQDNEMKPVLVNPHHVKKSKELDDNNPTKNDRKDPKVIAGLVREGRYMIPYLPDGVYADLRTASNIRFQLQAELTRIQNRISRWFNIYFPEYKTVYGKPDAKSGMLILKAAPLPEDILMLGIDGVNQIWRDAKLRAVGKARAKTLIEAAEHSVGSKEGAVSARMEIRMLLEDYESRNTRLQEVMVLIEELVRKIPMAEKLLEIKGVGIRTVSGFLAEVGDISRFNNPKELQKLAGLALVENSSGKHKGETTISRRGRKRLRYLLFEVAMSLVSKNQEFRELHNYYTTRRLNPLKKMQSLMAIAAKLIRVFYAMLTKGVDYDPKKMVSDIRRPAAYLQAA

SEQ ID NO: 407103 - protein, 385 aa, unidentified
MTSTNTRFRIIPAQFDIFAGLDVDKKSMATTFSDHATLSKSLRLPYSATDLLNYVNKHFAGKRIAFVYEAGPTGFGLHDELVARHHTCLVVAPSMVPTEPGKRVKTNRLDSRNLSVRLRGGELNGIHVPGRCYRELRHLVQLRDTQMRQLTATKCRIKALLLYEGIEFPDPSGRWNARAIDGLYRLPCSSEVRFKLDHLIGTLYFHFNSAATVQKRIRQFCKNEPELHQSITLLTTLPGVGWITAAHAVARLGDWRELKNVRQIAGFLGLVSSEHSTGEKENRGPITRAGDSRLRNKLIQCAWVAIHKDPELRAFYRSVYQRQPKKVAARKAIVAVARKLTTRMSVVLKEQRPYIIRPEISVAPLTAEETVGPRERLDATQNEQL

SEQ ID NO: 407104 - protein, 450 aa, unidentified
MEHGMTQQAQAKKRAPRLEVTNPNAAGIDIGSASHYVAVPADRDDEPVREFKSFTVDVHKLADWLEACGVDTVAMESTGVYWIPVYEILERRGLTVLLVNARHVKNVAGRKSDVLDCQWLQQLHSYGLLRGAFRPADQICVLRALNRQRGMLLRMQARHIQHMQKALVQMNIQLANVISDVVGETGQKILRAIVAGERNPHVLAGMRNVRIKASEEDIVQSLRGNWRDEHVFSLKQALELFDEYGKKVADCDELMEQQMIMLHQHDGVLGKARKQSGRNKPKFDLRTRLYQMCGVDLTRIDGIEVGTAMTVLAEVGVDMSKFPTVKHFAAWLGLCPGTKISGGKVLGSKTQKCANKTAQALRQAASCLKNSQSALGAYYRRMCAKMDKPKAITAAAHKLARLIYTMITKGEEYVDQGQTYYEERYRQRVEVNLRRKAETLGLRLVPMEAA

SEQ ID NO: 407105 - protein, 371 aa, unidentified
MRFYSSQHQFYAGIDLHARSMHVCVLDAGGTVVYDRNLACHFPTLLQAIAPYRGDLVIGAECMFGWYWLADCCAENHIPFVLGHALYMKLIHGGKAKNDRLDAAKIARLLKGGNFPLAYVYPQGMRETRDLLRRRMYLVHKRAELITHLEILNAQNNLPPFGKKLSYAGNRAELHIPERFAHPSVHMSATLDLDLIDKLDELIAEVELYLTRTAKVDDVQMYHRLRTIPGVGPILALVLLYEIHDLARFEEVGQFLSYARLVRCEHESAGKKLGWGAKKIGNAHLRWAFAEIACLFLRASERAKQWKQKQEQKHGSGKALGILAARLARSVFHMIRKQEAFDAKRFWSGQVSGEQPGPSRKKPAKSRKKAS

SEQ ID NO: 407106 - protein, 385 aa, unidentified
MCRFSDPGVTTATRDLEDIVDQQWGVAGIDPHKHNFTIGVVDGCGARRDLAAFDMTKDGFAEVLVWFDELGLEIGRVGVEGSNGLGRQLSLFLTSAGFDVREVQSNRTAERRRRRRRQKTDREDAEAIARETLAHDDLPPAGKQHRPDPVWDELVAVRNHRTSLVRRRVRLLNEAEGVLCGLPLAIRAALPATSRVRPRLKALVAGAAAAIETCAADQVHLAWLTESASDITQLDSRIRAIDKQIPALLARLGSTLADEVGIAAVSAMDLLVEIGDPSRFCTEGQFARWCGAAPIAASSGEGRGDPTHHRLDLAGNRQVNSVLHTMHVTQIRCHEPAKEFVARKRTEGKTSREARRAHKRQLANRVIRRMWDDHHRRRSDMSAAA

SEQ ID NO: 407107 - protein, 360 aa, unidentified
MNATTVAVDLAKSVFQIAVADEHWRIVETQRLTRTQFERWFANRSVDLVIMEACGCAHHWARWLNGLGIEVRLLPAQYVRAYVRRNKTDATDAAALLEATRASDIRPVRVKSVEQQALQGLHRIRSLWMGTRTSRINALRGFLREFGIAVPVGARTGLEAISRVLADPASAVPELIRGSARLLVEEIRLLEARIAQLERELAALARLSPACTTLLSIPGIGLLTATALVAATSGNVTHFKDARHFASWFGLTPREHSSGSSRFLGKISKRGDRYLRMLLTHGARSVLRAAKVAEAAEREVCGVRRWALDVQRRSNHNKAACALANKLARICYATLRDKTPFGETERLHKKITRETFVMSA

SEQ ID NO: 407108 - protein, 431 aa, unidentified
MGYERVEWSGDDGTQISCVAGLDLGKAELACCVQRMDPDHPGRQVQQVSTWLTMTNALTALAAMLVSMGTQLVAMEATSDYWKPVFYRLEAHGLNVIVVNAKQFKHLPGRPKTDKLDSQWLARLASKGLLRPSFVPPADIRQLRDLTRDRADLVDQRTANKNRVEKLLEDACIKLSVIASDIFGVSGRAMMNALIQGERDPQVLADMARSRMRTKTAALVEALTGMFTQHHAFRLKLLLDRIDALGDDIATLDTQIDKLIAPYEHQRQQLASIPGVSAVSAAAIIAEIGVDMARFPTAGNLASWAKYAPGVNESAGKQKGSGSTGKGNKYLARALGQCAVATRRTKTFLGERYRRLARRIGAAKAQTAIGRSILVGIWHLLPDPTATWIDLGPDHHQHHHNPQRAIQGHIAALETLGYNVTIAPKQSSFSD

SEQ ID NO: 407109 - protein, 351 aa, unidentified
MLIIGCDYHPSVQQIAWVDTETGEMKERRLQHGGGEAERFYRELKEKGCRVRVGMEATGHARWFERLLRELGFELWVGDPAQIRAKRVRKKKTDREDAVHILNLMLKEDFPRIWVPTPENRDQRQLLLHWHRLVQMRTRVMNQLQAVALNEGIRRKRGLWTKPGRAQLEGLQLPTWTSRRRQELLELLDQFNPSIDQLSQAVEHEAEQQPEVQRLMTHPGVGAITALALVLVLGTPEWFGCGKQVASYLGLVPSEDSSSDRRRLGHISKQGNTLLRHLLGQAAQSVANSDQQWRRQYAQLAMRRNRSIVKVAMARKLAVRLYWMWRQGYDYQQWTSSVRTRGKLEMSHGVK

SEQ ID NO: 407110 - protein, 375 aa, unidentified
MSVYVGIDVHRKRSQVAVVDQTGEVQVNRNVVNGVAPILKVIGELPIGTPVAFEAAFGWGWLVEMLEDYGYDPHLVHPLRCKAIASARLKNDKVDAATLAQLLRADLLPEAWIAPPAVRALRALLRHRVALVRLRTQLGNRIHAVLADHGLDRAGGFRSGVGRAWLAELDLPPVSRTVIADCLAVIDGLQPSIDRLDVEVAQRAKADPRVQALTRLPGVGVFTALVILAEVGDITRFRNARTLASWAGLTPTVRGSDLVVRHGHISKQGSAWLRWILIEAAQTAKRSPAFAPTYQAIAHRRGKKIATTAVARKLLARAYHLLADAETTPAGAPHTSTTHAPAPAGTSPATDREGRTPGRARSCGMSRPGEPPTSD

SEQ ID NO: 407111 - protein, 341 aa, unidentified
MAVAGGLDLHRGQLTFDYVDTGTGESWRGRISPADRESLRGWLRRFHGVPDVEFAVEGCTGWRYVVEELRRAGITPHLAEPAETAGLRGRKRRAKTDWADARHLRDLLLDGRIPESWIPPAHVLEARALVRLYKDLLEERTSWQQRVHATLFHQGIPVVPKLGTADGQQRLDAAELSAAGRRAVQAGLRQIERLTQEMASLRRELARLSSRQPGCRALRRAHYGIGGLLSVAVWAELGDCRRFSSSDDAVRHTGLDITIYDSDGKRARGHIARQGPPVLRWALYEAALYASRPASPDYAYYCGVRDRIDGQRALLSVARKLARRCYHTLRDLGEDALAPAA

SEQ ID NO: 407112 - protein, 414 aa, unidentified
MALVRWTGRAIGLDVHRDFCVVAICEEGQVRSGARVPSTPEGLAVLAESLMASDRVALEVTGSCWEVARILEPYVERVVVVSPDDTGITQARAKTDRLDARTLARLLWSGELESVWMPDERCRVLRRRLARREQLVHARSRAKNEIQAVLQRRLQGKPPCSDLFGVKGRRWLAGLELPLEERESVEAGIRHIDFLDTEIAAVERLIAQQALNWPEIRRLMSVPGVNLICAATFIAAVGDPHRFLTSRKLVAYLGLDPKVRQSGDGPARSGKISKRGSASARWALVEAAWSVVLQPGPLHAFYERTRARRGHGKAIVATARKLAILFWCMLTRGEDYAHQQPSLTRKKLRRLELTAGAPKYARSAGGVWSSNVAIRQAERELAAQAEASYKRLVTDRQAAAPARKVGASVTAERA

SEQ ID NO: 407113 - protein, 350 aa, unidentified
MNIMPDTPPIVIGGVDTHLDLHTAAVVTTDGTALDTASFATTRQGYRRLLTWMRSHGHVDRVGVECTGTYGAGLVRLLGREGIPVLEVTGPDLAARRAKGKDDTLDAIAAARAAAFGQRVQVAKNRNGQVEALRVLRTTRKTAVRCRRATLQQLHNTIVAAPENVRDELRDLTRMKLLRTLAASRPNTQAFRDQTVATRIALRSLARRLLDLNDEIAALDELIEPLINELAPTLVQLPGVGPESAGELLVAAGDNPDRLRSEASFAMLCGACPIPASSGKTERHRLNRGGNRQANSALHMIVISRMRIDPRTKTYVARRLAEGRTKREIMRCLKRYIAREIYATLTRPPT

SEQ ID NO: 407114 - protein, 451 aa, unidentified
MNYKKKRLSNLLEQVNLYAAGIDIGSTEHFVAVPEGLDEESVRSFSSFTGDLNCLADWLVRIGVQTVVMESTGIYWIPLFEILEERGLEVLLVNARHVKNVTGRKSDVLDCQWLQQLHTYGLLRGAFRPPEQVLALRSYMRQRDNLVRYCASHIQHMQKALRQMNLLLDNVVSHITGKTGMAIVRTIIEGERDPMVLAQNRDGRCKRSIEEIAKSLEGNYREEHLFSLKQSVALYDFYQQQISECEQAIEQQFKLFDAKEGLPEIPSPSGRKSPQAPAFDVRTDLYEMVGVDLAQIDGISELVALKLISETGPSMERWPSAKHFASWLGLSPDNKISGGKILSSGTVPTANRAAAALRMAAYGLSNSKSYLGGYYRKMRARHGAPKAITAAAHKLARLVYSMIKHGAEYVDQGEAFYEQEHKERIIKNLKRRAKEMGLSLVSEDGATTVTV

SEQ ID NO: 407115 - protein, 427 aa, unidentified
MRVLYDRVAAIDVHKDMIKVAVRVPGKKRGSRTTDVLEFRTFYGVLQAMARELRRRGVTHVVMEASGVYTEPVYYALTELDFTEVLVINPAHAKALRGHKTDARDAVRMLDLYECGALLRGSYIPSPDLREVRDLVRYRVKTVQARTSEIQRLQKTLESAGIKLDSVVSDITGMSSTAMIEALIDGERRGEVLADLALGRMRAAGKLADLSMALTGRFTDHHALMCRLHRDRIGMFDDAVGGLDAKISPLVARYAREAELLKTLPGFGEVVAAGWLGAIGPAPHQHFGTAERLASWVTLCPGNYISARKSRSGRTGDGGNYIKPLLVQAAWAAIRTPGRLQARFHRLVRKLGGPKNKGARKRAIIAIAHTLLKIAYAVLKSGKPYQEPGADFYTRRESAQAREEYLLRQLQKLNPGCVITITPAEAA

SEQ ID NO: 407116 - protein, 566 aa, unidentified
MNQNLQSHLGIGIDTARYGHHASFMDEQKRTASKGFHFSENADGYEKLRKSIEQLIAKHPQALLHIHVDAAGQYAENLIQWLHQQSWPVVISVGQPARNKAYRKVHYDKRKADPVESLACARFAVVERPAAMHRPAVEFSALRDAVAQMESSASARTALVNQLHNMLARAFPELATLVADIASVSILKLLEKYPTAERLAAARLETLCKMPHIDEELAAKLHQAAKASTASLQNETSELLIKQKVQAIVAERKNQADIGKIVQNAVENLPDGPHRRLRTICGIGPQTEAALIAKIINIERFRSASALIGYFGIFPEEVDVSGVNKDGTPKTGKAFQMSRKGNDLVRRLLYTATQNAVRFNPPIRALFARLMANGKEYKTAIGHCMAKLLRQVYGVWTTDCDYDPEYESRNQASQEQLAQEEAKPAQEETKSVAGHSQEHVPSRKVVTATLSNIPAKRRPLNFAKLREQVSMSQVLELLDWTPTRSSRGTLRGGCPMHCTEAKNDSSFAVNEAQKAFCCHRCGAQGNALDLWATSQNLTLLDAAWDLIKRLRIDPPLLQTEKENCLV

SEQ ID NO: 407117 - protein, 370 aa, unidentified
MGNFSTYVGLDVHKESIDVSLAEAGRSGEIRHYGKIASDLRSVDSLIGKLKKPGRALRVVYEAGPSGFPLYRHLRARGVDCIVVSPSMIPKRPGERIKTDRRDSVSLARLHRAGELRAIYVPTEQDEAVRDLVRAREDAVHDRRRARQRLKSFLLRHGIQYPARADWTRRHRNWLSDRGFAFPAQQIAFQEYIESINETDARVERLTEELHKLVPTWSRAPVVDALQVLKGVSFVTAVTLVAEVGVFSRFDTPRPLMAFLGLVPSEHSTGQTRRLGAITKAGNTPVRRVLAEAAWCYRPRAGIGRRLLARQEALPKELRDISWKAQLRLCGRFRSMAARLKPTPKIATAVARELLGFVWDIARRVEANLH

SEQ ID NO: 407118 - protein, 417 aa, unidentified
MQEYAALISIDWADRQHAISLYDQSTGKREQAIVKHTPAALQEWALGLRQRFGGRLLAVCLEQARGPLIYALLQYDFLVLYPINPATLAKYRQAFSTALGKDDPTDADYLLDLLQHHRERLRAWRPDDEKTRTLRLLVEQRRRLINDRTRVSNRLTALLKGYFPQVLDWFDDIRTLLVCDFLAFWPELSVLQRVKPATLNKFFRSHHSTSNTTNQRRLAEIKTAVPLTNDAAVRTCSVLLVKVLVAQMKTVIAAIAEYDRHIEALCQTHDDYHLFASLPGAGPVYAARLTAALGSDRSRWATADELLRFSGIAPVIERSGKQNWIRWRYFCPKFFRQTFHEYAAQSIQDSFWARAFYAMQRAKGKEHHAAVRALAFKWIRVIWKCWHTCTPYNEIIYLESLRKKGSSLLNFAANNPA

SEQ ID NO: 407119 - protein, 408 aa, unidentified
MLFVGDDWAEDHHDVELQDLAGRRLGRARLPEGVVGIARLQELVAAQLGADDGPEQVVVGIETDRGPWVQALVAAGYQVFPVNPRQVARYRERHGTSGAKSDAGDAHTLADMVRTDRHQLRAAAGDSDQAEAIKLLARAHQTLIWDRHRHLLRLRAALVEFFPAALAAFPDLAAADALELLQAAPDPTSAARLSRARIAAALTRASRRGVPAKAAQVQQALRAEQLPQPERVVAAYAATVGAAVAVIGTLNAQIEALAGQVEAHFGEHRDAAIYRSQPGLGGVLGARVLGEFGDDPGRYRDARARRNYAGSSPVTKQSGKKKVVVARFVRNDRLADPSTSRRLCADGLPRGPRLLRSAPRPRHRPPRRAAPVVQPAGRHPPRLPQDPHHYSEATAWSHRTSDAATAAA

SEQ ID NO: 407120 - protein, 323 aa, unidentified
MKPQPSENSKGVWVGIDVAKRSCDAARDNSPVSRTFECSRSGLQELVRWLKTAAVAGVVLEATGGYERPVVEVLHRAGMPVSVVNPRQVRDFAKASGQLAKTDVLDARVLARYGKVFEPAAQGPVSPENQRLSALLLRREQLVKMKVAEQARLESLTDKTVRKWIKAHIRTLEKAIKRAMKEVQELMSTPALETASQRLQSVPAVGPIVSSTLIAELPELGRLTRREIAALVGVAPLNRDSGQHRGHRRIWGGRSRVRRLLYMSVVVGIRHNPVISAQYQHLLDAGKAKKVAITACMRKLLVILNAMLRDNKDWSPPQITQQN

SEQ ID NO: 407121 - protein, 351 aa, unidentified
MSFKILKFKCCGLDVHKTWIYACIGITDSNNRTEYKQARFSSFTKGLNELCDWLAKYNCTDVCMESTGKYWIPVFNILEQHNLWVTLSHPKYTKPMKGNKTDRKDAKWICDLYMCGMVKPSFIPPADIRELRDLVRYRYKLTCMITGEKNRAQNCLTVSNLKLDDVFSDVFGKSSRSITEQILQHPGEKFDVAPFVHGRCKTPIEEIQAAVDGAISKEQAVKLRQCLDHIDELNKHISELEQEILRLSDKYEAALNLIRTVPGFDKNPMTAVQILSEIGGDMSVFPTAKHLVSWAGCCPRNDQSNQKIKSTRISRAGSYFKPVLVQVANALIKSKKLAYIANNRVIVSKNG

SEQ ID NO: 407122 - protein, 406 aa, unidentified
MNQNTCITIDVSQNKSHIQGFIGPNKPLSKARTMRNTKQGFQFILILKNLIESKTNETPLIVFEFTGIYHKPLEKFLISQNLKYHIVAPLKAAKARNSEIREQKTDARDCLSLSKLFYSNNLGIFYSENETYSNLRKLNRYYDTCMKHLIKIKVNFRETLAVVYPNYKKLFSSIYSDDSLTFLKEFPHPSLYTSKLEDRIIEILKNKWDHLESWTLSKVKILTPLINEVVSGCNVTEPDIIMLLSYISQIEYYLNQIEITVSQMNELAKKVPLYNLVHSLPGIQDILTCKFIAEVGDISRFSNYKQIVAYAGIDPMIRQSGDKDGLHLKMSKKGNKRLRTILHLMVSSLIKANREPNAIKDKYQKKTHQLNPLKPKVASMACANQLVRIIFYMHKTSSTYTYHECK

SEQ ID NO: 407123 - protein, 390 aa, unidentified
MDILYQSCAGIDVHQANIVVCILHGSLTSTRPKREMATFDTTTKGLRACHDFLSQFHVEAVGMESTGVYWRPVWHALCDDFELILAQPAHMKAIPGQKTDKKDAHWIAKLTRIGLLPRSFVPDETIQELRELTRQRKHYVESRNKETNRIHKILQSGGIKLTTYIEDIMGASGRNLLQLLIDKTSITPRIVHQSVYTSLKKKVPQLLEALDGYFSDHHRFMLKQSLEIYDFYQKQIELLEERMNVYLSQYEKQVEILDSVPGIDVITASVIISEVGVDMSQFPTAGHLASWAGLCPGNNESAGKKRSTKIRHGNSYLKKCLCQAAFAIKRQKGSPLAERFYQIQSRRGSQKATIALAHQLLKIAYILLKEQITYPEFLAQKKTTRDELVA

SEQ ID NO: 407124 - protein, 335 aa, unidentified
MKALSKPERLVGSKSRIEHKEGSNNMEQFVGIDVSKAWLDGEAVPQSRPMRYGNDSAGIAALVSALVADPPALVVLEATGGFETEAASALAAAGVPTVVVNPKQVRDFAKAMGILAKSDRLDARVLALFGQRIRPQVRPLPSPEQRDLAELLDRRAQLVSMRAQERTRLATALAVAKPSLREHIQWLDARIGEFEIELTARLRSSAAWKVKVDLLKPVPGVGKVLLFTLLSRLPELGHLNRCDIAALAGLAPFADDSGERRGQRFIRGGRSEVRKALYMATLSATQHNPAIKPFFARLTAAGKPFKVAMTACMRKLLTILNAMLKTNQPWQPRVA

SEQ ID NO: 407125 - protein, 485 aa, unidentified
MTKSKRRRPERDFTPTHPHAAAIDIGSRMHVAAVPPDRDTEPVRAFGTCTGDLQQLADWFERCGVRTVAMESTGVYWIPAYELLEQRGFEVVLVNARDAKHVPGRKTDVSDAQWLRRLHEYGLLRASFRPKGELAALRAYLRQRERLLDYSASHIQHMQKALMEMNVQLHHVVTDITGETGMRIIRAVVAGERDPAVLATHRDRRCHASEAEIAAALAGNWREEHVFALGQALELYDTYHAKVVECDLRIEAVLRRLRDAAAKPAGRLPPARHRDKTANAPAFDARAALHAVLGVDLTQIHGLGPSLALKLIGECGIDLSAWPNAKHFTSWLCLAPANKISGGKVLSTRTRRSGSRAAALLRLAAVTVGRTIDGAGRLLSTALRTRRQGQSGDRNGSQDRHPVLQHAATWDRLRRPRRFLLRGQISRPGHRQPPTTREVSRLHAARDAGAGVVSQEVCLRSGAVGHGRLAVIRRSGPRSRRRTPA

SEQ ID NO: 407126 - protein, 359 aa, unidentified
MKTATNNFKDFSGQNIYVGMDVHNKSWKIHIYSDEFELKAFSQEPDVDQLAAFLQNNYKKASYKLAYEAGFSGFWIQRAFAAKGINCSVIHAADVPTNDKERLRKTDQVDSKKIAKGLRNGDLNIIHVPDRELELDRQLLRSRKVLTRDTTRIKNRIKAILKLQGIVIPPEYKEGKTWSKKFIEWLKKIDLGSISGNVTMQTQVKELIFMAERKRETDAVIKQLSESERYCTNAVLLQSIPAMGPMTAMLLLTEIGDIHRFKRLDELCSYCGIVPNCHSSGEMESVGKMSRRGNSLIKDALIECAWVAVRKDPALLLYYKKQLAQMSGQKAIIKITRKLLNRVRYVLMNQKEYVTGVIE

SEQ ID NO: 407127 - protein, 344 aa, unidentified
MTIVEERTAITAGVDTHSEVHVAAALDPVGGPLGTREFPATAAGYAGLLGWLAKFGDVALAGVEGTGSYGAGLARHLAKRGVRVVEAGRADRQDRRRQGKSDPLDAVSAARAALSGRASGQPKGRDGAVEAIRALMADGRSARHERTQAISQARALILTGPDELRARFAGLRAAALAEAVAALRPRPGDAAEYSLRVALRELGRRVQFLEDQTGRLDDLIVPLVTARAPGLLGLYGIGPDTAALLLIAAGDQPERLRSEAAWAHMCAVAPIPASSGKTRRHRLNRGGNREASHALWRIVITRMSAHPETRAYVQRRTAEGLPEKEIIRCLKRYVAREVCPYLRG

SEQ ID NO: 407128 - protein, 345 aa, unidentified
MDIRTIGIDLGKTVFHLVGVDARGKVVVRKKCSRLQLLRFTSNLPECLIGMEACAGSHFLGRALREQAHDVRLMPAQYVKPYVKTNKNDYIDAEAIAEAVTRPSMRFVPIKTDDQLDLQSLHRVRERWVGRRTAVINQIRGLLLERGITVSKGRRRIEQSLPGILEDPDNKLSGALRVLLDELRQEMQYLQRQIENSDKLIVRIAGELESCRRLVEIPGIGPIIATATIAAIGNGAAFKKGRGFAAWLGVVPGEYSTGGKQNLTETGRRGNKYLRRLFVQGAHALLQNKTKLAPGLSTWLGQLTSRKRIQVAAVALANKMARMVWAVLYKGEAYRPPLSAQAVAA

SEQ ID NO: 407129 - protein, 406 aa, unidentified
MFYGGIDVAKYRHEICIVDESGNVILQIFVDNTRNGLDKLIHNLKRLEIEVSNVEFCLEATGHYWLSLYYHLTELGYKIHVINPIQSDALRNFYVRKTKTDRKDAHLLADIVRFGHISETKLASETVLKLQNLSRLRFEFVRQVGGLKNRVLGILDRIFPEYPQCFSNVFINTSRELLKSFTAPEDLAEADLSELTNFLNKHSRGRLGVDRAKQIQALAKGTFGINIALDAFTLELRLLVEQIEFIEEQISVIEEAIDQVMEEMRPSKDTAYRHVLETIPGIGPVLAASIIGEIGDINRFPNAKALVAYAGLDATVRSSGQFEGTRNRISKRGSPVLRHSIWLAAVSARRFNPEMKEFFEKKRSEGKHTLVATGAVARRMVHLIYSLWKDNRPFDPNYQWSPTNSR

SEQ ID NO: 407130 - protein, 367 aa, unidentified
MKKHTTMNKPVSATDVSVCTTVAVDLAKKVFQVAGEDALGQLAYEQRIKSREAFQAFLQKLPEGVTVLMETGPGAQAWARLLQAQGNPVRILPAQRVAEHRSGAKNDRNDAHAILRAGRDSSIASVPVKSVAALAMQAWHRVRRGYVRRRTAMGNQIRGLLLEQGIALAQGDVGLKQGVTRVLEDARQPLPALLRELIDEMLNEWQRLGERIAALTGRLEACAAADPTAKRLMTVRGIGPITATALLAKQVEPERFANARQFAAYFGIVPDQHSSGQKVRLGKMTKRGDAYVRSLMVVGSHAVLKQLRPDSEHPDDRRLQRWLQRLGRKGAAVRLANRNLRIAWVLLCSEQTYQRKPNACREMEMSH

SEQ ID NO: 407131 - protein, 344 aa, unidentified
MELFTLGIDLGKTTFHLVGMNQRGEVVLRKRFSRSQLLHFTANLKVELIGMEACGGSHFLGRALREQGHEVRLIPAQYVKPYVKTNKSDYIDAEAIAEAVGRPTMRFVPVKSDDQLDLQSLHRVRERWVMRRTAVVNQIRGLLLERGTTMRKGRRYVDEALPGILACGSSKLSGAVLVLLAELKQELEQLAEKIDRADKSIEKIARENESCRRLVAMPGVGPVTATAIIAAIGNGAAFRKGRDFAAWLGVVPEEHSTGGKQTLWKIPRRGNQYLRRLFVQGARAVMQHRTKQSSGLSAWLAQLTARTHQNIAIVALANKLARMAWAVLAKNEIYRPPLLAGNTI

SEQ ID NO: 407132 - protein, 354 aa, unidentified
MMVIGVDPHKQSHTAVAADELGRKKAQRTVRARREGHRELIGWAREIAPAGRLWAVEDVRHVAGGLIRELLAAGEQVVFVPPKLMAGERRGGRERGKSDPIDALAIARLALREDADLPAARLDEQVLEVRRLTDYRDDLVAERTRVVNRLRWMVHDLAPELAPAPRSLGSGRARAKLETGLRALPAGGAGRAVALSQLARITALSAEITGLEQHLAALVAVLVPELLAIPGVAVITAAKIVGETGDIRRFRSPAAYARHNGTAPVPASSGTGHDGPHRLNRGGNRQLNAALHRTALVQARCHPRAAALLERRGQDKHETRKASLRVLKRHLSDVIYRALNADAWRLDQPAPHAA

SEQ ID NO: 407133 - protein, 430 aa, unidentified
MKSNTQNAKIEAITEKTLVLGIDVGSEMHYARAFDYRGIEYSKKPFKFSNTEAGFVTFKEWILDLKERHEKDKVIPGMEPTGHYWFNLGKFLQDNEMKPVLVNPHHVKKSKELDDNNPTKNDRKDPKVIAGLVREGRYMIPYLPDGVYADLRTASNIRFQLQAELTRIQNRISRWFNIYFPEYKTVYGKSDAKSGMLILKTAPLPEDILTLGIDGVNQIWRDAKLRAVGKARAKTLIEAAEHSVGSKEGAVSGKMEIRMLLEDYESRNTRLQEVMVLIEELVRKIPMTEKLLEIKGVGIRTVSGFLAEVGDISRFNNPKELQKLAGLALVENSLGKHKGETTISRRGRKRLIYLLFEVAMSLVSKNQKFRELHNYYTTRRLNPLKKMQSLMAIAAKLIRVFYAILTKGVDYDPKKMVSDIKRPAVYLQAA

SEQ ID NO: 407134 - protein, 346 aa, unidentified
MMIIGCDYHPSWQQICWVDTVTGETGERKLEHASGEAEKFYRGLPAPALIGMESTGNCQWFVEMATTAGHDVWTGDAAKIRACDVRAQKHDRRDAALILKLLLEGRFPRIWIPSGEEKDLRQLLIHRYKLVRIRAQVKTELQHLAMNQGVTKKRKLWSKAGEKVLRELPLKPWTSRRREDLFKVREMLSAQIDRLDQAVVEVAEKNEKARLLMTQPGVGPITSMAFVLTMGDVNRFQRGKQVASYLGLIPREYSSGGHQRFGSISKQGNWFLRMLLVEATQNAVRYDPGLRNEYLHRCHNKAKGVAKVAAARKLAIRLYWMLRTNTGYPGVVRVESSSRVPLVSAS

SEQ ID NO: 407135 - protein, 408 aa, unidentified
MQVLHENCAGLDVHKDVIVACRRVVRGKGVLKDVESFGSTTRELLRLSAWLEESGTTHVVMESTGVFWKPVWNVLEGHFELILANPKRVKNVPGRKSDVKDAEWLAELLAHGLVEASFVPEMEILELRKLTRTHKQLTRERVQHVQRIQKTLQASNIRLDSAISEILGKSGRRILDAIVAGETDARKLASLARRVKATTETLTCALEGRVSPTDRKLLRTHLRMVDVIDERLAELEKDIDEALAPFAEAVELLKTIPGIGDGNARTLIAEIGVDMSRFKTPGHLVSWAGMCPRMDESAGKRRSTKLRDGNKWIKTALCQAAWSAVRCKQRGYLHAQFYRLRARRGEKKALMAVGATILTAVHAMLSTGCPYRDLGPDFFERKDEQKTVQKLTQRLASLGYEVELRRAA

SEQ ID NO: 407136 - protein, 345 aa, unidentified
MKNFFIGIDVSKEKLDATLIRYESQSDSEQQLAYTTVANNPKGFRSLVSWSKKNAGRGVKTDTMLFCCETTGGYDRALCDWLYGNGLNIWRESALQIKRSMGLRKGKDDKADSEMIAHYALRFRSQAALYEPMDENMRSLRNLFLYRQSLVAERQAKLVSAKEKQHISSKSKSDNFIYRDAQKAIDLLTKSIKECERRMLEIIKADEEMYRNYLHLISCKGVGLVTSVMLIVYTDNFKGWTAKKMASYCGIAPFYESSGSSVFHKANTSGYSNRRLKGILTQAARSAITHNPTLRQYYLRMKAQGKPYGVILNNVNNKLLHILFSLVLHDCDFELDHEAKRTLRA

SEQ ID NO: 407137 - protein, 507 aa, unidentified
MRRVARMIVVRRVSLVVGYRKQKRSGKKVGDASKSGSAGGTDTAGIVQTTCGRSSPMNKKKPYSAIRVKDVQLAPILAEHAGKDLWVGIDVAKEFLLVALCWGQGRFGRPWRVSNPGELGLLVERLKQLNCGRRLVVALEPTGTYGDPLRWALQQAQLQVHRVECKASHDYAEIFDGAPSQHDAKDAMIVAELALQGKSRPWSIREGDERQSSMAVWVDQADDQQRVQAVWTGRLEGLLARHWPEATGILDLTSMTLLRALAEYGCPANLAADAEAAAKLLQWSGAHLSAQKVEVLLQSAASTMGVPAAQAEAQRIRQCAEAALDATHALGKSKRELEKLTEGNETLERIGRAVGKATACVLFVKLGDPGDYSNPRAFVKAAGLNLKERSSGKYVGQLKISKRGPSMVRKWLYLAAVRLLKDDPGTRQWYERKRGRDLEQVGNGPARKGIGVKALTSVMRKLLAALWHVNRKKTTFVAARLFGGKAASQSGGKAGGPGAAPVLCAER

SEQ ID NO: 407138 - protein, 338 aa, unidentified
MEYGAIDLHTRKTLIRIVAEDGAVVLDRTITTTREGFLQVFGGRARMRVLLETGTESEWVAQVIEAEGHDVVVADPNYALMYGVTVRAVKTDRRDVAALAEACRLGIYRAAHRVSAAQRAMRRRLRVREQLIRMRTQAINLLRAQLRQEGYRLGSGASETAAARSRALALGAELRADLAPVLTLLDRLGPLIAGCDQAAKAQADADPVVRRLMTAPGVGPIVGLTYRAVVDDVGRFADAASSTAFLGLVPREDSSGARRRKGGITKRGPTTLRVLLVQAAWTIWRQRQGRAALHAWVERLAARRGRRIAVVALARRLARMLYAMWRDDCDYRPVPRSA

SEQ ID NO: 407139 - protein, 380 aa, unidentified
MQPTHTFNVTSGLALSLELSSGSWKIAASDGCREKPALHGAEAKAPWERLQQVLQRIEQLKAKWQLPAGSEVYAVYEAGQDAFWIARALQAAGIKVFVVDPASIPVARHARRAKTDRLDALTLLECLFGWLRGERQRMHVVRIPSQEAEAQRQLIRDRGELQKEIVQHRDRIRKLLRTVGCWEDVQAHLQARLDGGKLRCWDGQVLPEPLRERLARECERLVLAQQQLAALEEQLRRQLPAPLQQRIEQLARLKGVGWIGAMRLVIELFWRQFHNRRQVGSCIGLVAQPYDSGASRVDQGISKQGNRKVRALLIEMAWMWLRYQSESAIARWFAMRTAGNAANKRGKRIAIVAVARRLAIALWRYIEQGVMPEGAKLKSV

SEQ ID NO: 407140 - protein, 338 aa, unidentified
MEHQQQYVGIDLHRRRSVIVRMTEDGEVLECVRIANDPVALSLEVAKAGPDPEVALEATYGWYWAADLLESDGARVHLVHPLGLHWDARRVKNDERDATELAHRLRRDDLPEAWIAPAEVRELRELIRYRAKLAALRTSAKAQIHAVMAKLGILPTLSDMFSAAGQVLLDGMPFEGPYALRVDSLRGLLERYEHELVLVERELHGRLVDHKGYTAIQALNGVGRITAAIFVAEIGDVTRFPDARHLCSWAGLTPSHRESDQKVHRGHITKQGSTLVRWAAIEAVARYHGGAPIAPAFMRIAKRRGTMIARVAAARKLLTLVFYGLRDGEIRCLVREAS

SEQ ID NO: 407141 - protein, 387 aa, unidentified
MATSIFRTNFPGTVKLQEAADCADYIIGLDLHKKTTAVCVISPKNPEQPVFQRKRLQNTELLSTLHRFSGRKVIACEAAYGWHQLAHALDAMHDVTFVPLDARKTASWIKTSGIKNDKIDAQVLCAACLHGGIGRLAVYRTSEHAHECTKLVRHRDSLVQQAASIKRQLAAFEHAYGPNPYTGEIPQQSTRASAMLSDLRSSLLCLKDRIASVEVMMKQESKDDTVITRLRSIPGIGPITAFALRHKVEDINRFESPARLSGYIGLSIRERQSGESTVKGKIAKTGDALIRRLLIQGAQAVRTLKPDLVPLYFPNIGQDALMAERRHRNKVVTALARKNLTFAWHIWKKEEDFDLQRYRERRSHVVTDRVPSRGAELECRLSVKDAR

SEQ ID NO: 407142 - protein, 386 aa, unidentified
MGKSITSSVYVGLDVHKDSIDIALAEAGREGEVRHVGSIGGDLAALDKALRKLISRGAPLHIVYEAGPCGFVIWRHLSAQGLACEVVAPSSIPKRSGDRVKTDRRDAILLARLARAGELTAVRVPDAADEAVRDLVRAREDAVRECRNARHRLKALLLRNGITYAGKSAWTAAHLRWLATLKMAHATQQIGFQEYLHAITEATARIGRLEQALRDALPEWTLRPLVQALHALRGVQLIAAMTLVAELQDFVRFANPRQLMSYVGLVPGEHSSGPKRRQGSITKAGNSAARRMLVEVAWHYQHSARVTPIIAKRQDQLPKAVTDIAWAAQLRLNAKFRRLVARRVMKTKAVVAVARELAGFVWAIGREVQTSGWPGIDTDAAAAVTH

SEQ ID NO: 407143 - protein, 346 aa, unidentified
MIPIGSDVHKGRCLMAEVGSGGKVKMLPPVECTREAWLQRLAELPPEAEIALEVSTSGYFVMSVLEEAGWGERAHWIHTAGVDSLRKQKSDRLDARRLARKLAANTADPLPEAWFPPAPIRHLRLLARQRCRLARRRALTRNRLSSLVQMHGLRPPHPAVSRLGREWILQQGLPVPVVQCFEPWWRVHDFLDPERDRSEKNRAAHAAQFVEVQRLATIPGIGHMLAAVIGGEIGRLDRFPHADALVNATGMVSSLYPSAEVTIQGPITRQGSAWLRWAFITAANCLTHSKSPLGQRYWHLRRCHKKPNVAKTAVACSVARCAYGVLKHGEPFQAERWGRRSGKLEP

SEQ ID NO: 407144 - protein, 345 aa, unidentified
MRKLIAGMDLHSNNVVIGLMDMDGKRVAHQKVECRLSEVVKFLAPYKKRLEQVAVESTYNWYWLVDGLQALRYPVVLANPAGMEQYSGIKHADDTNDAFFLAELLRLKILPTGYIYDPHLRPVRDLLRRRLTLVHQRTALMLSFKSLYTRTTGQEMTLSRLKELEIKEAQDLYDHPANQLIAGMQIKHIEQLSESIEKVEKVVLDCARELPFYSKLTTLPGVGKILGMTITMEVGDIKRFAEPGNFASYCRTVEAKRTSNSKKKGENNSKCGNKYLAWAFVEGANFARRYDPRCRRWYDRKVAKTSNVIATKALACKLAKAAWHAMAEGTDYDSQRMFGQAASTG

SEQ ID NO: 407145 - protein, 343 aa, unidentified
MDHFAGLDVSVKETSVCIVDDAGKIVREAKVASEPEALLQVLANPAFHFKRIGLEAGPLSQWLYSALAEAGLPVICVETRHMRAVLKAQINKTDRNDARGMAQMMRVGLYRPVHVKTLRSQKLRMLLTHRKLLQSKAIAIDNDLRGTLRNFGLKVGIAGKVKFEARIKELVENFPDLAVLVEPLLVVRRVLREQLGILHRRLLAMVRDDDVCRRLMTTPGVGPVVALTYRATVDVPARFRNSKAVGAVFGLTPSKYQSGEIDRTGAISRCGDDMMRTMLYEAAQSMLFHSTKWSWLKAWAMQIARRRGMKKAIVALARRLAVIMHRIWIDGTEFRWTREVAAA

SEQ ID NO: 407146 - protein, 387 aa, unidentified
MVQVNDLSRSLAAFDPISTLVVVVEMSKASWLVSSVVPGVERQPLKKLEPDATALLRLIERWRNEAVRVGRPISRIALAYEAGRDGFWLARWLIARGIEAHVIHSASVAVSRERKRAKTDRLDAAMLMRVFLGWLRGERGHCGMVAIPTMEEEDARRPNRERESLVNERSRIINRMKSALARFGIRGFKPHLRKAPERLAGLRTAEGTGLPANIIEEFRRDMARLALVREQISSIEKTRAERLERAPDTGPHAMVRLLARVIGIGIETADMLVREILSRKLRDRRALARYAGLTGSPDESGLKSREKGLAKAGNARVRRGLIQLAWRFLMFQKDSALARWYRTRTQGPSGARKTTMIVALARKLLIALWRLVTTGEVPDGVELRTAA

SEQ ID NO: 407147 - protein, 420 aa, unidentified
MKKDNNSRQKSELNGKRAKSVNARHRETTEVLAELVGRLREKLNPKMASLNPRRERPVDRGSLRPNCDRLTVGVDLGDRWSNYCILDLEGDTLAEGKLQTTQEDFAQLFRGLNASRVVIEVGTHSAWIWEVIRGCGHEVLVANPRLMEGSKRRKRKSDRIDANKLARLGRVDPQSLHPLEHRSTAVRQDLVLLRARDALVSTRTELINTARGLVKSMGSRLLRCSSRSFASKTEEGVPAEIREALLPLLQIADAVSDCIQEYDRKVEEMASEKYGHTKLLRQVKGVGPITALAYALTLENPQRFAKSRDVGPYLGLVPKQEDSGESQPQLGISKAGDSMVRKLLVGSAQYILGPFGPDTDLRRYGLRLCERGGKNAKKRAAVAVARKLAVLLHRLWVTGEVYEPLHHCMSLPAVTATAAA

SEQ ID NO: 407148 - protein, 351 aa, unidentified
MLIIGVDYHPSFQQIAFCDQDTGECGERRLTHSDGEAEHFYRDLKQRGISVRVGMEASGYARWFERLLGELDYELWIGNAAEIQSKRVRKQKTDRNDAQLLLRLLLEDRFPRIWVPSPENRDLRQLLWHRHRLVQMRTRILNQLRALAMNEGWRWKKKLFSEQGRVELEKLALAPWASRRRQELLKLLDQLNPIIADLSASVEQEASKRPEVLQLMTHPGVGALTAMAFVLILGTPQRFRRGKQVGSYVGMIPGEDSSGGKQRLGHISKQGNSLLRFLLVEAAQAAVRNNAEWRRRYIHLAMRRHKSIAKVAMGRRLGIRLYWMWRNGCDYSSSFEFGSYAGQLGTGQGGK

SEQ ID NO: 407149 - protein, 410 aa, unidentified
MDTLIERCAGLDVHKDTVVACVRVPARGGGREQSIQTFGTTTAQLLALRDWLVAHGVTRVGMESTGVYWKPVYYVLEDAVECWLLNARHLRNVPGRKTDVADAAWICQLVEHGLVRPSFVPPKPIRELRNLTRYRKAQIEERTREAQRLDKVLQDAGIKLSSVASDVLGVSGRAMLRALIAGTRDPETLAELARGTLRRKIPALRQALHGRFGPHHALLVGTILAKLEFLDEALGHLSAEIEQVIAPFAAEAALLRTIPGVDRRTAEAVVAEIGVDMSRFRAAGRLASWAGWCPGNNESAGRHGSGKTRKGSKWLHTYLTEAAKAAARTKGTYLGAQYARLRGRRGSARATVAVGHSILVAAYHILDRHEPYRELGPDYFRRRHSREHQTRRLVRQIEALGYHIRLEEVA

SEQ ID NO: 407150 - protein, 302 aa, unidentified
MKVSTLGIDLAKNVFQLHGVGCNGQTVLKKKLTRDKFLPFLMQLEPCLIGMEACASSHHFARVLRQYGHEVKLIPPQYVKPYVKTNKTDAADAEAICEAVARPNMRFVQIKTAEQQAILVLHTERNILIRERTACANSMRAILAEFGIIMPRTLSQLYKKIPEILEEYDNELSPFVRCSVARQLEHLQGVEDQVTLIEQELSRWAKTQPACQRVMKVPGVGLMTATYLVASVGNGQQFHSAKQFAAWLGLVPREFSSGGKQRLGRISKRGDRYSVIFWSMVRGQLQPLLRDTKTICRGFTGC

SEQ ID NO: 407151 - protein, 427 aa, unidentified
MASDQHSGETSFVAIDIGKAFHAVLVEFPDGAHQRVRMANSAEDYGRLVAFLRSLPGTVRVALEPTGNFHRTLAFHLITAGISVVSVSSVAGARYREAMFNSRDKNDPKDATVILQLLKHGLVQHYHDPLLAGHHDLQELAKTYRQVALARKRLADSLLNHYLPLYFPEMARYWESTRVEWFVVFLSRFPTPRAVRALSLPEFTEAAWPLIGRKINKRAKLEELYELAQSSMALPVAVDSPAIDTFRLQLAHFARLAELRRQLEAQAHALLKDRRDYQCLCSLPGVASVLAMVILAEGGNLRRFRHHRQFLKYCGLDLAKCQSGQFRGRERLSKRGNALLRMAFWMAAQRAVRMNENSFRDKYERYMKQDPGNADLRRKALTAVAAKMARVAYALVKRLEPYRGYHEHALPSGSIPLTRAVGAPATP

SEQ ID NO: 407152 - protein, 359 aa, unidentified
MLAMGDRALRKEADAMIFVGCDLHTRMQQVAMLDAETGEVSEHRLPHEGTAVEDFYAALPGPVTIGIESTGYAAWFHTLMQRLGHTLLVGDAAKIRAMVVRKTKTDRRDALHLLDLLRHDRFPAIWVPDPLTRDLRTLLTHRMRLVRLRTMVKNGLHAIALNYRVARGPRLLRQAGLAQLQALALPPHTARRRDHSRALLAGLTMQIRELDEAITSAARAHPDAPRLITHPGVGALTALATVVVLGPVARFHDSKHVVSYVGLAPAVNASADKHHLGHITKQGSTLLRFVLGQAASHAARMDADLKRTYFTLVHRRGRPKAKVAVARKLLVRLFIMLRDQIDYDEFRRRGCRTLALTSA

SEQ ID NO: 407153 - protein, 415 aa, unidentified
MQVFEVIHPCCCGLDVHKDTVVACVRRTAANGAVEQQVETFPTTTAGLLGLGDWLVERGVRIAAMESTGVYWKPVWNLLEGRLELMLVNSRDVKQVPGRKTDVKDSEWIAQLLACGLLRRSFVPPLPQRELRDLTRTRTSLQQDKSRTANRLQKILEDANIKLASVASDVLGASGRDMLQALIRGDRSPAQMADLSRKRLRLKIPKLTEALSGKVTEHHRFMLKLLLDQIEQYEAQVAKLDQRIEEVMSPLEKTALEILDEIPGIDCRAAQNVLAEIGSDMSRFPTSGHLAAWAGLCPGNNQSAGKRRSGRMQQGNRWLKATLNQCAWAASRKKDSYFAAQHRRIASRRGVKRATMAVAHSQVCVCWELLKNGQAYQDLGRDYFEKLNEDRVKRQLVHRLEKLGYTVTLQKKDAA

SEQ ID NO: 407154 - protein, 423 aa, unidentified
MRFIGLDVHRDFCEVAIAEAGAVRVAGRVQTEPAALLLFAQSLAVDDQVALEATGNALEIARIIEPHVARVVLANPKAVKGITRAGAKTDKIDARTLAQLLAGGFLPAVWLPDEQTRILRRRISARAQLVRQRTRAKNQVHATLIRNLKGRPPVSDLFGVRGRRWLAAQELPADEQETVAACLRQIAFLEGEIALIERALAEQVLASTEMQRLLTLPGVNFVTAAALMAAIGDIGRFPTARQLVSYLGLDPRVNQSGSEPARHGRISKQGPGETRHVLVEAAWHASRAPGPLRAFHQRIAARRGGNIATVAVARKLVVIAWHMLSHSEDYAFARPSLTREKIRKLELATGAERQKGKRIGVWVTKEQHQLDKELAAQAELAYRRLVQDWQPAIKGASAAPGRASHRPSSGQAARQETAPPPAL

SEQ ID NO: 407155 - protein, 341 aa, unidentified
MKNKSFIGIDISKNVIDASIFCEGTPIKDFPHAVFNNSRKGFGEMCTWLKKNHVVLSNCLFGMEFTGSYSMELEKFLNARKFQFCMLSTHVVKHHPMGPKDKSDKIDSAKIADSLYRYDGTECVKPYKMPDKTMQRLKALTNERKFLVEQRTCFMNRRQLCTTKEDAQLYDGYIKKFSRDIENIELEEQKLLATDDSLLATYKNLLTIPGIGFVNAINVIVITRNFTAFETARQYASYVDVAPHSHTSGSSVKWRPRPSARCDGQAKADLSMAATVAVQYDAELQSFYNRKLGGKQDSDTKRKALNAVKFKLILRMFAIGKQNRKWEPLDSKSSNEKLAIS

SEQ ID NO: 407156 - protein, 415 aa, unidentified
MNVQGDEILVGIDVGTDGHQIAIQLPNSEWCYQGRIKHQHAAFDATIKRLSALTKVYHTPIVIGIEGYNGHIAPFDQMLVAAGFVILNVNPSRLYHFRRIFGAPYKNDPHDARLIAAYLKARHLLDTSISGTRSLLPIKDGSDVHKKLRSWSRYLNELIREQTRLRNRLTKRLKEYVPELLVLAKQVNRKWLIILLTHCSSLTELKRCSVEKIEGFRGITGYRIGPKKAVQIKASFEAIEYYSPLVEEYAFIIKNYAIELSRLSELIKEVLKNIERLGRDSVYYQVLLIQDGIDIKLASRMIGEILSITNFPSEDAFAAYNGTCCLDHTSGKRKEDSTRNLLCNKRLRTAMRDWAGCRIRCHELSRHYYDKKRTEGKNHNHALKCLSRHLSNLLYRILKQVETMIDNKKTIPVAA

SEQ ID NO: 407157 - protein, 406 aa, unidentified
MLFIGDDWAEAHHDIEIVDESGRVLVRRRLPEGVVGLSALHALAGDHLGEDDDPDQVVLGIETDRGPWVQALIAAGYTVYAINPFQVARYRERHGTSGAKSDPGDAHVLAELVRLDRAHHRPVAGDTALAEHVKVVARAHQTMIWTRQRNTNTIRSMLREYYPAALEAFDDLAHPDALAVLAAAPDPERGRTLTKSRVVAVLRKAGRQRNLQTRAEQIVTALRSEQLPARDGIVAAYAAAIRSLVAITTEMVAQIGVMEDQVKAGFGRHPDAEIYLSQPGLGQILGARVLAEFGDDPQRYTDARSRKNYSGMAPITRASGTKRVVLARHARNRRLADALYQQACAALNASPGARAYYDRQRDRGATHHQALRALANRLVGILHGCLRHHTRYDETTAWAHDQQVAA

SEQ ID NO: 407158 - protein, 412 aa, unidentified
MTAKDQFAAHVGLDWADKKHDVCVQFKNGDRIFHVIEHTPEALDIWLNELHQRAKGRIAIAVELKKGPVVYALQKYPFVTVFPVHALSLARYRQAFWPSGAKDDPQDAELALDLMLRYPHKIKAIEADNPDIRLLQQLVEQRRLLVEDKRRFVNRLINTLKQYYPQPLEWFSHRDSSLFCELIIRWPSLQQLKRARSDTVRNFMNAKGGPAVAYTEQRVASIASAIPLTTDKTVIEANALMAIALASQIKLTGDLIRTYDERIESLFDTLPDAELFKSLPGMGPCMGPRMLAALGDNRDRFNSAEEIQNYAGIAPVTERSGQKSWVHWRWQCAKFVRQTFVEWTAKTVNSSYWARLYYQGQREKGKSHQSALRALAFKWIRIIYRCWKTRTRYDEAKYLLALEARKSPLLKP

SEQ ID NO: 407159 - protein, 343 aa, unidentified
MTEVITIGVDLAKNVFQVHGVDAEGGVVFRRQLRRGQMLPFFKKQPPCLVGMEACATSHHWGREIEALGHQVRLMPPRYVKPYVKRNKNDMADAEAICEAVTRPTMRFVEIKTPDQQSVLMLHRTRHLFVRQRTTLINALRAHLAELGIVAGVGRNGLERLLKVIEDGDDNRVPSAARDCLLALRDQLEMVKHQILDADRRILAWHRASELSRRLDDIPGVGPLIATALVASVPDPHAFKSGRDLAAWIGLVPRQNSTGGKERLGHISKAGNRYLRMLLVVGALSVIRRAKQVGYTRRPWLTKILERRSTKIAAIALANKNARTAWAMMAHGTFYKEPEPQAV

SEQ ID NO: 407160 - protein, 347 aa, unidentified
MKFYTTFHQFYCGIDLHARLLYVCILDERGNKVVHQKIKADPHQLHKLLKPYIGQVVVGVECMHCWYWVSDFCRQINVEFILGHALYMKAIHGGKAKNDKIDSYKIASLMRGGNFPLAYNYPAETRATRDLLRRRTYVMRHGSELKAHVVNTDSQYNLPAQSLNLKNVSAREGLRHYYDDPVVQRMIALDMNILDCYIRELKHVESFIEGKAKEHYGALLNIVRTFPGIGQILALTILYEIGDINRFPSVQQFASYSRLVKCKAESAGKTYGTSGNKIGNGYLKWAFSEAAVLYLRGNDNAKRYLAKLQKRMSKGKALSALAHKIGRCVYFMLRDRQVFDEEKFLNR

SEQ ID NO: 407161 - protein, 375 aa, unidentified
MHVPTEVCPPAGPLSLSADTSEGRTVPIVIGIDAHKNTHTAVAVDEVTGRQLSEITVRARATGHERLVGWARELDLVRRFAVEDCRHVSGGLERHLISRGERVVRVAPKMMAQTRRQARTRGKSDPIDALAVARAALREIDLPEACLEGPERDLRLLVDHRETLVHRRSEDQARLRWLLHDLDPNLDIPLRSLDRYVVLDRVRKRVETMAPTVARELALELLKRITEQTRTVNQLQRRIETTVADLAPELLQIQGCGGLSAAKIVGETAGIERFSRESKFAMHAGIAPLPVWSGDNTRFRMNRSGNRQLNTAIHKIAITQIRMYEPAKMLLKRKMSEGMSKTEALRVVKRYIARRVFETMKKGARAPVDLSPAVA

SEQ ID NO: 407162 - protein, 419 aa, unidentified
MKRIQPGMPVRAKGRAVAGIDVGKRKHAATALTPNGERIAQLAFFLNTRAGIDLLEKEILRKAGGPGKTLVAMEATGHYWMCLYHELKRRGYESVVLNPVQTNAHVRAKIRKNRNDRIDSEGIARLVLAGEARATRVPDEKTAELRLWVRHRQRLLRAAGNMERFTHTLVDRVFPEYADILSKPFLPSAQKLIRQLGLAPADLAANGREVREVLQIASRNKIAPETIDNLLEAAKQSIGTRQAEDAANRQLVLVFDYLATLRQQIAAIEGELDLRVQEIDSPLFSLGLTANVVAAIHAESDPISDFGSADQYVAYAGLDPSSYRSGDTIDRRGKISKRGSPTLRRALYLAAFVVCRKHVYFRRIYQKHRRHGKNHCNALVVVARNLARVVWRMLTDGREFSKRPPQNAVTTRQSGCKAS

SEQ ID NO: 407163 - protein, 316 aa, unidentified
MSDPQVLVGIEVSKAQLDVALRPTDGGGPVNHDEAGIAGLLERLRTVQPTLVVLEATGGLAVPVTGALAAAGRPVVVVHPRQARDVAQATGRVAQTEALDARGLAPVAEAVRPTPRPLPAAQAHAVRAWLTRRRQVVPRRTAERRRLQTAPQPIRADIEAHLTWWTRRLARPADAVAAAIYSRPRWRATDAMLQRTPGVGPSRSRTLVAAVPEVGGLNRREIAALMGVAPLTRDRGTWRGTRAVWGGRAHVRAVRSRSTWAAGRHHPGLTAFYARRRAVGKAPKVARTACMPTLLTILNARLKPRTPWHENDATHA

SEQ ID NO: 407164 - protein, 363 aa, unidentified
MKILVGIDLHSNNALCGLMEESGRRLAHQKLPCDLGALLQFLKPCQKRIATVAVESTYNWYGLVDGLQDQGYHVVLANPAAMQPYSGMKHTDDVSDAFFLTELLRLNLLPTGHLCDRPSRPVRDLLRRRMLRVHQRTTLILSFKSLNERTLGQRLPLARVKTMSVADAQARFSAPADQLLSGQQITLMGHLTNAITQIERHILGVAGKWPSYQRLQELPGIARILGLTIALETGDAQRFADAGHFASYCRCVRSLRQSNGRKKGENNRKCGNRYLAWAFVEAAHFACRHDQQCRRYYDRKKQQTNPVVATQALACKLAKAAWPVMAQNVPYDATRVFGPGKKIDFGETRRQPAKGSGPVSQQN

SEQ ID NO: 407165 - protein, 387 aa, unidentified
MEVRIENTPPAGTNNDPVRCFVAIELSKSSWVLGFQTLLAKQTSRYQVKACDAKALLELIERVRSRVVRELGRPVEMMSCYEAGYDGFWLHRVLEAHGVHNHVLDPASLQVNRRARRPKTDRIDADRMVRALIRHLRGEPEACSVLRVPSPEQEDARRLHRERDRLIAERVAHVNRVKGLCATQGIYDYEPLRRDRLKRLDNLRTGDGRALAPRLKAEIVREIKRLEVVLEMIATVEAERDAILKEKKSTHLNADKIKMLAKLKAIGAEFSTTLVGEVFYREFANRRQLGSYVGLASSPFCSGLLDRDQGISKAGNPKARTMMIELAWTWLRYQPESALSRWFRERVGNLKGRPRRIAIVAMARKLLVALWRYLQTGVVPIGAELKA

SEQ ID NO: 407166 - protein, 360 aa, unidentified
MIVIGIDPHKSTHTATAVDPATNTDLGSIRIDATLTGYKTLIAWAKSWPQRQWAVENAYGLGHHLAQWLLVLGEVTLDVPTTATARVRELSRGGRRKNDRIDAAAAACVAAMQGDASPVDPEGPAEILGLLDERRTNLSGSRTRNMNQLHALLRQLLAGGARTSLTASAAAALLRSFRAKSPVDRMRVGLCRDLIADIRRLDDQLAANEKQMAETLDEHGTRLREVDGIGAVTAARLIGRTGRPDRFPTAAAFANYNGSAPVQIASADTSDPDVRQRRAQLFREENRQGQKARCGQARPQTSPVRSRLANHARRPKASSSTREESIRQGRLTTERPYMRHALNASTYASSVSVPGIGVGL

SEQ ID NO: 407167 - protein, 410 aa, unidentified
MGGMILPIQERRGREMYRLLVGVDVSKDIFSGSGLSAEGKEHFSGTYEMNSQGFSEFLQALCSHEGRLDQMLVAMESTGCYHINLFSFLSSQGIRTVVVNPLLISNFAKLSLRKTKTDKKDALMIARFLLDHHEEISQLSISQDHQDLRDLSRERESLCHLMSATKVEIKRVLRTIFPELESIGNLYTGVMLRFLQQYPSARLVRGAKRKAIAKALRGPYVGDKLTYSAEEIMKAAQSSVGVVSPAKEIIVQGKIATLLHLQERMAELTKLLTDLCKATRVEDLKILESIKGIGRNTAVPFLAEAGEVKHYTSSKKLIAFAGMDPSVHQSGKFIGKSKLSKRGNRHLRRAIYLMTTSVVSQNAFFKAYFLKRKKEGLAPQKALFATAHKLIRVIFAMLSQRTYFKVEEAI

SEQ ID NO: 407168 - protein, 420 aa, unidentified
MRLPTDEFAAFIGIDWADAKHDICLQAAGSEKREWSTLDHQPDTINEWVSTLRTRFKGQPIAICLELTKGPIVSALRQHDFLVLFPVNPLTLARYREAFTPSQAKDDPTDAELQLELLLKHRDKLKPLQPQSATMRALEQLVASRRRLVGDKVRLTNRLTSTLKNYFPQALHWFHDKDTTIFCDFLTQWPTLKAVQLARRSSLERFFRDHHVRYTDVIHQRIHAMKSATPLTTDEGVITPNTLLAQALVPQLRATLHAIEAFDNAIAQRAQSHPDFPFFDTLPGTGAVFAPRLLVAFGEQRDRYASADELQKYAGIAPVTARSGKKSWVHWRLQCPPFLRQTFVEWAAESIRHSFWARAYYQQQRAKGASHQAAVRALAFKWIRILFRCWQNRTPYNESVYLNALERRGSPLLNRLVQVS

SEQ ID NO: 407169 - protein, 346 aa, unidentified
MGVLIGIDPHKATNAVAAIDERGELLEYAVFSTNRAGLRSLARWGKRFPKRRWAVEGAGGLGRFVALCLVAAGELVMDVPAKLSSRARLLATGNARKNDRVDAIHVALAALRRGERLAEVGEEEQAEVLRMLSERREDLIKERTRTLNRLHGLLRDLLPGGAPKNLSAEKAARVLRGVRPRSGPARTRRRLAADLLRDIRRLERQLYELECRIREAVKEASTGLTLMFGVGPILAAEIIGRVGNVARFPTKAHFASYTGTAPIEASSGEVVRHRLSRAGNRKLNHVVHMIAICQARHDTKGRTYYRRKLAEGKSEKEALRCLKRRISDAVYKQLRADLPAANLTAA

SEQ ID NO: 407170 - protein, 314 aa, unidentified
MSSLVFVGIDVSQARLDIAVRPGAPFSIAHTESALATLGEQLRALSPTLIVLEATGGMEIPLTSALATAGLPVVVVNPRQVRDFAKASGHLAKTDALDAQVLAQFAEVMRPQPRPLPDAETRALAAQLTRRRQLVEMLTAEKNRLLSASSPIRKRVRTHIVWLERELEHTNTDLAEAIRQSPVWREKDELLRSVPGVGPVVTSTLLASLPELGTLTNKQIAALVGVAPLNRDSGRLRGRRTVWGGRAQVRAVLYMSAIVAARFNPVIRTFYQRLCRAGKAKKVALTACMRKLLVILNTMIKHRTPWQQAEVPLA

SEQ ID NO: 407171 - protein, 413 aa, unidentified
MDVLHPRCCGLDVHKNSISACILVQEAGRVQKHQRRFGAMTQDLRELANWLRQFKVTQVAMESSGVYWKPVWNILEGQFTVVLVNAQHIKNVPGRKTDQKDAEWIAQLLQHGLLRPSYVPCEVIRDLRDLTRMRASLSQEASRISSRVQKVLEDANVKLASVATNTLGKSGRAMLEEIIAGQNDPEYLASLALGHLRAKTPQLRHALEGKIRPHHRFLLRRLLDQLRFVEHEIVLLDERLEDIGRERPELSQAVARWDTIPGIDRVAGWTLLAEVGNTMAQFPTAEQLASWAALCPGNHESAGKRLGGTTRKGSPWLRRMACQCAWAAARTKNTYLSAQFRRVAARRGSKRAIIAVAHSLIIIGYYLQKNQRNYEDLGGDYFDRIDSAGLKRYFVRRLEKLGHKVTLVPIKVA

SEQ ID NO: 407172 - protein, 345 aa, unidentified
MAIITIGLDLAKNVFQVHGVDERGAAVLRKQLRRDQVVPFFALLQPCVIGIEACGGAHYWAGKLKELGHTVRMMSPQFVTPYVKTNKNDAVDAEAICEAVARPTMRFVAAKTLEQQAVLALHTARAGFVKARTAQANQIRGLLAEFGLVIPQGIASLYKRVPALIARAEASLPGRFRVLVERLLEHLRLLDRQVQELEREIVDWHRESDLSRRLDAIPGIGPITASALVASAGDARNFKNARQFAAWIGLVPRQRSSGGKSQLLGISKRGDVYLRTLLIHGARAVVRHAGAHAGKASSWLTNLIRRRHVNVAVVAVANKNARVAWALLASGRNYVTNGKPRAAAA

SEQ ID NO: 407173 - protein, 391 aa, unidentified
MVCVGIDVAKDKHDCCILDSDGMVRADCFTIPNNMDGFKQLLQTIRNCTKKSDKIKVGLEATGHYSYNILGFLLDNDLAVHVMNPLHTNLYRKSLSLRKTKTDRVDARTIATMLLSDVDLKSYTDTAYHNEELKSLTRYRFDKVRERAKLKQSVSRLVTILFPELEKLVPSLHIASVYALLSEYPGAKQISEIHLTKLTNLLTTASKGRYGKDKAIQIRDAAKTSIGSVMPAKSLELKHTIKLIKELTSEIDEIEDSIQQIMDELHPPILSIPGVGIQSAAMILAEIGDFSNFESPDKILAYAGCSPSTYQSGKLTNCYAHMEKRGSRYLRCALYNATKYVCHWNPVFAEYLAKKRAEGKHYNVALSHAMKKLVRLIYALQKSGKAYLTAA

SEQ ID NO: 407174 - protein, 410 aa, unidentified
MLQSLVHCCAGLDVHRSLVVVTLLRSRPDERIEKKVREFSAFRGSLQEMARWLRLEGVELAVMESTGIYWKAVFEALEDEEIEAMVVNARHVKNVPGRKTDVMDSEWLAELARCGLLRPSFIPPRDIRELRLLTRYRSKLSGILSGEKNRLHKVLDDCGIRLGAVVSDIDGVSAREMVRALLDGYTPKEIANLARGRLRKKVKDLELSLEGRISDRHRLLLQTISSHIQGLQDEIQAIDCLVFTAMEPYQNEWQLLQTIPGMDQTSAAMLLVEIGVDMSRFGSRDRLSSWAGMCPGNNESAGKRKTGRSRKGNRYVRAILCEAANAARKTDSQFKGLYQGLVIRRGHKRAIIAVGHRILEIVYLLLSRKEPYRDPSVDYEALMVKRNAPRWIEALRKYGYIDQHIHEIAL

SEQ ID NO: 407175 - protein, 278 aa, unidentified
MADRITYVGLDVHKESIVVAVASGGLRGEVREYGRIANTATALDRLLRKLGGEGMTLRFCYEAGPCGYGIQRRLSTQGHECVVVAPSLIPKRAGDRVKTDRRDAASLAKLHRAGELTAVWVPDARHEAMRDLVRARLDAVHSLRRARQQLSGFLLRQGCHYGRPAWTKLHRRWLAGLTFDQAVHHLVLEDYIAAVEAAMARRDRLTVQIEAMLPDWTLAPVVAALQTMRGMALVNAATLIAELGDLSRFTNPRQLMAYLGLVPSEHSSGASVKRGVGL

SEQ ID NO: 407176 - protein, 380 aa, unidentified
MTTTRTVLRGKHMAKQSDLYMSFELGDKQWQISIGDGRHSVSRYTVAAGHTDAVADCIVKAAARFQTGGQAQVHSCYEAGRDGWWLHRWLSDLGVDNIVVDAASIEVNRRARRAKTDRLDADKLLAMLVRHHAGEHVWSVLREPSHEDEDARRVHRELQRLTHERIAHTNRIGSLLVLHNLRPKIIIGGRDWAAWWDTHCEQVPPMLRAEIEREAARLKLVKEQVRAVEAARCKELAEGKQPLVAQLARLRAIGPKGAWVLVKELFGWRHFANRRELAGSLGLVPTPYSSGDSEIEQGISKAGNRRVRGLLVELAWAWLRLQPASALTRWFNRRFAGAGKRMRRVGIVALARRLAIALWRYLQDGEIPAGARLEPATARA

SEQ ID NO: 407177 - protein, 440 aa, unidentified
MLAETRDDEVIIERIAAVDVGKAELACCVRVPDERRPRRRLQEVEVYPAMTRSLLRLADRLRCLGVTRVVMEATSDYWKPVFYVLEAAGSGTWLVNAKDVKHLPGRPKTDKLDCIWLCKVAERQMIRPSFVPPPPIRRLRDMTRYRIDLVTTRTAEKQRAEKLLEDACIKLSVVASDIFGVSGRAMMASLIAGERDPKVLAQLARTAMRRKISALEEAFTGHFTDHHAFLLAKMLARVDALDADIAELDAVIEQMIAPFASAAERLDEVTGIGLVAAAVIIAEIGTDMTRFPTSGHLVSWAKYAPGVKESAGKKKGAGTTGHGNPYLARVLGEAAIATSRTGTFLGERFRRIARRRGSKKAIVAVGRSILVIIWHLLSDPTARYADLGPGFTTPASATAARHTTTSASSKPSATKSASNPPPDRIRPGSTDTPPGAAACP

SEQ ID NO: 407178 - protein, 388 aa, unidentified
MIYAGIDIAKLNHFASVVSSDGEVLVEPFKFSNDFEGFRSLSLVLDQYDRDQLLVGLESTAHYGNNLVEFLAAKGYRFCVLNPIQTSALRKGNIRNTKTDKVDTFIIAKTLMTSEHRLFEKQDLDLLHLKNLGRSRQDLMKKRTTAKIKLTSFVDQAFPELQYFFNGVHHKSVYALLKEAQTPEQIASMHMTHLTNLLRVASHGHFKKEKAQELRVLAQRSVGSNDSSISIQITQSIEQIELLDRQINDDEAKIEEIVKAIGSVIMTIPGIRYVEAGMILGEIGDINRFPDYHKLLAYAGLDPVIRQSGKFNASRTRMSKRGSRVLRYALVYSAHNVVKNNETFRKYYDLKCSQGRGHYAALGHCAGKLVRIIYKLLSEDIAFDPNRL

SEQ ID NO: 407179 - protein, 404 aa, unidentified
MFKFGIDWSEQHHNLCIRNDKGAILSQIEFKHTLEGFQRFDDERRKLGVPASECLVAIETAYNLLVDFLLDRGYLVYLIPPQATRGYRNRQRSTDAHTDDTDAALLSSILHTDLDSHRRLQPNSALTQQILAQVRLIDLLRRSIQRQSNQLRAILFRVYPQALGLFGKLTAHINLHFLMAYPTAQDAQGLTRTAFEAFCREHRYGRANLISRRYAHLIDPAPEANRIAVAAYRDQIRILAELLLPQVLRRTEALSSLAQLFSQHPDAFIFESLPGAGQLLAPGLLAKFGDHRDRFPTPNSVQALAGTCPVTKQSGKRKVVIFRRGCDREFRRIAQQFAKASVRQSGWALAYWRDVRPSCRSDSDAYRRLANRWLAIIWKMWQDGKAYDEAYHLQQRAQRRRPQS

SEQ ID NO: 407180 - protein, 437 aa, unidentified
MNHLRLQHNREFLTGKTVIGIDPAKDKHRAAIVDPHGGQRGGSFSFPVSASGYGETLWRSIAKILPSFGPQDLIFAIETACNLWETLAFFLFSRGYSVVLVSPLSTHHARPILSMEFSRTDPKDAFLVATVAQRGAFQFYNRFSAQHTAMHQMAIIYNKLRKDLAQNRSRVHALLDKVFPEFPHILLPQRNSAVYLLKKYLFPDEFLAMDIRSEAPVIEQISRRQCGRSTLEAIQKAAETSIGVIRRSDERVADRLSLNAFLALIEHADVQINCVLDELVARAQELPQFERLTSLSGVGKRLAALFLAEVQDLTRFTHYKHIEKLAGLNLRLVDSGRYSGTRHISSIGNSRLRWILYKMTEETARRVPEVRIKYLRRQLKRRHHVKNVVGSIPQLLQLIMAMEKHQHSYHERQEILLELKELETKYEQLKAQRKAAA

SEQ ID NO: 407181 - protein, 327 aa, unidentified
MTIATVGLDIAKQVFQVHAADSEERAVLRKRLQRDQVADFFANLPPCLIGVEACCGSHYWTRVLSRFGHTVRLIAPQFVKPYVKSNKNDANDAEAICEAVSRPQMRFVSTKSIEQQDIQSVHRVRSRLVSSRTQLASQVRGLLAEYGIVLPQGISQLCRGLPLILENAENELTGFSWRLFASLYEELAQLDSKIEALDEQVKAIYRASERCQRVAAVEGIGPLIATALVAAVSDGKSFKNGRQFAAWLGLVPREHSTGWKARLFGISKRGDPYLRTLLIHGARSVWCIARAARLTRATVGLPTSSADWVRRKPAWRWPTRMHVLCGR

SEQ ID NO: 407182 - protein, 432 aa, unidentified
MDILYERVAGLDVHKDTIVACVRNVVEGKTKRECLSFATTTEQLAELRAWLEECRCTHVAMEATGVYWTPVFRILGEGKFELVVANAAHIKNVPGRKTDMNDAMWIADLLACGLIKASFVPPEEMQELRSLTRTRKQLVREQTRHVQRIGKTLAEANIKLDSVISDVMGASGRRIIEAMIAGVHQPRKLADLASKQIKVTPKELYDALHGRLTDHHRFLLELHLRQWDGLDETIRKIDQEIDQRITRMSTTAETYKIPFRTLIELLHTVPGISAVAAPAILSEIGRDMSRFPTAGHLVAWAGLCQVKTKALAGANPRGCARARPGSRRCSCNAPGLPSARKTATTEPSSSACKASVDRRRPSVPSPHRSLRRSIICSRMAANTTTSGLATSIGAPPKSKPITWSSVSKSWALPSSFNHSRRQSDTFPMPVSS

SEQ ID NO: 407183 - protein, 452 aa, unidentified
MRADVQEIDADGEGEEAVERVAAVDVAKASGMVCTRLPHPSLAGRRVTKVWEVRSTTNAILALADELADQGIERAVVESTSDYWRPFVYLLEARGLSVWLVNAREVKQVPGRPKTDKLDAVWLAKLNERGMLRPSFVPPAEIRRLRDYTRLRFDLVGERSRHVQRLEKLLEDALIKLSTVATDIMGVSGRAMIDALIAGERDPHVLAELARGRMRVKRAALAEALTGRFDEHHAELAQMLLDQIDALGAKVEALTLRIDQLIAEIPAAQAPVDPRPSGQRHDPHSNSLAVVARLDEIAGIGVRAAQVIVAEVGLDMTQFPTPGHLVSWAKLCPRTIQSGPRSRSGKTGKGNPYLKAVLGEAATAAAKTDTFLGERYRRLVRRRGKLRALVAVARSILVIVWHLLADPAARYQDLGADFYTNRVNKDRKTRQLIHQLQALGHHVTLQPIAMAT

SEQ ID NO: 407184 - protein, 376 aa, unidentified
MTQTDVQYPTIHLAIELSRSAWLVAARMPGVEKPSLHRIEGGDTAALLALAAALRARAAARLGTPVRVACCFEAGRDGFWLHRLLTAEGIAAYVLEPTSILVNRRARRAKTDRLDALGMLRVLAAYLGGDRQACSMVRVPTPEEEDAKRPHREREELVRERVRLENRIAALLATQGVRERPSLRSWERDLAALRTGDGRPLPPHLRAELDRLRRRLVLTLGLIREVEAERDAALAAGPRDAAGRKIAALCRLRGVGANFAAVLTREVFYRAFDNRRQLAGYVGLAPVPHQSGEADRDRRISRAGNARARTTLIQLAWLWLRYQPDSAPARWFRDRVGALRGRTRRIAIVAMARKLLVALWRYVETGLAPEGVEVAA

SEQ ID NO: 407185 - protein, 472 aa, unidentified
MNKRRAISRQTAKAKDRTVSPGLLKRIQPDAAGIDCGATSHYVAVAEARDPEPVREFRTSTGGLHALADWLVKCGIKTVAMESTGVYWIPVHEILEERGLEVVLVNARHVHNVRGRKTDVQDCQWLQELHSVGLLHASFRPAGEIVVLRSYVRHRQILVEATATCIHRMQKALTQMNLKLHHVLSDITGVTGLAIVRDILAGVRDPLKLAAHRHGGCKASEQEIIAALTGNYRAEHLFALRQNFEAFEFYQRQIADCDQAIEAQLTNLAQTRQPPAPQLPAARPRCKPSKNEPRVELREPLHRITGGADLSQIDGIGPYGALQLIAEIGTDMSRWRTEKHFTGWLTLAPNNKISGKRLLSSKTQPSANRAAAVLRRAAMSLTRSSTALGAYYRRLAGRLGQPKAITATARKLAVLVYRVLRGDLTYCDPGANAYLELHRTRIINALRRRAKEVGLSLINLETGEVLDHALVP

SEQ ID NO: 407186 - protein, 346 aa, unidentified
MEQYVGLDVSLKLTAICIVDRTGKIEREGVVASDPETITAFIKSHAPHVARVGLETGATSTWLWTELNKMGLPVICIDARHAKAALKMQINKSDRNDAVGIARIMQCGWYKEVRVKDLDSHAIKALLVSRALLVKIKRDIENQIRGLLKNLGLVIGRAKMNVFAVRAAELAEARPELAAAVEPLLKAREAVGRQIADLDRKVMRLARNDAQVRRFMTAPGVGPITALCFLATVDDPTRFKRSRSVGAYVGLTTRRYASGEIDWTGRISKCGDAMLRSYLYEAANVLLTRVTKWSTLKAWGVRLAKRSGLRKAKVAVARKLAVILHRMWIEGTEFKWSSKEAANQAA

SEQ ID NO: 407187 - protein, 313 aa, unidentified
MAAAGRFIGIDVAKRQLDVAERPSGERWAAANDGPGIAAVVERLGTGEAVALIVLEATGGYELPLAAALTAAHLPVVVVNARQVRDFARAVGKLAKTDALDAAVLAHFGEAVRPEVRAVPDELTQTLQSWLARRRQLLEMLLAEEQRRAIAVPTLRPQLQQHIEWLRQQLRALDGELQKLIRQSPVWREQENLLRSVPGVGPVLATTLLADLPELGRLNRQQIAALVGVAPLNRDSGQQRGSRHIWGGRAPVRTALYMATISAVRCNGVIRAFFERLCGAGKPKKVALTACMRKLLTILNAMVHHRTEWAPAA

SEQ ID NO: 407188 - protein, 334 aa, unidentified
MSNVTTCGIDLAKNVFSMHAVDGHGVVVLRKTVSRARLMPLIAQLPACLIGLEACSGAHEWARRFAQHGHTVKLMAPKFVAPYRKSGKNDGNDAEAICEAVSRPSMRFVPVKSVEQQAMLTLHRVRLGFVEERTATINRIRGLLAEFGVVLPQRVVEVRRGAAATLEQLPPLAARALADLLAHVRVLDERVGEYERELEQHARRDERARRIQKLSGVGPISASAIVSSVAEAHEFKNGRQFAAWLGLTPKQYSTGGKSRLGRITAHGDPYLRTLLIMGARSMLQTALRRTDRLARWAIAVRVRRGYHRACVAIAAKHARIIWAMLAKNEVLQLA

SEQ ID NO: 407189 - protein, 351 aa, unidentified
MKQPPQPEPSTIKIITIGIDLAKSVFQIHGVDAGGAATVRKKLRRAEVLKFFEGLPPCLVGIEACATAHSWAREIGALGHDVRLMPPSYVKAYVRRQKNDAADAEAICEAVTRPTMRFVPVKSAERQGVLVLHRTRDLLVRQRTMLINAIRGHCAEFGMIAPQGAYRASDLIEQVRDAEGSVLPDLARSALLMLAEQLDALAVQIHALERRLLVWHRQAEASQRLATIPGVGIITATALAASVTDPHLFRSGREFAAFLGLVPRQNASGGKDRLGRISKMGDGYLRKLLVVGATSVIRRAGDNTSATGAWLRTLMERKPARVVTIAMANKTARIAWAVLSRREDYRASAIT

SEQ ID NO: 407190 - protein, 346 aa, unidentified
MAGAVHMKKYNFYIGVDISKPFVDFIVSDGKHSRIHAQGANDPESLKAFLTQLRKLEGCRISNCIFGMEHTGIYSNHLLTVLHKLKADVVNENSIQIKNSLGLLRGKNDKLDAFRIAEYLFICRDKLTLWTEKRDIISELSGLLTLRERLIQILHNLKVLLKQEKGFINKNLSAQNLDLCSASIAAVKTDIIKVEQKISSIWTTDKTLEHFMRIILSVPCVGQLTALNIIITSNEFKTISTAKKFACYAGVAPFSRQSGTSVSGRSRVSHAANKKTKSLLHTCAVLSVRFVPELKAYFLRKTQQEKKHRMLVYNAIRSKIILRVFSCINNERMYQKDYVYTPLQHQ

SEQ ID NO: 407191 - protein, 407 aa, unidentified
MYVGWDWASASHDVTVVDEAGEIVDHWAFSHSEIALQGILAELAKVGEPTSLEVAIERPSGLVVERLLEAGHLVVPVHPNAFNATRPRWGASRAKSDPGDSYRLADLLRTDGHRMRRLRPLDQATRELQALCRTRDDHVEAKVAATNQLQALLDAHWPGAAAIFARLDSDIALEFLDRYPTPESASRLGEQRLTVFLRRFSYCGRRTPAELLARLRGAPVAPTRLDPEVFGELVHAQVQLLRTLLRTIADLDRAISAAVAEHPKAHLLTRLPRLGHGVNLAQVLAEVGPILERSLSPEQAAAEVGASPVTKESGKARSVSFRWAANTRARKALVTFSDNSRHASPWAATTYARARSRGKRHPHAVRILMRSWVRVIWTCWHNDVAYDPAKHRGELLVGAAHCGQGLT

SEQ ID NO: 407192 - protein, 337 aa, unidentified
MNYSGIDLHSNNCVVLVSDETDRILCKRRVPNELETVLRLLEPYRGELAGVVVESTYNWYWLVDGLQTAGYRVHLANTAAIKQYEGLKHSGDETDAGHLAQLLRLGILPTGYICPPRQRAVRDLARKRLQLIRSRTAHILAVENIVARQTGGRMNAQAVKRLDLDELRKLGQLEEVRLALSANVAVIQTLTAQINKLEARLRSEVAPRAEFKFLTTAPGIGEILAATIMLETGTVERFAAVGNFASYARCVASKRVSNGRKKGEGNVKNGNRHLAWAFIEAANFARRYCPEAKRFYERKKARTNMIVATKALAHKLARACYHMLKHEQPFDVKRCFA

SEQ ID NO: 407193 - protein, 354 aa, unidentified
MKGTAVTIVEDKPVITGGVDTHADLHVAAALDPIGGLLGVRQFPATAAGYADLLEWLGGFGDVGLVGVEGTGSYGAGLARHLAAAGVAVVEVDRADRQDRARQGKSDPLDAVSAARAAQSGRASGVPKGRDGAVEAIRALMVAKRSARHERTQAINQARALIVTGPDELRARFAGHGPASLAEAIAALRPRPGDVPGYATRVALRELGRRVQFLDAQLERLDELIGPLVTARAPGLLSLFGVGPDTAALLLVAAGDHPERLRSESSWAHLCGAAPIPASSGKTSRHRLNRGGNREANHALWRIVITRMGSRPGHPATRAYVERRTREGLSKKEIIRCLKRYVAREVYQQLRDGT

SEQ ID NO: 407194 - protein, 405 aa, unidentified
MNAVGIDVSKGKSTVTIRQPGDVVVLAPRDYRHTQSSINDLITTIKELDGETKVCMEHTGRYYEPVASWLSSAGIFVSAVNPWLIKDFGNESIRTPKTDKADAKKIARFALDRWAKLPQYSRMDELRNQLKTMNRQFSFYMEQKTAMKNNLIALLDQTFPGANSYFDSPARSDGSQKWVDFVYTYWHVDCVRGKTLEAFTEHYKNWCKRKGYNFSTGKAEEIYLAAADLIAVFPKDDYTKLLIRQAVSMLNAASKTVETLRVKMDQTASQLPEYSVVMEMDGVGPTLGPQLIAEIGDVTRFKHRGALTAFAGVDPRPDESGDYARKSNPTTKKGSPYLRKTLFLIMDGLIKRSPTDNPVYAFMDKKRAQGKPYYVYMTAGANKFLRIYYGKVNAFLSPSEEGKES

SEQ ID NO: 407195 - protein, 313 aa, unidentified
MERSLFVGIDVAKGHLDVHAVPTDAAFRVAHDAAGLATLCERLVAWAPTLIVMEATGGHEVTVVAALASAGVPVVVVNPRQIRDYARATGQLAKTDALDARILAKFAAAVRPEVRPLPEPQTRALDEAVTRRRQLIEMLGAEENRRRLVRDRSVQGQIEAHITWLKRAIKELDRELQATIRASPLWRDAEAVLRSTPGVGPVMTTTLLAELPELGQLSRHKIAALVGVAPLNRDSGQFRGRRMISGGRASVRRVLYMATLSAIQRNPAIKTFYERLCANGHPKKVACIAAMRKLITILNAMLRDGRRWQAQIA

SEQ ID NO: 407196 - protein, 348 aa, unidentified
MRFYTQQHQYYCGIDLHARTMYTCILDQAGDTVVHKNLNTKPALFLRTIEPYRDNLVVAAECIFTWYWLADLCAEENIPFVLGHALYMKAIHGAKTKNDRIDSYKIAKLLRAGMIPMAYVYPAKMRAARDLLRRRMHFMRKRSELRAHIKNTNSQYNLPPMGNTIPHRANPDRVQTQFTDPCVRKSVQVNLALIDYYDKMLKDLELYIHRSAKHHEAKDQYLLRTIPGIGPILSLVLLYEIENINRFPQVQNFASYARLIKPIKESAGKRTGKTNKKIGNAHLKWAFSEAAILMMRERDEAKKFVQRKQSKHGKAKAIAILSHKIGRAVYYMLKHQRPFDLNKFFNKN

SEQ ID NO: 407197 - protein, 474 aa, unidentified
MEVVSNTSKKSGRELKGRKGKRRKGMSPEDKPILEANASGIDIGAREMYVAVPPDRDPTPVRIFDTFTQDLGELADWLMRCGVETVAMESTGVYWIPLYEMLEQRGLKVCLVNARHMKNVPGRRTDWHECQWLQYLHSVGLLRAAFRPEDEVCAVRALMRHRHELVTMASQHVQHMQKALTQMNVQIHHVIDDLTGMTGTAIMDAILAGERNPVKLSELRDPRIKADVETIRKSLLGNWRKEHLFTLKQSRQMYGNYKAQIEECDREIETLLSRFEPRVDPEDKPLPPDQKRKQSKESKSNAASNFDFRTEGYKLFGVDLTQVPGLRTMVLPLFTELGRDMSQWGSAAQFTSWLGLCPDNDISGGRVLWKGTRKTKNRAAQLFRLAAHSLSRSDSPLASFLRRMKSKLGPAAATTATARKIAVLFYTMVKTQTEYNETLAANLDAQRQANLEKKLQRQAKRLGFQLVPLENSTS

SEQ ID NO: 407198 - protein, 407 aa, unidentified
MTVAVGIDIGSVSHAVAVCREGAQEAERQGLKIAANRGGFDDLDAWLRRQPEPVARVVMESSGHYWFNLASHLSHQGYPVAVVNPLEAKYFSKRRLQRSKSDPADARTLAAFAMVDQPRTREPLVGAELREASRFAMRLTREQGQVCQRILRLVDIGFPELAEVWDDPTCVSALAVLRRASTARAVARMSVEKLAQLRRPGSGGRAIGPSKAAELKRLAATSVAAPELEAQVGFEMRLLIGQYDLLEQQIQEADRRVAALLDGEVAQRLLTIPGVGPSTAGALMAEIGDIWRFTDVDQLLAYAGVHPKEQSSGKKGANPETSWAMAKTGNAFLREAAYRMAVVGIQHNPVIRAHYTRKRAAGKSRMNAVGHCMSKALSLVWGVWRGGKAFDAAHGSATKAPPTPPEA

SEQ ID NO: 407199 - protein, 355 aa, unidentified
MNQEKYIGMDVHQATISVAVMDGRGKLIMECILETKAGTILEFIGGLQGSLSVTFEEGTSAAWLHDLLKPHVAHLIVCDPRKNALLKDGSKSDRIDARKLADLLRLNKLNPVYHGEHGVRTLKELGRSYLTITQDLTRVMSRIKAVYRSWAIPCSGTTVYAPRHRAEWLGKIVEPGVRRRAERLYQQLDLLQPVRQQARHDLLVESHQHQAVKLLRQIPAIGPIRSALLIALLPTPHRFRTKRQLWAYSGFALETRDSGEYRMVRGKVRRNRERLTVLGLNDNHNHDLKNLFKGAAISASTRPGPLYDFYVGLLQKGMRPTMARLTLARKIATITLTMWKKGVDFDAQQLNRQAA

SEQ ID NO: 407200 - protein, 450 aa, unidentified
MSKGSGVSRGDKRRNARLAELRRLVPRENAIAGIDLAEDNQAVVVTDHDSKVLARRSPRCKAWQLGEVLDWAVAKAQARGFASVTVACEPTGSRWMHVQQACAERGLNFVCVQTLVTHNAREAEDCTRDKSGQKDAVLIARLTAELRCYRPEVIEEDWAVLRYLGQRRDALVTEAIRCRQQITDRLALAWPAALGTAAAPLDSVTFLACLQVVADRCDGDPGKLRGYGLAEFTQLVRGVLPRWGGQRACHRIVAAFHAALGDSHGAVPARRRGALKLAGHALADLRRARELQARVGAEMIAQLHVLGIADVLATIDGLSLEVAACILAETGDPARSGSSRALVKHAGVAPCDNSPGNSAGQARISRRGRPVLRKAAWRATWAMIHGANPVLAARYAHLTSRPAGQLAKGQAHIACMATLLRWIYSVVTSRASWDQRAAAGTISHTAAMAA

SEQ ID NO: 407201 - protein, 356 aa, unidentified
MSRDIKYIGMDVHKEAVVIAVLNSSGKLVMESVVETKASSILQFIHGLRGELHVTWEEGTWASWLYDLLQPQVEQVLVCNPRRNALLKEGSKSDKVDAQKLAELLRTGMLRPVYHGENGLRTLRELGRSYQTISKDLNRVMNRLKALYRGWGIACAGTQVYAPRYREEWLHKIPHPGVCRRAELLYQQLDGLQALRRTLRPELLAESRKHKAVKLLRQIPCIGPIRAARLLAIMQTPHRFRSKRQLWTYSGLGIETHDSAQFRFVRGQLQRSKKPQQLRGLNRNHNHEMKEIFKGAATRASCGRGPLHDFYAALLTKGMRPEMARLTLARKIAAIALTLWKKEERFDAQHLKPQAA

SEQ ID NO: 407202 - protein, 371 aa, unidentified
MKKHNKKQDARQDNQKASKETKEKFAFYIGMDLGDKNADVCVFGPDGEVSEEFRLPMKGGDFQLYFVTIPRSRVALEAGGQSRWAAEIIKNCGHEVYVSNTRKVPYIHQSDDKDDSGDAYKLAELVYFKPRLLHPIQHRSQEAQADLSWIRAREALVESRTQLINTVRGISKAFGERLPKCSVEAFTGKLAGQIPAAIRGAVAPLLETIDHLNRHIHEYDEMEEHMARERYPKYWLLDQVNGVGVHTALAFMLTIGDPGRFEKSRQVGCFLGMRPKKQESGESKPQLGITKAGDIYLRKTLVNCAHHILGPHGKDSDLRRFGQRICERGGKNAKKRAVVAVARKLAVLLHRLWVTGEKYEALRNSQKKAAA

SEQ ID NO: 407203 - protein, 360 aa, unidentified
MYYVGVDLHKATSWFYVLDAKGKKVDSKNLSNDLAVLKGYFGTIPVPFTLAVESTYNWYYFVDLAQTYADEVFLANSYELKAFAKRHKKTDKIDAQLIAQVLYKGYLPIVTIADQQTRQIRELLRCRMNLVRDRSRTISRLKALLDKLGVYSEGDFTTYKRLGAIPIETMSSIYGTVAKHYIEQIIESSRRLFEMEKAITTLSNRDTEVSHLISIPGIGPFSALLIKSEIMDISRFASFNRLCAYAGLAPRVSASANKIHHGPLNKNRRKYLQWILIEDAYHYIRSVPEAKEKYAQVEKRKGANTAKIVIAREMLKVVYHVLKENRPYYTEGEKRKQRAKQHKEKGVKIQSVAAAALLGV

SEQ ID NO: 407204 - protein, 345 aa, unidentified
MQIKSIGIDLGKTTFHLIALGDRFQVVIRKKFSRSQLLEYTANLPSSLIGMEAGVGSHFLGRALREQGHEVRLIPAQFVRPFVKSNKNDYRDAEAIAEAVERENMRFVPIKTEDQLDLQALHRVRDRLVARRTSVINQMRAFLLERGISFRKGPASLRRQMPEILENADETLSPAMRRRLDFLWQEWRSLQVQIESLNTELEQIASNDPSCVRLQQIPGVGPLISTAVVSAIGNGAAFKKGREFAAWLGLVPRQWSTGGKAKLMGISKRGNPYLRKMFIHGARAAVLRVKREGSSLGKWMSGLETRTARNVVMVATANKLARISWAVLASGNDYQPLHRAALLSN

SEQ ID NO: 407205 - protein, 347 aa, unidentified
MDQIIIGVDTHKSKHIAVAISHQGACLGSMTISTNSQGYRDLEAWASGFGTIKAFGIEGTGSYGAGLSRDLLAMGHMVLDVMRPNRQLRYLHGKSDSLDAESAARSVLNGQATALAKTQTGACEIIRHFKIARDSAVKSRSQAMITLKTLIINAPAELRDTLDLIKGPITLIRHIAALRPGKITSPTASAKTAMRAIARRWLVLHEEIQAHGQELERMVREKAPDLMNSHGISTMTAAEMLILVGDNPERIKSEAALAKICGVCPIPASSGKTKRMRLNRGGNRHANAAIYIIAITRMRDHEATKSYVAKRTAQGKSKREIIRCLKRYIVREIYRELCVPNDTKRTH

SEQ ID NO: 407206 - protein, 351 aa, unidentified
MKEFIALDAHKRYSWMEREEVRSRKVRCARIEHAPGAIREGLQGREKGTPVAVEATGNWYWIVDEIEQAGLEPKLVHPRKAKLMMGLINKTDKLDTHGMNQLQRNGTLPTVWIPPRELRDQREITRARMVLTRHRSRLKNRIQATLSKYGWTGGEASDPFGKRARRELSKALSGLPPQTAQITEMLLQQLDFVQGQIEEMESKTRQLVKDTAPMDRTRSLPGIGWILSAVIALEVGDMKRFASAERYASYSGTTPRVHASGDKVWYGRLRPDVNRYLRWAYIEAAHSVCLHVKTHPERHVSQLYERIRERKGHGKAIGAVARHLAEATYHVWMKEEPYQDPAWRKGPSREV

SEQ ID NO: 407207 - protein, 391 aa, unidentified
MERPMPQRNDLSRSLLALDQNSTIIAVIEMSRSNWLVAGVIPGVDRQPLKKLEPDEEGLLHLLRRWQDEAARAGRTISRIAVAFEAGRDGFWLARWLRARGIEAYVIHPASIPVSREHRRAKTDRLDTELLKRAFLGWLRGEPNHCSMAAVPTLEQEDAKRPNREREVLVGERTRIVNRMKGTLARLGIRGFKPALPRAPERLETLRTPEGATLPPNTRAELQRDMARLRFVTDQIRELEAARAERLEHAPETGPNAMIRLLARVVGVGIETADMLVQEVLSRNLRDRRAVARYAGLTGAPDESGAKRREKGLAKAGNARVRRGMIQLAWRFLLFQKDSALSQWYRARTTDARGATRKTLIVALARKLLIALWRFGATGEVPQGVVLRPAA

SEQ ID NO: 407208 - protein, 309 aa, unidentified
MNEELVYLGVDIAKAYLDAAIANEKRRFSNDAVGHRRLIQWLKQIKGPVQVICEPSGGYERALVRALVAAQIKVSLVPANRVRQFARAGGILAKTDRIDAKLLCAFGEAMKPGIISASQLEQEQLRELESQRRHLTHLLVMEQNRAARVSEVCARKLNRRLITLIKKQVEQLDLLIQEQIAASRELATKAEKLTTISGVGARTAALLLAQMPELGQLNRREVAALVGVAPFNRDSGRMRGKRAIYGGRRSVRHGLYMAALVAARHNPILRGFYLRLRAAGKPAKVALTATMRKLLIVLNSALKPDLNYA

SEQ ID NO: 407209 - protein, 365 aa, unidentified
MLYLGIDQHKRQLTVNLRVEDGTVILKRQVSTRWEKVRAFFDDLSEKAGPEGGFLAILEVCGMNPWLLDMLREYGCREIVVIQPTKRSKQKTDRRDAGELSHLLWVHRQQFLEGKHPLGLRRVQPPTDQQAADRQLTTLRAQLTKKRTAVLNGIHKILRKHNLEQSQPTKGFQTKKVRRWLGELELPAMDRLEMNLLLTQWDLFDEQLEVLEAKIAERAAADEQVQLLESVPGIGHYSAVAIASRIGDIERFKSPDSLANYFGLTPGCNNSGDATKRLGSITKRGSKMVRYLLNQAVVSVLRFDGAMRLWFKRIKKRRGSKIARVAVMRRLATILWHMLKKKQKYRYDLSIKKYREFEAFEGAAP

SEQ ID NO: 407210 - protein, 451 aa, unidentified
MKKNRAYKRYQEKKRQVSGKRIVGIDPAKEKHQVTVVDEGGLQKGSTFSIGVNFRGYNEELWNGLRKILGQFGPADVVFAVETSCNLWKTLVVYLSKKGYTVLLVSPLVTYQSRPIMNNDYSKTDPKDALLIGENAQRGYYADYHEYSSEVNRLHSLCIAYDKLVKDRSRNKMRLRSLMEEIFPEYLECLNVDIDTSLYLLGKYYLPEHFAGMDIKREAEHVYRLSRGNHGLETLHQLKESAQRSIGVDKRGEEDSVRLILDVWIGEIRQLDRSIEAVSARMIEIARGSEYFEIIASVPGISDISAARFIGECYGLNLFTHYKQIEKLGGLNLRLCDSGQYKGTKRINKLGNKRLSKLQYQMTTQTARFVPEVRIKFIKRQKKRECYRKNIIAASSVLLRILMALIKDKRRYEYRDDKVKELAALELTYKPQKKKRKARRTGRKSAGKEAA

SEQ ID NO: 407211 - protein, 383 aa, unidentified
MRTMYSNVACGGMDVHYKFSNVTFRDQAGRVVRRERLDHPQRARLRERLRRWPRGVPIVLEASFGWGWLSDLLSEAGLEPHLSNCYKLEQMRKARGGVKTNKKDADLVSLLPFETTDWWEVWRAPREVRNRREQMRFRGDLVALQTAVKNRIHAVFHRHGIFHEFSDLFGGQGRRFLAELCLGGSEYLSPEALQALRDQVLLLDHLRRQLADVAWILRRQLARTPLIRRLKTVKGFGLILSHVLTAEIGRIERFRNHKALASYSLLAPRSHESGQEDPDRSPRGRHLGTRGNRTLKWAFIEAAHGAVRSGGRWRAMFDRVTDGGTRDRNRGYIKVARELVKVVYVVWTKGVDYQPIAPPRPGRSQKKQSRSGTGQLSHPMVHA

SEQ ID NO: 407212 - protein, 369 aa, unidentified
MEHTRFVGLDIHKERISIAVAENGRSGAVEYLGEVANDPGAISKLCDRLGRPGRPLAFCYEAGPCGYGVYRQLKSLGHRCDVVAPSLIPMKPGDRVKTDRRDATMLARLHRAGELTAVWVPDADHEAMRDLIRLRSVVRQIVTRTRQHLQGFLLRHGRKHGQGTAWRMAYRRWLSTLAFQHTAQQIAFQDYVDAVMDAERRLQRVEEQISCLLPEWNLRPVVDALQAMRGIALINAVVLVAEVGDFTRFSSPRQLMAYFGLVPGEQSSGENIRHTGITKTGNSHARRALVEGAWAYRMKPRIGRHKVDRIEALPKIVRDIGWKAQVRLCARYRRLSARGKNANVVNIAIAREMVGFIWSIACTIQSAPR

SEQ ID NO: 407213 - protein, 357 aa, unidentified
MKSQEIKYVGIDCGKKTLEVIRIGDNSLHQRQQFSTTEIGISKLINWLNPNDVVGLEAGSQSFRIAKSILNKGVQVIVLNPGNLATIYQSLKKTDKEDSLKIARLIQRHPIEELPTVPIPNDEEEDNRRLCSEHENWTKQLTQGKNRLHSLFTQAGLTQITKKHLRTKANREISVALLPSRYQKEAERILKVLDLVEQNLKLIEEEIREALKKNKAYAQTIMSMPGVGMITSLAIMSYMGNCKRFSSAKQAAYYVGLVPRVDISGDSAYYGRIVNRGCHSIRRVIVQAAWSLVRCQYGGKIKEFYQRLYPKKGAKKSIIATSRKMIEILYTMIKTGELFDSMPEKVLNRKLTQYGLM

SEQ ID NO: 407214 - protein, 394 aa, unidentified
MACLLIVLKNGRVQKQVRTFGTTTRELMGLREWLLSESCTHVAMESTGVYWKPIYAILEGAFEIVVANAQHVKKVPGRKTDVKDAEWIADLLCHGLLRPSFVPPSPIRELRDLTRYRRKLVESRTAERNRLLKLLETANIKLASVATDVFGVSGLLMLHALVEGKATAQEMAELAKKQLRKKIPELEMALEGKVEEHHRFLLRVQLRRLRTVEEDLGILEQRIQEKLKPYAAQFTLLQEIPGIDETLAAAIIAELGVDMGVFENVSQLSSWAGVCPGNNESAGKRRSSRIPKGNVYLKTALVEAANSAAKAKGTYLRDKFYRLKARRGYKRAAVAVGHKILVAIYHMLSQQVSYNDLGDLYLDKLNKNHLTRNLVHRLERLGYQVSLTLQEKAA

SEQ ID NO: 407215 - protein, 431 aa, unidentified
MSRELERLLDFQELRDEVRGSAKHLLVGIDVAKMKHHAYFGTPTGKTLRRHFVFPNDRAGFGALRSLARDLARQHDLHPIVFGLEPTGVYHKPLLAYLIDEGERAVLVSNVAVQRNRELLDGRWDKNDVTDPANVADLVGQARCLFPDDPTPDLRELRSFVRARVRLKKREHVLRMRIRNHLIAQYFPELERAYAKSGGANDAIVLRIVERCFDPAQIAQLPFAVFWEQLAEPRWNQRHQARVREVWLAAAQSIGCPVDAAVRWEASRLVQRLQTLRHDLRELDHRMHQVAQRMPGYPSVTSIPGMGPVLAAMLLAALGDPYRFAHPRQVLRLAGLDLCARRSGTSSDRAVPRISKQGKASLRYALVQAAMVGAHSSPALRGYFSRLVAGRTHERGIRRKMYVKLAAKLLVVAWTLMRRADTFSPGPFMDE

SEQ ID NO: 407216 - protein, 343 aa, unidentified
MQVVTTVGLDIAKSVFQVHGVDAAGQVVIRRQLKRRYVLAFFEKLPACLVGIEACASSHHWSRELKTLGHTVRLMPPAYVKPYVKRQKNDTADAEAICEAVTRANMRFVATKTPEQQSCLTLHRTRHLFIRQQTAVINVIRAHLAEFGIVAPVGRKGIETLLDVVANPTDKRVPVIARACLAALGAQLRRLKEQILEFDRMIMAWHRSNEASKRLDAIPGVGPVLATALVASIADPKAFRSGRNFSAWIGLVPKQHSSGGKDRLGNISKQGDRYLRSLFMAGALAVIRHAKIHGTTHRPWLTALLARRPTKVAAIALANKMARMVWAMMTRGERYKDPIALAA

SEQ ID NO: 407217 - protein, 351 aa, unidentified
MEKAKAVVAFVGIDAHSEHCSLKAVGRQGESLLSAEVVTQERRVRAAVRKLPRPVWAMVESSYLAPLLKEWLDPVVDRVIVCETRENRWIARSEDKSDPADADRLARLLRMGEFKPVHVPGRAGQERRELVRLHRKAVGDVTRLKNRLKAKYREHGVAVKGEKVYTVRHRASYARQVKQPAVRAMLAVMSEQLDGAQAAQLKIWGQLFARLRTLPEYRLLKTIPGVGSRLGAILVAGIDDPGRFANKRRLWKYSGLGVRRQWSSHPEQARVSGSPSGNRLMKYAALSAATNALRGKNRFSRHEAAMLEQGIDPAMAKRTVARQILATALSMLKSGTVYREPEPGAKAGGGG

SEQ ID NO: 407218 - protein, 324 aa, unidentified
MEVEAVYVGIDVSKARLDVAVWPGAERFSVANDPRGIAELVEKVVALTPQAVVLEATGGLEAMAASELHAAELTVAVVNPRQVREFARSLGRMGKTDRLDALVLAQFAQSAHSNERLPKLRLPDAAEAELKALVTRRRQLVAMLTAESNRRERAPKVIRKSIVASIRALKRSIAEIEQQVREVMSDSPVQQAKAVLLAAVPGVGPQLTATLLAELPELGNLGRRKIASLVGVAPHPHESGKFYGRRRCWGGRATVRTTLYMAALSGVRFNPALRSHYRALLERGKARKLALVACMRKLLLILNAILRDSASWNPHHQLDFQHSR

SEQ ID NO: 407219 - protein, 372 aa, unidentified
MNYNTVYVGMDVHKESFTLCSCKYEDEKASHYQRTPASYKNVLRYLAFLRTIYGEYTRFVCGYEAGCLGYSLYHQLENFNVECVILAPTTMLEQRSKRRIKTDKRDAEIIAKSLAQHNYSPVHIPTKMDNQTKEFIRMRDDHKAELKKIKQQILAFCLRQGYQYDGSGNWTAKHVKWLRSLKTEGLYKEILDEYLLTYTILTDKLNRLDQRIEELASEEEYKEPVSKLTCFLGIKIHTALSVIVEVGDFQRFASARKFAGYLGLVPGQHSSGDDRNGLGITKAGNTHVRRLLVESAQSYTRGKIGYKSRVLRSRQAGNSPQIINYADRANERLRRRYYQMVLKDGKKYNIAKIAVARELACFIWGMMTDNIY

SEQ ID NO: 407220 - protein, 326 aa, unidentified
MTASQSSDNTFVGIDVGGAVLEVAWHRGGSAQYANRPDAIATLIQKLQSGPAITRIVIEPTGGYERPLRRALRQAGLPVEVIHPSRFKAYRTLVGAKAKSDTSDARQLAAYAAAPDDVRGCKAHHVKLPEDAIREALNELASRREQLKHMIHAETCRLNTARLADVRLAIEAHREALVADDKQVHKMMLTLVRQRVDLRRDQRLLRTICGIGEKSALACIAMVPELGRIDNKAAAALIGAAPFVHQSGTKTSPARIYGGRSAVRNILYMAAVAASRHNPVLRPFYERLIAAGKPAKVALIAVLRRLVVFANAVLKSGQPWRGAVPA

SEQ ID NO: 407221 - protein, 346 aa, unidentified
MKQISTIGLDLAKNVFQVHGADAEGSPVFNRKLRRAEVLRFFEKLSPCLVGLEACGGSHYWAREIAALGHDVRLIPPIYVKPFVKRGKTDAADAEAISEAVTRKTMRFVPIKSADQQAASMVLKTRALLVRQQTQAINALRAHLSELGIIAATGTAKVAALIEIVRDGANACLPRAANFALAEIADQIETLTRQIEKLEREIVAEAKLDEDMRRLTTVPGVGAITAANVKALVPDPDGFKSGRHFAAWLGLTPKPHSSGGKERLGGISKMGNPTLRSLLVCGATSVLRRAKGNDKAPQWLTGLLARRPFKVVAVALANKMARIIWALLTKGGTYRNTGAASGAASA

SEQ ID NO: 407222 - protein, 331 aa, unidentified
MKKVLLCGVDVGSKELAVAIDADSGRVWEGVFANNPAGHRKLIRRLTRSKTTARVCVEATGIYHLDLSLALEQTKGIEVMVANPRVTKDFARAQLRRSKTDRTDALSLLEFVRRMDFDLWVPPSSSILALRALSRRIQALLVTRAQEKNRLHAGESVEATPLAIRESIERHIDAINAEIEALSTSALEEVHTNTVLDRRFTHLVSVKGVAQATAITLLAELSVLPADMTARQWVAHSGLDPKHNESGISVKGRVRISKVGNRHLRAALFLPAMVASQHEPRVRAYYEKLLAKGKKPMQALVAVMRKLLHAIHGMFQYDADFDGTKFFAERT

SEQ ID NO: 407223 - protein, 354 aa, unidentified
MLIIGCDYHPGFQQIAWVDTETGECGERRLTHREEAEQFYQSVKQRNGTVRLGMEASGHGRWFERLLRDLQFELWIGDAAEIRIKRVRKQKTDRQDAQLLLRLMMEDRFPRIWVPDAANRDLRQLLWHRHRLVQMRTRVMNQLHVVALNEGLRRKKALWRPAGRNELESLNLAPWASRRRQDLLDLLDRLTPKIQDLTRQLEQEVERRPVTRRLMTHPGVGPLTALAYELVIGTPERFHCGKQIASYVGLVPEENSSGDRRRLGHISKQGNVLLRFLLVEAAQVTVRSHPEWRSTFFHLALRRGQKIAKVAMARKLAVHLYWMWRQGLDYGQRNKLGSHAGEPGHPMVCSKSPT

SEQ ID NO: 407224 - protein, 414 aa, unidentified
MRLLFIGDDWAEGHHDVVVQDEAGKTLARRRLPEGVDGLARFHEVVASCLGEDGEPDAAQVVVVIETDRGPWVKALAAAGYRVFPVNPKQAARHKETIAVSGKKDDFFDAAGLADMGRTRRHQIRELAADSDVAEAVKIAARAHQKLVWERTRHLLRMRSALREYFPAALEAYADLTLTGADTLELLGKAPVPASAARLTVPQITAALRRARRRGDLAKRARDIQAALRVPRLAQPAVIAEAYGASVQAGAAMITALNEQIKIMEAKVSELFHRHPDAGIYLSQPGIGDITGARMLGEFGDAPGRYASAKARKNYAGTSPLTIQSGKKKTVHARYIRNRHLIDALHTQAFAALTASPGARAYYDELRARETGHEAALRRVAGRLTGILHGCVTTGCEYNEATAWSHRDIRAQAA

SEQ ID NO: 407225 - protein, 417 aa, unidentified
MNSPSESIPFVRYIGLDVHKDYITVGGMNFHQEVVLRPRNVEMRRFRAWAESNLCPTDAVVLEATTNTWDIYDIVAPLVAKTVVAHPPEVKQIANASVKIDKHDVIRLIRLLIVNMVPEVWVPPVHVRELRALMSYRWRLLKMSTMVINRLRSLLHRHNIPGPEGKLYAIKNQDFWNDLELSPIETMRVHQELATLRQLRAHIDEIQQQLAILSNSDPWKDQAVYLMQLPGIGLVVTMTVLSAIGDISRFPSAKKLVGYAGLGAGVHHSGKTKRGKRITKRGRRELRWAMVEAAWRAVRYDHHWKAQFEELKTRKHPSQAIVAIARKMLVVVWHVLSKQVPCRHSQDEDLAYKMIIWSQRLDEEALQGLTRQQFAKYGLLRLGAGQDIERIVRSGLPRRLAPAADVLSLKPDLRPPQ

SEQ ID NO: 407226 - protein, 413 aa, unidentified
MTVFCGIDWAERHHDVALVDEAGTLLAKAHITDDAAGYHKLLALLAEHGDSPDDPIPVAIETSHGLLVASLRTGSRRVFAINPLAAARYRDRHGVSRKKSDPGDALVLANILRTDMHAHRPLPADSELAQAITVLARAQQDAVWTRQQVANQVRSLLREYYPAALLAFQAKQSGLTRADSRVILTLAPTPAKAAKLTLAQLRAALKRSGRLRGCDAEAERLRAVFRAEYAHQLPSVEDAFGHQLLALLKQLDAACQAADDLAEAATAAFHQHADSEILLSFPGLGPMLGARVLAELGDDRARFTDARALKSYAGSAPITRASGKKRFVGRRFVKNNRLINAGFLWAFAALTASPGANAHYRRRREHGDWHAAAQRHLLNRFLGQLHHCLKARQLFDEQQAFAPLLSPPAEQAA

SEQ ID NO: 407227 - protein, 367 aa, unidentified
MKRYLGVDLHRNCFTVCTLGEDGGSELKKWSIHSLSDFAQQVQATDAVAVEATGNARHFCQALKERGCRLVVVNPHQFQVISRSVKKTDAHDAKTLAEFLAKDMLPEVRLKEDLPAEIASLLQTRDKLVKLRTTLKNKINNLLSARGILLPKESLSTEKGLEQVLQAEVGALPRVELMVLVEQIRHLNQGIAKLEAAIKKQGPKLPGYENLKSIKGIGDIGGSTLLSAIGDINDFANEGKLAAYFGIVPRVSNSNETERSGRITKRGNKLGRTALVQCALIAMRYSPYLANYYARIKAARGTGKAIIALARKFLGIIYKTLKNGWLFEDFPRFVLAPAGAQGGGFAPTPLGFTALGVTGGAGEKRQG

SEQ ID NO: 407228 - protein, 423 aa, unidentified
MKYALVRVLPEVPPGGVCAGIDWASADHAVCVVDLAGQVADRFAAAHDRAGIAGLIARLRGRGAAEVAIERGDGVLVDALLAAGLTVVVIGSRQVKNLRSRYGSSGAKDDRFDAFVLADTLRTDRARLRPLVPDSPATLALRAAVRARRDLVAHRVSACNQLRAHLQVAFPGAVGLFSELDSPLSLAFLAAFPGQQAAARLDEQALAAWLATVPRRGNTAPAGVLAARLAAAPRGAAGADAAQAAVTAELAAATAGLAGRVRALEAEIAAQLAAHPDQHIFTSLPRAGTLRAARLLAETGDCRARYPDPWSLAGLAGVAPVTRRSGTYISHEFRWNVNRQLRDAICDFADGSRHASPWAATVYAAARDRGKDHPHAVRITARAWVLIIWRCWQDGTSYDPAKHRALQDILTRQAAAGTPQPHR

SEQ ID NO: 407229 - protein, 346 aa, unidentified
MLYAGLDLSRKRLDFHLLDADGATIEVGTAPPDVDGLRGLSERLARYGEPVRAAIESMNGARFVHDRLELADWQVEIADAQKVKGLAPLACKTDRIDAWVLAELCRRDLVPAIWLPDPLVRAERERARWRLHLVRHRSSLKQRVHAVLLTHGKPCPVSDLFGVRGRQLLARLGLPEPWQGTIEASLRLIDELDREIGDCERELRRLGADHRYVPLLCTVPGISWVLAYTIAAELGDINRFPTARKLAGYTGLCPRVYQSGERDLRGPLAKQGPRYLRWALVEAATHACTAPVYRDRYQQTKARIGKQRGAKVAQIDLARRLTEAIWHMLTRNQPFAPKGATDPLAA

SEQ ID NO: 407230 - protein, 368 aa, unidentified
MKKDTSKKMAGKGKKETQGDFAFYIGIDLGDKNSDVCVLNPGGEVGKQFRLRMKEEAFQECFASIPRSRVAVEAGGQSRWVAEVIEKCGHEVYVSNTRKVPYIHQSDAKDDPGDAYKLAELVHFKPRLLHPIQHRSREAQADLSWIRAREVLVESRTQLINAVRGLSKAFAGRLEKCSTESFTAKLAGQVPEAIRSAVAPLLETIDHLNEQIRYYDQREEHMARERYPKYRLLEQVNGVGVHTALSFMLTIGDPERFEKSREVGSFLGMRPRKQDSGETKPQLGITKAGDVYLRKTLVNCAHHILGPHGKDSDLRRFGLRLCERGGKNAKKRAVIAVARKLSVLLHRLWITGEVYEPLRNSKQAKAAA

SEQ ID NO: 407231 - protein, 349 aa, unidentified
MRFYNGTHRHWCGIDLHARTMYVCILDAQGQVLVHKNLRATPEAFLETLEPYREGLVVAAECIFTWYWLADLCAREGIDCVLGHALYMKAIHGGKAKNDRIDALKIATLLRGGMLPQAYVYPAGMRATRDLLRRRLHLVRKRGQLLAHIQMTSHQYNLAPLGKRIAYPSNRAGVVEHFEDHAVRQSIAVDLSLLERYDEILRDLEGDLVRQARQHDPQAFALLRSVPGIGKVLALTILYEIHDVGRFDRVQEFASYARLVKCAKESAGKRHGTSGAKMGNVHLKWAFSEAAVLFVRHSQEGKKVLAKLEKRFGKGKALSILAHKLGRTVYFMLRRGKAFDRERFLATVN

SEQ ID NO: 407232 - protein, 397 aa, unidentified
MYAQFTTVPLYVAIDIGKNVHCFGGFEGAECRPCGEPEMVHSTQRGYRQFCAWLSAQVASGRYDPIVVGMEPTGIYHEHWAYALAQDFGGQIELRFLNPYQTKNRRKQVTNSRRRKSDALDVEAIAQCLRDNLAHPARLPQDASFGFGTWAASFRRAHSQKQRLHNTLLSELDRLWPGALVNVRAFRKAHPDMAEPKPLVLSHPLQRRIVQILIEFAPDPSQWLSWTLEDVCRFFHSHNLRCGPVTAARLQHVAEEAVLLPKSIASNLIEYLQIDWCRYQRLVEEVERLRQLIKDLVPGTPAAVLTTVPGIGAFLAGAYMAYVVDPARFQRADQIWSLAGFDPRQEESGDWSRLGKITAEAIQAYAISYMPSALRPASIALLSEEAKNKPCSVARAR

SEQ ID NO: 407233 - protein, 340 aa, unidentified
MKKQYVAIDLHRSRSLIVRDDHRGKELAVTKIDNDPLTLASVVAEAGEAPEVAIEATNGWYWAVDVLEELGAKVHLVHTKGLNWEGRRVKNDYRDCRELLDRLHLGKLPEAWIAPVETRELRELVRYRVKLVNMRTSAKAQVKAILIKHGLHPPVKELWGVAGPRYLDEIGPTLADAYLVRLESLRDVVGLFDREVAMVEGHIARALKGHRGYRAIQVIPGVGPILGAIFVAEIGDISRFSSPKQLCSWAGLTPKHHESDTTVWRGKMTKQGSVLVRWAAIEAVSKLRGGPKLQADFHRIAERRGKNIGRSAVARRLLTLVYYGLRDGQLRCFEQAEAAG

SEQ ID NO: 407234 - protein, 446 aa, unidentified
MAHSRGGTTRGVARRNAKLTLLREQVRKDLAIVAVDLAAGEQAAVVADHDSRVLGRRKFRGPAQRIEAILGWAAPIAASAGFAGVMVACEPTGHRWKVVLQAARGRGLAMVCVQPMLVARAREAEDYTGNKSDYGDAVIIARLVAELRCYIPYLPEGPWARLRHLGVRRAQLLDRVTAARQCLLDLLECGWPSVLGAAAQPAESLTWRAALTVSASPRMIAAMSRGEFTAAVRGQLPAVGGKRICQRIVTAIHAAAASPGGIEAEQDALAERAGFARDDWLAALAELRRVEAHMVQILDELHLTHLVITIPGISAVGAAAILAETGDPARYDDPRAWVKHAGLAPRANESGTFRGATRTTGRGRSRLRTAAWRAIWGALPHNPVYTARHAHLTGRGQNKLNDGKARSALAAALLRQLFVVTTQRVPWDPMIASGAALPGQVTATAA

SEQ ID NO: 407235 - protein, 407 aa, unidentified
MMTSTDRRVTGGFDTHADSNVGAVFDTATSRLLATETFPTTTAGYEAALSWLCGFGVIDAVGIESTGSYGAGLARHLAVSSVRVVEVNRPERLDRRLDGKDDFVDARAAARAVLSGRATAIPKAGDGPVEAIRVLEIVHDSAIGDRTEAINQFKALLVRAPAAFRDRHSPVTLRHQLATARRFRTGASDDMVTIELKMALKTLAQRIEFLEAQIAEIDDRLRPIIAEHFPAVLGLHAVGIHSAAQLLMAAGDNAERLSSDAAFAKLCAACPKPASSGKTIRYRLDRGGDRRANKALYRIVIVRMRFDPRTRDYVARRLAEGKTKREIIRCLKRFVAREIFHAITEPHDPIPTGNELRAQRKAAGISVAAAATGAGVSYPQLSQIERGITHNTDIANRVHTWLAQQTT

SEQ ID NO: 407236 - protein, 356 aa, unidentified
MSRDIKYIGMDVHQEAIVIAVLNGSGKLVMETILETKASSILQFIHGLRGELHVTWEEGTWAAWLYDLLQPQVQQVLVCNPRRNALLKEGNKSDKVDARKLAELLRTGMLRAVYHGENGLRTLRELGRSYQTISKDLTRVMNRLKALYRGWGIPCAGTQVYAPRYREEWLSKIAQVGVRRRAELLYQQLDGLQALRRTLRPEFLAESRKHKAAKLLRQIPCIGPIRAARLIALMQTPHRFRSKRQLWTYSGLGIETRDSAQYRFVRGQLQRSKKPQQLRGLNQNHNHEMKEIFKSAATRASCGRGPLRDFYTALLAKGMKPEMARLTLARKIAAITLTLWKKGGRFDAEQLKTQAA

SEQ ID NO: 407237 - protein, 347 aa, unidentified
MDHVGMDLGKRESQVAILTEDGELINMRIRTERHRLVEMFGRRPKARILVEASTESEWVARCLEDLGHEVIVADPNYAPMYAQRTRRVKTDRRDAHALAHACRAGTYRPAHRTSTERCELRARLAVREAVVRTRAAWITRIQSLVRREGCRLRTGAPETFLTRVEELALPPALTTVIAPLLELLDPINKQIEALDEELERIVAADEVPRHLTTVPGVGPVTATAFVATVDDVTRFRGAHQVEAYLGLIPCEWSSSEVQRRGHITKAGNGRMRWLLVQAAWCILRRRKRPETAALRDWAERIAGRRGRCIAAVALARRLAGILFAIWRDGTVYDATKVRGPLPARRAA

SEQ ID NO: 407238 - protein, 357 aa, unidentified
MLKYCVGLDISSKHFHACLSAIDQLQKVTVKCNAKFSNNPAGFNDFEAWLLKHHKQKDIALVVVMEATGVYYENIALFLHLKGYKVSVILPNKAKKYLQATGLKSKNDSIDAQGLSRMGSEQALEIWQPKDEYFYQLRSLTRQHQSLQELKTNVNNQLHADQHGMYQNALVTSQLMLLIKTINSQIADMEAAIATHLNKDNEVAKLVEGITLIKGVGALSIAIVLAETNGFALFKNISQLVSFAGYDVVENQSGNHVGKTRISKKGNGHIRRCLHMPAFNVVRYQQSPFIQLFNRTLQRHGIKMKSYVAVQKKLLVLIYVMYKKKEAYQPIRNIKYSGEQEQVSSSLLSFAEAGQLN

SEQ ID NO: 407239 - protein, 438 aa, unidentified
MSNNLIFNLDELFLSVGIDVGADLSWMSIALPNQQIVGKPYKILHNKLDSLSTAVTKIKEAEELYSLESRIFLESTGIYHYPLFCYLRDKGLNCSVMNPIITKNSTNMNIRKVHNDRFDSKKAALVGLKPDLKVSLMPSDLALNCRNLCREYYDLMDGRSTYINKLQGELRMAFPQYLGIFSKVTTNTSLTLLENYTSPEAFLNADQQEIVDSIRSTARFGLTYAQNKYNVIIQAAHDAKEFGYIINSNIKRIRLYVSLIRKYDEEIASMLQDLHDLVDQNEDTDFVKQVHLIETIKGAGFLSAVSLMGEIGDFSAFSKPKQLFAYFGLDPAVKQSGKFVGTKVQMSKRGSSIARRVIHVLALQSISIARNGVAKNPVLHAYYLKKCKSKPKLVAMGAVAHKVCNIIFAVLRDGKPFEIIKPEEHIRQYNAVKCDMAA

SEQ ID NO: 407240 - protein, 356 aa, unidentified
MGQNGSVNIPSNKSGVGIMKITTVGLDIAKSIFHSYAINHTGRLIRKKQLKRKQLLAYFSKLEQSIVVMEACGGANYWAREFIKQGHQVKLIAPQYVKPFVKGNKNDYNDAQGIAEASQRSSMRFVPIKSLEQQDLQNVHRQRERVKKERTALANQIRGLLAEYGIVIKKGISAIRNELPSIIEDAENDLTVMSRELFNELLEEFRAMGDLLEHCDTKIKIANKNNDVCARLGDVLGIGDITSNALYAAAGDGKNFVNGRHFSAWIGLVPGQNSTGGKPRLLGISKRGNSYLRTLLIHGARAVLRHSEKKNDRFSLWAQALLKRRGQNKACVAVANKLARMAWVIMAKGETYRPAM

SEQ ID NO: 407241 - protein, 412 aa, unidentified
MRAKLVHGVLSEPPTGRRQRWRIMNCQPDHETSRDRLYALETPVLIRFEAAGNYHRPLAYYLGQCGFELRLISSLAVARTRDALYNSGDKNDPKDTQVLLHLLKTGVVQRYHDPLVHRMNDLQELAQTHSQISLRKVQVQHSIMTHYLPLYFPEAERYYTNSRAQWFTQLLHRFPCPAAITRYDADAFEHEAWTVVGRKVNKRGFLADLYATASQSIGLAVAEDSEAIQMFRVMLAEHQHLCATRAAIEHQADQALQAHPDYQRLRTLPGVGPILALTILAEAGDLRRFPHHRQFLKFCGFDLSTQQSGQFRGTSRLSKHGNARLRYAFWMAANGAVRMRQNTFREKYARYIKTDPDNPDRKRKALCAVAAKVARVAHGLIKTGTDYRPYFEALPPSGALRSRGPSRQVLTS

SEQ ID NO: 407242 - protein, 348 aa, unidentified
MYYAGIDYHKRYSVVSIQDGQGQIVQEERVDHAYPEGFRRLFRECPEPVSVVYESTVNWSWLYEILKPLRNVSSVTLANPFKVRLIAEAQIKTDKISARALATLLRLNVVPVCHIPDQKTRRRKEVLRQRSYWVKMRTAVRCRVHQIVGRQHNLSMPQVTDLFGRKGRAALDKALLPEPEDSLLEQNLNVLDALDEEIGDNEKLIRKAGKADHATKILSSIPGIALILANVIATETDGIARFRDSPHYTSYSGLSPTVHSSGGKTRTGRMVPQCNRWLKWAYVEAAWVAVGCSPYFGGLYRHHRGRGKQANTAITIVARRMCHIAYQLLTEDRMYEEHPFSPAALVKG

SEQ ID NO: 407243 - protein, 337 aa, unidentified
MVELIKYAVGIEISKDNLEIRFGSIDIEQGTKISDTKSFKNTEKGIADLYHYTKGLVKGNKPVQYIMEATGVYFENLAFYLKEKGEKVIVILPNKSKHFRQSLDAKGKSDEIDSAALTQLGLERNLKEWEIPAEIVIKLKELTREYESINNIKTELKNQLHAKKHSKHNISTTVVRLEHSIKMFETQQKTIQSEIIKILKKDPEIENKVMMIVDSLKGIGLMTVVKIIAETNCFSLILNKNQLTSYAGLDVIEDSSGNRKGKTKISSKGNSHLRHALYMPALGAIKYIDEMKNLYIRICIRNSAKKVGLTAVMRKLLILIYTLWRKNEPYNPAYGTK

SEQ ID NO: 407244 - protein, 408 aa, unidentified
MEVIHERCAGLDVHKETVVGCLRVRERGQVRREVRRWATTTAELLELGDWLRQAGCTHVAMEATGVYWKPVWHVLEGEFELILANPAHIRNVPGRKSDVNDATWIADLLAHGLIRASLVPPGPIQELRDLTRTRKQLMREIVQHKQRIQKVLEDANVKLASVVSDVFGESGRRMLKAISAGQTDARQLAALGDGRLSSSRETLAAALQGKVTTHHRFLLSQHLRMIEHLEQTVTAFEGQIEAAVQPFRAAREHLVTIPGVSATAAHVIIAEIGVDMSRFATVGHLRSWAGLCPELHESAGKVMSRRLRHGAPWLKTVLVQCAWAATRNKNNYLHAQFVRLRARRGSKKAIIAVAASILTTAYFLLRNQVPYRDPGALYFARIDQERTAQRLARRIKELGYEVQIRKAA

SEQ ID NO: 407245 - protein, 427 aa, unidentified
MAYRIAGIDVHKAMLAVVVADVEVEGDWPFTRRRFGATPSQLRLLTEWLIEHEVEEVVMESTAQYWRPVWDALERDWQRTQRPRGDASPTTAALHLAQAQSNQGRHGRKRDFPDAERLVKRLVAHELTLSFVPDVTQRLWRTVTRRKYQLTRNRVQLQNRLESLLEETHIKVSTLVSDLLGASARRMLRAVATGETDPAAIAALGSPRLHATPEQLRDALGAATDVPPLYRRLLAMTLAELDLLESHMQQLDEELAALLRVHQDAVQRLAAVPGFGVDSAQQIIAEVGPAATTFPTAKRLASWVGACPGHDESAGINRSHRAPSGNRQMRRLLNQAAHAAVKTKGSIFELLYRRFVVRLGHAQAIGAIAHRLCRLVWKILHDGVTYEERGPAVSQARAQRRAAKMLRELRSLGYRVELTPATLHTTH

SEQ ID NO: 407246 - protein, 410 aa, unidentified
MRYYLGVDWADQTHAVWVVDESGMQITARAVSHTAEGLGEWGRELDEWRARGIALWAAIERPDGRVVDFLLDHGVVVYPVNPKALDRARDRFRQSGAKSDPFDARVLADFLRTDHAHLRALQPSSEAAQELKLLTEDCQRHIRQQTRLVNQLTATLKAYYPRALEVAELTSALARAFLPAFPTPETLTTLTERQWQRWARAHRLPEARTGELWAVLRQPQLSVPAHVVRAKARLMRTLMEQLMPVVAAVAQYRKAIDDFFASMPAAQWARTLPIGKHGITAPTLWARLGDAPGRWESFRHLQAHAGTVPVTKRSGKQQRVVQFRFACDKALRYVVDQVAFLSMLSSEWARAYYDQQRARGHSHRRALRALGAKWLKIIFVMWERQVPYDEQYHLAMMTRQQLRQRQQQIA

SEQ ID NO: 407247 - protein, 442 aa, unidentified
MSFDRLKRTQRRKRLPGHKLKPSRATLFVQNSKPHLSMKPTYFLGIDAAKHKMRATLSNRSEHVLFEKDLSVQATGLRQLLAAIKRQVNDPEQLLVLIEATGLLHLNWSAALTKAGYAVAVINPLIARRLYTLQNSIRDNKSDPIDARGLCTIGLLHGEKLLVHYRFSLRPEQFTLQRAQSVRKALRSALTNLKKTYQSLMDLSFPELGGLLQLDGVGIRQLLIQAPTPAAIAGKRLSTLENNWVRPKAAALKALAADSMADPDLAAASGPALVALLQSVAAMEARLHALDQQIAKLACTSVDPQTKALIETIPGFGPVNAAKTLAWLPTEILHSGSNRKVAARLQAFMGNDPRLRQSGQWKGHTKMSKRGVEMLRTAFFQSAFSAAHNDPELRAYYQCKRAQGKTHQVALSHLMRILTRRLVAVLRSGKPYQSHYNLKNAA

SEQ ID NO: 407248 - protein, 326 aa, unidentified
MEHELHYIGIDTAKEKLDVDVLRPDGRHRTKKFANTTKGHDELVSWLKGHKIDHAHICIEATGTYMEPVAECLYDAGYIVSVINPALGKAFAQSEGLRNKTDTVDARMLAEFCRQKRPAAWEAPHPLERALRALVVRHQALTDMHTQELNRTETAREVQRPSIDAHLLWLEAELKRLEKQIKDLTDDDPDMKHRRKLLESIPGIGEKTSAVLLAYIGLKERFAHARQFAAFAGLTPRRYESGSSVRGASRMSKAGHVSLRRALYMPAMVATSKTEWGRAFRDRLAANGKKGKVILGAMMRKLAQVAYGVLKSGVPFDASRHNPVAA

SEQ ID NO: 407249 - protein, 417 aa, unidentified
MADDLGWFVGVDWASETHQVALLDACGTVIGERAFPHGGGGLAALCDWLLAMTGSPAAAIAVAIEVPHGPVVETLLERGFPVHAINPKQLDRFRDRFTVAGAKDDRLDSRVLGDSLRTDRPCFRPLRLADPTVVELREWSRMTEDLQQERTRLGNRVREQLWRYYPQMIELTDDVAADWFLELWALVPTPAKAAKVHKETIARFLQAHRIRRIDAEEARRILRQTPISVAGGTTEAATAHIRTVAVRLKVVNRQLKQAHRQLDALCARLAGSEDAEPGQSQEQRDVTILRTLPGVGRIVLATLLAEAWEPLRQRDYHALRTLCGVAPVTKRSGRRCTVIMRQACHLRLRTAVYHWSRTALQHDELCRRRYAELRKRGHSHGRALRTVADRLLAVACAMLRTHTAFDPAHAAAQKAAA

SEQ ID NO: 407250 - protein, 406 aa, unidentified
MPITAHRPEALSAVRVDLGAIFVSMELSQSKWLITSLSPGNGEKLSKFIVGARDVVGMLARFADLQRKAQVRVGQKFPLVVIQEAGLDGFWIHRVLEAEGIESHVVDPASIAVSRRRRRVKTDKIDGEMLVRTLLAYKRGEPRVCAMVRVPTPEDEDRRRVSRERKSLTNERVRHVNRIKGLLFGQGINDYEPLRRDRRKRLDELTTGDGRPLPAHLKAQIARELGRLELVIAQIKECEQTRDALLATPVSAAATQVHKCAVDDEAAQPSPPSAPAMLLELKGIGPEIASVLWFEGLSRQFDNRRQVAAYAGLAPSHWQSGKIDHDQGVSKAGNSRLRTSLIQLAWLWVQHQPASALTLWFKERVAQNGGRLKKTAIVALARKLLVALWKYVHAGVIIEGAVVQTA

SEQ ID NO: 407251 - protein, 412 aa, unidentified
MDVYCGIDWAEDHHDIALADRDGQLLARRRISDDAAGLAGLMALLAEHGDSGDERIPVAIETPRGLLVACLRATGRQVYPINPMAVARYRDRHSIAGRKSDHGDAVVLANVLRTDLHAHRPLPADTELAQAIAVLARAQQDAVWDRTTAHNKLRSHLREYYPAFLAAFAEARGGILRPEARAVLAAAPTPADAATLTLTQLRGLLRKAGRIRGIDAEATRLREAFRAGQMRQLPLVEAAMGRQALALLGQLNAACAAADDLERAATESFSLHPDAGIITSFPGLGALTGARVLAEIGDDRSRFQDAKGLKAYAGAAPITRASGKTKSVTRRHIKNNRLNAAGYTWAFSALTASPGARAHYDRRRADGDRHAGAQRNLFGRLLGCLWHCLTTGCEYDEATAFPTTPEKLPKAA

SEQ ID NO: 407252 - protein, 336 aa, unidentified
MTIIRIGLDTSKHVFQIHGVDENEKPVLRRQLRRSEVEKFFAQLPPTRIGIEACGASHHWARLLRGLGHAVLLMPPQYIKGYVKRGKNDAIDAEAICEAMSRPTMRFVPVKTAEQQAALTMLGVRDLLIKQRTMLINALRGHAAEFGVAAAKGPNKIVELLQRLATGEGVPALAREILGMLTSQLEAVNGKLKAIEARLMAWHRQDQTSQCLATIPGVGPIAGVSFALKIPDARAFRSARHFAAWIGITPRENSTAGKHRPGKISHEGDESLRRLLVLGATAVIQRAKRGRVSPWLLGLRARKPKKLAAVALANKMARVIWAMMISGEVYRRPQEA

SEQ ID NO: 407253 - protein, 352 aa, unidentified
MAVYIGVDLHVRTQTLCWVDESDGEQHEITLDHERDDVRAFYSHFPAPALIGVEATGYSLWFHRIIEALGHQLRVGDALAIRQFARRRQKNDRRDAELLLDLLRHDEFPAIHIPSPASREVLALLRYRHRLVRVLALLRNGLQAVALSHRLRLGPKLFTTRGQQQFAALPLTGAFAVQRQHSLLLLASLAEQILAVEAALEHRAQGDPRVIRLRTHPGVGLLTSLALVHALDPVSRFDRARGIAAYCGLDPKERSSGDTQRFGHISKQGNRLLRFLLIEAAHNAIRGDDHLRRFYFHLQARKNSSVAIVAVARKLVLRLYRMLRDEIDYDQFRRRGRDARRARENASLAVPG

SEQ ID NO: 407254 - protein, 430 aa, unidentified
MKKKNHSNEKLEAITLKTLVVGVDIAKHNQWARFVDCRGIEHNKALKFENNRNGFYAILTRIYEICKNEDFNKVIVGMEPTGHYWKAFANFLLKQAKITVVLVNPYHTKKAKELDDNSQTKSDKKDALTIARLVKDGRYFETYLPHDIYAELRGLTTTRHSMNKRKKSIINTITAVLDEYFPEFESVFKHPFKGKASMHLLKVCPIPKFISELGEEGVLAEIKKAVKKTVGRKKAEQLVAVAKDSIGVDYGEYAARFKIQQLMEELELVTRQLEALEAEMADALRKTEISEYLLSIDGMGIVSLATCFGELGNPLRFEDARQMSRLAGYNLIEDSSGKNKSGTCISKRGRKNLRSVLYQISLTMVANNKQMRQIYDYLKTRENNPLKKMQALVVISKKVLTLIFTLSKKKAYYKPELVFGSYRKSQLQAA

SEQ ID NO: 407255 - protein, 375 aa, unidentified
MSEIQAYVGLDVHKDTISVAVAEAGREVEVRSWGAIPHETTAINRLVKRLLKKLGTFECVYEAGPCGYGLQRHLAGLDVACRIVAPSKVPVQPGRKRNKNDTNDALGLARLHRAGELTYIWIPDAVHEAMQDLVRARRTSSYQVRKARQRISCFLLKHGRRYERKKWGYRHRVWLADLQFEHAAQQFALQSYLNDEEQSAARRAQIDEQIEGLIPDWRLGPIVRELTALRGVDTVIATSVAAEVGDFSRFDNPRRLMSYFGLAPGEFSSGTHVRPRGITKAGSSDVRALLFQAAWLYRLTPKVGQWSLIRQKALSQQSKDIAWKAQLRLHSRYRRLTETRQKRSQVAVTAVARELVGFIWAIARNAETVTLSDSA

SEQ ID NO: 407256 - protein, 346 aa, unidentified
METMARITGGVDTHLDVHVAAALTDVGGVLGTASFPTTTAGYRQLLEWMSSFGQVVLVGVEGTGSYGAGLSRFLHVQGVAVVEVDRPNRQKRRLSGKSDPIDAISAARAALGGTANGAAKTRDGNVEAIRVLRVAKISAHKARTQAINQIHSLVCTAPDELRDKLRALPTAELVTTCAGLRPGSGSDVTAATKTTLRALARRVHHLDEEIADLEALIRPLVHVTAPRLLAHNGVGPDTAAALLVAAGDNPERLRTEATFARLCGAAPIPATSGKTQNRHRLHRGGDRQANSALWRIAFTRMSNDPDTRAYVQRRTKEGLSKREVMRCLKRYIARELFPDLPGETLA

SEQ ID NO: 407257 - protein, 312 aa, unidentified
MNTKNDPIHYVAIDVSKSTLQVQDDRRAFAVGNDPDGHRKLLDYLKACANPLVVFEASGGYERALLQSLHKAEMPLARVNPSRVRDFARSEGVRAKTDPIDGKMILAFAKSKALRPMEAPSEACIKLAALLDRRSHLVEQLAREKNRLQNSEAFIHRSIKRMMRILEKEIATIEEAIGKLVSSDPGLKSRSELIGAVQGVGKITAWTLLAYLSEIEDLNRNRLVALAGIAPFNRDSGKFSGKRTIQGGRAKVRKCLYMAAHSAATCNPVIAAYVQGLRDRGKPYKCAIIAAMRKLLIHIQSLMKKAQLSPCC

SEQ ID NO: 407258 - protein, 340 aa, unidentified
MINCYVGVDLHRNNFTYCMRSGNGAKEEIGKRSIKDLNGFASLLGQHTALAVEATGNTLMFCTELKNKVGRLVIVNPTQFKVISQSTKKTDKHDAKILAEFLEKNLLPEVRMKDDLQAKIASLTQTREKLVQLRTVLKNKVNNLLAARFIEIKREELSSEKGLLKALSYHFDPITDIEMQVIVGQIRSLNKSIAELDKAIEENGSKMNGFDNLKSIKGIGAKGAAIMLSVIGNIADFRSAKQLAAYIGIVPRVSNSNDTVCHGRITKKGSKTARTALVQCSLIAMRYSPYLRQFHDAVKNRRGGAKANIALARKFLEIIYKTLKNKWVFEDFTQFKLVKN

SEQ ID NO: 407259 - protein, 412 aa, unidentified
MLHPKMKKLFIGVDVHKRTHTTVIINCFTEKLGELRFENNIRGFEQFISYVKTILKRGISPCFGLEDSTSNGRNLARYLLNLGYNVKTVESSLTYTERRNQAIAHKTDSHDAFCVAKVLLNQLDTLPDATMNDDSWTLQLLVSRRNAIVKVRAALKNQVHSYITHHYPSYRKFFNETYCKAGMEFFQKFPSPSKLKDTTKEELAELLYNKSSGYFGISQAEKILMLVEKDGDTSTEFQETRDFIVSNCLKEICHCNEELETIESEIKKHMKQFPYKLETMPGIDTVTAAMLISEIGDIRRFASADKLSRYSGISPVACSSGDKDKNFRNKQGNRRLYEIFRNIASRSICKGRNNQSPVNEVFLNYYNKKISQGKTKRQALIAVMKQISKIVYSMMLHQREYIKPTIPKTENT

SEQ ID NO: 407260 - protein, 384 aa, unidentified
MQKPNDLNQSRIVLKQDSTLIAVIEMSLSSWLVAGIVPGVERQPLKKLAVDESALVKLLNRWREEAEKAGRRIERITVAFEAGRDGFWLARWLRARGIEAHVIHASSVAVSREHRRAKTDRLDTELLKRAFLGWLRGERDHCKMVAIPTTKDEDAKRPNRERQSLVGEQTRIVNRMKAALIRLGIRGFNPKLKKAAGRLEDLRTPEGEPIPPNTLAELHRDMERRRLVSDQIRQIEKARLERMEQAPGDGPHAMVRLIARVIGVGIETADMLVHEVLSRKLRDRRAVARYAGLTGAPDESGSKRREKGLAKAGNARVRGGMIQLAWRFLLFQKDSALAQWYRTRTEGGRNRKTIIVALARKLLIALWRLVTTGEVPAGVVLRAA

SEQ ID NO: 407261 - protein, 346 aa, unidentified
MEYFVGLDASLDTVNMCIVDQDGSVLLEQKVDAEPEQIVAVLKRFGRPLKRIGLEAGPTSSWLFSELRAAGYPALCLECRHVKAGLSAMRNKTDRNDARGIAHLVRLGWFRLVHVKSEVAQEIRMLLVNRNLLLSKLQDIENSVRGSLKVFGLRLGKVTKRSFETRALELVKAHPKLAAISLPLLRVRRVLLEEFCRLDRIALKIARSDAVCRRLMTVPGVGVIVALTYRTGVDVPERFTRSRDVGAHFGLTPRRYSSGQVDYDGHISRCGDEMVRTALYQAAHVLMHHGRWSGLRGWAMRIAKRSGAKLAKVALARKLAVVLHRMWIDGTEFRWTIRESAPAAAA

SEQ ID NO: 407262 - protein, 325 aa, unidentified
MIDGFVGIDIGKFKFDVAVLSKHNPTKHRTFTNDQEGFGKLVLWLEGELLVFEGHFCMEATGRYGEQLAHFLYGHGHSVSVINPSCIKNYGRSKLKRTKNDKIDALLIATYCQKETPALWQPLPRESRELQEMTRELHRLKDLLAQEKTRLKAGVHIATVLSSIEARINFLKAQIEAIEAEINAHIDNAPKLKRQRKLLVTIPGIGEPTANALLAEIPDIHRFKGVRQLVAFAGLVPSERSSGTLRGQTRLSKVGITRIRKLLYFPAVCGKRYNPVIINFCNRIEATGKNKMVALGAAMRKLLHIIYGVLKTEKPFNAKLHLANI

SEQ ID NO: 407263 - protein, 346 aa, unidentified
MMIIGCDFHPSWQQVCWLDTETGETGEQKLVQAAGDAERFYRQVPAPALIGMEATGNCHWLVDLLSELGHELWVGDAAQIRASYVRQQKTDKRDAAHILKLLVEGRFPRIWMPSSEVRDLRQLLLHRYKLVILRARVKNELQHLCLNQGVQRQHKLWSRAGQQVLRELPLKPWAARRREDLLRLMAMLDQQIEPLDQAVKAEAQRDKMALLLQTQPGVGPITALAYVLTMGEVSRFPRGKQVASYLGLIPREHSSGGRQKLGAITKQGNRMMRMLLVEAAQAAVRYDPEFRKEYRHRCHRKPKAVAKVAAARKLAIRLYWMLRTHKPYPEIVRIESSPRVPLVGAS

SEQ ID NO: 407264 - protein, 355 aa, unidentified
MESVKYIGLDVHQSTISVAVLNSEGKLLMQSVIATQATAVLDLLKGLHGVLQVTFEEGTYSAWLYDVVLRHGARVVVCNPRKNALLKSGNKSDQIDARKLAELLRAGMLSPVYHGEQSTRTLQQLVASYPALTEDTGRAMRRIKALYRSQAIACAGKKPFGKRYRGEWLARLSDSGQRRRAEWLYQELDAVQILRREARHAVMVECHKNQAAKLLRSMPFFGPLRAAVLIARVQTPHRFRTKRQFWTYCGLGLETRSSADYVEKDGQIMRRRKPVYIRGLNWNYSHELKNVFKSAATTASAMDGPFGAFYASRVANGMLPAMARLTLARKMAAIALILWKKGETFAAEHLKLQAA

SEQ ID NO: 407265 - protein, 318 aa, unidentified
MEQNKSKHVVAGIDVASTELVTRISVDTKVRSHENSQNGIKQLLKELAKEGVTFVVLEHTGKHEQALLEALWQAAMPAHCAHPKAAHNFAKALRANAKSDPIDAGILMEYGLRMDLLPTPRPAQEILDLQSIVTRRDDFNEMLVQEKNRLSAPGVPAWKKRSILKHIKYLKTELAALEADMHKLVEKYPSLQGPLACLDEEYGVGFVSAATLYAHVPELGTMNRQRVAAIAGLAPFIRQSGKFQGQSKIYGGRTAARSALYMPALTIIRKKGHPLCDFYLRLRKANKPTNEALTAVMRKLLIRLNTRMKTLTIQTALA

SEQ ID NO: 407266 - protein, 416 aa, unidentified
MNAVGIDVSSRKSTVAVLRPLGEVVCLPFDVTHDIAGLASLVEKLKALDGETRVVMEHTGRYYEAVEKALHEAGIFVCAVNPLLIKEYGANSLRRVKTDKADAVKIARYALDNWADLRDFTPMDAIRYDLKTLNRQFQLASKQRTASANNLIALLEQSFPGIRKCFDSPVRSDGTQKWVDFAHSFWHVDCVRKQPFPAFCERYRKWCKRHAYFFKLSNAEEVYALAKRAVVLTPKAKVVKVLVQEAANQLSSISRSVEVYRAEMDRLAAMLPEYPVVMAMYGVGKSYGPQLMAEIGDVRRFERKQALVAFAGIDPMPNQSGDKNVRSNKSSKRGSPYLRKTLFNVIRTYLQCAPQDEPVFQFLNRKRAEGKPFYVYMLAAANKFLRRYYAKLRDYFASLDTLQSVDPIPTTLKASL

SEQ ID NO: 407267 - protein, 367 aa, unidentified
MQPTTFVGLDVHADSITVAIVPSEGPSAEVIKLSSDLMKVRRLFRRLSDKGPVRSCYEASGAGFVLQRVLARDGFHCEVIAPSLIPRRPGDHRKTDRLDAIMLARLYRSGHLTPVHVPTEDHEALRRLLRLRYTYHTYCTATMHRISGILRNHGHIFTQGKSTWTKKHRQWLASLRQILDGPLQTALAIELEHLEYLEAQQRSIDADLERCAQSDQFRAQTEALCCLRGVKTLTALTLVCEVDDVRRFRSPRTLMAYFGLVPSEHSSGNKEYRGSITKAGNIHVRRLLVEAAWNNRHRAGADLILNRRRQGQPPDIVAIALKAQHRLYKKFWHLDQRKHRHVAITAVARELCGFIWAILNQLQPSHH

SEQ ID NO: 407268 - protein, 414 aa, unidentified
MRLVYPICCGLDVHKNVIVAAIVTTNNVGISEYKQRSFSTINSDIQKFHDWLIENDCYHVCMESTGKYWIPIFNYLENDIDVCLTHPKYVKAIKGKKTDKKDSKWIADLYKFDLVRCSFIPPKDFRQLRELARYRFKIVCMKSSEKNRIQNCMTVSNIGIASVLSDPFGKTATEIMSYLLKNTSDSIDDKAVRKLIKKGAIAKSDEIIEAIKGYNIETDQAKKLVLARDHLDYLDDMITQTEVELYVRIKPYYEFVEYLSSLPGVTELSATIILAEIGVDMNIFDDAKHLCSWCGLSPSNNESAGKKKSVRIAKAGAYLKPMMVQCALAAIKSKKQPYFAIKYGRIKKRRGHKKAIIAIARMMMVCIHHMVSEKQYFNPTDYTELMDPHVNQPKVTLNDANVFAYLEAQGYDTS

SEQ ID NO: 407269 - protein, 376 aa, unidentified
MEIIYECCAGLDVHQNNVVACVLDGPLTSTRPKKHLKKFDTTTKGLLGLHEWLTEFNCEIVAMESTGIYWKPIWHILQGSFDLVLANPYKIKNIPGQKTDKKDASWIAKLLRIDLIPKSFVPEEPIQDLRELTRLRKMWIESRNREKNRAHKILQTAGIKITSYMTDIFGMSGRNLLNLLISEEEITEEKVEKAVYTSLKFKVPELLEGLTGFFRSHHRFLLKQVLDVIDMYNDKIKELEIKIAECLEPYREYVDNLVTIPGISEDSAAVIISEFGINMNQFSSAEKLASWVGLCPGNNESAGKRRSTRISKGNSYAKKILCQCAYSACRSNHLRFKNYYQRISQNRGGKRATIAVAHLITRIIYYMISRNEVYHE

SEQ ID NO: 407270 - protein, 324 aa, unidentified
MIDGVLGIDVSKNTIDVSMSGSNKVRARSFANSADGWRHLLAWLISQKIQRVHACLESTGRYSIGIASALYEAGHVVSIVNPAQIRDFARTKLGRNKTDGVDASHIREYCELFKPQPWAPPSEAHRRLGELQTIRAGIIAGLTEWKNRKNSGMIDAVAQSLADVTISHFTSQLGAVDEAIRQTIDNDPVLRRKRDLLMTISGVGETLAGVVLAELPGPNVLRSGAEVVAYAGLNPRLHQSGTSIDRMTRISKIGNAVLRAALYMPAMSAMQHNPAIVALVARLKSRGRLKPKQIVVAAMRKLLVLCFGVLKTGKPFDPAVAMGC

SEQ ID NO: 407271 - protein, 451 aa, unidentified
MRKQKRTVVVLEPDAAGIDIGAEEIYVAVPPDRDLESTRKFGTFTRDLNALAEWLGFCRIRTVAMESTGVYWIPLFQILEERGFTVYLVNAHYLKSVPGRKSDVSDCEWIQYLHSVGLLRTSFRPPEHICTVRALWRHRASLLQMAAEHTMHMQKALSQMNLQIHHVLSDITGMSGLAILDAIVAGQRDPIALAKLCHARVRSPRETVAKALEGDYRPEHLFTLRQSLDGYRFHQNLIIDLDLEIAKLMLTLPSAAETPVLPTTRTKATAYRRQGNDPSFDLRGELHRISGVDLTDIPGVSTATAQVILTEVGPDVSRFRHASAFASWLGLCPEKRVSGGRVLSCRTRRVAHRAATALRLGAHSLSRAKGYFGDFFRRMRSKLGTASAITATAHKIARVIYHVLLTKEPYSETVFHQCEEQSRQRAQQRLCRYAHQLGFQLMPITSQGAVD

SEQ ID NO: 407272 - protein, 387 aa, unidentified
MVVHVVVPGRSEARTFGTTTRELLTLLEWVEALQITHVAMESTGVYGKPLYNLLETTGMTVYVVNAAHMKAVPGRKTDVQDAEWICDLMRHGLLRASLIPSRPQRELRELVRYRISLVSERTAEANRIPKVLEGGNIKLGSVVSDILGKSGRAMLEALAAGQRSPEDIATLADVRVRATREDVADALRGRLTPHQHLMLRLQLDHVRYLDQQIEAVEGEVTTRLAPFAVQMTQLDTIPGVSERVAEVMLAEVGPDMTRFPSAAHLTSWGGMCPGSNESAGKRRGARTRKGSPTLRRTLTEAGQAAGRTKNTYLGAVYRRIAARRGKKRAAIAVGRRILEIAYYVLRDGVAYEELGANYYDEHKKDAVVRSAVKRLERLGYKVTVEAA

SEQ ID NO: 407273 - protein, 390 aa, unidentified
MTNIYLGLDVGKTNHHATALATTGKKIWDKPLPQSEPKIRELLEKLNGQGTVLLVVDQPKTIGALPVAIAQDMGIQVAYLPGLTMRRVADLHPGEAKTDARDAFIIAETAHTMPHTLHTITVTEETTAELSMLCGFDDDLEANATAISNRLRGFLTQIQPHLERSLGPRLSHSAVLKLLKKYPAPADLKTAGKTKVRNLLKKNAPRLTEEIFLTLGEQTVVVAGTAIVTPIISALVVQLELLLTQRAQTEQQILALVEAHPLSAVIRSMPGMGVRTSARILTEVVGKDFKDASHLASYAGIAPVDRKSGTSIKRTQASRRGNKALKRVLFLSAFASLKVDQASRRYYDRKCAEGKRHNQAIMALDRKRLNVLFAMLRDGCFYECRVPVGT

SEQ ID NO: 407274 - protein, 349 aa, unidentified
MLHVGLDLSRRRLDVCLISDQGEHLGAFRCPVDRDGLYGLTRRVAAYGGEVRGVVESMNGARYVHDELVRLGWEVLVADAQRVKGLAPLACKTDKVDARVLAELSVRDLVPAIWLPTPEIRAERERSRWRLHLVKHRTTLKNRVHAVLVAFGHQTPVNHLFGPTGRRLLADLELPEPWRGHVDASLELIDELETRIGAIERELRRGGADHRYVPLLMTAPGIGWITAFTIATEIGDITRFPTPTRLVGYTGLCPRVHQSGQTDRRGPLSKHGPRYLRWGLMEAAIHASAHPLYRERYQRTKRRLGPQRGAKVAQIDLARRLTEAIWHMLTHNQPFKPFAPAGAAHPLAA

SEQ ID NO: 407275 - protein, 351 aa, unidentified
MIIIGVDYHPSYQQIAFLDQETGECGERRLNHSDGEAEKFYRDLQQRGVSVRVGMEATGYSRWFERLLAELGIEMWIGNAAEIKTKRVRKQKTDRNDAELLLKLLLENHFPRIWVPSPENRDLRQLLWYRHRLVQMRTRIQNQLQALAMNEGQRWKKKLWSEQGRAQLDKFPLFPWASRRRNDLLELLDRLDPKIAELTIAVEQEARKWPEVLRLMTHPGVGPLTALAFVLILGTPERFHRGKQIGSYLGLIPSEDSSAGHQRLGHISKQGNALLRFLLVEAAQAAARCDPEWRRRYIHLAMRREKNIAKVALGRRLGVRLYWMWRNGWEYAQSVEFGSHAGQLVTGHGVK

SEQ ID NO: 407276 - protein, 347 aa, unidentified
MTATDYVVTGGVDTHADLHVAAALDRIGGVLDTQSFPTTATGYGNLLAWLSSFGELGRVGVEGTGSYGAALARHLTEQGVSVIEVGRPNRQVRRRHGKTDVVDAIAAARAVLSGEASATPKSHDGPVECLRTLKVVARSATKARTQALNQISQLLVTAPDGLRDKLRGLPRRELLATCAAFRVRDDDDTLAGVVRLALRELAQRVAHLDGQLARTKVRLTRITTAVAPELVAIRGVGPDVASTLLLTAGDNPHRLHSERSFAALCGASPIPASSGKTTRHRLNRGGDRQANTALWRIAMVRLAVDPATKAYLAKRVADGKTKTEAVRCIKRYIAREIFTALPQTART

SEQ ID NO: 407277 - protein, 363 aa, unidentified
MGNQTRPGHGPKETSMTEGIRTVVGFDVGDLWSHHYVVDHSTGEVVMEGRVATTRKALERFFGSLERSRVALEVGTHSRWIQSLLLRLGHEAVVANARELQFIWKSHNKHDRVDARKLARVARLDPSLLHPVRHRSLETHQDLAVLRTRDQMVQVRTRLIVMVRGMVKAAGERLPSCHTSRFAEKMKDLVPEGLRSAIEPVLRVIAELSRSIKECDERVEALVTDRHPEARALRKVPGIGTLTALAFVLVLEDPHRFRKSREVGPALGLVPRRDQSGGSDKSLRITKCGDGMLRRLLVEAAQHILREQGQDTDLRRWGLALVRRNGVGVGKKRAVVAVARKLSVLLHHLWVTQEEYRPLRDAA

SEQ ID NO: 407278 - protein, 328 aa, unidentified
MLYLGMDVAKAKLDCCLLLDEASGKRKTKVVSNTKSGIVDLLAWVAKQNVSPEVLHVVMEGTGVYHEQAALALADAGVTVSIVNPAQVKDFGRGLAVRTKTDGVDSFVLARYGALLKPKAWLPPAPEARILQALLARRTAIAQDLQRERNRQEKADATDTPDRIQQSLADSIEFLVKQLDQLQQVIDEHIDKHSSLQKDMALLQSIPAVGPQVGGNMLSVMHSHNFNSAEQLAAYLGLVPVERQSGSSVLGRARLSKAGPARIRAVLYMAAIVATRCNPHVKAVYERLLARGKSKMSALGAAMRKLVHLCFGVIKTQQPYEHDYTKNA

SEQ ID NO: 407279 - protein, 430 aa, unidentified
MKSNTQNAKIEAITEKTLVLGIDVGSETHYARAFDYRGIEYSKKPFKFSNTEAGFVTLKEWILDLKERHEKDKVVPGMEPTGHYWFNLGKFLQDNEMKPVLVNPHHVKKSKELDDNNPTKNDRKDPKVIAGLVREGRYMIPYLPDGVYADLRTASNIRFQLQAELTRIQNRISRWFNVYFPEYKTVYGKPDAKSGMLILKAAPFPEDILTLGIDGVNQIWRDAKLRAVGKARAKILIEAAEHSVGSKEGAVSARMEIRMLLEDYESRNICLQEVMTLIEGLVKQIPMAEKLLEIKGVGIKTVSGFLAEVGDISRFNTPKELQKLAGLALVESSSGKHKGETTISRRGRKRLRYLLFEVAMSLVAKNPEFRELHNYYTTRRLNPLKKMQSLMAIAAKLIRIFYAMLTKGVDYDPKKMASDIKRPAVYLQAA

SEQ ID NO: 407280 - protein, 406 aa, unidentified
MADIFALDVSMGKSYCVWYRGKHCLKEFSLVHTKAEFNALRDMINKAQKPIIYFEATGIYSRVIEHFFETNGLRFCRLNPLELHLKSESLRRVKTDQKDAHRITLTVQENTFRLTVPWKKDYLQLHELSRFYNQLNADWNYRLNHLHTELEQVFPELKQLFVNRTSKLALNIVELFPHPALVRPYSRVKLKNILMASTDKRISKMKAYKYADRLIDLAQKSYPAVSGDAIQVDEVRYYARQLIALTRKKEEVIKRIESIAQLLPEYGLYYSFPGIGKQTAAQLVGELGDISRFDNSNQLNAYVGIDIRRHHSGTYAGQDHINKRGNPIARKLLYFTIGNMIRQQHVNPNHIVEYYYRLKEKRPYPKLNKVAMVACMNKTLKCLLSMIKHHEKYHYRYTDSMVPVRA

SEQ ID NO: 407281 - protein, 354 aa, unidentified
MSKVKTLSFEGETICVGLDVHKTNWKVHSRMENVDLAAFSQDPNPQVLSNYFKKNYPGAKVKVVYEAGFCGFGIQRSLKQLGMECIVVNAADVPSSDKERKRKDDKRDARKLSRELADGSLNAIYVPSVEMEQARSLIRQRYRLVQDQTRCKNRIKHMLMFNGIRLNRDKERWSNQYVKALEEVQCDSAALRQALNLAIEQYKQIRLILKRAVEAIGNMAIQSPFAQVQQYVQSIGGIGLINGMVIQTEIQDMHRFKTLSQLCDYAGFVPDISSSDKKMVVKGITYRCNEFLRKAIIESSWMLIRKDPAMLMKYTEYRNRMSKNKAIIRIGKHLLARIRYVWNNQKPYETGIVA

SEQ ID NO: 407282 - protein, 341 aa, unidentified
MHATTIGLDLAKSVFQLHGVDAHGKVVTSKRLRRDAVLTFFANLPPCTVGMEACGTAHYWARELRQLGHEVRLMPPRYVKPYVKRHKNDRADAEAICEAVTRPNMRFVPIKSEDQQAALVIHRVRTMLVQQKTQLINGLRGHLAEFGLVAPQGAPKIAVLTARLAEPGDEQIPAAAKTVLQVLVEQLRDTERRIGELDERLVAQAKQDELCRRLSTIPGIGPITATALVATIGDAKAFTSGRHLAAWLGLVPRQHSTGGKERLGGISKAGDGYLRQMLVHGARAVVRWRRTSSPWLAKLLERRPVNVVVVALANKTARIAWAVLRRGENYHTSGQPLPTAA

SEQ ID NO: 407283 - protein, 458 aa, unidentified
MFTCRLSGGRAVSQPQTNTPDADGGQRLVDKDFAVGWERRSHNREQFIMNLDQVSVIIGIDWADRTHLCCLLGKDGVARQTVPVGASAEDFGSWIDTVEQQCPDGKIAAAIERSEGAMVEMLLSRPRWVVVPINPVVLHRFRQAFAPSGAKNDPGDAALLAEIVRTHPERFDPLRPADELLTELSALVKERRHWVNTRTRLVEQLIAVLKKYYPQAMELMGETLGSPMTLAFLQHWPDLASARKAKGSTWDRFYRQHHSGRDDVLQRRRALLRVARPVSDREAYVHPYRLHMLAIVRQIIAAQTSIAQFDAMIAERYARAPGHEVIDSLPGAGPVFAPRLWVACAGEGAQPDATTMQLKSGIAPVQQQSGNSKVVRFRWARPHFVHQTWTEFAYHSLPTCAWAHAYYQARKTKGHGEGAILRALAFKWIRIVARLWRDQVPYDERYYLQHCAARLAAA

SEQ ID NO: 407284 - protein, 314 aa, unidentified
MTSVSNPASRFIGCDVGKSAIVVFDDATGRTRTIANQPESLARFAAGLDSTCLVVCEATGGYEAALLDALLAANVPAHRADARKIKAFIRSFGTLGKTDTLDAKAMARYARERDPQLPRWLPPDPDRATLQALVLTRHDLVRQRTAFSNRRQAPAAEPVRAYLDDLLACIARQIKAIELRIAAILKASQPLKRDADILTTIPGIGFKTAADLLALMPELGSLDRRQAAALAGLAPHPRQSGRSDAYRHTKGGRSEVKRALFMAALAARNHHPTLRPFFLKLVANGKKPLVAIAAVMRKLLIIANAKLRPQLQLS

SEQ ID NO: 407285 - protein, 393 aa, unidentified
MIQRKNAESEPVRIKKFASFIAISGLPACLNPDPDSRLASIVKVIGLSSSPFFLKSVKDKRMENFYFIGVDVLKKKLNFCVMFEGKVVHEEETSNHQGAIMSLLHHLEEDYGIASGQMLVCAEHTGQYTFPLACACKAVECRLWLENAAEIKYSSGVQRGKSDKVDAKRIAIYASRFQDKVRYYERPTEDIERLKQLESERTLYVTDFAKYKGQMKDQKEYMPKSLYERKMKRLQALMDDLEEAIQSITDEMDEVIASCPVLFRQRELLMSIDGVGRVVATNMIIATEAFTRFDDPRKFNCYAGVAPFSYSSGSSQHSKARVSHRADKVMKRLLHLAAVAVTHRIGGELKKYYERKVAEGKNKMSVINALRAKIVARMFAVIKRNERYKPILS

SEQ ID NO: 407286 - protein, 465 aa, unidentified
MNSSEPSPVEFAAFVALDWADQKHAWALQVAGERRLQYGELENTPEAIEVWASELEQRFGGRPIAVALEQPRGAVVAVLSKYAHLVLFPVHPSTLAYYRQSFYPSGAKSDPTDADLLLELLVQHRDRLRPLKPDTVETRLLQFLVEERRRLVDDRTRYSNRLTAWLKQVFPQVLKWFDDVTSPLVGDLLQRWPSLTELQRARPDTLRRFFQEHNCRDQERIEERLGLLPHAVPATHDPALLQSGSVAIRCFVQLIARLREDIARYEEKIEEVAQAHPEFALMDSFPGAGPALAPRLIAALGTDRSRFQSAQELQCYTGIAPVLQSSGQQRWVHSRWACPKFVRQTIHEWALHSMGKCDWARDYYQAQRSRGKSHHTAVRALGFKWLRVLFRCWQDRTPYQEQIYREALGRGASRRAAAGAPQRLAHQPTPKPAAPASPGQPPGASAVQLRWESCAGFFKLGVVSS

SEQ ID NO: 407287 - protein, 391 aa, unidentified
MGGQNAQQEWVMAPRRIGMEKLREWAAANLRKGDAVVIETTTNVWDVYDIVEPLVSYVVVAHAGGVRQIAEARVKTDKKDIERLIRLLIADIVPEVWVPPVEVRELRGMISYRNRLVKTSTMIRNRLQSLIHRHNLILPKGMLRDKVWWEAQKVGALEKIQIRQELAMLDEMEKHKGEVDGELGRQSLGKVWGKQAMRLLQLPGFGVIVTMTVLSAIGDASRFESAKKLVGYSGLGAGVHDSGKEHIEKRITKSGRKELRWAMVEAAWRAIRISPYWKEQYEKYLRRMRKPNQAIVVIARKLLVVVWHVLTKEETDERVSEEDLAYKMLVLSWDLDENVRMGLTYKQFAKYALMKLGVEKDITRFVRKEIPRRLAPRAEVLERMAELGIAL

SEQ ID NO: 407288 - protein, 344 aa, unidentified
MTYYAALDVSLRSVAICIIDDQGAVCLERTVGSEVNDIVGCLRGFDQPIETVGFEAGTLSQYLAQGLQSDGFEVVCLEARQVSAALSAMRNKTDRNDARGIAQILRTGWYARVHVKSRASHYSRALLSSRKAVLQKCIDLENEIRGLFKVFGIKLPASLGHGPFDGRVRPLIEQDADLAEALLPVLEARLMLYRTYLVLDRRVKQEARNDAVCRQLMTVPGVGPITAMTFKAAVDDPHRFRRSRTVGAHFGLTPRRHQSGEHDNPGRISKAGDGDVRAVLYAAANALMGRTQRWSALKAWGLRLQRTKGRRRMLVAIARKLAVILHRMWIDGTTFQWGKEAEAV

SEQ ID NO: 407289 - protein, 319 aa, unidentified
MNNLSHGRVIGIDVSRDWLDLYCLPDGHRRRAPNTPAGHAVVVALARDRDAMVCFESTSGQEWQLWAALEVEGVTARQVPPAQVKAFAQSCGTRAKTDRIDAELIARFFAFRPEAGRSLPAEKLRLLRALTSKRAQLVEMRTRLLAQIRAHQKLGTAAMFEDVDTELKQRIDSLIKELEDRISQAIASDERLSETAGVLRSIPGIGPVASTMLIAEMPEIGTITGEQAAALTGLAPVAHDSGTLRGKRTIAGGRRALRHVMFQAALVAAHHNPSLRSFADRLRKAGKPHKVIITAVARKLVTIANALCKNRQKWAVPTT

SEQ ID NO: 407290 - protein, 515 aa, unidentified
MSGRNPKTPAPRRRAQPAPPTCPPPRPPDDLRRLARSAAQQRRHAEECARIAALPVRDQHAAGIDAGDASHWVCVDAAPDGADTVREFAAHTAGLRQLVAWLQLCGVTTVALEATGAYGHVLFLTLLEAGLTTIMIPPQFARQIRGRPKTDRRDCQWIQRLHKLGLLPAVFRPDEATHTLRDYVRQRANLVRLSAQHIQRLQKALELMNLKLTKVLGDITGVTGLKVLRAILAGERDPLKLAQRRDRRCKHTAAEIALALDGRYRPEHLLELRCNLTLWEKYQEVIATVDVAIAAQLRAMRRHTELPPLEPRTRVRGRKPHDPGFDVRTALYYVTGVDLIAIEGIDEVHALTLVSELGTDLSKWPTLKQFCCWLGLCPNWKKTGGKVQSSHTRRGKNRAARALRLAAWALMRSQSYLGAYLRRQRSRLGAPKAITALAHKLARIVYNLLRYGVAYMKQTEEAYAEQVRARLEKQLRRRAVELGYELRPIEPKLETLIVGGEELTVTADGEIVAAK

SEQ ID NO: 407291 - protein, 321 aa, unidentified
MKDITQTPVLGIDVSRDYLDGYFLPDGKRFRLPNTEEGHGQLIELLAVHPDVVVCFEATGGQEWRLWAALDAVGIETRQLPPAQIKAFAASRGTRAKTDRIDAELIARFLAFRPDAGRRLPHETLRILRALCAKRGQLVEMRKRLLAQTKARMKNGSGDPFEPMDGELKALLGIQIADLETRIEAAIAADPEMADTARILRSIIGVGPVTSWTLIAEMPELGQISGEQAAALTGLAPIAHDSGAMRGKRSIGGGRRALRHVLFQAALVASHHNPRLTAFADRLRERGKPHKVIIIAVARKLVTIANALCKSRQICANLDNL

SEQ ID NO: 407292 - protein, 346 aa, unidentified
MNYIGIDVHKSICTAVVMNDDEKVIDQIIDFGTNDEGCSFIVDHYSPEDSYILFENLTTAHRVYHFFKDRGYRVEGLHTGHGCVTEISKTDFKTDLEDATKLARMCKDHFTGRREYALVHFADIDSMKAKELCRVMNDCSEQRDKLNLRIQAYMDLFDIHLPKGLKNVYSNKAMAYLKSLNHPALTIMVEDMASSMTHIETAREGLESLFKDNEDVKNLMSIKGIALQTAATIYTAIDGIERFETPESLVSYFGLKITRHESGGDRDLHGHINKRGDPLVRKYLANVVVKHSIYYPDSDLAGFYKRKKEVMPHWKAVTAAMRKLVCIIWAMLTRHQVYRFSSPVKA

SEQ ID NO: 407293 - protein, 343 aa, unidentified
MQAVTTIGLDIAKSVFQVHGVDAEGKVVVRQQLRRARVLPFFRKLPPCLVGVEACASSHHWSRELQTLGHTVKLMPPAYVKPYVKRQKNDAADAEAICEAVQRPNMRFVPTKTPEQQSCLVLHRTRHLFIRQQTAVINTIRAHLAEFGIVAPVGRNGVEELLYAVADPKDERIPDVARACLEALGALLGRLKAQILEFDRQINAWHRSSETSRRLDALPGVGPALATALVASVADPKAFRSGRDFSAWVGLVPKQSSSGGKEKLGNITKQGDRYLRSLFCAGALAVIRYAKIHGTKHRPWLTKLLERRPVKVAAIALANKIARMAWAMMAKGERYREPVALAR

SEQ ID NO: 407294 - protein, 418 aa, unidentified
MTVDSVARKRAIIKPDTLVIGIDLAKHTHVARARFYDGSYTRPVKVPNTRAGFLALSEQIGAWKPRPDSAVFVGVESTGSYGVNLVRWLSEYGCRVVLVPSLHVCREKELLDNGRGTSDEKDALIIADLVARGQYLGFVELSGACLELRPLVSLRARLVKEQTGWLNALHQTMDVLFPEFETIFADLKPPSARLVLGRFGTVSTARAHSPAEMRRLLARDGAVRLSLAKLKRLKAAADESIGPLAVSAGQARSLHEILDTLATIEERIASLEAEIVRLLEQLPEAAYLMSVKGVGAMTAAVILAETGGLAQYSCARAVLKLAGLNLYQNSSGQYQSGRRISKRGRSQLRRALYMVAVQHAKRGWPLQPYYAALVERGKPKTVALTALCCRLVRLLYALVRDGRCYSECPPEAGCLQAA

SEQ ID NO: 407295 - protein, 480 aa, unidentified
MNVKARRTKKQVNVENQAIMLLSKEELDRKIEVIKKELRSYTWRDLETNGTFAKNDKLSFITDDMLIAGCDIGSETHYIRAIDVRGRELSSGAFEFSNTSEGFANAKAWVLALAAKNDKKQIVLGLEPTGHYWFALAAWMISNGISVVQVNPYAVKQSKEIEDNSQLKDDRKDPKLIANLVKDGNYGMPYLPEKVYADMRRLSMFRDQLTEDRIRNINRLHRELKIYFPEYMDAFGKIDGAFTLEVLKISAIPSDITVLGAEGIKNIWHNVKLRGRGYSRANEIVGYAEKSVGLTDGTDAGREAMKWYAEQILRLDEQLADIESALHEKCREIPYAENILAINGVGENILAGILAEMGDISRFDDVKEIQKLSGMGLVSCSSGKHKGQTKISHRGRKRLRYWLFQAAKSAVSHADEFKQLHEYYTTQSNNPLKKMQSLVVIACKILRVIYTILKTGTTYDPQKLLKDIKHPAASQAPMAA

SEQ ID NO: 407296 - protein, 342 aa, unidentified
MSIVTVGLDLAKHAFQVHGVDEHGRVVVRRQLRRDGVEDFFAALAPCLIGMEACATAHHGARRLAALGHRVQLIPPSRVKAYVQRGKKNDATDAAAIAEAVTRPHMAFVPVKTEGQQAVLMLHRTRDLLVRQRTMLINALRAHLAEFGIIAAQGRAKAGDLVAGLGDAAIPELARTALQEIAAQIEACDQRIVIMEKEIFAWHKTNEPSRNLATIPGIGPITASRLAATVTDPSAFKNGRQLAAWLGVVPRQNSSGGKDRLGGITKTGDHSIRRLLVLGATSVIRRARTRAPGDAEWLKALLARKPARLVTVALANKMARIAWAVLARGEVYRATVPLPAAG

SEQ ID NO: 407297 - protein, 431 aa, unidentified
MKNRTSERIEEITIGTLIVGVDVAKEVHWARFVDYRGAEHGKAVSFKNDRQGYEKILTKIKEICKIKTLRYPIDTVMIGMEPTGHYWKPLANYMMIEGYRVVCVNPYHTKKAKELDDNSPTASDKKDAITIARLVKDGRFFDPYLPQEIYGELRGLSNARVSAMKRSNAVKNTITAIIDEYFPEMCSVFKNPLKGKASRQVLRSCPFPAFILGMSEDEILAEIKKAVKKTVGLKKVRALINASKDSIGVRYGLDAARMRLKWLLDELELLEGQVSEIEDAMEAALLKTGYAEQILGIKGIGVVTAASFLGEVGDPLRFQNARQIANYAGYNLTEDSSGKSRSGTIISKRGRKQLRSILYQMAFTMVGTNAEMKELYRHLTTRKSNPLKKKQALVVISKKIITVIYSLLKKQETYKPELVLGTARKELMKAA

SEQ ID NO: 407298 - protein, 327 aa, unidentified
MLYFGIDVSRDKLDCAVVDEQGQRVKRARTFTNDTQGVIELIGWARAVAVDQPRRFVMEATAAYHELAATRLHCAGLVVSVVNPAQVRALARGLGTLSKTDLIDALLLAQYARLAEPRQWRPTKPQLQEFSAMLLRLDCLEADLRREQNRREQAAVRGSADCVMASIDACIEFLRGQCKAMRKTIDSHIVANEGLSQSITRLRTIPAVGEKTAKRMAAILGANDFVSAKEAAAFLGLVPIKCESGSSVRGRSRLSKAGNPKVRASLYMAAVVAKKINPDIKDLYDRLCAQGKTKMSALGACMRKLVHLCYGVLKSDHDYVPPEARSS

SEQ ID NO: 407299 - protein, 346 aa, unidentified
MKQITTIGLDLAKQVFQFHGAEADGSPVVSRKLRRADVLAFFKKLSPCLVGMEACGGAHYWAREIAKVGHDVRLIPPSYVKPFVKRGKTDAADAEAICEAVIRKTMRFVPVKSADQQAAAMVLKTRELLVRQRTQAINALRAHMSELGIIAATGPAKVATLIEIVRDVKDVRLPQAARFALSELANQIEWTKKRIDKLERAIVIEAKRDEDMRRLVTIPGVGVIIAASIKALVPDPHGFKSGRHFAAWLGLTPRSHSSGGKERLGRISKMGNSTLRSLLVVGATSVLKHVRHSADGPKWLVAILARRPFKVVATAFANKMARIIWALLTKGGTYRKSGLAIGTASA

SEQ ID NO: 407300 - protein, 340 aa, unidentified
MEKISIVGVDLAKNIFQVHGATADGRPVFSKKVRRSKLLSLLAGIPTCTVAMEACASSHHWGREIGKLGHTVKMIPPIYVKPYVKRQKNDANDAEAIAEAASRPTMRFVTVKSAEKQASGMALRTRDLLVRQKTQTINALRGHLAEYGLVAPSGTVHLNRLQAAISDPETELPAAVIDHAQLLLDHIAMLACKIGKLGAELRAGARQDPAAKRLMTIPGIGPITAMALTALSPDPSTFRKGRDFAAWTGLTPKQFSSGGKERIGRTSKMGQRDLRRLLIIGAASVVRWAIRRGADQGGWLGQMLARKPRMLVTVALANKMARTAWALMTKNENYRNPALA

SEQ ID NO: 407301 - protein, 302 aa, unidentified
MVGVALNRFSKVKEEFEFGNNKDGIENWVSYIVGKYKNITVASEATAEYHRNLALACLKSGLNYRLLNPIITKQFTKATVRKRKTDKQDALIIAKLALTGAGNMVNYKSFDTTKSYSRTAAKLVHLENTLRLVARRFLELVPNDKGSYKSLVKCISQLKSSAKFLRKKGVSKISKDQIKLLSTIPGVGPIIAPVLISEIGDINNFKNVKSLVAFAGIDPKVKQSGIGLKHNTHLTKRGSPYLRQSLFQAASIARIHDKELMYYYQKKRDEGKRYKEATVAVSRKVLNRVYAVLKRQTPFVVR

SEQ ID NO: 407302 - protein, 416 aa, unidentified
MRVFSTFTEDLEKLAQWLVSCGITTVAMESTGVYWIPLYDVVEKYGVKACLVDARGMKNVPGRRTDWHECQWLQFLHSVGLLRAAFRPEGDVCAVRSMMRYRTELVEMTSQHIQHMHKALTQMNVQIHHVISDLTGLTGLAIVDAIIAGQRDPVVLAKLRDPRIKASEETIRKSLVGNWRAEHLFTLEQSRKSYQHYQGQISACDEAIEKLLVAFVPRVDPTERPLPPDRKRKQRGRKKKNANPNTFDLRTESYKLFGVDLTQIPGLMAMVLMLFSEVGRDMSRWKTAGHFVSWLALCPDNDISGGRVLWRGMRRVHNRAGDLFRMAAYSLHHDATPLGDYLRRMKSKLGPAGATTATAHKIAIIFYTMVKKQVEYDATLWADRDAEREKRFEAKLKRQAQQLGYKLVPIEERPAA

SEQ ID NO: 407303 - protein, 343 aa, unidentified
MSKHVVAAGNVAGLLDRFAELRRKAEARTGRCYPIIVIQEAGLDGFWIHRVLQAEGIESHVADAASIATSRRRRRAKTDGIDGEALVRALLAYKRGEPRVCAMVRAPTPAEEDRRRISRERKTLTNERISHVNRVKGLLFAQGVSGYEPLRRDRRKRLEELMTGDGRPLPAHLKAQIGRELDRLELLLEQIKAVEAERDAMLAAEQLTSPAPTMLLNLKGIGPEFAVVLWSEGLSRHFDNRRQVAAYAGLAPTPWQSGSVDYDQGVSKAGNPRLRTTLIQTAWLWLRHQPRSALTLWFKDRVKQNSGRLKKTTIIALARKLLVALWKYVNAGVVIEGAVMKTA

SEQ ID NO: 407304 - protein, 343 aa, unidentified
MSYKLYFGVDVSKFWLDIAYYDGVDVDWKHGHIRVDNDEKGFAQLGRWLDRLGVGKGTCIFCMEYTGLYSQEFRQWLERMKIVYGMVSPRKMHRFEPDLGEDERSLDRIKTDEMDSFRIAIYCKEHSMKIRRKPSHLPSDAYFKLKRLLAERRQYVKQSTLYKQQLHDIGKYDSEASRHRKEAELASLTENALQTSKEMEAIIREDADIRKNYGLLCSIKGIGLIVAAETIVLTENFTSITNPRRYACYVGIAPGRKESGVSIQGGDHVGRKGFTQAKADLSMAALHAIRFDKGIRAYWLRRKAEGKHSGVVLNAVKFKIVLRMFAVIRRQKPYVEMEEYGKK

SEQ ID NO: 407305 - protein, 340 aa, unidentified
MEIAVLGIDLGKNSCSIVGFDDGGAVVLRRRMHREGVIKLAGKLRPCVVAMEACCGAHHLGRVLRAQGHEVRLMSPEYVRPYVKSQKNDDRDAEAIAEAATRPTMRFVELKSEEQLDMQTLHRARDRLVGERTALINQLRAVLLERGITVAQGRRKLERHLAGLDAQGGLSQRMRVLIEDMRLQWCELDRRIAELDKELTKWVRNEEVARRLMTIPGIGVLNATALIAAIGQGESFARGRDLAAWLGLVPRQLTTGGRPRLVGISKRGNKYLRKLLIHGARAALPTLLESPTSLGAWLRGLMTRMHKNAVVVALANKLARMAWAVLRHGEMFRFAVSAAA

SEQ ID NO: 407306 - protein, 341 aa, unidentified
MKQPLFSIGIDIASDDFVVSISDTPGIALFGPQQFDNNPQGFKELAAWFKRNKIKQKDMIICIEATGVYGEKLCYFLHNLKYTLAVDPPLKVKRAFKIDGHKTDPVDSLQIAEYAFRFFDELNIWEPREDIVEKMKALITTRELLVSQRTAVTNNLAALNRKAIRPAVAIRTLKSQIKTLTKNIDTLEKEMDNLIHKEPHMRQTVNNLKSLPGVQNLLAFNMLVLTNGFKTEKHYKQFTSYLKIAPRMHQSSSSIFKKPKTPKYGPSIMRKLLHLAARSVVTHKPVFRKYYLLKQKEGKAKKLILNNVENKLVKIMCAIIRDQKPYIENHYSVHPNLLKIA

SEQ ID NO: 407307 - protein, 412 aa, unidentified
MDCLYRCVCGLDVHKDSVAACVTWRDEKDRVRREVQPFGTTTREIERLRAWLSERGVSHVAMESTGVYWVPIYNLLEDHFELLLVNAQAVKRMPGRKTDVSDAEWLASLQLHGLLAASFVPPRAQRELRDLTRLRSQLVGQQAEAANRVQKVLEQANCKLGSVASDVRGVSGRAILAAMVAGETDPVVLAELAQGRLREKLADLREALLARVNDHHRFLLGLHLAQIDNLQEQIDQLSARIEAIFAPFRATWAVLLDIPGVGQRTVENILAEIGWDLSRFPTAAHLASWAKVCPGTNESAGKRRGSSAGHGDRWLRTALVQAAWAASHTKNSYFAAYYRRLAQRRGKKRALLALAHALLVTIYHLLTDGAAYHDLGPEWVDRRAGDQRAKYYLAQLRKLGYDVALPAPEQAA

SEQ ID NO: 407308 - protein, 425 aa, unidentified
METSPSIPRIVAWVGLDWADQQHVGRLQASGSPQVEAFVLDQKPEILRAWVQQLRTRFLGGAVAIALEQSRGALLYALMNYDFLVLYPVPPRSLAAYRRAFYPSGGKDDAVDADLLLDFLRKHQDRLRPWRPDDARTRQIRLLVEQRRKLIADRTRLTNRLTAALKEYFPQALEWAGELASPAGCQFLSRWPTLPRLQQASPRQVRDFYHAHRRLTPAQWEDLQEQIRKAQPLTTDSAVVQSWALVVPLWVEQLRCLLSALERLDTALQQLFRQHPDHSLFDSFPGAGEALAPRLLAAFGSDRERFQDAAEVQRFSGVAPVTERSGKTHYVHWRLACPKFVRQSFHEFAAHSRHWSPWASAYYQQLRERGVSHHAALRALAFKWIRILYRCWKDRTLYDEHRYQQALKRRGSPLCLALLSQEVPA

SEQ ID NO: 407309 - protein, 413 aa, unidentified
MTDTRYAFYVGIDWASAAHQVAVLDHERRKVTERSVLHTGAALGEFATWLATAAAGHPEQVAIAIEVPRGAVVETLLERGFHVFAINPKQLDRFRDRHTVAGAKDDRRDSLVLADSLATDQPAFRRLHPEEPAVIQLRELTRVEEDLQDELRRQSNRLREQLQRVYPPLLTFCPGADEPWVWALLAQAPTPEQGRRLTRAAVARLLAEHRIRRVTAEEIVAQLRTPPLVVAPGTVAAVAEHITLLVPRLALLHDQQRHCAARIERVLEALAAPTEGHRGHRDATIFRSLPGVGRVVIATMLAEAARPLADRDYHALRAQGGVAPVTRQSGKRRAVSMRYACNPRVRQALYHWARVSSQYDPATRRHYDALRRKGHGHGRALRGVADRLLAILVAMLRAGTTYQPERRRAWAAA

SEQ ID NO: 407310 - protein, 413 aa, unidentified
MTTKISLAVMDPLAAFVDVGSEQMHVSIAGESAEVFGTFTTELHRLRDWLRERGVKSVAMEATGIYWLPLYGVLESAGLKVSMVNGKQTRNLPGRKTDMKDCQWGATLHAHGLLQAGFVPPAQIRRLQDYLRLRGDHLSCAAACVQHQQKALERMNVKLHDVISSLVGESGIRIVEAILAGERDPERLLALCDKRIQNKKAERVKESLRGTWAEEHLFALRQAVENWQHYQRQIAACDQQIERVLRQISGPDESGGTEIKTKPLKRGGINAPQIEDLHHMLRKLCGGKDLTVLPAHTDYSLLQLLSEVGTDLSGWKTEQHFTAWLGLAPGSHQSGKRKGSVRRKRNRAGRLFCMMARSLAQSKNIALGGFYRRMAARRGGLIANIALARKLAELFWRVMVKGLDYAEAGLKAY

SEQ ID NO: 407311 - protein, 359 aa, unidentified
MFVGVDVHKDTHTAVGVSPFGETLFEMTVGNYEKDFKSLAKKVEQMKGGLSPYFGLEDCHGYGERLAQYLVLQYPVIHVPSILVDRERQNAPHPEKSDSLDAYGVAKVMLTASDTLLPHTVSEESKRAKQIKELSMDREYLVEERTRLKNHLHTILHQIWNTEYRTKFKDPFTLKALAYWIKAKPSCDPFLLRMMKRKAKRLVDLFHEINELEKEMRALLEKGKYTIQTASGCGVAVASTLVGEIGDISRFHSPASLAKYAGCAPRECSSGKTKRFKKTRSGNRRLNCAFHRMALSQISRSGSDKAKTYFKRKVSEGKSKSQALVCLIPSPTNPFKFEGVFDILGAYEQMQNSSPSYAR

SEQ ID NO: 407312 - protein, 347 aa, unidentified
MLTEELDVVIGVDTHEASHTLCLVSARTGALVGEFELPANRSGYRQALSLARRRARRRLWALEGTGSYGAGLARFLDARGEHVLEVERPCRNGRGSRAKSDPLDALRAARAVIAGAASASPRACGAREALRVLLTTREGAVSVRRAGLNELRALVVCAPEALRERLRGRSPNALVGACLALRPRAEQEPELRATRLALRSCAQRVRSASREAVALEREIALQVSALAPVLLRLQGVGPISAGFVLVAWSHPGRLKSEAAFARLAGAAPIEASSGKSVRHRLDRGGDRRLNRALHTILLCRRRSDPRTRAYIARRVSEGKSEREAVRCLKRYLARHLFRLLEGMRLAS

SEQ ID NO: 407313 - protein, 408 aa, unidentified
MESQIIFGIDVSSKSSTVCVVNDRIKQGESFRISNDSLGYQKLYEQLNQYLITPLVVFEATGVYSLSLQAFLEDYHIKYLKLNPLKAKKLMDNNLRHNKTDKVDAYRLALIQFNAPQKLRDPQPREYHELQNASRYYEELTRSIVTTKNQLHRNLQSTFPQIEEILSHPSGRIYWALVSLFPHAGYVLEKNETQVTQMLNSISGIGQQRARYLTTRLYAFAREAYPYDSKDSIIVRAIQRNISNLFSLQQERDYVINYMEKLAKAVNARALSIYLSIPGVARITAVRLVAELGDLRRFSTSAQIDAFVGIDPGRYQSGEKDSSLGITKHGNHIARKILYRVIIQMETVKATQPCHITDYYDKKKRSSNSQGYKKIAIASVHKLIRTMFALIKHDQLYDYNIATENKRL

SEQ ID NO: 407314 - protein, 347 aa, unidentified
MRFYTKQHQFYCGIDLHADAMYVCILNSVGEVVLHKNIATRPKAFLRLIKPYRERLVVGCECMFSWYWLADLCADEGIDFVLGHALYMRAIHGGKAKNDKIDSHKIAVLLRGGSFPLAYVYPKSLRATRDLLRRRNHLVRKKSELIAHIQNTATQYNLPPLGRIAKPTERDGLLDKFSDPVVRRMVEVDLLTIEHYEQLLATLEWQLERITGRQAPVDLALLKSISGVGRILGMVMLYEIENIARFPRVQDFVSYCRLVKPEKQSNGKSYGHSGKRIGNAHLRWAFGEAVVLMLKGNKPLQAKRQRLASKHGKGKALAILSHRLGRAVYFMLKNQEPFDQEKFMRGI

SEQ ID NO: 407315 - protein, 320 aa, unidentified
MSSPILGIDIAKASFQAALLHNGKLHHHRFDNSAQGFAQLQTWLVKHRCKRLHAGMEATASYGDELALFLYLAGHTVSIVNPARIKGFAQSQLQRNKTDQLDATLIARFCQQQAPEAWTPPPAEIQQLRALMRRLAALQEMRQQEVNRLEQAGNQALIRESLEKIIATLDGEIARLRQLIKDHIDQHPDLKRDRELLMSIPGIGETTAAWLLSEVQVAAYSSARQVAAHAGLTPRHHESGTSVHGPTRLSKTGNARLRRALYLPAVVAKRYNPIIRAFCQRLEKRGKRPMEIVGAAMRKLLHIVYGVLKSGKAFDPSFAS

SEQ ID NO: 407316 - protein, 406 aa, unidentified
MMNAVGIDVSKGKSTVTIRRPGDEVILPPCDVRHTRSSIDTLINEIKSLEGETKVCMECTGRYYEPMATWLTDAGLFVSTVNPVLIKDFGDDSLRAPKTDKADSKKIARYTLDRWTKLKQYGLMDETRNQLKTMNRQFGFYMDQKTSMKNNLISLLDQTFPGANDFFDSPARSDGSQKWVDFVYTYWHVDCVAGRTLDVFTEHYRNWCSRKGYNFSAAKAKTIYDVSKDLIAVFPKDDVTKMIIHQAVDLLNAASKTVETLRAKMDETASTLPEYPIVMDMNGVGPTLGPQLMAEIGDVMRFEKRGSLTAFAGVDPGKNESGQYAQKSVHTSKKGSPHLRKTLFQIMDGLIQRSPVGDAVYDFMDKKRAQGKPYYVYMTAGANKFLRIYYGRVKEYLESLETNESE

SEQ ID NO: 407317 - protein, 354 aa, unidentified
MNESTGFDFKGQSIYVGLDVHKKSWTMSIYDKSMHLKRLTMPPDPEKLCAYLKRMYPLVRYHVAYEAGYSGYWIHDQFKRMGVDCIVVHPGDVPTTDAERRNKTDVRDSMKLGKELQKGNLQGIQIPNMSRREDRGLIRQRRNVLKMLTRTKNQIKSMLAFHGILIPESYDKRFWSKSFFSWLHHVELTQVSGKETLSSLLRTYDFAWEQFVYLNSQIGQLSQSDRYKEEVDLLCSVPGIGKLGAMIWLTELGSMRSFSTFDALVSYIGLVPRERSSGETIRTGSLNRRGNSYLRTLLIEISWTAVRKDPALLLTYQGLTKRMTGQKAIIPIARKVLRRMRHVLLCREPYKIGH

SEQ ID NO: 407318 - protein, 398 aa, unidentified
MTESSDYESVQVFIGVDVGKDTHHAVAINRSGKRLFDKALPNDENKLRSLISDLKQHGQILLVVDQPATIGALPVAVARSEGVLVGYLPGLAMRRIADLHAGEAKTDARDAAIIAEAARTLPHALRTLKLADEQIAELSMLCGFDDDLAAQTTQASNRIRGLLTQIHPALERVLGPRLDHPAVLDLLQRYPSPEKLASLGEKKLAAQLCKLAPRLGKRLAADIAQALAEQTVVVPGTNAAAVVLPRLALQLITLRKQRDEVELEVEQRVLAHPLYPVLTSMPGVGVRTAARLLTEVACRAFASAAHLAAYAGLAPVTRRSGSSIRGEHPSRRGNKALKRALFLSAFAALRDPLSRAYYTRKMSQGKRHNQALIALARRRCDVLFAMMRDGTFYTPQAS

SEQ ID NO: 407319 - protein, 344 aa, unidentified
MEAIVTIGLDIAKSVFQVHGVDANGAVVVRRRLTRAKVLSFFERLPPCLVGLEACATAHYWGRELRKLGHDVRLMPPSYVKPYVKRQKNDAADAEAICEAVTRPSMHFVEIKSPEQQSIMSLHRVRQMLMRQRTQISNAIRGHLGEFGRVAPIGRNGLAQLIAIVADENDNTLPDDVRAAVAMLAVQLRIVNDQILELDRRVRASARATDVGRRLLEVPGVGPVLASALVATVPDASAFKSGRNLAAWIGLVPRQNSSGGKDRLGGITKQGNRYLRQMLVVGALAVIRYAQRHGTRRPWLVQLLARRTTKIAAVALANKTARMIWAIMTTGERYREPSAASAAV

SEQ ID NO: 407320 - protein, 345 aa, unidentified
MSMVIYVGLDVHLNSIAAVWGKAKDKPRSMTVTPTEEGFKALTEAVGTHEVWGVYEASSCGFEAYDQLRALGWKMSIVAPTHITKSAHSKKRKTDLRDAKHLWEVLMSHGELGTELAQIWIPSRELQEEREIVRRRLKLSESSCRVKNGILSLLRMHKIKRPEGMKTSWTRKHLSWLRGLAKDEALGASVRTVLESYVRELVFVEEEIETLQKAVESLAQELRYRGAVEKMTEVPGVGILTALTFLVELGDLRRFDNRRQMGSYLGLVPASYESGEANDRKGHITRLGPPRVRKVLNQAAWHLVRLDPLWRKRYEGIAARGGGKTAIVAIMRKLGIELWQRAKSA

SEQ ID NO: 407321 - protein, 381 aa, unidentified
MQTIDTVNPSILLAIELSASTWLVAARVPGLEKPHLHRIDSGDTAALLALISSLRARAARRLDAIGIVCCFEAGRDGFWLHRLLTAHGVICHVLEPTSILVNRRARRAKTDRLDAEGMLRVLAAYLRGDHQACSMVRVPTPEEEDAKRTHREREKLVQERLRIENRIEALLFTQGIRKRPSLRSWERDLAVLRTGDGREIPRHLRAELDRLRRRLVMTSELIREVEAERDQAAKTKPQDQACHKIAALSRIRGIGENFAAVLTREVFYRSFDNRRQIASYVGITPMPYQSGGMDRDRRISRAGNPRARTTMIQLAWLWLRYQPGSELAEWFRERVGTLAGRTRRIAIVAMARKLLIALWRYAETGVIPAGAEIRAETAVAA

SEQ ID NO: 407322 - protein, 421 aa, unidentified
MRGLRAKRVRTVKEGTLIATVDIGATTNTGYCTSVDGRDMKVFKFGNTREGFEKFWHMIVAAQNRFKCTEVVVGYESTGPYAEPLVHYLRDKPVSTVQVNPLHTKRLKEVNDNSPGKTDDKDPRVIADIIKLGRALSVVVPEGNAAYLRRLNNVRERHIGERTALLNQMQQLVFLIFPEFKTIVKQMIGKTVRFILKNYTTPEKIGALDKRVFGEEMRKRSMGKLGVKDAELLINAAQQTVGIKEGVAGIVLDIKHIIAQLDVIDSFTADIEAEMALTLGRIPCSARLLSIKGLGVVSVAGLIGEVGDFLKFRTQSEIIKLAGLDLYEVSSGKRKGEKRISKRGRSLIRKILYFAAIQMIRKNGIMHEYYEGLIGRGMLKMRALVAVMRKLLGIIHAIVRDNRDYVGQYGAPKRRVIKRAA

SEQ ID NO: 407323 - protein, 371 aa, unidentified
MGESSKTLFVGLDVHKDTIAVAYAAEDRSTEVVSLGMIGTRQCDIDKLIRKLESKGAPFTIAYEAGPCGYWLYRYLTRRGLSCIVVAPSLIPRKPGDRVKTDRRDAVTLARLLRSGDLSSIYVPTVDDEAIRDLSRAREDAVRDLKRSKVRLKAFLLRQDIRYEGRANWNAAHLRWLARVVCPTAAQQIVFQEYVHTVTEQTERVQRLEVELHTAVKTWRLHPIVEAVQALRGVDLTGAVTLIAEVGDLTRFDTPRKLMSYLGLTPSEYSSGERRRQGGITKAGNGHARRALVEGAWAYRYPAKVSRHLQLRLENVPTEVRAIAWKAQLRLCKRYRLLSARGKHVNQVVVAIAREMAAFSWAIARTVPMAS

SEQ ID NO: 407324 - protein, 341 aa, unidentified
MEQATTIGLDIAKHVFQVHGANATGHVLFRKRITRAKLLGFLAAQARCVVAIEACAGAHYWAREIAKLGHHVRLIAPAYVKPFIKRQKNDAADAEAICEAAQRPNMRFVPVKTEEQQANGIVFRARDLLVRQRTQCVNALRGHLMEYGYVFPKGITHVEALVALVEDLQSALPDSARVILKLLIDTFTALEAQITALDAEINQRSKSDPTARRLMTIPGVGPITATAIAALVPAAEGFPAGRDFAAWLGLTPLQKSTGGKQKLGAVSKRGERTIRRLLIIGASAVVQQASRHGAPKGSWLAQMLARKPKMLVTVALANKMARIIWALLVKGGTYRTPAVAA

SEQ ID NO: 407325 - protein, 431 aa, unidentified
MKNRTSQRLEEITAGTLIVGVDVAKSLQWARFVDYRGVEIGKALSFPNNRKGFESIVSRIREHCNSKILRYPIETVMIGMEPTGHYWKPLANYLMNTGYRVVGVNPYHTKKAKELDDNSPTKSDKKDAITIARLVKDGRFFDPYLPQEEYGELRGLTNARVSVMKRSSAVKNTITAILDEYFPEIKTVFKYPLKGKASRQILRSCPFPAFILAMGEVGVLSEIKKAVKKTVGMKKVWELINAAKDSIGVQYGLDAAKMRLGWLLDELELVEKQLCEVEQAMEASLIKTGCAEQILGIKGIGVVTAASFLGEVGDPLRFQNARQIARYAGYNLVEDSSGKNKSGTCISKRGRKQLRSVLYQMAFTMVGKNVEMKALYKHLITRKNNPLKKKQALVVVSKKIITVIYSLLKKQEAYDPALVLGAVRQGMLMAA

SEQ ID NO: 407326 - protein, 354 aa, unidentified
MQMVTTIGLDIAKSVFQVHGVDAGGQVVIRRQLKRRSVLAFFQKLPSCLVGIEACASSHHWSRELQALGHTVRLMPPAYVKPYVKRQKNDMADAEAICEAVTRANMRFVLTKTPEQQSCLMLHRTRHLFIRQQTAVINSIRAHLAEFGIVAPVGRKGVTELLHIVADPSDKRVSEVARACLAALGSQLLSLKQQIVEFDRMILAWHRSNQTSKRLHYIPGVGPMLATALVASVADPRTFRSGRNFSAWIGLVPKPHSSGGKERLGSISKQGDRYLRSLFVAGALAVIRYAKNPWHPASALAHGVVGAAPDEGRRHRACQQNCADGLGHDGQGRELQTIRRAGCVNEIAPTSGVM

SEQ ID NO: 407327 - protein, 294 aa, unidentified
MKLMRVGVDLAKNVIQVHGVDRKEQPVWRRRLPRKKWLKVLLETVEPGCEIGMEASSGAHHWARQLKAQGFVAKLIAPQFVKPYVKSNKNDANDAEAVCEAMSRPSMHFVAVKSVAQQDIQAVHRIRAELISQRTAKANQIRGLASEYGLIAPQELHQLRRAIPEWLEDPNNGLSERFRRLLNGLWGDVKRLDERVAELDAEIAAIAQEEPSAQLLQQLRGVGPITATALVAAMGDGAQFANGRQMSAALGLTPKQHSSGGKDRLLGISKRGDSYLRTLLIHGARSVIRTAKHK

SEQ ID NO: 407328 - protein, 351 aa, unidentified
MGGFRKKNSINQKLFTMEKNIIKQNIGVDISKNDFKVAFSTIGSDLQKKVLGSRTFTNNLKGCQEFLQWSNAKKNGHLDLHVTVEATGVYHEHLCYFLCKQQGIKVHVVLPNLSKKYGQSLGIKSKTDKIDAQILAQMGLERELIAWQPINKDLLFLKQMTREREALVESKSAVNNRLHAYTHQGQPNTSSVNRTKKYLIFLDKQILQIEQEIKSFIEGDENLKTKLSYLTSIPGVGFITAVTIVSETGGFESFTNIKQLTSYAGMDVRVRESGTWKGKSKISKKGNSHIRKSLYMAALTASKYATTLQGFYDRISTKKGSKMVGIVAIQRKLLGLMFSLWKNEQMYVQNA

SEQ ID NO: 407329 - protein, 402 aa, unidentified
MNCVGIDVSKGKSMIAVMRPFGEVVVSPFEVRHTASELSELARLLKSLDGETRVVMESTGNYHAPVARLLHDAGLYVSVVNAMLVHDYGNNSLRRAKTDKKDAVKLANYGLDHWLTLPRYIPEEDTRLMLKTCYRQYQQYSKVQTMLKNNLISLLDTAFPDVNRLFTSPPRADGSEKWVDFVATFWHCECVCGLSEKAFTAKYQRWCRKHRYNFSEEKALDIYASACGHFGVIPKTDTAKLLVEQAIFQLRATSAALAALKQEMQSLAASLPEYPVVMEMFGVGPTLGPQLMAEIGDVRRFHSKKALVAFAGIDAPPYQSGQIDVRSRSISKRGSASLRRALFLVMGVILQCAPGDEPVYQFMNKKRSEGKPYRVYMMASANKFLRIYYASVKAYLDSLEHA

SEQ ID NO: 407330 - protein, 368 aa, unidentified
MERSNEMSSKGMKDAVAMAWTGLDVSKAYFDAGLLPPGTDAATVDVMSLRVERFERTAEGVAHFVVWVREQLAEYAGAWRLGAVMESSGPYSAPLADWLLGAVADARVAIENPRRTHGFIQSLGLRNKTDQLEARALALYAAQRKVREYAPLTGVWRELRELSRYRDTLVAQQIAMKNREESMLDAAGFAAKSHARLLKAVAREIKAVDEQIRRVAAADAQLGQDVALLTQVTGVGPVVATTVLAELGNLRRFANRHAAAAFAGLNPHVHESGASVRRRTRQDKRGSGRARQVLYLSAMAVIHAKRDTALKRWYLRLLERGKPKMVAIGALMRKILLVMRAVLIDGHVDANVSKYGGKQSTSLATSKG

SEQ ID NO: 407331 - protein, 337 aa, unidentified
MEREYVGIDLHRRRSVIIRKNAAGELISKVHIDNSAEALVAAVAAAGPGPEVVIEATFGWYWAVDLLQEMGAHVHLAHPLGNNWGNRRVKNDERDAADLVDLLRLGRLAESWIAPPEVRELRELVRYRHKLVRLRAGLKAQVHAVMGKHGVLPTRVDMFGPGGTAQLDALELPDGYARRLASLRALIKTYDKDIAELDRTIATCLVNHRGYHVIQSLNGVGPIVAAVLVTEIGDIGRFPSPDRLCSWAGMTPRHRESDTKVKRGSITKQGSRLIRWAAVEAVSKNHGDDIIKAAYRRIAERRGRNIAKVAAARRLLTLVYYGLRDGEIRCLAGPTRG

SEQ ID NO: 407332 - protein, 380 aa, unidentified
MDKACGLDVHKESVFVCILDEQGKKIFEKRYGTLTPDLTKLRDTLVEQGCGRVAMESTNIYWMPIWHVLESDFELTLTNPYFIKQLPGRKSDVKDAQWIAECLQKNLIKSSFVVDDVLREMRQYTRQHRRLTKSRVRLEQQLDNQLQRCNIRFSNYVSNQGSNVSMRKVIKALIAGERESAKLCRLVHGRTQNKHGKQVIADSLDGVIQQVDIQILTQCMDQLELFEKQQATCLNLLEELAKTYFAKEISLLCTIPGIKILSALFILAEIGNDMSAFPNANSLVGWAGLRPRNDESAGKIHSRKILHGNKYLRQILVEISWSVARSQKSFLGKKYGTLAKRMKSQKALIAITRKILVVIYNVLKTKQPFDHKKNMQANIA

SEQ ID NO: 407333 - protein, 315 aa, unidentified
MTVYLGIDIASKKFDVAELCDGNYRCRAFANTSAGFLAFYKWLNTENKQDIHACLEATGDYGTGLATFLYERNLKVSVVNPARIKGYGASELSRTKTDRADSKLIARFCKAANPERWKPMPAPVRKLQALVRRISALNGMLRMECNRRENADANIQASLDRIINQLKKEIESVRQELHAHVRSHDELKKQDELIQSVPGIGAISSHLILSFISGKEFRKAKEVTAYLGLNPRHHQSGSSVRGKTRMSKMGDARLRSALYMPALTALKHNPDIKAFGQRLLLAGKPRMLVVGAVMRKLIHIVFGVLKSNIAESPRV

SEQ ID NO: 407334 - protein, 482 aa, unidentified
MSKQTMEWRKSERLTRKQRRELGRKIRSDKPGLDVVHQDAAGIDIGSREHYVAVGPDRDSEPVRVFGCFTSELQRLAEFLIQCRIKTVVMQSTGVYWIPVYDVLEEAGLEVWLVNARDTKNLPGRKSDVQESQWLLKLHTYGLLRKSFRPTPEIRALRTCWRERAEYVQQAGTCIQRMHKALTEMNVQLGTVLSDLSGVTGMNILRSIVAGERDGNKLAEFRDARVKASPEMIAKSLEGTWRPEQLAILTRQLADWDHVQQQIQACDRDLQAMMKQMPDAAAVPPAKPPADTDPKPSKRRRKKNGKSSRNEPRFDLESELKRMTGVDLTRIDGVKANTVQTVITEAGLDMSRWETERHFVSWIGLSPRNDLSGGKVLNRKTRKVVSRLATALRIAATTLRESDSYLGAQFRRFRTRLGAPKAITAMASKLARLIYRMLRYGQEYVDRGTAHYEQRHRQQQIQFLARKAAQQGFALVEIGKPA

SEQ ID NO: 407335 - protein, 395 aa, unidentified
MYRLLVGADVSKDFFSAAGVDEEGKELFSGTYEMNSRGFSEFFKTLSSHEERLDQMIAAMESTGCYHINLFSFLSSQGIPTVVVNPLLISNYAKLSLRKTKTDKKDALTIARFLLDHHEEISQFSLSQDHQDLRDLSRERESLCHLISATKVEIKRVLRTTFPELESIGNLYSGVMLRFLQQYPSARLVRGAKRKAIAKALRGPYVGDKLTFTAEDIVKAAQSSVAVVSPAKEIIVQGKIATLLHLQERMGALTKLLTDLCKATRVEDLKILQSIKGVGPNTAVPFLAEVGEVKNFTSSKKLIAFAGLDPSIHQSGKFLGVSKLSKRGNRHLRRAIYLMTTSVVSQNVFFKAYFLRRKKEGLPPQKALFAVAHKLLRVIFAMLSQRTCFKVKEAI

SEQ ID NO: 407336 - protein, 342 aa, unidentified
MKMTTIGIDLAKNVFQVHGVNEHGKVIVKKSLKRDQVVPFFAKWTTCLIGMEACGSAHYWAKKLQALGHTVKLMAPQFVKPYVKTNKNDAADAEAICEAVTRPNMRFVPIKNGEQQAVLSLHRARQGFVKARTAQANQIRGLLSEYGIVIPQGIRHIAKHLPEILTDHVDNLPGVFHQLLQRLGEHLKELDRQVSELEMQIQMWHRQNEASRKLEKIPGIGPITATALVASIGDAKSFKDGRQLAAWLGLVPRQHSSGGKKTLLGMSKRGDTYLRTLLIHGARAVLRTAERKAHYAGSWLANLTGRRNKNVAAVALANKNARTIWALLAHDREYRSDFVAAA

SEQ ID NO: 407337 - protein, 424 aa, unidentified
MPLSSNIFKGMRQMLKIVYPICCGVDVHKTFVVACIASTDDKGVTTYQSKRFNTYTKGLRDFADWLAANNCKDVCMESTGKYWHPVWNVLELTCRPVLAHPKYLKAIRGKKTDKKDAKWIADVFKHDLVSGSFIKPAEIRQLCDLVRYRFKLTNYTTGEKNRAQNCLTTSNIQLDHAFSDVFGKSATAILDYILEHPGENFDVTPFVDRRCKTPIEEIQLSIDGNISHEQAEKLKIVRSHMDSLELCKANLESVILTLAEQFRPQIDLVSSVPGIKDFSAIAVIAEIGVDMSVFPTAKHLCSWAGLAPQCNESGGKKKSSRVSRAGAYIKPLLIQCANAVVKSNKHPEIRNRYLSIKKRRGHKRAIIAIARMLLTAIFHILKKNEPYNQELYRQSDVSPVDRVEQAVKLLEKNGFVVSRSLDVT

SEQ ID NO: 407338 - protein, 361 aa, unidentified
MDVIIERACGMDIHKDSITACVVTPEGKEIQTFSTNTIFLLQLIDWIKQHGCTHVAMESTGVYWKPIVNLLEAEDIEFLVVNAKHIKTVPGRKTDVKDSEWIAKLLRHGLLKANFIPDRTQRELRELVRYRRSIIEESARQQNRIQKVLEGANIKLGSVVSEIIGDSSLEMLRAIADGEEDSIKLASFARRTLKKKKDELELALYGYISPHQRMMLKTILNHIDFLKEQIEMLDHEVAKRVSEYQEDVERLDSIPGIATLMAEQILSEVGTNVKEQFPSAPHMCSWAGLVPGNNESAGKRKSSKTRKGNKYLKSALIEAAHSVRGSKNYLGALYRRMLLEKVKNEQALLSLTQCYVLLIIY

SEQ ID NO: 407339 - protein, 415 aa, unidentified
MHEIQTWFVGVDWASQKHDVWLADANGKRLGKRTFAHSGEGLAQMCDWLVATSGGKPEVIHVAIEVPHGPVVETLLDRGFKVYAINPKQLDRFRDRFSPAGAKDDSRDAETLSSSLRTDRRAFHQVVLADPAIIELREWSRMADDLRADKIRYANRLREQFRRYYPQMLQLGSDLAEEWIFAIWEAAPAPAQAARLRQTEVGKLLKRHRIRRIGAAEVLAILKQPALVVAPGVTEAALAHVPVLIESIRLFTRQLKEVHQQLDRLCKLLAEPVASENALQPEQSLIAIIQSLPGAGMIVLSTLLAEAFEPLQRADYPILRKLCGVAPVTRRSGKSRAVTRRLACNPRLRNAIHYLADAARRCDEKSKAKYLALKGRGCSHARALRTIGDRLLYVACAMLKRRALFNPCLQSQKCA

SEQ ID NO: 407340 - protein, 335 aa, unidentified
MKSYKRVIGIDISTERLDIADSNSKITHEVDYSIDAIKSKILKLIKKPSETLVVCEATGGLEYTLVDVLHDAKIDVVVANPARIRDFAKGHGFLEKSDKIDARVLQLYGQQVKVSLAKPRTLQERNFIALTRRRTQLLQLISQENNRLRQSNDPQVKEFVEEMLKSLQTQMKSVDSWISKALDEQAKTNPSIDVIRSVPGVGPVMTATLVAELPELGTISRTKIAKLVGVAPMIKQSGKSEERRRARGGRGGVRRVLYMATLAATQKNDVIKKRYIKLVASGKPKKLALVACMRTLLTILNDMVRHETKWGEKKKSVAGSVVSNRPAPAHVLDKS

SEQ ID NO: 407341 - protein, 315 aa, unidentified
MAKKVYVGIDVSKASLDVSGLPGVAAFRVTNDAGGIEELVRLLGEVPGRIAVIEATGGYELGLVVALTAAGQTPVVVNPRQTREFARSTGRLAKTDRIDADNLADYGRKMRPKPRTLPDAQVRELQALVRRRRQLVEMLTAEKNRRYLARGYAQESVGRSIEWLKAELADLDKALKDLILASPSWREQAQLYQSVPGVGDILACTCLADLSELGLLNRRQISALVGVAPLNRDSGIFRGRRQVWGGRADLRSALYMAALVATRHNPAIRAFYLRLLAAGKAKKLALTACMRKLLTILNAIARTQTPWQEHATSLT

SEQ ID NO: 407342 - protein, 413 aa, unidentified
MAEETFRWFAGIDWGSATHQACLLDEAGTVVGERAFAHGGAGLAALCDWLVSLAGDPGSVAVAIEVPHGPVVDALLDRGFAVYAINPKQLDRLRDRISVAGAKDDRRDARVAAAGLRTDPHLFRRVLAGDPSVIELREWSRLAEEVQQERVRLGNRVRQQLWRYYPQLLALSDDVTAEWVLALWNMAPTPAQAARLREATLARLLRQHRIRKLDAPAVLAILRQPAIPVAPGVTEAAVLHLRSLVARLRLANQEFRQAERKLEELCTALSETQPTAQDSGPGDATILRSLPGVGPVTLATLLTEATGPLARRDYPALRTLSGVAPVTKRSGKSCIVVMRYAAQVRLRNAVFHWARVAVLNDRRCRGRYEALRARGHSYGRALRGVGDRLLGVACVLLRRGTLFDPDYGSSASA

SEQ ID NO: 407343 - protein, 414 aa, unidentified
MSETVYRRCCGMDVHKDTMVACVWPPDGQAGTVLRKTYHTFRNDLTRMRGGLKLRKVTEIAMESTGVYGRPVWNVLEGHGFRLRLVNPAQVKALQGRKSDGRDAKRIAKFLQDHRLDASFVPPPEIRELRQLLRHRLSLPPQRNEVHNQIRDLFETASLKWSWVASNLLGVSGRRIIEALIGGEDSPELLSWKLRGSLGKKEKLVRESRKGYYHDFHRLMLKTHYRHYEFLSGQVQELEAEISRRMEPYAQQIMALMSIPGVDRIVAWHFIAEMGTDMSVFPDADHCASWAGVSPGSCESAGKQMSGRTKKGNKYLRRVLAQAAWAVSHCKDGYLRALFYRVKGRRGWGKAVVAVGHKILVLAYSILKTGTAYQDLGGDYFDKLHPERTAKRLVQRLQQLGRNVVVTPPAEPTT

SEQ ID NO: 407344 - protein, 403 aa, unidentified
MNSVGIDISKGRSTVAVMRPFGEVVISPFEVRHTDSELSELARQLKSLDGETRVVMEATGNYHASVAKLLYDAGLYVSVVNAKLVHDYGNNELRRVKTDRKDAVKLANYGLDRWLTLPRYIPEEDTRLLLKNCYRQYRQYSKVQTVLKNNLISLLDTVFPNVNRLFSSPIRGDGSEKWVDFVAEFWHCRCVSEKSERAFTSKYLRWCRKHGYNFSEAKAHTIYAEANGHIGVMPKSETTKLLVEQAVAQLRATSTALAALKHEMQTLASQLPEYPVVMDLFGVGPTLGPQLIAEIGDVRRFYSKKALVAYAGLDAPPNDSGDVTGRHKSMSKIGASSLRRTLFLVMSVYLQNAPLDEPVYQFMDRKRAEGKPYRVYMMASANKFLRIYYATVKAYLESLEHTV

SEQ ID NO: 407345 - protein, 330 aa, unidentified
MTTNPPQIVFNHILAFEVSKEQLLVHTLPADEQCAIDNKPQAVRRLIKAEIKRNRNKQLGQMLVVCEATGGYERHVLDAAVEMGLSVHRAHGTRVRHFGGYCGLLAKTDPIDARLLAQYGLKTENIRLYSPPPPETAALRALHARRTEIQQMLIAETGRLDHAQHKSVLKSLKDHIASLKAALAAIEADIAQLVEECEVLRKKVALMQTVIGIGPISAMVVLAYLPDIGRLTRGQAARLAGLAPINNDSGKKRGARHVEAGRTAIRRALYMAAGVAMRTNPIVKAFADRLRGKGYPFKYVVTAVMRKLVVILNAVLRDGQSWRGAQVASV

SEQ ID NO: 407346 - protein, 419 aa, unidentified
MELMYERVAAIDVGKREIAVTVRVPGDGPGAPRVEVTRMYKTFYPVLRVMVAWLVEHRVTQVTMESTGVYWRPVFHALCEVDPGFEILLVNAGHVKNVPGRKSDVKDSQWLAQLLEIGLLRGSFIPPADIAAIREVTRYRKKLIQARTSELQRLGKVCEDAGIKIDSVASSLTTLSARDMLEALIAGERDPQVLAELARGVMRKKIPDRSMALAGRFGTHHAVLARTHLDHLDHLGMMIARLDAQIEEMIIPFGAQVAALCTIPGISDRLAQVIISEIGVDMTRFRTADHLASWAGLCPGNNESAGKHGNTRTRKGNQEIRTALVEAAWATARTNTYLGARFRRLHRRFGKKNGGKAAVAIAHNLLIIIWYVLHDAVVFEDLGADYFTRLGSPATDRRKNQLVNELRALAYTVEITIAA

SEQ ID NO: 407347 - protein, 379 aa, unidentified
MKAITLQLGLDVHKDSITIATAQGGLKDEVRLFGTITNDLQALEKSLIRLRKAHPGARLEVAYEAGPCGFGIARRLQQLGIPCLVAAPSLIPKQPGAPFKTDKRDACTLARLLRAGELTPVYIPEPTDEAIRDLCRARTDAVDDLRRCRLRLKSFLLRHSYRYHGKANWSEAHMRYLRELVLPHPAMKTILEEYLQGIDAAHQRVQRIEASMLNLLESWRLKPAVQSLMSFRGFQLVAAMITVSELGNIHRFSHPRQLMTYLGLVSVEHSSGPRQRLGAISRCGNGHVRWLLTECAEHYVQPPKVSRELARRQEGQPAHVRALSWKTQNRLHLRFARLLARRLQRNKAKVAVARELCGFVWALLRTQACYQQAAGGAAS

SEQ ID NO: 407348 - protein, 351 aa, unidentified
MVIIGIDPHSATHVAAAVDEHGQLLGSIQVGASPQQLQRLVGWVGGFPRPRLVAVEGARGYGLALTRLLLGAGERVVDVAPTLTAAGRRRGRARGKDDQIDATAVARVARQEPGLPALSLDGLNADLKLLVDARDQLVVEASRVRNRLHALLLVLAPGYRTSTGALAKRPALRRAQRLVELAAPDDVVRARLALAAIVRLEALEAECAQLERDVKIALTPRQPTRLLAICGVGALTAAKLLGETHSVDRFASAAAFAAHTGTAPIPVSSGNTQRHRLSRSGNRQLNRALFTIAMCQARWDPNARAYLARKRTEGKSPAEARRCLKRHLANVVYRAMVADAQALQATPTPTA

SEQ ID NO: 407349 - protein, 364 aa, unidentified
MSTITLGVDLAKSVFSVCEVDGSGHVLRRLDLKRDAFAAWLAQVPAGIVVAMEACSGAHHWARRCLEVGLQPRLMAAQLVKPYRLSQRSKNDRNDAEAIATAARQGNMRFVPVKDVDQQARLAWHRVREGYKAESLAIGNRLRGLLAEFGVVVATSDVALRRVLGDLDRAVLPGEFKELLRGLEAHWTEVRKALDACDARIDAHAREDERCVRLHAIIGIGPITADAMVASLGSAKDFRNGRQLAAWLGLVPTQHSSGGHARLGTISCHGEAYMRTLLIQGARSSLQRAKAVSMEKSTPEQIWIRPLACRMCFGKVLVAIANKHARQLWAMLAHDQTYDADAWLKHPMVQRPAGKHAATVAAMA

SEQ ID NO: 407350 - protein, 409 aa, unidentified
MTYFVGLDWAQKEHAVWVLDERGGTVGKVTVAHTAAGLTELKERLGRIAPPSEMRVAIERPSGLLVDTLVEQGFTVVAIHPNAVKASRPRYSAAQGKTDLGDAYLLADLLRTDGHRFRALAPLSDETKALRGLVRVRDDLVAQRVALANQLRCLLEQFWPGAATLFSDVESPIALDFLDRYPTPQVAATLGEKRMATFLARHAYSGRRSAAELIERLRGAPSPVAGDAEAEAKGECVRAFVAVLRPLVAQIATLTSAVEHAVETHPDGKIVTPLFRSGRVCAGQLLAELGDDRARFVSAEHLAAEGGVAPVTQESGKHRAVTFRYACNVRLRVALTTLADSTRHTSPWARALYQRARDRGCLHSHAVRIVARAWCRVLWTCWQKRVAYDPTKHRAARDLTLRAVDQEAA

SEQ ID NO: 407351 - protein, 430 aa, unidentified
MKSNTQNAKIEAITEKTLVLGIDVGSETHYARAFDYRGIEYSKKPFKFSNTEAGFVTFKEWILDLKERHEKDKVVPGMEPTGHYWFNLGKFLQDNEMKPVLVNPHHVKKSKELDDNNPTKNDRKDPKVIAGLVREGRYMIPYLPDGVYADLRTASNIRFQLQAELTRIQNRISRWFNIYFPEYKTVYGKPDAKSGMLILKAAPLPEDILTLGIDGVNQIWRDAKLRAVGKARAKTLIEAAEHSVGSKEGAVAARMEIRMLLEDYESRNTRLQEVMILIEELVRKIPMAEKLLEIKGVGIRTVSGFLAEVGDISRFNNPKELQKLAGLALVENSSGKHKGETTISRRGRKRLRYLLFEVAMSLVAKNPEFRELHNYYTTRRLNPLKKMQSLMAIAAKLIRVFYAMLTKGVDYDPKKMVSDIKRPAVYLQAA

SEQ ID NO: 407352 - protein, 323 aa, unidentified
MICTKRSSRRALTPRGERTWEGRFPRTADGIARFVARGVGPHQAIAVEASGPTWAFVDAMAPTGAAVCVVDPRKTKLKAGFAAKTDRLDARRLADALRRESVVSIYVPPPAIRELREVCRGRHQVVRLRTRVAQMIRALLLRCDAGEPPGTRLYAPRARAWLAAVQLAPDADHTLHRLERVYRAVHADASDADREVRQRAATDPIAVALAGLVGIGPVMALTLRAEIGDITRFRRGPALACYAGLVPRVDWSADRRYQGRITRDGSPWLRWALVEAAMHALKRDDATGRWARRLAVRKGIHKARVALARVLCDEVITTWPRTA

SEQ ID NO: 407353 - protein, 263 aa, unidentified
MTFRPHALHLKAELFVKSSRVHVRDDGFTRCNFHLKFFIMVSRGIDISKSSFVAAYPSTNGNPTKTFPNTTARMRELIGTLAVAEHHCVMEATSNYGCCCTCYISFAPPKKQIKHFSRMMMPVTKTDEKDAYMIAMYGEKMNPPIYKMPSQATIRILTTEGFTYFDNAKQLSRFIGICPTYQQSRTSVNIREHINRNDDERLRSLLYIAFWTALRYNSRECYIRLKANEKPFKVALIAVTNKLVRPVLTITTINSIYRWICPG

SEQ ID NO: 407354 - protein, 343 aa, unidentified
MQTMTTIGLDIAKSVFQVHGVDAGGQVIVRRQLKRRYVLTFFQKLSPCLVGIEACGSAHHWSRELQALGHTVRLMPPAYVKPYVKRQKNDATDAEAICEAVTRANMRFVPTKTAEQQSGLVLHRARHLFVRQQTSVINAIRAHLAEFGIVAPVGRHGVEELLNVVTDPNDKRVPDIARACLSALGDQLQSIKQQILEFDRLIRAWHRSNEMSMRLEAAPGVGPVLATALVAAVADPKSFRSGRNFSAWIGMVPKQHSSGGKNRLGNISKQGDRYLRGLFVAGALSVIRYAKVHGTKHRPWLTALLARRPTKVAAIALANKIARMVWAMMATGERYKEPVALAR

SEQ ID NO: 407355 - protein, 367 aa, unidentified
MKKNSTVKQSPKRAKVLARSPITIGLDLGDKTSRYCVLDANAKVQGEGSVATTKKAMTQKFARLRPCRIALEVGTHSPWLSRLLSSFGHEVIVANARQVQLISASSRKDDRMDAQMLARLARVDPQLLRPIRHRGEKAQQDLLTIRVRAALVEARTSLVNAARGLAKAMGERLPSCDTDSLSVERLESLPEKLREQLKPLVKEVESLTAEIQQLDQKLEQIARTEYPETELLRQVCGVGPLIALTFVLTLEDRGRFEKSRDVGCYVGLRPKRSESGDSQPQLRITKEGDLYLRKMLVQGAHCILSRRAPDTDLKRWGLRLAERGGKNAKKRAVVAVARKLAVLLHRLWVTGEVYEPLRNSTAKKVAA

SEQ ID NO: 407356 - protein, 407 aa, unidentified
MQKRENLLYVGIDLHKETHTAVMVNCCNEKLEVVVIENKPSEFKKLAEKVNRKSSILGLNPIYGLENAYGYGRSLAVWLIENGYIVKDINPALAYDQRKSAPMYRKNDEYDAYCVATVLINQLHTLPDAKPKDNEWTLAQLVNRRDLLVKDGIRFKNGLHEQISMAYPSYSKFFSEIDGKCAMYFWKTYPSPVHLQEKTAEDLTIEFKEISRIARRDKAELILDCVQNDGDTFREYQESRDFITTSLVRDLEHQKEELAGLDKEIEKILLSFDYKLTSMPGIGTSIASKLIVEIGDIRRFSNADKLARFAGVAPVKFSSAGKGKEQSSRQGNRQLHGLFYFLAVTMVSRPKNGAPNHPVFYDYYMRKIGEGKTKSQALVCIMRRLVNIVYGIMKNKTEYREPLPEKE

SEQ ID NO: 407357 - protein, 342 aa, unidentified
MDLKDGNDTAATVWIGIDVSKDSLDVCLLRATGKEKYKNFSNDAASHAKLLRWVQHLVGEEGCHYCLESTGSYSMAVAHFLAEAEQRVSIVNPARIKYAGMAQGVGNKTDKADARLIAGYCRKEEPALWRASAPEVRVLVALVRRLHSVQEFVVQEQNRLGAPGLPMAVRTSLKKSIRFLEAEVQRLQKQIKEHIDKHPGLKADKELLLSIPGIGETTAHELLGEMPDVTQFASAQAMAAYAGLCPREHQSGSSVRKRTRLSKQGNSHLRKALYFPAVSAVQWNAPVKAHYERMREKGKGKMVSLGAAMRKLLMICYGVLKNRLPFDPNWQQKRQQPLVAAP

SEQ ID NO: 407358 - protein, 371 aa, unidentified
MKKNSTVQQSPKRATARKEGPITIGMDLGDKTTQYCILDEQGEIVQEGSVGTTKKALVQKFGAHRRCRMAVEVGTHSPWLSRLLTSLGFEVIVANARQVQLISASSRKSDRMDARLLARLARMDPQLLRPIRHRSERAQTHLMVIRVRAALVETRTSLVNTARGLAKSMGERLPKCDADQMGVERMEWLPEKLQEALRPLLEQIESLTEKIKESDGRIEQIARTEYPETALLKQVKGVGTLIALTFVLTIEDRERFRKSRDVGCYVGLRPKCSESGQSRPQLRITKEGDVYLRKMLVQGAHYILGYRGPDTDLKRWGVGLASRGGKNAKKRAIVAVARKLGILLHRLWVTGEVYEPLRNSQAGASARTVAA

SEQ ID NO: 407359 - protein, 404 aa, unidentified
MYNAVGIDVSKGKSTIAVLQPGGVIVRKPFDVFHTSQSLKELSNYLASLEGDTRIVMECTGRYHESMANSLSNAGFFVTVVNPHLIKNFGNNTLRKVKSDPADAKKIARYTLDNWAELRQYSCMDNTRNQLKTLNSQFSFFMKQKVAAKANLIALLDNTYPGVNKLFNSPAREDGSEKWVDYAYSFWHVDCVRKTGLKAFTVRYEAFCRKHHYIYQPSKPEELFNASKELVAVFPKETSYKLLIQQSIQQLNLASAHIEQLRREMNALASTLPEYEVVMGMYGVGKTYGPQLIAEIGDVSRFTHREAITAFAGVDPGVEQSGQHNSKSNKASKCGTGRLRKTLFQVMTTLLQNAPENEPVYQFLNRKRSEGKLYYVYMTAGANKFLRIYYGKVKAHLRSLEQNE

SEQ ID NO: 407360 - protein, 356 aa, unidentified
MQTQFTKKIDFSGKELFIGLDVHKKSWSVTILVEGMEHRTFTQPPDPKALFNYLQRMFPGGTYYSAYEAGFCGYSIHRQLNSLGIKNIVINAADIPSSQKDHLEKRDPIDSRKIARALGKGLLRAIHIFDRDMEELRSLNRTRFYLMRDLRRSKNRIKSFLQYYGESIPPEFDNNQWTLKFISWLKNIKMQTLSGQDAFSNLISSYEYHREQILTLSRQIRQRVTEYDKELYTLLKTISGIGPLTSSALITELGDINRFPHIDHLSSFVGLIPRVKQSGETSYSGGITFRCNEYLRTLLIEASWQAIRQDPALMQYYHEHLINNKGQKVIIKVARKLLNRVRYVMKNRQPYVTGVA

SEQ ID NO: 407361 - protein, 332 aa, unidentified
MVEGTMGSHHKERSTKMNKHNMLCAGIDTGKRKLEVALTSGLRLQIDNNAEGHAALSGWLRKHRIKRVGIEASGGYEREVVAQLRRWRFVVVVFQPAQVRAYAKFHLQRAKNDKIDAALIALCTADVRKIHAPPDARLIPLAERLTFMEQITEDMARAKNRHESCRDPRTKRHWEAEIARLKGVLRIELKALVADIRQHSDLSKRLDLIASVDGLGIRTALAIAVRMPEIGRVTRAQAAALVGLAPFDHDSGDQVGVRHIEGGRERLRKALYTAALPAVFLWNHQLKLMYRRLIAAGKPHKLALVACARKLLIYANTVVERGTSWTSLRAAA

SEQ ID NO: 407362 - protein, 449 aa, unidentified
MASKVRSWAGLDVHAAKVVACVVDAESGEMSLHRLSGATDEVVAFCAGLPRPTRAAYEAGPTGYGLARALEAAKVGCVVAAPGKIERPTQDKLKTDARDAERLVRLLMIDALHVVRVPTPEQEALRDLVRAREDVRVDLIRARQRLSKLLLRHDVRYDDTTSRWGERHRAWLAQVDLGQSGAQATLSDYVGAVEALELRRGTLETAIAALVPYTPCAQAVARLRCLRGIDTLSAVGLAVEIGDFERFQRPGQLMAYVGLVPSEQSTGQTRRQGHITKSGSQHARRLLVEAAWHYRRAPRLGTTLARRQQDQSQVVTAIAWKAQQRLHHLWRRLDSQRHMRRTIVAVAVARHLAGFCWAIVNYHDQEPADQLPRRSEPSRARARRRVTDAGLQSSASRSACGRPTGDSSAGHPLCGSEVGPGGPTTGKAVAKSNAPHAGDRPARTRRSHP

SEQ ID NO: 407363 - protein, 345 aa, unidentified
MKIVGCDLHTRYQQIAMLDTETGELIERRLEHAHGEARAFYASLQGNVRVGVEATGYTRWFERMLAELGHELWIGDAAQIRAAMVRKQKTDARDAAHLLQLLVEDRFPRIWRPSMAERDLRQLVWHRQKLVWMRNAIGNQLHALAMGEGLCRKKQLWTKQGRAELEGLRLDEWASYRRQELLEMIDQLDGSLKKLDEAVEEQSQQNEAAVLLRTHPGVGPVTSLAFVLTLGPVERFTRSKQVASYLGLNPREHSSGGKQRLGAISKQGNPMMRSLLVEAGHSAARLDAELHKDYQRLKLRRGSGVAKVAIARKLAVRMYWMLRQQANYAQLVRMQGSPWATLVEQ

SEQ ID NO: 407364 - protein, 315 aa, unidentified
MDYIGIDISKDTFHVAWNDVAEVSVFANDNEGIDSFEDSLHHRQFQKEHTKIGLESTGIYHLLLCVLLTDHGWDVNVINPYITSKAIHATLRHVKTDVKDARAIRSVLIAGHGYRFTDTPAILKLKALLREYAALVKLKTRCKNLIRVHETYQKTTEKRINSVFPRLCLSLEKNLKEMRRQLGKTESETQTLLQSIPGIGPVCSAALVGYIGDIRRFDHPGKLVAYLGLDCRVHESGTSIHGKGFLTKRGNGTLRSLLFNAAFIARQHNPDLQRFFEKKIAEGKHYCVAMCAVERKLVHLIYAVWTRGSPFEKRP

SEQ ID NO: 407365 - protein, 349 aa, unidentified
MKKIIVGIDVSKEKIDASAILVTGNQLGMQKLDYQTFENRPMGFRRMVVWAKHLVKGITLDDVMFCCETTGAYDHKLCDYLFAKGLDIWRESALQIKKSSGLRKGKDDKADSLAIAEYAMRHADKAVYYVSPSQDIRELKELLLYRHKLEQEKASTTVRVTGLKATAGKSPSRNFILRDAQKRIKQLEKSIKECEKQILEIYGRNEEMKKSYTHITSIKGFSIVNATAMIAYTNNFKNITSSRKLASYYGVAPFREKSGTSIDKKAKVNCYSNTMLRSYLTMAAKHTIKANGIYFDYYNRMIAAGKCYGIAINNVKNKLLNLSISLVKNDMDYEACHEYKRLQGKAELA

SEQ ID NO: 407366 - protein, 409 aa, unidentified
MKLFVGLDVSSFDIKVCFLNGEGDKLSSFTVDNDLPGATQLRDEILHAVQGKSVSELRIGLESTSVYSFHPSMFLHNDKFIQALGGQVFVMNPKQIANFKKSYSDMDKTDEIDAFVIADYMRFGRLPMSIVKEEQYVALQQLTRARYQLVRQVTQEKQRFLQYLSYKCNTFTEDVESSVFGKAMMDFFLESYSLEELSCMDLEDLADYLRVKGRNRFPDANQVAKSIQKAARSSYRLDKVVEDSIDAILSTSITLIRTFEKQIKELDKSIERIMKGIPQVLQSIPGIGPVFTAGIIAEIGQVERFDNEEKIAKYAGLYWRKHQSGRFTADHTSLSRNGNQYLRYYLVEAANSVRRQIPEYSEYYAKKYQEVPKHQHKRALVLTARKFVRLVDALLRKNQIYTPKRSVDI

SEQ ID NO: 407367 - protein, 392 aa, unidentified
MRICVGIDAAKTIHWAVAVDEGGRVVLDRAVENDPAAIDALVADLRGLDGEVVIGIDVVGSFARFLEATLLTEGFAPVHTPGIAVNRAGQGFAGGERKSDPRDARTIAELVRTRPLRPILPNDDTRVALRLKVGRRRDLIEDQTRRLSRLRGLLCGIHPGLERALDVTCKGPLALLSRFVTPAEIRRAGKARILAHLKKTPHLHGTPALADRALEAAAAQTIAMPGEAATAALIRELAAEALEAKAKVARIDGDLEALLADHPDGALIRSLPGMGAVLTAEFLAATGDFRRFGSADALASAAGLAPVQRQSGKRNGWRRAFGGDKALKRVFYQSAFCAVSGKDPLSKAFYDRKRREGKHHTQAIIALARRRVTVVWTMLQRREAFDPGIKAA

SEQ ID NO: 407368 - protein, 320 aa, unidentified
MRNAVGLDISKLTFDAFAMVGNAEYSAKFDNNSKGLNQFSDWLKSLGCQNLHICMEATGNYYEEVADYFAQYYSVYVVNPLKISKYAESRFKRTKTDKQDAKLIAEYCRSAQESELVKRQKPTDEQYRLSRMTAAYTQIKSECAAMKNRHHAAKDEEAAKAYAEIIKAMNEQLEVLKAKIKEQTEKPKCKEGVKCLETIPGIGRMTAAVLFQYLTSSAFETSNKFAAFAGLSPQQKESGTSVRGKGKLTKFGNRKLRAVLFMPAMVAYRIRAFPDFIKRLEAKKKPKKVIIAALMRKLAVIAYHVHKKGEDYDPSRYKLA

SEQ ID NO: 407369 - protein, 344 aa, unidentified
MNLTRIGLDLAKNVFQVHGVDRRETVIAKRKLSRKQVREFFEKLPPCLIGMEACASAHYWAREFGRMGHQVRLIPPQFVKPYVKSQKNDANDAEAICEAVGRPSMRFVAVKSVEQQDVQAIHRIRSELVRQRTAKANQIRGLLAEYGVCVPTGIGALRRALPEIQEDAENGLSGLFRRLLTGLREDLESFDTRVAALDQEIEIAARGDVMAERLQSIPGIGPMGATALLAAVGDARQFARGRDMAAYFGLTPGQHSSGGKERLLGISKRGDSYLRTLLIHGARAVLKVAGRKTDPRSCWVMNVAARRHKNVAAVALANKNVRIAWALLTQGGLYDARHGMAAAA

SEQ ID NO: 407370 - protein, 323 aa, unidentified
MNKYKETFGVDISKNVFDVFGSTSGHNQFNNDEKGFKSFLKILSNDSIVAMEATGYYHYRLAQFLYKNNVAVSVVNPLSVKRFIQMKLAKVKTDKSDAKAICEYSLANDVPLYNAFTDVQAECLQLFRLMDSYLKKRTATKNKMHGEETLGIPSKFVYRSLKRDKEHLDKELAGIEERLLELVRQEQQHQLTLLQTVPGIGAKTALFLIVVTDGFSKFETGAQLCSYVGITPTTRESGSSVRGRSRISKVGNKKLRNLLFLCAFNACKYNRACQALYQRIVNKGKSKKLALIAVTNKLLKQCFAIAKSGLPYDADFVSVLAEK

SEQ ID NO: 407371 - protein, 387 aa, unidentified
MIFVGIDVAKDTHYAAVSDDSGAVLVKPFAFQNNAEGFCLLLKKLSEFDRSKLLIGLESTGIYSENLICFLYESGFRLAVINPIQTATLRKTAIRKTKTDKVDTMLIIKSLMVNSYRLYSQRDADSLKLRTLCRFRQNLKKSKARLKIQLAGYVNLVFPEFGKFFKSGIHIAASYALLKKYSSPKEIAALRTSTLCTLLSKASHGRFGKDTAEALKSLALSSVGVKNPYISIQIAQTIAQIELLEQQIKDLNSAIEEAMESINSVLMTVPGIGAVNAACILGEIGDIHRFSSSNKLLAYAGLDPSVYQSGNFQAKKTRMSKRGSKVLRYALVNAAHNVVKNNATFKAYYEAKMAEGRTHYNALGHCAGKLVRIIWKMMTDNVEFNLD

SEQ ID NO: 407372 - protein, 331 aa, unidentified
MFPVGIDVSKNTLDLCMLYDGIKGRIKTRNIQNNRHSVENILRWLRLQHCSPEDVHVVMEATGVYHERLATELHDAGFQVSLANPHRSREFARGMGIMTKTDKVDAYMLACYAFLKKPHRWEPPAPEIRYLGALLRRRDVLLGDALREENRLEKYLSTDTPADIISSCRRMAQLLREEISNIERQIKAHIKASPALRRDYTLLTSIKSVGPQLGMHMLVVLRSHNFVSAEQAAAFLGVVPIEKRSGTSVRSRPRMSKIGPPQLRAKLYMSALCGKIYNKRMRNIYDEMCLRGKPEMVAIGALMRKLVHWCYGVLKTGTVFNDEGLKPVLSS

SEQ ID NO: 407373 - protein, 307 aa, unidentified
MFVGIDVSKQWLDVHIRPQDRSFRVERDVKGLSVLIETLGDGPVAAVAVEATGGFETIVAATLGAAGLPVVVINPAQVRHYAQAIGRRAKTDPIDAEVIARFAEAVKPQVRPLPEAAAQVLGELIARRRQIIEMLVAERQRLRRLTVKGLVESARRVITVLEQERTALDQEIAGTVRNTPVWREREDLLASVPGIGPTIARTLIAELPELGSLDRRRIAALAGLAPFTRTSGQWKGKSFIQAGRAHVRSALFIASLVAARYNPPLRVFYEKLRDKGKPKMVALIAVARKLLTILNAILRDKKPWQIA

SEQ ID NO: 407374 - protein, 315 aa, unidentified
MTKINITTAGIDTSKAKLDVAVHNRTERWQVANTLSGWRVLAANLAKAGVTRVGIEATGGYERGVVEHLRAAGFTVMVLQPIQVKAFGRVHLRRAKNDELDAALIAACTAALDQPKIAPDPRLAELARNLTFLEQIEEDIARFKTRLEHIDEPRLRRLVTSDIARLKARRAAQIRDIAKHLRGHDDLARRLALVLSIPGIGERTALALIIRMPELGQISREQAAALAGLAPFDDDSGQHRGQRHIAGGRGRLRKSLFAAALPAAFRWNKALIALYARLIAKGKVHNAVLIACARKLLIYANTVVQRGTPWIENAA

SEQ ID NO: 407375 - protein, 262 aa, unidentified
MQVTTLGLDLAKNVVQVHGVDAQGHVVLRQRFSRAKVLPFLAQLPPCLIGLEASGGAHYWARELSKLGHTVKLMSPQFVRPYVKNQKNDANDAEGICEAVSRPHMRFVPMKSVDQQDIQALHRIRERQIKARTALVNQIRGLLAEYGIVIAQGVSKVRHALPALLEDADNALTWNGREWLSALAGELRLLDQHITETEQKLQRVLERDEACQRLAQLEGIGPLTATALEAAVGTAPTFQNGRQMAAWLGLVPRQHSSGGKPT

SEQ ID NO: 407376 - protein, 395 aa, unidentified
MMNEIGNQGKGRVVGMDIHPTVFSASALENTNAQTARELSMHDQLDMDDLERWYKKNNQPGDIYVMESCNNSFETCERLRAMGAHVIVLESFSVGQIHTAYLKNDKFDARKVARVYLSGLAKTVWQPDEKTRERREVLAVYERSKRDSTRCKNRLWSWLTQHGIKRPKGLKLAEESGLQWILQCREWSDRQEFLIKTMHTNLVQAQSKRKEIKRLMAVEIAEDIELLKLQQLCGLRLITIYALGAIIGDISRFKNPKKLVAYIGLQPGVNQSGITDKGGPLKHTGRKDLRALLVQAAHAILRMAPATNNLATWGRAMTYRKCRNVAAIAVARKLTVYIWYLLRGFFTPLDNLSTSFRTKLQKLAVEIGTQQRREMGYKTIKDFIQKKEKLLLAGT

SEQ ID NO: 407377 - protein, 348 aa, unidentified
MDELSTIGLDLAKTVFQVHGVDTQGAVALRRRLRRSEVLKFFARLKPCLVGMEACCGAHYWARELMALGHAVKLMPPAYVKPYVKRGKSDTADAEAICEAVTRPSMRFVPVKSAQAQAMQSLNKVRTALVGQRTQTINTLRSLLAEFGVIAPQGAAAVRKAWAGLAEDALPAAANLALSELVRNFATLEEQIKRREVEILAHNRASELSRRLAAVPGIGPITAFALSASVPDAGAFRSGRHFAAWIGLTPRQHSSGGQERLGHISKMGNQDLRRLLVMGATSILRRAAKEQTPQGQWLRNLLARKPARLVTVALANKMARIIWALMARGDVYRPQPAWAASARINQPA

SEQ ID NO: 407378 - protein, 344 aa, unidentified
MLYVGLDLSRKRLDWQALDREGERVAVGAVPPDRDGLAGLAQRLDDVPVLGVIESMSGARFVHDQLELAGWDVRVADAVKARGLAPLACKTDRIDCWVLAELGRLDLVPEVWLPDAAVRAERERARFRLHLVKHRRALKNRVHAILFQHGLPNPHRDLFGAGGRCLLTRLQLGEPWASTVKASIELIDELDQQIDECERELRRLGADHRYVPLLTTLPGVAWVLGYTIASEIGDITRFASPRKLVGYTGLTPRVEQSGERDRRGPLRKNGPDYLRWALIEAAHTAGRDPRYRPIVERMRARHGRKRGSKIAAIEIGRRLSEAIWHMLTNDKPFAPAGAPTPLAA

SEQ ID NO: 407379 - protein, 350 aa, unidentified
MLHAGLDLSRKRLDVCLLSEHGELVEEFSAPPDADGLRGLVRHVGKHGVPVRGVIESMTGARFVHDTLEQLGWEVLIADAQKVKGLAPLACKTDKIDARVLAVLSERDLVPAIWLPDPRIRSEREQARFRLHLVKHKSMLKHRIHSTMLSFGHPCPVTDLFGAAGRELLERLEIPDPWRQTVDASLKLIDDLERQIAEINRDLKASGAEHPYVPLLLTVPGIGWVLAFTIAAEIGDITRFASAKKLCGYTGLCPRVHQSGESDRRGPLTKQGPKYLRWAMLESTMRALRHPAYAERYQRNKKRLGRQRGARVAQIDIARKLTEAIWHMLTNNQPFAPTPASGGAALRLVA

SEQ ID NO: 407380 - protein, 394 aa, unidentified
MKLIGIDIGKNKHFFCIMDQQTGEIISQPISFSNDKEGFDFLIQKIKSYSKDSVLIGMEDTGHYHFALLKYLLDLQYTVALINPKTTDFNRKMQGGITKNDKLDTINICDVLDTPERKKQYRISKVNSFDLYEQKQLTRHHHNLKEEENVYKNRLQKCIDIVFPEFNKLFNSKYGTVYMNILKTFGSAENIANTDIRTIRKCFEIEGRGNRISLTPERLKECARSSIGISSSAEVIQIKHLTAQIELIEEQLTEIDKKIEEFSIQNNSPILSIPGISHFSGTSILAELGDISNYSKPSQIIKFAGVAPLHYESSQFNAQHTSITKKGSKYLRKTLYQIILPVIRHNQVFYKYYQLKISQGKGHRCAQGHCVRKLLRIIYHLLKTNQQFDPQLLR

SEQ ID NO: 407381 - protein, 321 aa, unidentified
MNYVGIDVSKATFVVAYSSAKGSETKTFENTIKGVHKFIQTITPEDTHCVMEATGNYSMLLVYLLSKAGITVSMENPLKIKNFTRVMLSVVKTDEIDARMIAMYGEKMNPAPFKLRSDSLMVLKQKRTVLRQLKKQLNANTNLQESMEALPFIDSVCKKILDKTMKFLRKQINEMEKELSSIANIEYRKQMDLLTSIKGIGVTLATALIVATGGFTYFDNAKQLTRYLGLSPTYQQSGTSVNRKGHINRNGDSYLRSQLYVAAFSSLRCNTECKACFDRLRANGKPGKVAVIAVANKLIRQAFAVVTQGKEYVDGFISAKK

SEQ ID NO: 407382 - protein, 492 aa, unidentified
MKKSKAKQSVYRNQNSLIRALFERAGNSRKVLCVALDYAKRKHVALICDGNGDVLKSSFPVENNAAGIEHLLEEISATARHRKIPADQVFLGGEDEAAYVANFTQALRLKGYLVVRVNAYEAKENRENLLASTDGLDLLGIAKTLLSRRARVTGDAANANPAYRHIRDLSRCRRTLVRQQTAASNRIHALAEQLFPGFLNGSKSALTPFTEASLELMRERFSAPEIARRKPAALGNLLRRHRVHHPDQTAAEIILLAREALPPAAARVASLQRTLAATVDLYACLRRNALELRSEAALLLATTPYVMLTSIPGIGFVLAAGLAGELGEPSSLSRLDSLCAYAGIVPRTFQSGGPDSPAIQGHASPRCNRILKDWTVQSAQKIHLYGPPELKDRITRWNAEGRHGLFAGARHNLRLASALVKNEIPYLAPEGRGRHATPAQIETATQATWAILLKKWRTISGGPDLILDQAHPLGYWRNLMLEIHGIDLPGRP

SEQ ID NO: 407383 - protein, 362 aa, unidentified
MFRPHTLYIRIRIVRKVSEPAFAMKDQDVTDVIRRKQQTAMRYIGIDVSKATFVVAYSSDKGGEIRTFNNTTTGIKQFIGALPKDGSIHCVMEATGNYSALLLYMLNVAGITVSMENPLKVKNFAKAMLSTIKTDKSDARLITLYGEKMNPRPFKVQGEAILRLRQKRTVIRQLTKQITAMSNLRGSLACLPVPDKGATHTVDETIEFLEKRRDRLQSELTDLVEVEFSRQLALLTTIKGIGITLATALIITTGGFTYFQNAKQVSRYLGICPTYEQSGTSVNIRGHINRNGDAYTRGLLYVAAWTASRFNTKCGETYTRLRQNGKPGKLAMIAVANKLVRQAFAVVTHDKEYVDGFVSNRP

SEQ ID NO: 407384 - protein, 342 aa, unidentified
MLHVGMDMHKRFSVVTVIDDEGKEVVVGQKLENQEADLLAFFKGLDEEVRVVLEAGPNLMWMCDLLDDCGIDNLLCHPSKTKAITAARIKTGKLDSKILSHLLRADFIPEAYKPDAGTKATRELLRYRAFLMRERTRTKNAIHALLTRGNIPNPYSDLFGKAGLSYLEGLRLLAVRRAALDGYLSLLSRLGEEIAAAEQRVRGKFKNSPQARLLSTIPGVGPLLSLTILSEIGEISRFGAARQLSSYAGLVPSTSQSGGVTRHGRITRQGSRWLRWALVEAAIHAASRPGPLRDFHLKLKKSKGNEVARVAVARKLSTYAFHMLKQEKSFDEIISGKNGDLG

SEQ ID NO: 407385 - protein, 345 aa, unidentified
MTEAYDGRQVVGMDLHRRRSVLVRMTEDGRKLETARITNSPAALRAVIARAGKNPRVVIEATYGWYWAVDVLEAAGAEVHLAHPLGVKAFSYRRVKNDERDAADLADLLRMGRLPEAWIAPPEIRELREISRYRHQLVKARTSLKDQVHGVLAKLGIPVTHSDIFGVHGQAWLDELPMPQPYAGKVASLRQLAGELSAEITLLDTVLADLLAGHEGYAAIRQLPGIGPVLAAVIVAEIGDIRRFPGPGQLASWAGLTPRHYESDTKVIRGHVTKQGSRMLRWAVTEAIQRQPAGSRPGQVKDAIIARRGKEAKNIAKVAAARELLTLVFYGMRDGRIRRQARPAA

SEQ ID NO: 407386 - protein, 344 aa, unidentified
MSKVSIIGLDISKHVFHAHGADGRGRAIFSKRISRAKLLDFFATQPSCTVALEACGGAHHWARQLAQLGHEVRLIPPAYVKPFVKRQKNDAIDAEAICEAAQRPSMRFVAVKSEEQQAAGLVFRTRDLLVRQRTQLINAIRGHLTEYGWVAPKGPSHVAMLADLIDEEEMANSLPGAARAMLRVMLDLLTELSSKIADLDKEIARRAREDEVSRRLMTVPGIGPISATAIAALAPPAETFAKGRDFAAWLGLTPLQRSTGGKQKLGATSKMGERTLRRLLIIGSSAVVKQASKRGARRGSWLEQMLARKPRMLVTVALANKMARIVWALLVKRETYRAPVAARA

SEQ ID NO: 407387 - protein, 380 aa, unidentified
MTNTYYIGLDVHKETIAIAVACGANRDEAAYHGQCGGSVPAAVKALRALAEKLGVGFSDLKVCYEAGPTGFVLARRLIRYGLDCVLMSPSKTERKPNEKIKTDKRDACKIAKLFRNGDITVVRIPPVLDEAVRDVCRARTDATDDLSRSKQRLGAFLLRNGFNYTGKSKWSAAHMRYLRELVMPHDAQKIVLEEYMQAIDTGIERVARLADRMKQLLGGWEWEPIVRALMACKGFQEIAAMTVISELGDLRRFKHPRALMAFLGLVPGEETSGSKRRQGAITKCGNSHCRWMLVECAQHFRKAPKVGSALTTRQEGQGKAVKELSWRMQNRLHTRYVKLKARGINENKAIVAIARELSAFIWELQVKLNLPMPAVAPPGK

SEQ ID NO: 407388 - protein, 313 aa, unidentified
MYEEVFVGIDISEDQLDVHVLPKDKHFVSKNDSKGISKLITRLQKDRPTVIVMEASGGYEIDVASDLGSVGLPVVIVNPRQVRDFARGIGKLAKTDKIDAYVLARFAETTKPVVKPLPTEKERELKELVARRRQLIELRASEKNRSHRARSKRVRDSIATIIKALDQEIKEIDDDTQSLIKNSPLWREKEDLLTSFPGIASRTATTLVAKLPELGQADRQEIACLAGLAPLNKDSGKMRGKRMIAGGRAEVRQALYMAAVSASRFNPLIRPFYLRLIQAGKPVKVALVACMRKMLVILNAMIKRKQPFQASCP

SEQ ID NO: 407389 - protein, 341 aa, unidentified
MGRMIGVDLHKNSFTSCSYKSEDDYKLKTHRVSPKGLAAFKESLTRHDELAVESTGNTAFFVREIESKVKRVRIVNPIQFKVISSSVKKTDEADALTIAKFLSKDMIPEVRMRTKEQSQIASLIGTRDKFVKLRTALKNKIHNILNANGIVTKPEMFSSEKGFEKIAAIELEDSYRFEVDLIVEQIRNLNEAVDKINDELKTRGQNIEGHKNLTSIKGISDIGATIFLNTIGDINDFKSDKQLAAYFGIVPRVYVSNNTAHYGRITKMGNKIARTALVQSTLVAIRYSPYLRRFYDKLKAKKGSGKAIIATSRKMLGIIYNTLKNNWVFEDFTRFKLVGCA

SEQ ID NO: 407390 - protein, 346 aa, unidentified
MFYAGLDLSRKRLDFHLLDAEGVTVEVGAAPPDADGLRGLSERVGRHGAPVRAAIESMNGARFVHDQLEQAGWQVEIADALKVKGLAPLACKTDRIDAWVLAELSRRQLVPAIWLPDPEVRAERERARFRLHLVRHRSSLKHRVHALLLAHGRPCPVSDLFGASGRALLERLALPEPWAGTLRASLRLIDELEQEIAACEHELQRLGADHRYVPLLMTVPGIGWVLAYTIAAEIGDIARFPAPHKLAGYTGLCPRVYQSGESDRRGPLAKQGPKYLRWALIEASTHASKHPLYRARYQRTKTRLGKQRGAKVAQVELARRLAEAVWHMLTRNQPFAPAGATNPLAA

SEQ ID NO: 407391 - protein, 348 aa, unidentified
MAVYIGVDFHARQQTISYLTTEDGEIKRQQLDHGEAREVRKFYQQFRGQQVLVGYEASGYAAWFEELLEELGYELWVGHATAIRTFARRRQKNDRRDADLILDLLVRGDFPRIQRHSKVSRAVLQQLRYRQRLVKMRTMVINSLVFMGASRGVSLRTQLKSRRGLARLKQLALPEPLGQQRTELCQLLLEMQVKIKTVEQWLEEQANSDQRVQRLRTQHGIGILTGLGLVHTLAPVERFSNARKVTAYVGFDPVEDSSGERQRIGAISKQGSRLLRGLLVEAGQVAVRRDRDLAVVYKRIWLRRGHAKAKVAVARRLLIRAFIMLRDEIDYAEFQRRGVAARSSRATA

SEQ ID NO: 407392 - protein, 407 aa, unidentified
MMDQLFVGIDVGSRGNVAYIMRPDGELFSTFAMGNTLGGYRDVSKRIVAAMDKLGLDVVQIGMEATSIYGDGLVHAIREDGSLGRFQRKIHVLNPKQVSKFKEAYNDLPKTDWVDAFVIADALRFGRIKNEVYCDDYRYEALKTLTRARFYAVQNLAREKQRFGNLLFKKCSGLAQSSDVNNTASSTFALMEHFESVDDLANAELEDISAFLHSASRGRFANPDETAKIIQAAARGSYRLPKTVNDSVNQAMSVSIAGIRALQSQIKDLEAAIQKQFEIIPNTIISVPGIGKVYSAGIIAEIGDIHRFQSQASVAKYAGLVWNKHQSGIFDAEDTRLIKSGNRFLRYYLLEAANSVRGCDSEFQRYYNLKYKEVRHHQHKRALALTARKLVRLLFRLMKDNRLYIPA

SEQ ID NO: 407393 - protein, 319 aa, unidentified
MIYIGMDIGKRTIDVQILKGDGNFEHHAVANDAGGWQQLINIIKRKRHKKVHACCEYTGAYYFGAAVALAEAGYHVSVVNPLTIKQYALQELSRNKTDSEDAKLIARYCKVNKPALWQAPSPESRRIRQINRRIEQLIKMHTAEQNRQKEADEDMRASHEALLGHLEEEIAVQRKKPQELIEGDAELKAKSALMQTIPGIGEVTASALLSPLANIERFPSAKHFVSYLGLSPYRRESGDTVRRRGKMSKMGDRYLRKMLYMPARSACLRSKVFRDWAVQMMETRHPKVVYSIMMRKLATYAYKVIKDNQPFNPELALKH

SEQ ID NO: 407394 - protein, 321 aa, unidentified
MNTSLVSSIGIDVSKSSLSFATLRADHSAVVKSCANNEDGIDSMLAFFKEYKTDTGVPCVIESTGDYHVKCALMVTDAGFKVNVINPLITKQYQRASVRNNKDDTVDAVRLARIGLLEPNLMRFKATKQSLALKKVVASVGKLDHYKQELKAHTKQLKEAGVLLGVKVNLSHLEKAITSIEKQIDQFETYIHDHAPKEAIEISNGVRGVSQTSVAKILSLLDGHEFTDKHKLVAFTGLDVAARRSGSWKGRERISKRGNPHFRKILFQMAWGLKQHNAMYREYYQRMRERGKHYFTCLIAVARKFLRFLFAYVWKKSISFS

SEQ ID NO: 407395 - protein, 320 aa, unidentified
MTAFTPVGIDIASKKFDAAIWIEGKKYKNKVFANTPTGFHAFLLWLAPYGPCHICMEATGAYSLPLATYLYDAGYPVSVENAARIHAFGQSELIRNKTDKGDAKMIARYCHLHKPPEWKPVPVNERKLQVLINRLNTLKEMKRMEENRALTSETIVQDSIQKVIAALDEEIKEIEQAIKKHIDNDPDLKKNQALLESIPGVGEILSTTLLGYVGDMSRFSSNKALVAYAGLNPMLKESGCWKGSTKLSKKGNALLRKALYMPAITALKYNPVVAALCNRLKEKGKRGKYLVCAAMKKLLQLAYGVLKSGKPFAAEIPLAR

SEQ ID NO: 407396 - protein, 392 aa, unidentified
MSDSTINDDRLFIGMDVHVRNSYLSVSDAAGQAVKRGRVGNTLGELAAFLGPLESRPMRVVLESTTNTRAICQMLGQYAKQSGATLSAQALDARKLRVIAESVSKCDKLDAAVLSELARSNLKLPACYLPDDEVFALREHLRARADLVQMRTMLKNRLHAVLHRRGVLVPVKMDLFTQAGRQWVKELTLDEAGRQILDRQLAVIDELEPVIDQSTASLRTLARSQRWCKPEALLRTMPGVGLITAMTILAELGDVGRFKSRAAVSNYAGLVPVVRDSNAKHFGGGITHRGPAALRGALAEAAWVSVGRVPQYAAIFGRISARQGKQVAIIAVARRMLEDAWTMLKTDKVFRLAPAATTPREQRISSSQQPVGAADPAPAVVVVVAVDPSDAG

SEQ ID NO: 407397 - protein, 461 aa, unidentified
MVAVMIGVDPHKASHTAVVISAAEEPLGEVRVRACAAQAERLLAWAAAWPERAWAVEGADGVGHLLAQQLLAAGERVLDVQPKLSARVRLLAAGATGKNDPNDARSVAVAALRSPSARAVAADDHAAVLRVWSKRHRDLSRTRTQVACRLHAVLCELLPGGLATQMTAGQAAQLLGSITPGDAVAAARRELAAQFTADLRGIDAQMRDTKRKLTVAVRAAGTSLTGLFGAGPVIAATVIGDVRDVSRFPSRDHFAAWNGTAPAEVSSGKRKIYRLSRRGNRRVNHAIHMAAVTQIRYRHSPGRAYYDKKRAEGKTGKEALRALKRQISDAIFARLQADARRAASTNGPGGQPGNDSDSSAAGSHPAHRLFGQATPGPATQPMTPAIGQPAPAGPSRLAAIPRERAGGSRTGQGPAAPRRPQGVLDPAAREPTIPKAGKRTRQQPKAAARPAPNRTRPARSS

SEQ ID NO: 407398 - protein, 330 aa, unidentified
MKNWNVILGVDVSKLSLDICCAERRLHIKIENCSKGFKQFIQWCRLNGITLNEVLVLLEYTGGYEYRFLQFCESINIAYCRIPGLEIKKSMGMVRGKNDKVDAYRIGQYGEEKSKRLVPSRPLNNSILDLRQLMSYRKRVVREKAGQLSTLKERIHMYGQRKADPIIKLLKMQIKNNSLVLAMVEGQIKELIGADDAMSKNYRILKSIKGIGPINAQMSIAYTENFCSFTDGRKYAVYVGVIPFEHSSGTSIRGRRRVSHMPNKELKQELNQAAKSAMQHDPEIKSYAERKLKTKPYNLVLNNIKFKLIMRMFSLVRREEMYVENYKISA

SEQ ID NO: 407399 - protein, 402 aa, unidentified
MNCVGIDVSKGKSMIAVMQPFGEVVISPFEVRHTDSELSKLAGLLKSLDGETRVVIESTGNYHAPVAWLLHDAGLYVSVVNAMLVHDYGNNSLRRAKTDKKDAVKLANYGLDHWLILPRYVPEEDTRLMLKTCYRQYQQYSKVQTMLKNNLISLLDTAFPDANRLFTSPPRADGSEKWVDFVAAFWHCECVCGLSEKAFTAKYQKWCKKHGYNFSKDKALDIYASSCGHFGVMPKTDTAKLLVEQAVSQLRATSAALAALKQEMQSLAASLPEYPVVMEMFGVGPTLGPQLMAEIGDVRRFHSKKALVAFAGIDAPPYQSGQMDVRSRSISKRGSASLRRTLFLVMGVILQHAPMNEPVYQFMNKKRSEGKPYRVYMIASANKFLRIYYASVKAYLDSLEHD

SEQ ID NO: 407400 - protein, 402 aa, unidentified
MNAVGIDVSKGKSMVAIMRPFGEIVSAPFEIKHTASDINSLVELINSVEGESRIVMEHTGRYYEVLAHQLSKANLFVSAINPKLIKDFDNDSLRKVKSDKADAVKIARYALDKWQNLKQYNVMDELRNQLKTMNRQFGFYMKHKTAMKNNLIGILDQTYPGVNTYFDSPARSDGSQKWVDFASTYWHVDCVRKMSLNAFIDHYQNWCKRKKYNFSQSKAEEIYGKAKELVPVLPKDDITKLIIKQAVNQLNSASTTVESLRTLMNETASKLPEYPIVMAMKGVGASLGPQLMAEIGDVSRFTHKGAITAFAGVDPGVNESGSYEQKSVPTSKRGSSDLRKTLFQVMDVLIKTHPQDDPVYQFIDKKRAQGKPYYVYMTAGANKFLRIYYGRVKEYLSSLPES

SEQ ID NO: 407401 - protein, 360 aa, unidentified
MVKARTLVGLDVHAAKIVAAVLDADTGELRSFSMKGETLAAAGFCAGLPRPVRAAYEAGPTGYVLARELAKRRVECVVAAPSKIPRATGDRVKTDARDAEHLARLLLAGKLHPVRVPGPEEEALRDLVRARETLRLDLMRARHRLSKMLMRHGVQFDDGRAWTDRHRAWLKTVCLEWPAAQTTLLDLEGVIDVLVHRREHLEREIVQILPGSPWETQVGRLRCLRGVDTLTAVGLCAEIGDFERFARAEQLMSYLGLVPSESTTGNTRRLGSITKTGSAHARRLLVEAAWHYRKAPAIRKTLTDRQAGQPAEAVAIAWSAQRRLHRTWARLQARNKRRTIIAVATARELVGVCWAIAQIE

SEQ ID NO: 407402 - protein, 401 aa, unidentified
MNAVGIDVSKGKSMVCVMRPFGEVVLEPFEVLHTAQNLHDLAEKLKALDGETRVVLEATGNYHKPVAFVLHDAGLFVSVVNPVLIHDYDNNSLRRVKTDKKDAVKIANYTLDKWTRLRQYLPEDDTRLALKNCYRQYQQAVAIRTMLKNNLISSLDLTFPDANKLFSSPVKNNGCEKWVDFIGDFWHSECVSSLSANAFAKKYLKWCQKHGYVFTHSKSDEIYACAVNSASLPKSPTSKLLIQQQVAQLKAVSQSVAAFRQEMLRLSQQLPEFDTVMEMYGVGPSLGPQLMAEIGDVRRFSSKKSLIAFAGIEPQPNDSGKVVGNDKGISKVGSAVLRRTLFLIMTVILQTQPQDEPVFQFMNKKRSEGKPYKVYMMASANKFLRIYYAKVKAVMDSERSQ

SEQ ID NO: 407403 - protein, 339 aa, unidentified
MHVTTIGLDLAKNVFQVHGITDDGEVAFNRALRRAQVLTFFESLEPCLVGIEACGTSHHWARELIKLGHNVKLIPPVYVKPYVKRGKSDAADAEAICEAVTRPTMRFVEVKTPEQQAILAVHRTRDLIVRQRTQTINMLRAQLAEFGIILPQGIYHALHFAKGCLNGEQPDLPEVAGDVIFELCDQLRFLHSKILRCSRQMNQIVKLEKRVALLRTIPGVGSITASAIVATVGSGKQFNNGREFAAWLGLTPLNKSSGGKERLGHISKMGDQYIRRLLVLGMTSRIRSIRTNPEKFDPWFADILARKPSRVAAIAMANKTARIIWAVLTRNEPYKVRTV

SEQ ID NO: 407404 - protein, 449 aa, unidentified
MSKINSQINGLPVIHTRAAGIDIGSRFHVVAVPANLSEDPVQTFQAFTADIQRMTDWLKTIGVETVAMESTGVYWVPVFEILESAGIKVIVANARETRSVPGRKSDINDAQWLQRLHACGLLRASFRPDRAIAALRAYLRHRERLLDYAAAHIQHMQKALTFMNLQLHHVVQDITGVTGMKIIRAIVAGQRDAQVLAEFRDVRCKSSIETIRAALVGNYQPEHVFALKQSLALYDFYQAQVDECDSEIEQALVVLKADKPEPEDPLPKARHRTKQPNAVNFDVRASLYQMVGVDLTQIHGIGPFLALRLIAECGTDLSKWPTAKHFTSWLTLSPGCKISGGKILSAHSRKSNNRLTAHLRLAAVTVGKTNTALGAFYRRLAARIGKVKAVTATARKISVLFYNAMRFGMNYSDPGADQYEQKYRERVIKQLHRRAAEFGFELKDIECVS

SEQ ID NO: 407405 - protein, 364 aa, unidentified
MGVGSRHRPRLDWKPAAASADRPRMSLALQSFLPFPNSCQGTSPHQQGRGTKMTEHCYCGIDVAKDRLDAQVLPHRQRFSVDNNATGWAELVERLHALPIAAVGIEPSGGYERGIIRTLLAAGLSVRRINPNKLRQFARARGILAKNDRIDAQLIAEYVSIMPTRVVQRNTATERLTEVVTMRRQLCDEHVTIENQAAHVEDAILRRLNKRRLARLKADIHLLDKRLAEIVAADVILAQRYELLTSMRGVGPTLAFTLIALLPELGQISRKQIAALVGLAPYDFDSGKLKGHRCIYGGRMPVRNILYMAALSAARYNPALKVFHNRLAAINKKPKVIIVAVMRKMITTLNAMVRDNAAWQPRAA

SEQ ID NO: 407406 - protein, 458 aa, unidentified
MEQPTRFIGMDVHKDTIVVAVTAAGDSGKATPYGTFPNSAAALEKLVKRLRQAGSGPLRFCYEAGPCGYGIHRTLTKLGEDCMVVAPSMIPRKSGDRQKNDKRDAASLAVLYRGGLLTAVWVPDAAHEAMRDLIRTRLAAVRAVRTARQQLSAFLLRHERIYRNGRKAWTKAHRGWLADQSFAQPAQQIVLEENIEAVRLSERRRDRIDGYLRAQIPAWSLFPLVQNLGALRGLDTIASAGLAAAIGDPSRFASAPDFMAYLGLVPSEHSSGPKRRTGAITKSGDIHARTLLIEAAHSYRFPARIGRAKLVAVDAVPEAVREIAWKAQTRLCQRYRQMLGKGKLKPVVVTAIARELAGFVWSIACVTSDPPPQPATLTASEEVCPTESTGRSRALRRQPLKATTRRAAHPKQTRAPVELRYVTGIKPAQSPTTRNPKVSTPASRTRRPAAPSVEGSTG

SEQ ID NO: 407407 - protein, 340 aa, unidentified
MSLYAGMDLHGNSNYVAIMDSKGKRIAQKKLPNDRRLILETLQPHRTKISGIAVESTYNWYWVVDTLREAGYCVHLANPSAIQRYSGLKYTDDQHDAFWLAEMLRLGILPEGYIYPKEERPIRDLLRKRGHLVKLRTSLIISLQNIISRNCGVRLNVNKVKELKKNQVSPLLEANDDLALAGEVSKEAIDFLTRKIQKIEGVIVEKIEVRDSYRYLLTLPGVGKILALTIMLETGPISRFAKVGNYVSYCRKVSSQWISNEKAKGKGNKKNGNKYLAWAFSEAAELGRRYHSGARAYYTRKMQRTNFMVAHSALAHKLARAAYYIMRDQVPFSSEKLFAG

SEQ ID NO: 407408 - protein, 366 aa, unidentified
MVYKKLNSTGTLIQRTTTEAPQGHMYYIGLDVHKKTISYCVKDASGQVHREGKVGATRWELDDWMNTLPQPWTVAMEATIFTGWIYDHLLPHAQQVKVAHPLMLRAIAAAKKKNDRIDAGKIADCLRCDFLPECHMASTAIRDRRRTLRYRHLLVRQMVQMKNRISGLLMETGVSHNKRRLHKVGYFREFLASNEEVNESIRPLLRVSRDTIVRLQKTEYALVSSLQRDPLLAERIRRLRTVPGVGPITALTWALEMGEVSRFPSIRKAISYCGLCGDEKSSADKMTRTPLSKQRNKHIQRVLVEAAKLAPRQDHDLALVYEREKQKGNANRATLAVARKMVAYMLAVDRGERDFVPFTNPRSAAA

SEQ ID NO: 407409 - protein, 318 aa, unidentified
MTTQERKIYIGIDVSKASLDIYNTDNVSYYQVDNSVSGIKKLMSTFKKNSNDQILITLEATGGYEKLTAKTLVEHGFSVAVINPRIIRDFAKASGKLAKTDKIDAKIIAAYAEIMKPESRFVFNENHEKITELSTRRTQLVAMIVAEKNRLDKVNGEIKKSILRIIKMLEKELAEIDSKLNASIMADETFAQKHALLKSVKGIGKKTAAALIAYLPELGTLEERQIAALAGLAPFNCDSGKMRGRRMIWGGRSSVRTSLYMATIAATRFNKAIKTFYQRLVNAGKPKMVALTACMRKLIIIINAMVKSNQPWQENYAR

SEQ ID NO: 407410 - protein, 374 aa, unidentified
MNEIVMGLDQHRAQITAEWLDAETGEVSRARVAPADRAGVRRFLARFGGRRLVVALEATTGWRFLVEELQRVGAEVHLAEPAETAALRGNKKRAKNDRADARHVRELLLAGRLPESWIPPDHILDLRAGVRLRHSLIEQHCEWQQRIQAVLYHHGCPQRRRLMEGDGRDWLAAQQLPETAREQVTVALAMIDFLDLQLAPLTQELCAWARRQTGCKALISAHYGIGELCAVTILAELGDCARFSSSREAVRYGGMDITVYQSDRHRAPGHLSRQGPPALRWALYEAAQRARFPASPDRAWYLEAAERLGGNRACLALARKLLKRCYHTLRELGDDALTPPDERAGSGAARHASSGSARRTERLTDPEPADALAA

SEQ ID NO: 407411 - protein, 343 aa, unidentified
MKLNRIGIDLAKNVFQLHGVDDRGKVVLKKRLIRDKWLSVFCESVEPGCEVGMEACGGAHHWARQLQSRGFVVKVIAPQFVTPYVKSNKNDANDAEAICEAMSRPNMRFVKAKTVAQQDIQAVHRIRQELMSHRTAKANQIRGLVTEYGIVAPLGLAALRSAIPCWLEDAENGLTVLFRSLLHGLWEDLARFDERIATLDAEVERIAKSDPVALRLQQLRGVGPLIATALVASVGNGEQFSQGRQMAAALGLTPRQHSSGGKARLLGISKRGDPYLRSILIHGARATVAHAKHKEDRLSQWMTGLAQRRHPNVAAVALANKTVRMAWAMMRNETNYDPDYVAA

SEQ ID NO: 407412 - protein, 569 aa, unidentified
MCCVRVPDEDHPGRRLQEVMAYSTLTRSLLSMADHLASLGVTRVVMEATADYWKPVFYLLEAAGFQTWLVNAKDVKHLPGRPKTDKCAWPGGHPGGMKCSPRLTGRGRRIQSGALESPRQVWRRARGTWDCRYEHEPQLRLLPGPPWWVVTAAQRGGEMELIYQRVAGLDVHRDEVAARVRTAGPRGGVHAEKARFSTTTGGLAVLAGWLAEREVTLVAMEATGVYWKPVYYALEDRFELWLCNAHHVKNVPGRKTDMSDAEWLADVAAHGMVRPSFVPPPAVRELRVLTRYRQKQTSIRAGEIARLEKVLQDAGIKLTSVASKVLTQSGRAMIEALIAGERDPRALAGLAKGKLRPKIPQLTAALDGHFGAHHAVAAARILAHLDFLDTTIAELDTQIAGRVAAGYQSAARLLREVPGIDRASAEVIIAETGADMSRFPSPAHLAAWAGLCPGNHESAGKRRMVATRPGNPWLRRSLIESARAAARTKGSYFGAQYRQIARRRGPNKAAVAVAHSLLDVAWHLLTTGELFADLGEDYFLSRHDKQHQTRRLISQLEKLGYTVELSPAA

SEQ ID NO: 407413 - protein, 354 aa, unidentified
MKRAKKELQPGDEIFVGIDMHKLKWHVTARTADFELFCGSIPGKWEALQRILDRYKGHQIQTVYEAGYFGFWLHDNLIEYGAECVVTPPSLIPQEYGNRVKTDRRDSRKLAHFLAKGMLKRVWVPTEKERYHRQVIRRRRQLIGDRIRTQSRIKAELRLYGIDIPEPQSKWTKIYLGNLGRIRFNNRWMQESFKRLLELYYFLDKQIIKQTELLRKLSETKLYQERVKILTTTPGIGMIAAMELLLELQDVSRFQRADQIAAYVGLTPSQYSSADKVRMGRITCVGKNSLRAMLVQASWALIRKDGVMREKYDRLKSRSGGKRAIVAVARTLLIRMRRMLLDNNPYVIGLVATN

SEQ ID NO: 407414 - protein, 413 aa, unidentified
MNVLHPRCCGLDVHKSSISACILLRESGREQKHQRRFGTVTQELQELAEWLQQFGVTEVAMESSGVYWKPVWNILEGQFTVVLANAQHIKNVPGRKTDQKDAEWIAQLLQYGLLRASYVPCEIIRDLRDLTRMRASLSQEASRISSRIQKVLEDANVKLASVATNVLGKSGRAMLEDIITGEDNPEQLASLAMGHLRVKIPQLQLALEGKIRSHHRFLLRRLLDQVQFVEHEIALLDERLEDIGRQRPDLAHAVARWDTIPGIDRVAAWALLAEIGDNMGQFSTAGHLASWAALCPGNHESAGKRLRGTTRQGSPWLCRMACQCAWAAARTKNTYLSSQFRRLAARRGKKRAIIAVAHTLIVIGYHLQKNQSNYDDLGGNYFDRIHSDGLKRYLVKRLQQLGHKVTLEPIETA

SEQ ID NO: 407415 - protein, 401 aa, unidentified
MVTSVGIDIGKRQHVAAVCRDGERVAQKAVLRFGADRAGFLELAQWLARQAPIERVVMESSGHYWMPLAAALHRAAVPVAVVNPVSAKHFSRRRLQRTKSDPADARSLAALGMADQPVTRQPLAGAELREAARFAMRLVEEQSRLDNRIHRLIDLGFPELAQAYDDPTCISALAVLRVAPTAAVAARKRPETLAHAARPGGGRPIGERKAREIIALARQTIAPPELERQVAFEMELLIAQHDLLGRQIDDAEARVASLLDGELARRLQTIPGVGPATAATLIAEIGDIARFSEFDKLVAYVGVHPAEKSSGQSGGPETSWQMAKSGNAYLRAALYRMAVVGLTHNPVIRDHYARKRAEGKTKMNALGHCMKKALALVWGIWRGEHDFTPEPPRHLTTGYGT

SEQ ID NO: 407416 - protein, 375 aa, unidentified
MDKIYDICCGIDVHKKLIVACLNHKRKKELREFGATTRELMELAEWLQKNECEIVAMESTGSYWKPLYNIMESYGLHAIVVNPAHMKAVPGRKTDVKDAEWIAELLQHGLLQPSYIPSKDQRELRELVQYRKSLVGERTRELNRLQKMLEGANIKLSGTVTNINGKSARKILEYILSGNEIDEKKYDEMYEEKLIAHNLKASKEQILDDLKGFMSPLQRRMLKELLQHLDELNVHIENLNDEIDNFMKPEEKQASQMIQDVTGIGNTSAQAIIAVIGTDMERFPSDRHISSWAGLCPGDNISAKKRKGGKIRKGNALLKSTLVLCAHAAVRHKSSYFHAQFKRISTHRGKKRAYVAVAHSILIAIYHILKDGVKY

SEQ ID NO: 407417 - protein, 353 aa, unidentified
MSNDKYVAMDVHKASVVIGVRDSEGKMIGRAVVETKAQTLRDYVRGLSGTVHLTLEEGTQAAWLYDLLKPLVAECIVCDPRRNKLLESGNKSDDVDVEKLSELLYLGRLRAVYHGGQGTRALKELAQNYEALVKDNTRIKNRLKAIFRGRGISYQGSEVYDYEQRAQWLGQLSERGVRERASQLYEQLAQLEEWVARARLQMLRESRKQKAKKILEQIPTLGEISVAQLIATVDTPFRFRSKRQFWTYSGLAVVRHTSADYQFTQGELRRRAKPGPTRGLNRNYNRRLKRLFKSAALAGSIKGPFKPYYEQLLARGLNPELAQVTLARKIAAVTLTLWKKGASFDQEKLVKPE

SEQ ID NO: 407418 - protein, 417 aa, unidentified
MRRSPPRGHGVCWGGRPPTASMCQNEVAEDLKRGEPSVTKIIRIGMDTSKSVFVLHGVDAAERPVLRKKLRRRQVLEFFGKLEPTKIGLEACGGAHYWARELRALGHEVVLLPPQYVKPYVKRNKNDAADAEAICEAMSRPTMRFVPVKTAEQQAALMLAGMRDQLIRRRTQLSNAIRGYAAEFGLAAAKGLSKIEPLLARIAEDAALPELARELFAGYGQEYAGLQVRIAKIEAQLMAWHKGNELSRRMVEIPSIGPIGASLLAMKVTDPQAFRSGRDFAAWLGLTPKDHSTAGKTRLGVITRAGDENLRSILVAGATAVIQQVQRGRGHTSPWLVELVKRKPPKLAAVALANKTARIAWKLMVSGEHYDRTRSVGGSQAPVVDREERRAALCGGSAQRSSLRRATPSQRKEMARA

SEQ ID NO: 407419 - protein, 338 aa, unidentified
MIVIGVDVHKQSVTAVAVDEAGRMLAEQTIQVGSDELLAWAATLDDERLWALEDCRRLTRWLERQLLAADQEVVRVPPKLMAPERRRGRARGKSGPIDALAVARAALREPSLSRPRPDEEPFRELKLLVDHRDAIVDERRRVHQRLRWHLHQLDPTFAVPLRMLARKVHLERVSRWLARQEQELQLRLARELVASRRSLDRVIAELDRELERRTTELAPALLDLPGCGAITAAKLLAEIGPVRRFQSDAQLARHSGVAPLEASSGRIQRHRLDRGGNRQLNAALHRIAITQARVHPGARAYLERKKAEGKSRREALRRLKRLLVRAVYQTLKESPTLT

SEQ ID NO: 407420 - protein, 349 aa, unidentified
MKEASIIGLDLAKRSFQAHGALADGRVAFRKKLTREKVLGFLAEQPRCVVAMEACGSAHHWGRAIRDAGHEVRLIPPAYVKPFVKRQKNDAADAEAIAEAASRPTMRFVAVKTAEQQARAMLFRTRDLLVRQRTQLINALRGQLSEHGVVAPQGPANVVILAQAIDDMTASLPLLVVELARVYLDQIVGLSEKVAELEKAIACEARRDATTRRLQTMPGVGPITAMAIETFAPPMEVFRRGRDFAAWLGLVPVQHSTGGKQVLGKTSKMGQRDIRRLLIIGAMVIVRWACRKGAQEGTWLHRMLGRKPRMLVAIALANKMARSIWAMLTKGEDYRGPVAVAATPDPRLG

SEQ ID NO: 407421 - protein, 415 aa, unidentified
MDTLLFRVAGLDIHKKFVMACIRITDPQTGMAREEVRRFETMTDTLRNLRDWLVAEQITDVAMESTGVYWKPVWNILEGAVRLILANAHELKQVPGRKSDVKDSQWIAHLLACGLITPSFVPEQAQRDLRDLTRSRTTLIEEHTRVSNRIQKVLEDTNVKLASVAADVLGVSGREMLAALASGVTDPTALAEMARGRLRQKFELLKRALEGNVRPHHRFLLRQLLDHLAHVEEQIAAYDRQIGDVIRPFLSPETEARLDKVPGVNRRTIEVVVAEIGTDMSHFPTEGHLCSWAGISPGNEESAGKRKRSRIKSGNRWLKSALVEAARAAARTKDSYFRAQYARLAARRGKNRAAVAVAHSLLTVIYHLLKNPEDEYQDLGVAYFDQRNPTRQAQHLVKRLENLGYDVALTPRAAA

SEQ ID NO: 407422 - protein, 409 aa, unidentified
MGLYCGIDWATAHHDIVVINDNGKVVARGRVGNDAAGFAALLTLLVEAGDTADHPIPVGIETDRGLFVAALRETGRVIYPINPLAASRYRSRHSVSGAKSDATDAVLLANIIRTDAAAHRPLPADTELAQAIRVLARAQQDAVWARGQVSNQIRDLLKEFYPAALVAFADLDGGLARPDARTILAAAPTPTQAAKLTSPRLRRLLIKAGRQRYLDRDVERLRAIFTGTYLHQPPVVEDAMGIHLTALLGQFDAACAAADALAEAAITHFERHPDAEIITSFPGLGNLAGARVLAEIGDDRSRFTDARGLKAFAGSAPITRASGKKTVVLHRHIKNRRLNAVGPIWALASLRASPGARRHFDTRRAAGDWNHQAQRHLFNKFLGQLHHCLHTGQLYDEHRAFPPPLPLAA

SEQ ID NO: 407423 - protein, 400 aa, unidentified
MSERQARVWAGVDAGKGHHWAAVVDETGATLWSKKIENDETAILTAMGEILDLADEVSWAVDISGTASALLLALLAAHGQRAVYVPGRTVNRMSGAYRGEAKTDARDAYVIAETARHRRDFAAIDVPAQLAADLALLTAHRSDLVADRVRMINRLRDVLTGVFPALERAFDYSAHKGALVLLTGYQTPAAIRRRGRARLTAWLANRSVRGADSVAVTALEAAQAQQTALPGEDVAAQIVADLATQILALDDRLKRIDQQIRDTFRAHPQAEIIESLPGMGPILGAEFVVAAGDLSAYADAGHLASAAGLVPVPRDSGRRTGNLHRPKRYSRRLRRVFYMSAQTSMMREGPNRDFYLKKRGEGCKHVQAVIALARRRASVLWALLRDGRVFTPAPPITQAA

SEQ ID NO: 407424 - protein, 353 aa, unidentified
MEDSTTEARFIGVDFHRDTTVVTRLRQDGSRCGKTQSYPSTRAGLTEFKDSCTAADHVAVEATYHWALFADVFEDFEGELVLGHPLKNRLIAESRNKNDKVDSKVLADLLRTNFLARAWIAPREIRSQRELLRYRVSLVRIQTALKNRIRVLLAKAGCDFEATDLFGVGALARLEHLDLGAERNRIVRGYIGVARQIARTVREAEKVIAAATESSPEARLVDSIRGFGALAALTVVAEIGDIERFSRAGKLVSYAGLAPTNRASAGVLRHGPITKQGSPWLRWVLIEATQHAIDGYPQLATLYRRVAAAQGGRKNAGRIAVARQLLVSIYHMLKRRQAFEPGRIGEQRACAKR

SEQ ID NO: 407425 - protein, 431 aa, unidentified
MDDVSRFEAFSQFRNSVNGSSKHLIVGIDIAKDKHHAFFGTANGKTLLRRLLFTNDIIGFCRLIEQVKVLLSQQRLTEVVFGLEPTSNYHKPLAHWLIQQGHLVVLVTGKAVKGNRELIDGRWDKNDIKDSANVADLVSRGKCQFYEQPDSKMIAVRSLLTIRKQLKKEEHRLRMRIRNGLIAKYFPELDRHWGNCLEENLAIVRWYLDPRKIAGTDFGVFLRHVTATDRGLRQVRRLDIIYQAASQSVGLPTDASTDFEAQLIIDRLKQVKQEISQTMKKIEAICRSMAGYKLLRTIPGFGPYIAALVMAALANPFRFKSPKQVIRLAGLDLNANRSGKKSQDSVPVISKKGDADLRYALYQGALIASYHNDGFRRLFNRMLDNRHGERGIRTKVRVKLAAKMLVIAWTMLKNGEIFDETRLLGKPAQQS

SEQ ID NO: 407426 - protein, 341 aa, unidentified
MGEPKSIIWAGFDVGKTSFVAALDEATASERRKVTSLPCREFKRNQDEVRKFFRWAKEEFPTAEVRIVMETTGCYSQHLAGWISQLRPDVPVTIENAGSIHAFIQSLNLPHKTDRLDAQAIARFGTERQPKPTNRPSKTVLVLKELTHTRAALVRARVEFENRQETLTEPFSAKINKKTLKMLEEEIEEINQEIKRCAMQNSEIRGEIELMITLPGVSFVSACDIIAELGSLKQYSARELSALSGLAPRIRESGSSVHSSFMSRRSSGRLRQILYLDSIPGVPKIPALQEFHQRLLEKGKKKMTVRCACMRKMLLILRSIVVHQRPFDKDFQKKLSKSLDF

SEQ ID NO: 407427 - protein, 325 aa, unidentified
MKILALDLGKYKMVGCEYESESGAHRFHRSVTTPAALRKLVQDVKPDRVVIEVCSIAGWIYDLMEAMGVEVQVANTSDDAWRWRKVKQKDDRRDALKAARLSAVNQLREVYIPAPEVRQWRALITYRRQLVRRRTQIKNHIRDLLLREGHMLARGSQCWNQVGIELLTSLARPLHEVGLRELWRGELHEELQQLELLQARLATVEEKLNTIGKADARVQLLRTAPGVGPRLAEAIVALLDKPQRFRKASQVSAYIGMVPKAFDSGESERRGHITRQGSRLVRALLVEVGWAACVIIPGCAKPTNVSVAARKRARRSPLWRWAESY

SEQ ID NO: 407428 - protein, 350 aa, unidentified
MHSTTAPLASIGIDIGKEVFHIVGLETDGKIAFRRKIKRLALVESFKKMAPCVVGMEACLSAHFVSRILRQLGHEPRIIPAIYVKPFVKGQKNDYNDAEAIAEASLRPNLRSVREKTQDQLDLQACHRVRSRLVSRRTATINQIRAFLIEQGIAVRTGATALRNSLPAILKNRQDEISPRMRGLIAGLYEDWICLDERIETITGEIEKIGEKEANCRRLMSVPGIGPLISTAVVAAIGTGEAFERGRDFGAWLGLVPRQYSTGGRSILGRISKRGSKYLRTLFIQAANVILMRPHNWERFSFGTWLSNAAPRLHRNKLATALANKLARIAWSILRNEKTFDAPRHEVMAI

SEQ ID NO: 407429 - protein, 423 aa, unidentified
MKNNAANKLKQVPTECLVIGIDPHKSKHAAVAITQDYNICCKFKFDNSRAGFIMAVERLRDEMIKAGCKNIMFAIETGGHYWRNFAYFLDENDIPFRFINQYSLKRRREGKDLNRRKNDYRDSEVAAEMLCTGEFTESKLRQGIYAELLATHNNYRRLIKERTRTINLIKGLLDGLFPEFTRVFKDPCGKTALGVLAACPIPREIACMTDKDFMIKVRTNYSGRLGKNKLFALKLVANTSSGVAAGAKAVSIELKFLVEKLRLIQCQLQRVEEALVELVDQSEEGKYLLSVRGLSYIAIAGLIAELGCFKVYRCAKQMIKMAGSNPSEKESGGKRSSHTPMSKHGRPGLRYVGWIAVIPMLRLNADFQAWAKQRRERPVNANPLSGREVLGAALNRLLRLVFALVKNKAYYRDSRPELALAGV

SEQ ID NO: 407430 - protein, 346 aa, unidentified
MLHAGLDLSRKRLDFHLLDREGATVEVGSVPPDADGLRGLTERLHRHGEPIRAAIESMNGARFVHDRLELAGWQVEIADAQKVKGLAPLACKTDRIDAGVLAELSRRELVPAIWLPDPSVRAERERARWRLHLVRHRSSLKQRVHAVLLAHGKPCPVSDLFGLRGRQLLARLQLPEPWQGTVAASLRLIDELDREIAACETELRRLGADHRYVPLLLTVPGIGWVLAYTIAAELGDIDRFPSPAKLAGYTGLCPRVYQSGESDRRGPLAKQGPRYLRWALVEAATHACTHPAYRDRYQRTKTRLGKQRGAKVAQVDLARRLALAIWHILTRNQPFAPASATDPLAA

SEQ ID NO: 407431 - protein, 369 aa, unidentified
MGKYSEVFVAFDVAKKKHAVAIAEGGRTGEVRFMGNVENNPAPIERTIKRLATRYARLHVCFEAGPTGYGLYRQVQALGHDCMVVAPALIPKRAGERIKTNRRDAVTLARLHRAGELTGVWAPDPAHEAVRDLVRAREAAGDDLRRKRQQLLSFLLRHSRIYSGGGHWTLAHRRWLAGQKFDHAAQQIVFQEGIDAIEDSLQRLRRVEKQLGLVVPEWSMAPVVEAYQAMRGASFLVAVTFAAEIGDVRRFDTPRQLTSFLGLVPAESSTGDTIRRKGLTLAGNRRARRALVEAAWTYRYPARVSETLRARLEGLPKPVRDIAWKAQIRLCARYRRLSATGKKSPVVVAAIAREIAAFLWAIGREIAPA

SEQ ID NO: 407432 - protein, 402 aa, unidentified
MQVDDIDVFIGIDVGKSEHWATALTTAGECLHDRPLPNDEARLREVYEHLGEHGRLLVVVDQPATIGALAVAVAQDMGITVGYLPGLSMRRIADLSPGSAKTDQRDAAVIASAARTMPHTLRSITSSDEDAAALSMLTGFDLDLARQVNQVSNRIRGLYTQIHPALEGVLGPWLEHDSVLEVIATWPTPAALRKAGRARIDAKLKANGCRRHAAWAQAIVEALSKQTVTVAGTDAAGVVLPHLARQLIALHTQRADIAAQVEALVEAHPLYPVLTSMPGVGVRTAAVFLAGTLGKTFTTGAHLASYAGLAPVTRRSGSSIRGEHVSHGGNKRLKRAMFLSAFASLRTDPVSRAYYERKRAQGKRHNQAILALAHHRILTLHAMIRNGTLYNPQPAQPLTTTA

SEQ ID NO: 407433 - protein, 418 aa, unidentified
MEIVYERVAGIDVGKKIIAVAVRTPGECPGKRRQQVRKYNTFHQTLTEMVAWLVAEGVSHVTMEATGIYWKPIFHALCAAERPLEVLLVNARHVKNVPGRKSDALDAVWLAELTECGLLRGSFIPPREIAAIRELTRYRKKLIEQRTSELQRLAKVLEDSGIKIDSVASALTTLSARDMIEALIAGERDPAVLANLARGRMRSKIPDLRSACAGRFGVQHALMCTLHLEHIDHLTDMIVRLDTRIDEASLPFVQQTDLLATVPGISERAAQVIISEIGVEMSRFPTAAHLASWAGLCPGNNESAGKHRSGRTRKGNTELCTVLTECAWAAGRTSTYVGAQFRRFHRRFGKKGGQKAATATAHTLIVIIWHVLAETTGYRDLGSDYFTRRTDSPEARKRRLIRELEALGHKITIEPAAA

SEQ ID NO: 407434 - protein, 352 aa, unidentified
MVLYVGGDLSRKRIDWQALWPDGSECAAGTASPDADGLAGLTRRLREHSEEVVVVIESMTGARFVHDQLEAQGLEVKIADARKAKVAVELLGLPSGAKTDKLDALRLAELGRRELVPEIWLPDPGTRAARELARFRLHLVRQRTRLKNRIHQTLVTHGIARSQSDLFGARGWAWLERLPLPEPWGRHVHVSLGLIDHLDREIEALERELRRRGGEHPSVGLLMTCPGIGWVLGFTIAAEIGAIERFQSPRKLVGYSGLCPRVEQSGASDRRGPLTKNGPKWLRWALVEAAQHASKHPAYRDLYQRTKTRLGRQRGPRVAQVEVARKLAEAIWYMLTRNQPFAPAGAPRCLAA

SEQ ID NO: 407435 - protein, 375 aa, unidentified
MTGVDSRHRPRRDRKPAVASESKPRMSLELRSLVPYPNSCLGTSPYQQERDTKMATVSFCGIDVAKDRLDVVVLPEQRCWSVCNDAAGWAELAKQLGSFSIAAIGLEASGGYERGVMRVLLAADMPVHQINPFKLRQFAKASGVLAKSDRLDARVIASFIAIMPPRRAQRPSPAIERLTEILSVRRQLTDQKIAAQNASAMLQDAMLLRLSRRRIGRLAADIEMLDRSLVEIVRTDAALAHRYRLLTSMPGVGPVLACTLIALLPELGSMSRKQVAALVGVAPYTFESGKLKGKRCIWGGRAPVRHVLYLAAMSASNWNPVLKAFHSRLKIAGKLHKVAIVAVMRKMITMLNAMVRDDVAWAGHLGGRQILPTAR

SEQ ID NO: 407436 - protein, 425 aa, unidentified
MNYKQNEKINQVKESTLVVGIDIGSTKQYARAFDWRGIELGKVFTFSNSREGFEAFKAWMQHLQDKYRKSDVIVGIEPTGHYWFDLGAYLEDEGILLVMVNPYAVKQTKELDDNSQSKNDRKDPKVIAKLVTEGRYSAPYTPDGVYADLRIMVTNRKRLIREMTQIKNRFARWFAIYFPEYTDVFGDYEAQSSMLLLKKVCTPEAIVELGAEKINKIWRDAKLRAVGMKRATTLCETAKRSIGLKKGSSAARYEMKLLLEDYEYKKAQLDAVMEEIEKLCRKIPESEQMLAIKGIGVITVAGFLAEVGDVRRFESPRQIQKLAGLSLQENSSGKHKGQTTISKRGRSNLRAVLFNAAIPLIATNPEFKSLHEYYTTRANNPLKKKQSVIAISCKLIRVFYAILANGVTYDAQKMLSDIHRQPQAA

SEQ ID NO: 407437 - protein, 390 aa, unidentified
MYIVGIDIAKRFHEATIIDKSGKVIVKRIRFANSHVGFIKLMEAVRKLDAPAEFGMEATGHYWLPLYAHLRQDGQTVHVINPLQSDALRNMFLRQTKNDTIDALIVAEVIRFGRYCETQVAPENIVALRELCRQRFFIVDTASDFKRKIIALLDQTFPEYEKIFSDTFGKSSVELLANYSTPEEMLSVDTQTLADLLNKASRGRFGLDKANEIQQSAKNSFGIVLASSSFALIIRQYLEQLKSLESSIAAFDEEIARLMDNFDTYLETISGVGKTLAAVIFSEIGGDIKKFSSVPKLVAYAGLYPKSRQSGESKTDGRMSKRGSPYLRRAVWLAANVAAFKDPAISAFYQKKRSEGKDHLTAIGHVCHKMLAIIFAVLRDNKPYLPASTS

SEQ ID NO: 407438 - protein, 385 aa, unidentified
MALDSTTQSTPYPEARCLYMAMELSATKWRLALSTGGPRIREKSVGAGDGGRLLDEIRAAKKRFGLPDDARVISCYEAGRDGFWIDRLLSQFGIENVVVDAASMKVDRRARRAKTDKIDAKRLLADLIRHHRGEKDVWKVVRVPSEEQEDKRRLHRNVERLKKEKTQHRSRVFSLLATQGVRPGNLKVFLAELDAARIWDGKPLPPALKAEIEREWDRLRLVEEQIRAITKEQREQLKQAGSPELEKVKLLTRLRGIGLDSSWILVMEFFGWREFKNRGEVGGAAGLVGTPYDSGSSEREQGISKAGNPLVRTRMVELAWLWIRFQPHSELSQWFQRRFAGGGSRLRRAGIVAVARKLLIALWHLVEHGVVPQGAVIDLTESSAS

SEQ ID NO: 407439 - protein, 365 aa, unidentified
MDQSTWVGLDVHQDSITAAILREGSATPEVVRLSGDLMKVRRLFRRLSAEGPVRSCYEASGAGFVLHRVLADDGFHCDVIAPSLIPKKPGDRRKTDRLDAVNLAHLYRGGHLTPVHVPSSEQVELRQLLRLRGRYQQQAKSTKLRITSILRNHGHRFTGTKSLWTVKHRVWLEQMRRELTGPLQIVIASELEHLEYLEMQRHSFDAEIERVAQSPAYCRSVDALCCFRGIQTLTAMTILCEVGDIRRFDSPRRLAAYLGLVPSERSSGNIQRRGPITKAGNTHARRLLVEAAWNNRHRSGANLILNRRRQGQPSEVVAIALKAQHRLSTRFYHLLQRKHVNVAVTAVAREMCGFIWAALRALPQN

SEQ ID NO: 407440 - protein, 412 aa, unidentified
MEVLVERAAALDVHKARVTVCSRTPGVAGEREEQVETFSTTVRGLLVLADWLEAQRVTQVAMEATGVYWKPVWAVLEDRFDLVLVNAHHVKNVPGRKTDVGDAQWLCRLVEAGLLRPSLVPPKPVRALRNLTRYRKTQIQDRQREANRLHKILEDTGIKLDCVASDILGASGRAMLDALVAGTTDPDVLADLARGKLRTKIPGLREALEGRFDRQHALIVGHILAHLDYLDEAIAQLSQEIEEQLRPFAPAVDLLCSIPGVQRRTAEVIIAETGGDMTAFPTAKHLASWAGMCPGNHQSAGRRGAGTTRKGSKWLRAALAEAALAAARTKHTYLAAQYRRLSARRGPRKAATAVGHSILVACWYMLQTGQLYNDPGGDWYLRRDPARHTRRLVTQLEHLGHHVTLHQPAATG

SEQ ID NO: 407441 - protein, 345 aa, unidentified
MEDMYYIGLDVHKKTISYCVKDGSGHIHAEGAIPATRLDLDIWMKTLPQPWTAAMEATIFTAWIYDHLLPHAVAVKVAHPLMLRAIAAAKKKNDRIDAHKIADYLRCDFLPECYMASTEIRERRRTLRYRNLLVRQAVQMKNKIAVLLMEAGVSYNKQKLHKVGYFRELLATNQDIDDGLRSLLRLCRETVVRLGKTESALVRSLQRDALLVERVERLMTIPAVGPIMALTWALEVGNVQRFSSIKKAISYCGLCGAENSSANIIKRTPLSKQRNKHLQTMLIEAAKMAPRNSPDLAMLYDREKQKGNANRATLAVARKLVAYLVAVDRRQKDFLIVERENRTAA

SEQ ID NO: 407442 - protein, 299 aa, unidentified
MNHKVGKDNTVARFIGIDVSKQWLDVASLPERETRRFTNDSAGQEQLSTWLMSLAPELIVMEATGGFETRVATTLAAQGLALAVVNPRQVRDFARAFGVLAKTDRIDASVLAAFAEKVHPPVRPLPDEDRRELIDLVDRRRQLVTMRAEEKTRLSQATASARQDIKEHIDWLDERLRRLDIDLTAKLRTSSLWKAKEEILISVPGVGRVTVFTLLARLPELGALNRRAIAALTGVAPFARDSGQHRGHRMIWGGRADVRSVLLYGCSKRCTHRSSHQKLLLAPETSRQTLESRAHRLYA

SEQ ID NO: 407443 - protein, 344 aa, unidentified
MQHTTIAVDVAKSVFEVAVSRHPGRVAERHRLSRDAFLRFFAQRQPATVLLEACGSSHHWGRQLQTLGHRVLLLPPQHTRPYVTRNKTDRSDAKGLLEAQRNEQIQPVPVKSIDQQALSALHRLRAAWLAARTGRLHTVRGLLREFGIAIPLGAKRVVPTLQALLEDADSGLPDSLRPALDEARAEILELERRMRSVEHQLRALARQTPAVRRLRTIPGVGLLTATALVAFVGDVGRFPSARHFASYLGLTPRERSSGLRRRLGAISKRGDVYIRMLLTHGARAVLWKAKSRKNPDRLRAWALHLESTRGHNKAAIALANKLARIVWAVWRRDVKFTEQAPIEA

SEQ ID NO: 407444 - protein, 424 aa, unidentified
MNFNQNFKISQVTEETLILGIDVGSSTHYVRAFDWRGLELSKVFKFKNSFEGFQNFVLWVNDLCCKNNKSKIIAGLEPTGHYWFSLGECLKENNITIAIVNPYHVKQSKELDDNIQTKNDSKDPKVIAKLVIDGRYSFPYIPEGVYGELRTADKLKDDITKQIISIKNKIHRWLSIYFPEYEKIYSSIDTKSGFLILKETPLPKDIVELGSEGIVKRWKQAKLRAVGLDKAKKLEEAAKKSIGCKNITSLARLEIKLLIEDYEYKQKQLELITGELNSLCEEIPEIKEVAEIKGIGMATAISFVAEVGDIRRFKSAKQVQKYAGLALRENSSGKHKGLTKISKRGRKKLRTILFRTAIPLIGLNEKFSSIYNYYIERKDNPLKKKQALTVICCKMIRIFFTILSKGIKYDETKMIQDIKRPLAA

SEQ ID NO: 407445 - protein, 385 aa, unidentified
MPGNAFIPREYDIFAGLDVDRKSISVTFTSHQGFLRSLRMPYRVDHLVHYVGKHFANQRVVFAYEAGPTGYGVYDGLVAHAYPCLIAAPAMIPRAPGQRVKTNRLDSRALAENLRGGQLRSIHVPSPVYRELRHLTQLRDTVVSQAVATKQRIKSLLLFEGLAFPPAAAGHQWSLQVKAQLRTLPCAPPVRFKLDQLLATLAFAEQQVLQTTREIRRFCRTEPELARCIQYLMTVSGIGWITASQLLARIGDWRELKNIRQLGAFVGVVPTEHSTGEGPQRGAITRTGDARLRAKLIQAAWAAIRHDAELRPCFRAVCQRHPPDRGPRIAIVAVARKLTVRIAVVLRQQRPFVRRDPVPSAPVTQEETVPQGTTRRLAEPGAAAP

SEQ ID NO: 407446 - protein, 366 aa, unidentified
MKKISTVVTNRNEIFKAHKLTIGLDLGDRSSHYCILNEAGEVILEHSFSTTAKGVHQVFDGIPHSRIALETGTHSPWVSRQLIQMGHEVIVAHARNVRLIGESSRKDDQLDARTLARLARIDPGLLGPVRHRSAKAQIHLTVIRARAVLVSARTALVNAARGLTKSYGERLRKCGTGQMNREIAKELSQELRDVLDPLLVEIESLNERIAEYDRRIEQIAKEVYPQVALLKQVKGVGTLIALTYVLTLDDPHRFRRSRDAGCFVGLRPGRRNSGMSEPQMHISKEGDRYLRTLMVQGAHYILGPFGQDSDLRRWGLRLAERGGKNAKKRAVIAVARKLAVLLHKLWVSGEVYEPLRNNHKVVSAVA

SEQ ID NO: 407447 - protein, 453 aa, unidentified
MSKTSASMPQNLTRMNPGAAAIDIGSTMHMAAVNPDCADMPIRSFGTFTHDLHDLASWFRSCGVTSVAMESTGVYWIPAFEILEQHGFEVILVNARYAKNVPGRKTDVSDAAWLRQLHSYGLLRGSFRPNAQIATLRAYLRQRERLVEYAAAHIQHMQKALMEMNLQLHHVVSDITGATGMKIIRAIVSGERDPDVLASLRDVRCHSSAETIKASLIGNERDEHVFALSQSLELYDFYQVKMLECDRKLEASIASMTVDPEAPLPPLPKVRTKTKQTNAPSFDVRAALYGLTRTDLTQIHGLGSSLALKLIGECGTDLRAWPTAKHFTSWLCLAPGNKISGGKVLSSRTRRSSSRAAALLRLAATTIGRSDTALGAFYRRLAGRIGKQKAVTATARKIAVLFYNALRFGMVYRDPGAAAYDERHRGRVIANLQRRARSMGYELAPMTAGDCVS

SEQ ID NO: 407448 - protein, 385 aa, unidentified
MLTQGFQATAAANQDGTIYLAFELSKSRWLVARLLPGSSKISRFRLEGGDTAGLLQLLTEAREKAARLGFAKPRIVSCYEAGYDGFWLHRWLQAHGVDNRVLDPASIEVPRKARRAKTDKIDLAKLMRVQLAHERGEPQVCSIVHVPTVAQEDAKRVSRERASLLQERISHTNRIKGLLFAQGVRDTDPLARNFLARLDELVTPDGRRLSHHLLGELRREHARLSLVVSQIAKLEAEVRTAVQQAQPGTPEAKMALLVQLKSMGPTWATLLVNEVFYRDFHNRRQLGAYLGLTGTPYNSGQSVREQGISKASNGRARNVALEFAWLWVRNQPKSALTRWFLNRVGEAKGAVRRIAITALARKLMIALWRYLETGLVPTGAVLRTK

SEQ ID NO: 407449 - protein, 407 aa, unidentified
MGRCIGLDIHRDFCEVAIWQDGTVRRAPRVAARPEPLEQFARQLGPEDRVALEATGNALLIARIIRPHVRQVVIVNTRRLAAISDAKQKTDRHDARTLAQLLAAGMLEGSWIPDETTRALRRRVSRRARLVVHRTRCKNEILAVLHRNLKERPPMTDPFGVAGRQWLSEQTVPVDERETIDAALRQIDFLTGEITTIERHLATFVLHSADARRLMTVPGVGMITAAAFLAHVGDITRFRTPDRLVGYLGLDPKVRQSGDGPAHTGRISKEGASIVRHVLVEAAHTTVRSPGPLRAFYERIRARRGQQIAIVAVARKMCVLFWHLLSTSQDYAYSLPTSTAKKMRTVELKAGAPRRPGRADGPRQPLNREQRRELERQSAEHAQTAYERTVTDWHHQERQRATTTAPT

SEQ ID NO: 407450 - protein, 347 aa, unidentified
MKKIIIGIDVSKEKCDATAIFVGKGLLEVAKLDYFVFENCAKGFRSMLSWAKKLMSDVLQEEFLFICETTGAYDRALCDYIYSKGLDIWRESALQILMSSGVRRGKDDKADSLMIAEYAVHHMDKMHLYESPDNRILEIRALFLYRRKLEQEKTSKLVRIKELEATAGKSKTLTFILRDAKKSVRQLEKSIKVCEEKIRELMKEDEALQKSYDHLDSVKGLGIVNITALIVYTNNFKAFRTSRKMATYWGVASFRSKSGTSVDKRVDVRNLSSSMLKSYLTQAALHTIAKGGIYHDYYQRKIREGKNHSIALNNTKNKLLHLAMSLVTNDMDYEENHEFLRTQRNEM

SEQ ID NO: 407451 - protein, 451 aa, unidentified
MAQSPSSSRRRHRSGMSVINTRAAGIDVGAQFHVVAVDPECTSEPVRSFRSFTADLHELAHWLKQVKVTTVAMESTGIYWLPVFEILEAQGFEVVLVNARDAKGVPGRKTDVNDAQWLQQLHCYGLLRASFRPKQDVATLRSYLRQRERLIEYAASHIQHMQKALMQMNVQLHHVVRDVTGVTGMKIIRAIVAGERDPKSLAQHRDVRCKASIETIEEALGGHYQGEHVFELTQAVALYDFYQTQITQCDVRIESALKRLQTNVAVSDPLPPARCRTQQPNGFAFDVRAALYAMLGVDLTEIHGLGPYVALKLVAECGSDMSKWPSSKHFTSWLCLCPGNKISGGKVLSSKTRRSSSKAAAALRMSAIVLGKTDTALGAFYRRLSSRVGKAKAVTATARKIAVLFYNTLRFGMNYVDPGAKYYEERYRERVLNNLVRRADSLGYVLQAKAA

SEQ ID NO: 407452 - protein, 381 aa, unidentified
MKPRLVALQETSVARTAKLFVSLELGDKKWQVAASDGGVRVSEYTVSAGDGPGLLAAIERARGRFALGKDAPVVSCYEAGRDGFWLHRFLEANAVRNHVVDAASIEVNRRQRRAKTDRMDARKLLSMLVRFDSGEKNWSVLRVPSPADEDARRPHRERERLMKERKAHIARMKSLLVLHNVRLKRVGGKGWAERLAALGLGPRLRQELEREAERLRLVDQQIGQITAEQAKALNEPASAQAQDQARVKQRCLQQLRGLGAIGAWVLARELFAWRTFNNRRQLAGSVGLGSSPYSSGTLERDQGISKAGNPRVRTLMVELAWSWLRYQPGSALTKWYMQRFGHGSGRSRRIGIVALARRLLIALWRFVEHGVIPEGAKLKAA

SEQ ID NO: 407453 - protein, 364 aa, unidentified
MLYLGIDQHRKQLTVNLRNEQGDVVLRRQVSTQWERVRKFFTELRQQAEPEGGFMAIVEVCGFNHWLLAMLQEYGCQDTVLIQPEKRTKKKTDRRDASQLGQVLWINRQRLLEGKAVHGLRRVVPSTPEQEENRQLTALRQRIGQLRTRTLNKIQHVLLKHNLQQDCPTKGLQTQTARRWLAKLPLAEIDRLEMDLLLKQWELWESQLKDLEEKIESRQRLDETAAIVASMPGAGAYCSLALSSRIGSIERFPRPGSLANYWGITPGCRNSGDAKERLGSITKQGSVMARFILGQMVLHVLRKDSHMKSWYQRIKKRRGAKIARVAVMRRLACILWHMVKYKQPYVLGGSVHVKKVKETREAIA

SEQ ID NO: 407454 - protein, 360 aa, unidentified
MVMLAEQYEYVIGGDPDRDTIDLAVVDVGTGAALAFYADRADRPGYHRLLEWAVNQAPGRRVWALEGTGSFAAGLAATLAEAGEDVVEVGAGKRQRGAKSDRIDAVRAARTALSCDHQAQPRARGLREALRQVLVTRQGILVSRTKAINEMKSLIVVSPEYLRASLRGLSLAKQLQRIRALGSPEQATVEHRITVLTLQSIAARVEFLQAQTAQLEPELLELVTEHPAGPALLAEPGVGPVVAAQLLVSWSHRGRVRSEAAFASLAGTAPLEASSGQRSRHRLNRGGDRDLNRALHTVAITRLRCHPESMAYEVRRIAQGKTHRDVRRSLKRSLARRLYRRMQAATKPLEAPRQPTPTAA

SEQ ID NO: 407455 - protein, 400 aa, unidentified
MKYYLGIDIGKEHHQAILCDLEAKPIAPSIRFKTTQDGFLELFSYLNKYIPNGDYSTIHAGLEATGIYWLTFYEKLKKQNIQVSVLNPMQVKAYRNEGIRGAKNDRLDALLIVKVLRFGDYRDSDIPPEDLFALRQLTRLRADLVDMTSSIKLKAIGIFDQVFPEYTNVFADIFGTSSKALLSEAVLPEQIAAIPTEKLTALLKRESHGKYGVQQARDIKKAAEQTIGVTLGLDAFSLSLEILLAQVIHLEKQVEKLNTEIGKRTELRAETLTTIPGIGKVQEATILAEIGNFERFRNDKNGAEKLVALAGLDPKVKESGKYIGRAKMSKRGSPYLRKAIRQVAFVASFGKGKDPMFSHIYEKKIFEGKHFEVALSHVENKMLHVIYSLLKSKKEYKPNI

SEQ ID NO: 407456 - protein, 345 aa, unidentified
MAMLADDVEWVIGVDTHKEAHTAAVVDRLGGVTETLEFPADPAGYRRVLAGVAERGGLRLWGVEGTGSYGAGLTEFLCSAGEHVVEVERPARPLRRNGAKSDTIDAVRAAREVLSGRDLIDPRRRGEREAVRVLLATRNGAVVARTKALNHLHALVVTAPDRLRSRLDGLTSSELTRQAARLRLRADLPVEDQATIRAMRACARRMLVCEQEAAELEAELERILADQVPRLLAEPGIGPISAAAIYLAWSHAGRIRNDAAFAALAGVAPIPASSGQTTRHRLNRGGDRQLNRALHTITLSRLACHPETKAYATRRLAEGKTSREVHRCLKRHLARRIYKLLEHTP

SEQ ID NO: 407457 - protein, 339 aa, unidentified
MGYYASVDLHGDNGYYGVADETGKRVFEKRIANDLPTVLKHLEPYRAQLTNGIVVESTFNWYWLVDGLMDNGYQVHLANPAAIKQYEGVKNTDDETDTFFLIELKRLGVLPTGYIYPKETRPVRDMLRRRMTLVQQRTAHVLSYQSLVARQSGQAISAAKIVKLRVEDLAELYEDPNLRLMGETSIDVIRFLSGKIRDLEKSIEQQNRLTPAYEKLLTVPGIGKILALTIMLETGPIGRFADVGKYTSYCRCVRSRCWSNGKAKGTHNRKNGNRYLSWAYVEAANFIRRYCPEAKSWYQRKAARTNVVVATKALSSKLAKACYFIMRDQVDFDVKKIFG

SEQ ID NO: 407458 - protein, 433 aa, unidentified
MGNYAGVDWASEKHDVLIADGAGEELFAGTFCHDEAGITSLCRALVKRDVEVVAIERPDGLLVERLLDAGVQVLALHPNQVKAARDRFRASGGKSDRFDSFVLCELARTDSHRFRILEPDSEETKAMRALTRAREDLVGARVSLGQQLRAELDRFWPGAVGLFSSIDSQISLAFLARYPSPADAKGLGEKRLAAFLKNQGYSARKTPSQLLEHLRAAPAGRAGQVETRTRRSIVLSLTRTLQVMVEQIRELESEIAQALRTHPDGKLFHSFFISPQSVICAATLLSEIGDCRGRYPHRDAIAAQGGHAPVAVESGKRKNAKFRWACNKRLRRALETVAMSTMKWNPWAADLYAQARARGHNHRRALRTLGRAWSRIIWRCWRTRTPYDPAQHTALKQHITVTIPSPSRPRPDSKTTARIASTLTSSKLQTAGG

SEQ ID NO: 407459 - protein, 491 aa, unidentified
MDQKGKRKPTPADRSVPVEIADAEHELVIERAAAIDVAKGSGKVCVRLPGNSGRRFSRVWDVSARAGTITELAEQLVQLRIEKVTVESTSDYWRIWYYLLEDQGLDVQLVNARDVKNVPGRPKSDKLDAVWLAKLTEKGLLRPSFVPPAPIRRLRDYTRLREDLTRERSRYWQRLEKLLEDAAIKVSAVASTLDTLSTRDMLEALIAGERDPRRLAELARGRMQTKRSELIAALDGRFDDHHAELARLLLGQIDSLTAQIGTLTARIEQLVAAMSESDHDSDDHRGSDAAGPQATSPAGTGDQPTAPGLGATTAIGVETDTATVIECRRLTVVERLDEITGVGQRSAQTIIAEIGLDMTRFPTPEHLVSWAKLCPRSIQSGPISRGGKTGKGNPYLKGALGEAAAAAARTNTFLGDRYRRIVKRRGKLKALVAVARSILVIVWQLLSDPTARFHDLGPDYHTSRVATERRVRNHIAQLTAMGFHVTLQPAA

SEQ ID NO: 407460 - protein, 338 aa, unidentified
MQHLAIDLGGRESQICVRGPKEEILEERRIPTKRLGEYLAKQPHSRVILETSAEAFAVADLAKRAGHDVRVVPSTLAPSLGVGAHGIKTDRRDAQALSAVSCRVDLRSVHIPSEQARAWRTLCNARDALVSSRTKLTNTAKSQLRCRLVLTNKRRSAATPEQIRTLWTELDGSVPPHVERELRVIEMLDAQILEADKEIRQLVKKNEICPRLRTAPGVGPLTAMRYVATLDDVTRFTTAHQVESYLGLTPGEDSSSRRTRRTHLTKAGSPQMRWLLVQAAWTAMRCAPNDPMVIWAIQVAERRGKRIAAVALARKLAGILFAMWRDGTTYNAKRGTAD

SEQ ID NO: 407461 - protein, 362 aa, unidentified
MEYFAGLDVSIEETAICVVGDDGKVVLETEVPTEPELIAEALERFAGRLRRVGHEAGSVSPWLHAGLIELGLPAVCLETRHVRAALSAQRNKTDAADALGIAHIMRTGWFRQAHIKTEECYRIRLLLVQRRNLKRKFLDIENAIRHSLKVFGIRLGKVGRGSMAKAVREAVAGDAMTAGLMDCMLRARAALWEEYLILHKLVTQLAMRDELCRRFMAIPGVGPVTALSFKSAIDDPTRFRRSRNVAAYFGLTSRRWQSGSSIDVKGRISKAGDPDMRRALYEAASAMLTRFKGRDTIKTWGLKLAKTKCHAKARVAVARKLAIVMHAMWRDGTFYVGDPDAEAHEIDTAYAAKMQRLSYARS

SEQ ID NO: 407462 - protein, 362 aa, unidentified
MMKQNIIFGIDVSSKSSTVCVVIDRIKQGETFKITNDSFGYQDLLDRLNQYLITPLVVFEATGVYSLSLQAFLEDYHIKYLKLNPLKAKKLMDNNLRHNKTDKVDAYRLALIQFNAPQKLRAPQPKEYHELQNASRYYEELTQALIINKNQLHRNLQSTFPQIESILSTSSGRVYWTIVSLFPHAQYVLNHNENQIFQSLLAISGIGRQRAHYLTTRLYALARQAYPYDNESSITIRAIQRNIANLLSLSAERDNVINYMEKLAMQANARSLNIYESIPGIAKTTAVRLVAELGDLRRFDTSAQIDAFVGIDPGRYQSGEKDSHLGITKHGNHLARKILYRTITQMETVKATQPCHITDYYE

SEQ ID NO: 407463 - protein, 408 aa, unidentified
MEMQVVFERCSGLDLHKKTVAACVTTPEGRETRTFGTMTADILALADWLQSMGVTHVAMEATGVYWKPVYNLLEPYGFELIVVNAQHIKQVPGRKTDVQDAEWIADLLRHGLVRGSYIPSRPERELRELVRYRKTLIRERSNEVNRVQKVREGANIKLASVATDVMGKSGRAMLEAMVAGTTDPKVLAALAKGRLQDKQPELEQALQGLVGPHQRLLLSTQLRHIDFLDREIETLSEEIAERMRPFEEALGRLETIPGVGRRTAEVLAAEIGMDMSRFPTAAHLASWAGMCPGNNESAGKRKSGRTRKGSPWLREALTEAARAAARTRNTYLSAQYHRLAARRGAKRAAVAVGHTILIIAYHILKGGTTYKDLGANYFDERDKVATVRRAMRRLESLGYKVTVEPMAA

SEQ ID NO: 407464 - protein, 382 aa, unidentified
MGTQTFIPRDYDVFAGLDVDKKRISVTFSDHQGVLKSLTMPYNVEYLVNHVRKYYGDKKVAFGYEAGPTGYGLYDGLEAQAYKCVIASPSMIPRAPGQRVKTNRLDSRGISENLRGGQLKGIHVPTPLYRELRHLTQLRDTLVSEMVGMKQRIKSLLLMEGLEFPPAPAGSQWSFLVKAKLRKLPCSSVVRFKLDQLLDSLEFNEKQVVKSSREIRRFCQTDPELSQCISYLKTLPGIGWIVASQLMARIGDWRQIKNVRQLPAFLGLVPTERSTGERIERGSITHSGDGRLRSKLIQASWSAIRQDGELREFFRAVAKTHPRPIAARVAIVAVAHKLSVRASVVLMKQRPYEIRQKVQSAPLTQEETVPQGTTRRQAVPGE

SEQ ID NO: 407465 - protein, 354 aa, unidentified
MTSTQYIGMDVHKESISIAVRNALGKVVMECVIETKASTILQFFDGLRGDVHVTFEEGTWAAWLYDLLKPQVTKLVVCDPRRNALLQEGNQNDRVDARKLAELLHHNQLRSVYHGDHGLRTLKELVRSYLTITKDLSRVLTRVKAIYRSWAIPCTGKQVYASRHRAEWLGKISEPGVRRRAEFYYQQLDALRSLRQEVRRDLLAESKKHQAWKLLCQIPSIGPIRAAVLLGILQTPHRFRTKRQLWTYGGVGIQTSSSADHHVVKGQLERKKQVEVRGLNENCNHDLKNLLKGAAIVAATKPGPFAEFYAKLVAKGMQPEMARLTLARKIATIILIVWKRGVCFDAQHLKPQTA

SEQ ID NO: 407466 - protein, 350 aa, unidentified
MIIIGADYHPSFQQIAFVDTETGELQERRLQHCEEAEKFYRDLAAQGMKVRVGMEASGHARWFERLLAELNIELWIGDASEIARKRERKQKTDRQDAQHILRLLLKDDFPQIWVPSWENRDRRQLLWHRHRMVQARTRLMNQLQAVALNEGLRYKKRLWRDAGRKQLEAFRLAPWASRRRHDLLELLDRLNPTIAELNQAIEQEVEKCPEAQRLMTHPGVGPLTALAFVLIIERADRFQCGKQIASYLGLVPLEDSSGNRRRLGHITKQGNSLLRFLLVEAAQVTVRSLPEWRRKYVHLTMRRGRKIAKVAMARKLAVRLYWMMRKQWDYEQVKKFGSHAGQPGHRYGVK

SEQ ID NO: 407467 - protein, 408 aa, unidentified
MQVTFGIDVSKSTSTVCELIGESKNELTITNNRPGFIQLLHELTAFSKHPQIIFEATGVYSRTLQSFLEDYGYDYVILNPLKAKKEMDMGRRHNKTDKTDAYHLALIQRLYHHPINQLQSQTYKQLNALSRFYDQLTADLVMAKNRLHQALQSTFPEIENLFSSAKGKNYWQIVVRYPHCDLVRREDKKQLINWLMSLKGIAFKHALRTADKLIELAYQAYPVVSCSSIEVEQVQYYAHRLLNLSDQRENLIARMVKLAKSLPNHDLENLESIPGFAQTTAVRVLAELGDLRRFSNPNKINAFIGIDPGRYQSGEMDSNLSITKHGNAVARKLLYRAIGQIDNAAKTNPCHIADYYESKKLSSQTKGFKKIAIASIHKLIRTIYALIINDQLYDYNVATHNQKDFSCN

SEQ ID NO: 407468 - protein, 339 aa, unidentified
MELYVGMDLHSNNTYIGILDKETQGKVYHKRLPNELPKIVYELEPFRKDIRAITVESTFNWYWLVDGLMDSGYEVCLANPAANQQYKGLKHSNDKSDAFWLAHMLSLGVLKKGYIYPKEERPLRDLFRKRTFFVHQRTSNILSLQGLINRSLGRRINSNSIKTLTQEKIDELFKDDHSRLIATSGVNTIKSLDREIKSIEKAVLEKAKLRKEFENLLSVPGIGKVLALTIMYEVGDISRFEKVGNFSSYSRCISGKWTSNDKVKGKGNSKNGNKHLAWAFVEAANIARRYNKKLNAFYQRKESSKNSLVATKALAHKLSRACYYIMKDQVPYKEELLVS

SEQ ID NO: 407469 - protein, 317 aa, unidentified
MQESLIFIGVDVSKASLSCAVEGSKAVHDLTNDAAAISAWLESQPVEALIAVESTGRYHRLLVTLAQARGHRTFVLNAQDVFFYARSLGCRGKTDRKDACVIAHYLAEHHRLLRPWSPPPAMAEELRELLRCRAGVAHKQMSLKMLLRHVASLVSDAQLIDRQLDELLGSIDARISAVIANDENLSCKCANLRTITGIGLQGAAMLAALFTRITFRNAGAVVAYSGLDPRPCDSGSMTGRRRLSKRGDPLLRRQMYLAAFAATRSKALGPVYRALKTKGFKPTQAMVILARKLLRIAWSLWNSGQRFNPAMLSSLGA

SEQ ID NO: 407470 - protein, 312 aa, unidentified
MASQDVFVGIDVSKDRLDVHVRPLGVGFSVGNEAAGYAGLIARLRPLRVKRIVLEATGGYERALWLALSEAGLVAAVVNPRQVREFARAAGRLAKTDRLDAEVIAHFAETFAPRIGKPDAVADRLGEHVLYRRSLQDELVALEHQRRRLATPALRERADRRLAALRAEVKEIEREMRAIVDSDPAKKALFACLTALKGVGLVLACTLIANMRELGSLSRHQAAALIGVAPLNHDSGTRRGYRAIAGGRRRVRNVLYVATLSAVRSNPPIKEFYRRLSAGGKPPKVALVACMRKMLVMLNGRVRDELAAATIP

SEQ ID NO: 407471 - protein, 313 aa, unidentified
MAIAVSKITLGVDVSKDQLVVFDWHTEERTTLENQPAAIKAWLKSMYGPVRIAVEPTSSYHLELVEQAHTLGFEIYLINPRQLVHYRKAVGERNKTDQADAWLLARYLDRECASLRPFKPQCAKAQRLWALIKRRGVAVSTRQKIQQSFRGTRIPTKALVTEIQKLIHRIDQHIQALIRQLAWQSDYQRCLSIPGIGPVNAAALTAVFHRGAFAGSDAYVAFIGLDVRLRESGKFKGKRKLTKCGEAEIRRLLFCAAQAARSYPPFDNYLQQQLEKGLSKIAAKVILARKLARIAFSLLANQQSFKIQEIAHS

SEQ ID NO: 407472 - protein, 344 aa, unidentified
MEHYAAIDVSLEWSSVGVVDAGGQIVREAKVRSEREALAAFFTESGLAFARIGLEAGPLSQWLHAGLVEAGLPAILIETRHVKAALKAMTVKTDRNDARGMAQLMRMGWFRPVHAKAPMVQEIRALLTARKLLVAKLRDVESSIRGILRGFGLKVGAVSKGKFEARIRELVTGQVMLERVAEPLLRARAALRTEYTTLHRDLLRTVREDAVCGRLMTVPGVGAVVAMTFRSAIDQPERFAKSKVVGAHFGLTPKKYQSGEIDRTGRISKVGDAMVRTALFEAANVMLTRAVRFSTLKAWALRVAGRHGMKKAKVALARKLAVVMHRMWVDGTSFCWGEASVSAA

SEQ ID NO: 407473 - protein, 387 aa, unidentified
MSQSQGTPQANSSTDNRILHMAMELSNGKWKLGLSDGLSKPSLHTVEARDREGVLASIEKAKRRFQLADDVRVVSCYEAGRDGFWIDRWLQSEGIENLVVDSSSIEVSRRKRRAKTDGLDVRKLLVMLIRYVGGEQDTWAVLRVPTEEQEDGRRLHREIERLKDERTQHTNRIRSLLALQGIQVKGTIGTRGWEEQLAAMKCWDGSELPPALKAEVVRESERLEMVREQIKGLQREQCEAVKEPEDEATKKIAQLMLLYGIGMQSSWLFVHEMFGWREFKNGREVGSYAGLTGTPYASGESEREQGISKAGNRRVRDMIVEIAWCWLRYQPESKLSIWYQLRYGGASKRMRRIGIVALSRKLLVQLWRYVELGEVPPGAALGMKKAA

SEQ ID NO: 407474 - protein, 383 aa, unidentified
MCYFQTDVIKTVSPDVEVESKSTNQIRSLTGETEMTLYIGVDLHPHQQTLSWCDTQSGETQTIDLKHDLESVRRFYSSLPEPAVIGIEASAKMVWFENMLFETGHTLFVGNPVLIRKRATSRHKNDRRDAELILELLMRGEFPKLWRRPAMSNQIIEILFLRQSLVRQRTQSYNRLQALAHSVGLPKGRMKTAAFQLVLKQIEMDDASSIRRSHLFWLLTQLNEQIDELNGWLKKKAETDTSVQLLLTQKGVGYLTALTTVHTLGDVTRFQKLSKQVASFAGLDPLERSSAGKTRYGHVSKAGSPLLRHQLGQAAQIALRFDPKLKSVYKRLAKKKPKAVAKTATARRLLVKLSIMLRDNITADEFDRRGRTVGNAGVGQGLQ

SEQ ID NO: 407475 - protein, 453 aa, unidentified
MKTSSLPCIKPNAAGIDIGSRSHFVAVPSDRDIENVKEFGFFTEDLYKLCQWLKKCSIETVAMEATGSYWIPLYDILISSGFEVYVVNARHIKNVSGRKTDVQDCQWIQQLHSYGLLRASFIPDALTSQLRHLMRYRDNLLRQASRQLQLIQKFLVEMNIQLMNAVSDIAGDTAMKIIRAICAGKRDAKKLAGYRDPRCKNSQEVIEKSLLGNYKPEVLFSLNLALESYDHYQRQICSCNKEIEHKTTEFTNRSNGQEIKKKKREAKRNNLGFDTQTSLLKMVGVNLLEIPGMNSKTALTVVSEIGPEVDKWKNSKHFASWLGLSPNNKVSGGKKLSSKTTSSSNKVKFALRMASLALERSPTSLGAFFRRMKARLGAPKAITAAAHKLAVIIYQMIKTKKPYEENGPLYFEKAYKIRAEHRLKQLAKLLGYEISPVEELKTEDLESAEVCIL

SEQ ID NO: 407476 - protein, 464 aa, unidentified
MNKRKRSSEKKVVPAALPVIRPKVAGIDIGSREHWVCGPARVDGEPNVKVFRSTTAQLRELVDWLVEQGVESVAMESTSVYWIPLYEMLESRGIEAVLVNARQLHNVPGRKTDFHDCQWIQLLHSCGLLRGSFRPGDAIVALRATQRQMSNLVEERTRYVQWMQKAFDQMNVQVHRAVADLTGTTGLAIVRAIVAGERDPVRLAQHRDPRCHKSIDEIAQYLTGNWREEHLFNLASSLRLFDAVEEQIASYQKRLLHVIDSLQHAGRQNGSVPPHHNPAKEKDLRSHGEQQLRTALWRFSGVDLTRIDGIGVGAANTILTEVGQDVSDFPNESHFVSWLRLCPRTPISGGKPLAKKRNGLGANRVATALRMAASALRRSKTALGAAYRRIARHKGAAVAVFAMARKLAQLVFRMLRYGADYVDNGEKAYELQFEKRRLAGISEAARSLGFALVPTQPTPATAPG

SEQ ID NO: 407477 - protein, 394 aa, unidentified
MIFVGIDVASDKHDCCILGEEGNVLSIFTFTNDKRGFDSFISTIAAHCGKQGFKDAKVGLESTGHYSINLTNYLLAKRLSVKIFNPLQVNLLRKAQSLRKTKTDKSDARFLAQLLFSDDSKPYSQPLYHISELKTLTRNRYRLVQMRSKLKLSVSRLITILFPELPGAVWSINQKSCYALLLEFPTAKAISEAHLTRLINILSVNSKGKYGREKALQIRQLAAVSIGLDSRATGFELRQAIRLIQGLQEEIDELDAEIKTVMLEIDSPILTIPGIGFTLGAIILSEIGNIENFDNPAKLLKFAGLEPSVYESGKYKASDTPMVKRGSKYLRWALLQAARLVAYRDRTFALYLAKKRSEGKHFFVAMSHVAKKLVRVVFHMLRSAEPFAPLLAAA

SEQ ID NO: 407478 - protein, 318 aa, unidentified
MARIICGVDISSRTLDVCLGGMGLQAQFANSSEGIAQLGALCLQNDVELVAMEATGGYEQKALHGLSSMGLPVAILNPRAVRQFAQSMGRLEKTDAIDAAIIAQYAAVRKSKPVLVAPARQQQLRALVTRLRQLTGLRTAQRNPARLVEDELVRRCFLELLSLVDAQIGELEQQIAARIASDPLWRQLDPVLRTIKGVADRTVARLFAELPELGTLPNKTVAKLAGLAPLARDAGQFQGKRHVRGGRAPVREILFIVGSVVARYEPDFVAFQDRLRQAGKPPKEVRIAVAHKLLTRLNAKARDLRQGQPSAAQQAEAA

SEQ ID NO: 407479 - protein, 322 aa, unidentified
MESFHLGIDVAKAKLDCALRSPDGKIRHKVVSNDAAGFAELQTFLSRQKVSTLHVCMEATGVYWEPVAEFLAALPQVTVSVINPAQIKAFAASRMVRTKTDKVDAALIAMFCQERSPQPWQAPSEAERALRALVLRLDSVQRMRIQESNRLLVARDAVRDGILEHIEWLDAEIERLTKAIRALFDSNDDLDGKRRLLDSVPGLGERTIAILLAFYAQTSRFDNARQAAAFAGLDPRQHESGSSVCAKPRLSKVGHGFLRKALYMPAMVALHRTAWGKLFRLRLAASGKAPKLIIGAMMRKLVHVAFGVLRSGKPFDSAAHGA

SEQ ID NO: 407480 - protein, 389 aa, unidentified
MTQSSCSSSSHPVALDYENTLVLAIELSNANWVLAAQVPGLLRVKAKQTIEPRTEALWAAINGYRERSRAAGRTVKRVVAIYEAGWSGFWLARWLGQRGVEAHIVQPSSIPVDRRAGRAKSDGIDAELLLRTLLAWFRGEPRVCSMVPIPNEVDEDERRRIREREELVADRISLVNRIAAVLATLGVRDYNPLRRDRRARLGALRTALGDPLPPHASARILRILDRLDLVCAQITELERGRDAVLEKEAPDRAEKMIQQLVGLRGIGVQSATVLVREAFVREFANGKRLGSYAGLTPTPFSSGPAEREQGIGKAGNRRLRTVMIELAWLWQRYQPSSALVGWFRERVSGTGRRMRKVMVVAMARRLLIALWQFATQGVVPEGAVMKPTH

SEQ ID NO: 407481 - protein, 342 aa, unidentified
MEKVTIIGVDLAKNAFQLHGAAADGSVVFRKKLSRLQFCRFMAGHPRCIVAMEACGSSHYWSREMARLGHQPKLIAPGYVKPFIKRHKNDAADAEAIVEAAQRPTMRFVETKSEEQQSRAIVFRTREQLVNQRTELVNALRAHLYEFGHVAPQGIGHLRRLAEVVEDENTELPDLVREICGDLLDQIDQLTGRIDALKKTIDALSRKGETSQRLQTMPGVGPIAALAVETFAPPMETFKCGRDFAAWLGLVPLQKSTGGKQRLGKTSKMGQRDIRRLLIIGAMAVVQWASRKGAPEGSWLARMMAKKPRMVVAIALANKMARGIWAMLTKQEDYWNPAMARA

SEQ ID NO: 407482 - protein, 407 aa, unidentified
MDITPIYPRVIGLDVHQAKISACAIAEQADGTVTVEHREFGAFQRDRRALAEWAKAFGPTVVVMESTGVYWKSPYAALERAGIVAWVVNARHVKAVPGRKTDIADAQWLAILARAGLLRGSFIPPAELRNLRLVSRQRQKLGGMLAAEKNRLHKVLTDAGIRLNVLVSDLHGQAGRAMVKAIIADQPMADVLKPAGRLKASREELFEALQTDDLTATHRFVLAEIMAHIEELETRMSRFETALLEGLVSWQPLLVLLQTLPGIDQIGAAMLLVEIGTDMAVFGSAERLASWVGICPGNHESAGKRKSGKIRKGNAWVRRLLCEFAQAAARSRCALKDKFTALTIRKGHKKSIVALAHKMLRIIYAMLKNHTPYQDRAIDYEALTVQRNAPRWIKMLVKHGFITPATA

SEQ ID NO: 407483 - protein, 345 aa, unidentified
MHIASIGIDLGKTTFHLVALGERNKVLVRKKFSRTQLLSYTANLPASLIGLEACAGAHFMGARLREQGHKVRLIPAQFVKPYRKSNKNDFIDGEAIAEAVLKENMRFVPIKTQEQLDVQALHRVRDRLVQRRTALINEIRGFLLERGITFAVRSIHLRKNLPEVIEDAEQNLSSHLRWLLDRLWQEWKQTETEIEVITDEIERISNEDARCRQLRQIPGFGPLVSTATVAAIGNGSAFRRGRDFAAWVGVVPRQYSTGGKQKLYGISKRGNIYLRRMLIHGARAVLFRVKYDTGGFGQWVHRLAQRAPSNKVVVAIANKLARIAWAVLSSGKEYRHQPLPQRAAA

SEQ ID NO: 407484 - protein, 396 aa, unidentified
MSFKIIKNNCCGLDVHKTWIFACIGITDSNNRTEYKQARFSSFTKGLNQLCDWLAKYNCKDVCMESTGKYWIPVFNILEHHNLWVTLSHPKYTKPMKGNKTDRKDAKWICDLYMCGMVKPSFIPTADIRELRDLVRYRYKLTCMITGEKNRAQNCLTVSNLKLDEVFSDVFGKSSRSITEQILQHPGEAFDVAHFVHGRCKTPIEEIQAAVDGAISKEQEILRLSDKYEVALNLIRTVPGFDKNPLTAIQVLSEIGGDMSVFPTAKHLVSWAGCCPRNDQSNQKIKSTRISRAGSYFKPILVQVANALIKSKKHPEFTTRYKRIKARRGHKKAIIAICRMILTAIWHILSDLEPYTPEGFLESRPVKEEKVLSTSQALNLLKQRGYIIKDEPLAVS

SEQ ID NO: 407485 - protein, 400 aa, unidentified
MMTPDDIDVWVGLDVGKSAHHAHALDHDGNTLYNKPLKQDEKAIRTMLGKLSKHGRVLLVVDQPNTIGSLPLTVARNMGIAVAYLPGTAMRRTAQLLPGDAKTDRRDAHVIAWAALKLPETLRDAGPDDETLAALKLLAGHDEDLAHESTRHVNRLRSLLLQTHPAFERALKGERITRDATLALLERYGGPMGVKRAGIEDVKDWAKSNGLRAGRIIDDMFKAIGEQTVTVPGTLMAETIIPSIAHDIKTIRDRRREVGRQVEKLLEDHPLLTVLTSMPGIGVRTASNILLGIGGDIANFKSSAHLAAYAGISPVTGQSGTSIKGERPSRRGNKRLKNALWQTAFVASTKHPPSVAYYKRKREQGKHHNAAIICLARRRCDVIYSMLKNGTLYQEPALVA

SEQ ID NO: 407486 - protein, 350 aa, unidentified
MVVVGADVHKRSHTFVAVDAVGKQLGQLTVDATTKGHHKALAWVRKSFPGEVVWAIEDCRHLSARLERDLLTAGQRVVRVPPKMMAMVRASARTRGKSDPIDALAVARAFLREPDLPVASHDAASRELKLLVDRRESLVNTRTRTINSLLWRVHELDPEHAPKPRSLDLAKHQQALRSWLLGLDGIVAELALDELDDVIALTLRIKGFHKRITKLVEKAAPTLLAMPGCGELTAAKLVGESAGITRFTDEAKFARHAGVAPIPVWSGNTAGRVRMTRSGNRQLNAALHRIAITQIRLDGCLGKVYYEKKMAEGMSTTEALRCLKRRLARTVFNRLQADNKVAPDSQPAAA

SEQ ID NO: 407487 - protein, 419 aa, unidentified
MERVAQEEFAALVGLDWADAKHDVCLQATGTARREFLRFAHRPEAIDAWVQTLRTRCNGHPVAGCLELNKGPIVSAWRKDDFLVLFPVNPLTVATYREAFTPSRAQDDPTDAALQVALLLKHRDTRKPLQPQSPAMRALAQRVEHRRRLVGDTVRCTHRLTSALKNYFPQVLQWFPEQDTAIFCDFLSRWPTLKAAQLARRSTLEGFFRAHHVRAADVIDTRLQAITSALALTTDDGVITPHVLLVHALIAPLRVTLQAIADFDNAIAQRAQDHPDFPLVDALPGAGAVFAPRLLVAFGAQRERFASAEELQQSAGIAPVTERRGKKSWVHWRLQCPTFLRHTCVEWAAESTRHAFWAQVYSQQQRDTGKAHQAAVRAFAFTWIRILFRCWQDRTPYDESVSLQALKRRSAPLLHNLAN

SEQ ID NO: 407488 - protein, 401 aa, unidentified
MRYVGIDISSEKHTVAIVDGESAVIVKAKDFTEDHIGYATLFEILGEDVEDHFVAMEATGHYWQNLFAALVAKGFKVVLLNPIQTRRFADSSLARTKTDKIDATTIARFAAEKKPTATIMPDEATLELRELVRMRDRYVQDFGDRVRQLHRIVDLGFPELTRFIDDLGTARATTILRHYPTAAEIAKQSPKKLAKLVYDGRHAIGETLANTLVDAAKKSIGRHHGRAYKMQAVDLCEDIDVLRARIKRLDKDVSDTLDKHDIGKLLMTIDGIGENTAARIVGEVGDPSTFRDAGALAAYIGVVPALWQSGKRQSMRAGLAPIGHADLRAKLWMPVLSAIKRNPWLRAFYDRLIARGKLPKVAIVAAMRKLLAAIYSVAKNRRPFTPILATTSAPTAVENSC

SEQ ID NO: 407489 - protein, 316 aa, unidentified
MTSSETFVGIDVSKAQFDVAVRPTGEHWTSAHTEAGITMVVARLVLLRPTLVVLEATGGFEISLTGACATAGVPIVVVNPRQVRDFAKATGHLAKTDTLDAQVLAQFAEAVRPTPRPLPDVQTQELAARLTRRRQLVEMLVAEKTRRGQASSHIQKQIQVHLTWLERRLRDLDEELATAIRSSPLWREKDELLQSIPGVGPVVATTVLASLPELGILSRQQIAALVGVAPLNRDSGTIRGKRTIWGGRAHVRATLYMAAIVASRCNPMIRAFYHRLCAAGKAKKVALTACMRKLLTILNAILRTRRPWQDRWAPEA

SEQ ID NO: 407490 - protein, 405 aa, unidentified
MVRYIGMDVHREFAQLAVVEDGLLRDLGRIAVTPEALRSWAGDLGQDDEVALEATGNSDAIANLLIPIVGRVVVSNPSKTRAIAEAKVKTDKVDARILAQLLAADFLPPVWLPDDRTRALRRQVTRRAHLVRLRTRIKNQVHAILARNLAPTPPVSDLFGKIGRHWLSMQPLPADERSSVHGLLRQLDFHGAELAVVDKELAVEALADPAVARLMTIPGVDAIAGIAIMAAVGDFHRFDDPDRLVAYVGLNPKVRQSGNSAPVHGRISKAGRAQVRGVLVEAAWSASRAPGPLRAFYQRIQARRGFQTAVVATARKLTVLAWHLITKDQDYAFARPSLVTHKRRKLELAAGAPSRRGNHRLPGAAYNEKQRRSEERKIAEQAEHAYQVFVAHWQPSKPSGTRAAG

SEQ ID NO: 407491 - protein, 400 aa, unidentified
MLYLAIDQHKNHLTINIRNEQGDVMQKGQISTNHAEVDDFFVAFAKKACKHRGYMAIVEVCGFNDWLLEKLRKTRCSEIVVIQPDNSAVNKTDKRDANALGELLWNNRKRLQGGQRPNGIRRIFPAAPADAQVRQLANFRQRLLKHRTMVINKIKGVINKHNLTHDVPSENSGTQKFRKWIKTVQLPVIDRFEVNMNIEAWELYDKQILEVEGELVKRSEATQEKMGDVYRLKSIPGISAMGAITLLSRIGDIKRFKNPDSLANYFGLTPGCHNTAGKHRVGGITKRGNAVARQVLNFAVIHVVRKDPVMKEWHKKIKRRRGTNTARVAENCLHGTKDKEYGEDKHVLGRSSWGEVWTVLTNIAVSLTNLLHQGERTLREVREKCSHNPMPIARKLGWKT

SEQ ID NO: 407492 - protein, 403 aa, unidentified
MNAAGIDVSKGKSMVSVMRPLGEVVAKPFTVCHTGSELKELADYLKSLDGETRVIMEHTGRYYEPVAQFLHDAGLYVSAVNPKLIKDYGNNSLRKVKTDKADSKKIAKYGLDNWGELRQYASMDMIRYQLKTLNRQHALYSKMKTAMKNNLIALLDQTYPGVNALFSSPAREDGTQKWVDFAASFWHADCVRGMSQTAFTERYRKWCKRNRYNFSSDKAAEIYTGAKDQIAMMPKGDLTKRLIRQAIDSLNTVSRTVEQLKAEMLKLASQLPEFPVVMEMHSVGDSLGPQLMAEIGDVTRFVHRGSITAFAGVDPGANQSSEREAKSVRTSKSGPPELRRTLFLVMDGLLKSMPQDDPVYQFMDKKRAEGKPYLVYMTAGANKFLRIYYGRVKEYLASLETAD

SEQ ID NO: 407493 - protein, 356 aa, unidentified
MLAEVVDAVVGIDTHRDTHEIELADRTGIPIATTTIGNDSAGFADLLEWITTHAPGPRVAVAIEGTRSYGVGVARAVAAAGLAVIECEQPNRKIRRGRGKSDPIDAHLAVLTALRMDTTRLPVPRADGDREALRILLGARNELATAQTAQINRLRALLLDGDDRDRQLARATLPEPVLTALARRRCPPDADRATAVRHHELRRLAVAVRATARQLKANRAQLQAIVDDLAPGLTDRPGIGPVTAAQAITSFSHPGRCRHDAAFAALAGTSPLPASSGRTVRHRLNRGGDRALNSAIHTIAKTRMRCCDRTRAYVTRRTAEGKTDREIRRCLKRYITRELYRALTDAMTPTTTLDNR

SEQ ID NO: 407494 - protein, 403 aa, unidentified
MNAVGIDVSKRKSTVTIRRPGDQVVFEPSDFRHTQSDINALIRIIKNLDGETKVCMEHTGRYYEPVATWLSDAGIFVSAVNPILIKQFGNDSLHAPKTDKADARKIARFALDRWPNLKQYGPMDEIRNQLKTMNRQFGFYMDQKTAMKNNLIALLDQTYPGANNFFTCPVRSDGSQKWVDFVYTYWHVDCVRGRSLEAFTEHYQNWCRRKGYNFSAAKAEQVYRASADLIAVFPKDACTKMLIHQAVDALNTISRTVEALRAEMDKTASMLPEYPVVMAMNGVGPTLGPQLIAEIGDITRFEKRGSLTAFAGVDPGKNESGDYVQKSVHTSKKGSPHLRKTLFQIMESLIQRAPADDPVYAFMDKKRAQGKQYYVYMTAGANKFLRIYYGRVKEYIAGLSESD

SEQ ID NO: 407495 - protein, 341 aa, unidentified
MSKVTVFVGLDYHKDSIQVCVMDQAGTALANRSCPNDAGAVALLVTFYGDDVRGAIEACNGAAQVADELITRHGWDLSLAHPGYVARMKQSPDKSDYSDAKMLADLVRVGYLPRVWLAPGDVRQLRTLVRYRQQLVNERRAAKLRVTALLRDARVAEAGLRRWGRPWLAWLASADGLGSEARFVVDAHLADLRRLDEAIAGVERRLAAVTADDPVVAQLVALRGVGAVTAWALRAEVGRFDRFRTGKQLARYCGLSPRNASSGQRQADAGLIKAGNELLRATIIEAAHRLIRFDDRWKALASSLRAAGKPACVVAAAVANRWVRWLFHRVEGGAIKLKAAG

SEQ ID NO: 407496 - protein, 388 aa, unidentified
MIYVGIDIAKLNHYASAIDSDGVVLIEPFEFLNDNAGFYTLLSKLNSFELDDIIIGLESTAHYGNNLVSFLVTKGLHVCVINPIQTATLRKNNIRKTKTDKVDTLVIAKAVALMDHPRFVTLYDIALMQLKNLGRFRMKLVKQRSRTKIQLTAYLDQVFPELQYFFKSGIHQKTVYAILKEAPSATRIASMHLTHLKNLLVSNSHGHFKKETALELRVLAQKSVGTADRSLSIQITQSIAQIELLDSQLDAVESEMKDIVTSLDSVIMTIPGIGPINGGMILGEIGDINRFSKPRKLLAFAGLDPSVYQSGNFIAKKTKMSKRGSSALRYALMNAAHNIVKYNQTFREYYDSKRVEGRGHYNALGHCAGKLVRIIYKMLKDDVEFNLD

SEQ ID NO: 407497 - protein, 353 aa, unidentified
MKPRMKSNTSSAVVIGVDIGKDIFHLVGFAADGKTAFRRRIRRLGLKDAFEKLSPCIVAMEACLSAHFVSRTLRALGHEPRIVPAIYVKPFVKGQKNDYNDAEAIAEAALRPNLRFVQEKSQDQLDLQACHRVRSRLVSRRTATINQIRAFLIEQGIAVRIGPRALRKSLFAILENRKDEISPRTAKLIRGLYEDWCCLDERIETVTSEIEALSRAEAKCRQLMSVPGVGPLISTAMVAAIGSGEAFERGRDFAAWLGLVPRQYSTGGRSILGRISKRGSKYLRTLLIQAAKVLLMRPYNWARYSFGPWLNSASERLHRNKLAVALANKLARIAWSVLRRDKAFDTHLEAAAI

SEQ ID NO: 407498 - protein, 343 aa, unidentified
MQISTIGIDLAKNFFQVHAVDHQGKVVLVRQLRRKQVIAFFGKLAPCLIGMEACATAHHWARELIKLGHTVRLIPPSYVKAYLKRSKNDAADAAAICEAVTRPSMRFVPVKTVEQQAALTVHRMRDLLISQRTQLINALRAHLAELGLVAEQGRDGLTKLVAIVTDESNLEALPVAMQQALQVAVAQLGSLQQQIGELERSIHAQHRTSDVSRRLESIPGIGVIGATAIAATITDPSAFKSGRDLAAWIGLVPRQNSTGGKVRLGRISKQGDRYLRRLLVIGATAVVQHARRHPEKHPWIAKLLVKKPAKVVAIAVANKTARIAWAIMCNGGTYRAPTRAVAA

SEQ ID NO: 407499 - protein, 315 aa, unidentified
MTQINITTAGIDTSKARLDVAVHNRTERWQVANTLSGWRTLAASLARAGVTRVGIEATGGYERGVVEHLRAAGLVVLVLQPMQVKAFGRAHLRRAKTDRLDAMLIAACAASLDQPRIAPDPRLVELAQYLTFLEQIEEDIVRFKTRLEHIDEVELRRIVDSDIKQLKERRAARIRYLARRLRAYPDLARRFELVLSVPGIGERTALALLIRMPELGRVSREEAAALAGLAPFNNDSGKHEGDRHIAGGRGRLRRSLFAAALPAAFRWNKALISLYARLIARGKAHNAALVACARKLLIYANTVVERGTPWVENAA

SEQ ID NO: 407500 - protein, 401 aa, unidentified
MAAVPSRTWIGVDIGKSHHWVCAVDKAGKKLLSRKVLNDEAEIDEVIAAVNELAADRVWAIDILGTPSALLVALLARSGEQVRYASGRVVAAMSTAYAGEGKTDAKDAYVIAETARIRADLAVIDAESDLVRTLGLLTGHRADLVADRVRMINRLRDLLTSVFPALEREFDFASCKGALVLLSGYATPEAIRRMGETRLSRWLRQRRVRGYADVAARAVAAAQTQHTVLAGQDVAVSIVAELAGTILAQHERLKLLDQQIQDAFAQHPQAEVIESMPGFGPILGASLLVAAGDLAAFPTAGHLAAAAGLVPVPNDSGRRTGNLHKPRRYSRPLRHALYLSAQTSMIRAGPNRDYYLKKREQGHTHSQAVIALARRRIDVLWALLRDNRTWTPAPPARAQAA

SEQ ID NO: 407501 - protein, 391 aa, unidentified
MTEESFTWFVGVDWGSEKHHACILDTRGTVVGERQFPHSGVGLAELGDWLLSIAGTTATVAVAIEVPHGPVVDSLIDRGFVVYAINPKQLDRLRDRFSVAGAKDDRRDAYVLGDGIRTDRRLFRRLHVADPRIVELRAWSRLTEELQEERVRLGNRVQQQLWRYYPQMQKITNDLAAPWFLALWAMAPTPGKARQLRRSTVEQILKKHRIRRIDADTVLRMLREPAIKVAEGVAEAASIHLRSLIARLHVVNRELRQAEQKLDQLCAGIGETEGAPGECLQRQDIMILKSVPGIGRINLAALVCEASGPLRSRDYPALRTLCGAAPVTKRSGKTCTVVMRYAAQVPPRVRPVVACLGLRNEGARVIESGTVRRSIQGPHRGAATATGERGH

SEQ ID NO: 407502 - protein, 407 aa, unidentified
MFVGIDVAKDSLVACAMDDQGEDVFPSYSVENNRPGCLKLINLIADNANLLKPDIIKVGMEATNVFWEHCYRLIKNHEKLNSNFKLQLYTVNPKVVSNFKKAYTDLPKNDNVDAWVIADRIRFGRVENSSSPEALYRALRQITRHKFKLAQHIKAEKARALNLVFLKFSDFTQKSPFGTFTKASMALLENYTLREIVNTDIHELAEFLHQNSNNRLGGSTPIEKITTALKKAARNSYRLKPEIDQAITQTLSMTFDNIRFYQSQNKRLKKVLKRQLKAIPQTLITVDGIGPVLTAGIISEIGDINRFDKETNLASYAGLTWSQYQSGSFTAEETNLTKKGNKYLRYYLVEAANSLRVHNDRYKSYYYKKYNEVPKHKHKRALVLTARKFVRLVFALLSKGEIYQPRR

SEQ ID NO: 407503 - protein, 343 aa, unidentified
MAKHTLVAVDLAKSVFEVAVSRHPGQVAKQKRYSREQFPLVLAQLPEATVVMEACGSAHYWARRVKALGHEAVLLPPHAVRPYVRRNKTDRTDTKGMLEAYRNEEIRPVPVKSIAQQTLASLHRLRSGWLAERTARINTLRGLLREFGILIPLGAQHAVPTTWAQLEDAESEIPDPLRPALAEICQEIRELERRVKMIEGQLAALAAQTPAVNQLMTIPGVGLIIATALVAFVGDIQRFPSGRHFASYLGLTPRESSSGLRRRLGAISKRGDVYLRTLLIHGARSVLLAAKRRHPDRLRAWALAKETARGHNKAAAALANKLARIIWAAWKHDRPFHSVPQVA

SEQ ID NO: 407504 - protein, 314 aa, unidentified
MITQTKAFSRFLGCDVGKTEIVVFDSHTGLITTIANHPRDLATFAATLDATCLVVCEATGGYEAALLSAVVEAEIAAHRADARKVKAFIRSFGILGKSDAIDAGALARYGRERQAILAPWQAPAEQQAALQALVLARADLVAERTAFGNRLAAPGSGVVRGCIKKLLACLDAQIRVIDAAIAALIRTHQPFERAAKALQTIKGIGPQTTAALLGLMPELGTLDCKQAAALAGVAPHPKQSGGRDAYRRTKGGRPEVKRVLFMAAMVAAKFNPTLRPFYERLIAGGKQKLVALTAVMRKIIVIANARLRDALAAA

SEQ ID NO: 407505 - protein, 546 aa, unidentified
MSKANRWLLVCAERTSMITIPVIMERCAGIDVGKRGLAVAVATGPADKEAEIRTRWYGTTVPALRELQGWLREYGCASVAMESTGSYWIPVKNILEEECKITLVCARKHQPKKGDKTDFRDAINLAIHHRHGLLTGSYLPERGIVELRDLTRRRKKLIGNLQSEKNRIQKVLETANVKLGNVVSDVFGVSGQEILQALLEQKPATAEELAGLAKRRLRTKIPQLTEALESHQMNGHHRWLIEQSIQHAKFLDQQVEELEEQIQKHLEPYRRQYELLMTIPGIKEAGAANILAEIGPDMNQFPDGDHLCSWAGICPGNNRTAGKSKSSHIKKANKFLLASLVEAAWGASRKKDSACQRKFHRWMGKLGKKKAVIAICRSQLRVIWSVLKNDRPFVEPDATVLKTLEREKQIRHHALRLRQLGADEETIAAMVENLLEDAPILTDPGVDTAEVSETIDPPPADAPEIADPACQPPPTCSPRNKASRLPKHQPPTRGVLGFRIHTREKKQYSVFKEPPGTATPPPATTSPRKRGRAPTRKKGGAHAPEH

SEQ ID NO: 407506 - protein, 377 aa, unidentified
MSKIRFVGLDVHADTIAVAVAEPDGEVRSLGVYPNRLNSIRKLVAKLGPAKNLKACYEAGPTGYVLYWQLTALGVACEVIAPSLVPVRAGDRVKTDRRDAVKLARSYRAGDLTPVWVPDADHEALRDLVRAREDARQDQHRARQRLSKFLLRHGRRPPETIKKGWTLKYMTWIKEQVHFDQPALETTLLDYVHEVDHMAERIERLEKAITSAMEKAPAEMRAVVAALQALRGVALITAVTVVAELGKLSRFPSPRELMGYSGLVSSEFTTGNRVRRGSITKTGNAHLRRVVVESAWAYQYRPWVGGFLLKRQKGLDQDIKDIAWKAQWRLHKRYKHLAAAGKKKPQVVTAVGRELLGFMWAIAVATEAKFETERTVA

SEQ ID NO: 407507 - protein, 355 aa, unidentified
MNDAKYIGMDVHQATVSAAVRDSSGNLVMEAILETKAETILQFIRGLRGSLYVTFEEGTWAAWLHDLLQPHVTRVLVCDPRKNALLKVGNKNDRIDARKLSELLYLNKLSPVYHGEPGIRTLKELARSYIAMTRDLTRVMSRLKAIYRSWAIPCAGKQVYAPRYRAEWLARISEAGVRRRAELYYQQFDALAALRQQARRELFAEARKHLAMRLLRQIPSIGPIRAALLIALLQTPHRFRTKRQLWAYCGLALRTYTSGEYRFVGGQLKRSKKVLAVRGLNINHNHDLKNIFKGAATRAASTAGPFQHFYEACVARGMKPHLARLTLARKIAATTLLVWKKGVRFDAEHLKQQAA

SEQ ID NO: 407508 - protein, 396 aa, unidentified
MDITNVLENQSFVHVGVDLAKNVFQVAYMEPRTNTLVNQQMNRTKFEKFLKDSKIKFKVVMEACSTCHYWGRECRKYGHLPMIIPAEITNSINIGSKDDKNDAHAIWQASFLPAIKTINVRSEENQAEGYLLKTRDFVLKIDTETNNNLKALLSEYGCVCNTTDYEKTKAVAQAFLDKSFQENKPWASTLKASVDALNKVREAIHESEKKLHEKIEETAKNNDLVQRLMTIPYVGPITSLAFANVMADPALFKNGRQFADYCGETPYHTGSGGKVTILGIARKGNPVLKRSLYEGASGLYNRVKTGIESKTCHYYQSDWILNLVCRKPRKVAICAIANKMCRIAWAVAATENGRYDRTKTSLVSVLMKSPEQIEQQKAAKAQAKAQAAAKASAKAA

SEQ ID NO: 407509 - protein, 344 aa, unidentified
MSEVSTIGLDIAKSVFQVHGVDVAGAVVVRKRVGRAKMLEYFGELPPCLVGIEACPSAHHWGRELQALGHTVKLIPPSYVKAYLKRGKNDANDAAAICEAVTRPSMRFVPIKTKEQQTALMLHRTRQLLVRQRTMLSNALRGHLAELGIVSAKGRNGTAELLRIITNGADSRVSPAVRDILDVLARQYSAIGIEIASIDRSIMALHRGCEASRRLAEIPGIGPIAATALVAEIGDWKTFSSGRSLAAWIGLVPKQYTTGGKDRLGSITKQGNRYLRWLLIVGAMAVIRYARKHGTEKRPWLGRLMERRPTKVAAVALANKIARMAWAIMVRGERYKEPKLLLAA

SEQ ID NO: 407510 - protein, 347 aa, unidentified
MNSVGIDLHRNRSHIAVIDEHGELALSRRITNDRETFLELLGGLEGENRVAVEATYGWEWLAELLEDAGYDVHLAHPLRTRAIASARVKTDAVDAKTLAHLLRADLLPEAYIAPREVRDLRELLRHRAALTAMRAALKNRIHAILAKHGITRQHSDLFGKGGREFLAALQLRDAPRRRLDSLLALIDDFDREITATTKEIDQAAKADDRVEVLTQIRGVGRYTAMLIIAEVGDITRFPSARHLCSWAGLTPTVRSSDGKARLGRISRQGSPALRWALVEAAQKSTTGGDRLREHFERISKRRGRKVAKVAVARHILTLSYYGLRDGEIRCVAPRSRASAKEKLASAA

SEQ ID NO: 407511 - protein, 415 aa, unidentified
MDVIVDRCAALDVHKNTVMACVRKPGSGKRRAQEVREFRTWTSTLVELREWLRAEGVTQVAMEATGSYWKPVWHVLVELDEVELMLCNAHHVKNLPGRKTDVGDAVWLCQLLECGLLRGSFVPPTEIAQMRDLTRYRTKLVQDRARETQRIQKLLEDANIKLDSVVSDVLGKSAREMLEALMAGERDVEVMADMARTRMRSKRPDLRLALEGRFSGHHALMLGMHLDHIDHLSLAIDEISKELDDRLVPFAEQVALLQTIPGVGLRTAQVVIAEIGVDMDRFPTAAHLASWAGLCPGNHESAGKRRSGKARKGNEALRSALCEAAWSAARTKDTYLSAQFRRFCRRFGKRGESKAIFAVAHTMLVIIWHVLAEREPYSELGSDWFERRSDTAAHTRRLVHQLEKLGHQVTLEPAA

SEQ ID NO: 407512 - protein, 370 aa, unidentified
MKETITSFVGLDVHKDSIAIAVAEAGRQSPRFIGTVVPRLASLHKVLRDIGRASRTLVVYEAGPCGYGLARRLNAEGYSCEVVAPARIARSPIDQRIKTDRRDALLLARESRAGNLVPVVMPDERDEALRDLSRTREDVLAARLRAHQQMKALLLRHGLTCPGRIVWSAAHERTLSTIRLPHPAQEIAFVEYRNAIKDAHERLERLIEALRLQSSQWRMRPLVQALMCLRGFDFIAAVTFVAEIGDPRRFAHPTALMAYLGVVPSEFSSGKSRRQGSITKAGNQHARRMLIEAAWAYCHSPRVSRGLEVRQQGQPKAIRDISWRAQLRLTKRFRHLRMGRKLPQNKVCVAVARELCGFIWDIARQVKPPV

SEQ ID NO: 407513 - protein, 412 aa, unidentified
MEVVYPCCCGLDVHKKSITACVLWAEAKGKSRKEKRSFGTFTHDLLRLADWLQQCGVTHVAMESTGVYWKPVWNILAEQFEVLLVNAQHIKAVPGRKTDQKDSEWIADLLQHGLLRGSFVPPRPTRELRDLTRYRVSLAQEINRIANRIQKVLEDANIKLASVATDALGASGRAMLEAMLAGEQDSARLAEMSKGLLRNKMPELKLALEGHVTEHHRFLLQQLYDHLLFTESKRKQIEEEIERRMLPFQSEVARLCTIPGVDRVTAWGMLAEIGLNMDQFPSSAHLASWACLCPGSFESAGKRLSGKMRKGNVSLRRCLSQAAWAISMMKNNYLSALYRRIAARRGAKRAVMAVAHALLVIAFHILKRKENYRELGADHFDRIDVSRIRRSLVRRLERLGHRVTLEPLAQTA

SEQ ID NO: 407514 - protein, 391 aa, unidentified
MICVGIDVSKDKHDCFIFSSEGVVLADVFTIPNNLEGFNTLLDKLRACCAPQDSIKVGLEATGHYSYNILGFLLDNGLATYVLNPLRTNLYRKSFSLRKTKTDRVDARTIATMLLSDAGLKPYTDTACHNEELKSLTRYCFDKVKERAKLKQSISRLVCILFPELEKIVPSLHMVSVYTLLAEFPGAEQVAAAHLTRLKTLLADASRGHYGRDMALEIRDAARCSIASRMPAKSLELQHTIRLIQELDAEIEEIETAIRAIMDELHSPITSIPGIGYRMGAMILAETGDLSRFDSPDKLLAYAGMSPSTYQSGQLKNCYPHMEKRGSRYLRYALYNATKYVCHWDPSFAAYLAKKRAEGKHYNIALSHAAKKLVRLIFALEKSRQPYCPAA

SEQ ID NO: 407515 - protein, 364 aa, unidentified
MQDTITKINSKLFIGMDLHKNTSTFCVKNKSGKLIASKKILTDKNDVSRFINSVKEESNNISLVLEPVSQWYYYADLIENLGVDVHLAHPLKVKAISSGKKKTDKIDAGILCDLLRADLLPEAYFSPKEVRGWKEQCRFRSSLLHLRRQVKNKIHAILHKHSLKHNFTDLFGKGGRRWLELLVLPEPYQNNLNQYLLTVDWFTGLIEQAEKSIETTVTKHQQAELLVSIPGISYVSALTIIAEIGDINRFPDAKRLQGYAGLVPTVKDSGDKQIRGKITKQGSKWLRYIMVEAAHHQIRCKKIPGFGSYYNTLKQRKGSKTAAVATARKLLAVVWRLLKDNRPFEITDPRRRKSSLLAENISSI

SEQ ID NO: 407516 - protein, 377 aa, unidentified
MNIKLYLGLDVHKNSIVVATALAEGGNPQSYGKWGGSNLSAERGLLKVRKKFGVDKSEISIVYEAGPSGFVLARRMLQLGYHCILVGPTEVPSKAGDKIKTDKRDARKLARLHRAGELTAIHIPEARDEAVRDLCRARTDASQALARAKQQLGMFMLRNGYRYDGKTNWTQAHMNYLRRTRMQHPAQQLVLEEYILEVDTLIQRVARVEAHMVEFLPNWERQPYVRALMAFKGFKEVAAMTIISELGDLSRFSHPRQLMGYLGMVPEEASSGEKRRQGGITKTGNGHARWMLIECASHYSHAPRVSPQLSARQAGQSREVRCIAWRAQNRLNTRFKRLAARQLHRNKVVVAVARELCGFLWELHLQVTTESKLKTAS

SEQ ID NO: 407517 - protein, 350 aa, unidentified
MDRYIGLDAHASSCTLAVVSPSGKRVGTQVVETNARCLIEAVRQIPEPRPICIEEGTLAEWLYEVLSPHAQEVAVAAVRESRGAKDDRRDAFGLADQLRMGGIQRKVYKERGRFRALAYRARGHRWVTVDAARVKNRIKSVYRSRGVQVAGQAVYAPSKREGFLVKLPREAQPLAELLYEELDALGALKSRAKKAMLAEAKKHPQYRLVKSCPGLGPVRTAELLPIVVTPFRFQSKRGFWAYCGLGLVERSSSDWVRARSGEWIRTPLRQTRGLNQNFNHTLKAIFKGAATTVIGRGKDEPIYRHYGRLLDGGTKPNLAKLTIARQIASIVLAVWRTKEVYDPKRLETIT

SEQ ID NO: 407518 - protein, 345 aa, unidentified
MQIVGCDLHTRYQQIAMLDQETGELVERRLEHESGEARAFYAALSGPVRVGIEATGHTRWFERMLAELGHELWIGDAAQIRASVVRKQKTDARDAAHLLELLLSERFPRIWRPTIAERDLRQLVWHRQKLVWMRNAVGNQLHALAMGEGVCRKKKLFTKKGRVELEGLGLGVWASYRRQELLTMLDPFDDSLGELDRAVAEQAEQNAAAVLLMTHPGVGPGTSLAFVLTLGPVERFERSKQVVSYLGLNPREHSSGGRQRLGAISKQGNPMMRSLLVEAGTPRRRLDGELRQDYQRLKLRRGSGVAKVAIARKLAVRMYWMLRGQASYAQLVRMQGSPWATLVKE

SEQ ID NO: 407519 - protein, 351 aa, unidentified
MIIIGCDYHPGFQQIAFVDTDTGELQERRLEHREEAERFYRDLGAQGAARVRVGMEASGHARWFERMLSELQFELWIGDAAEIRAKRVRKQKTDRQDAQLILRLMLEARFPRVWVPSGENRDLRQLLWHRHRMVQARTRIMNQLQAVALNEGLRCKKRLWRDAGREQLESFVLAPWASRRRRDLLELLDRLTPTIAELTQGIEQEMEKCPEAQRLQTHPGVGALTALAFVLIIGQADRFQCGKQIASYLGLVPLEDSSGQRRRLGHITKQGNSLLRFLLVEAAQVTVRSDQEWRNKYFHLALRRGRKIAKVAMARRLAVRLYWMWRKGWDYEQLKKFGSHAGQPGHRDGVQ

SEQ ID NO: 407520 - protein, 315 aa, unidentified
MGEQGYYVGIDVAKASLDVVVHGTGQHWSFANSDADIAKLVARLAALPASLVVLEATGGLETAVAAALAAARLPTRIINPRQIRDHARSMGQLAKTDRLDAQAIAHYAAVVRPEPRPLPDEQAAELGGLIARRRQVIKMLTAEKNRKATAVKRVQQGIQTHIDCLNRELADINRSLSDEIRNSPLWREKDGLLRSVPGVGPTLSATLLADLPELGTLNRRRIAALVGVAPLSRDSGTMRGRRTVWGGRAHIRTVLYMATVAATRYNPAIRSFYQRLCAAGKARKVALTACMRKLLTILNAMLQHGKVWSTAPAHP

SEQ ID NO: 407521 - protein, 430 aa, unidentified
MEKEVKKVMFVGIDVGKRKHEACFVESNGRVVRYMPFNNRIQGFKRFFSLIEQMRKDEVSITIALEATGHYFLNLYSFLRGHGIDVTVVNPIQTDSFRNVFIRKTKSDRRDSFVIAELARLGRARKSNIDDEGSKISNLKMLTRFRADYAHKASNMKKKLSSLVDRVFPEFFDVFKGFNTRTSLMILRNYPTPRKLLKEDRTILYTLVKNWSKGRIGEKVVDELISLAEDSVGSPIDIDAIEVEIPFIVDEIFFLEDKVKEVESYIEEQSLEIEEVELLKTIPGISTVSAASIVGEIANIDRFDSVKKLRAYAGFDPSLKESGDSVTGRSTISKRGSPYLRRALYYAANVSRRFSPTFKEYYKRKLIQHPNRERYAIVSVANKLITVIYYMLKSKKPFDPLYELNLKRNPFEKTPVTQNLEERSADDIFH

SEQ ID NO: 407522 - protein, 446 aa, unidentified
MTVSKRLWRNRKERKEWARRLQSEDPGLEVVHAHAGGIDVGNSAHYVAVRPDRDPEPVRRFECFTADLHRLADWLKSCGVKTVAMQSTGVYWIPLYEILEEHGFEVYLVNARHTKNLPGRKSDVQESQWLLKLHTYGLLNNSFQPVSEIRVLRTYWRQRGEHVRGAATCIQRMQKALTRMNLQLANVISDISGLTGQAILRAIVAGERNPLKLAALSDPRVHASQEEIAKSLEGNWRPELLFVLQQEVDMYDTYQKRIAECDQRLQKHLASLTHPLQVQPSTQKPKTKKPAAKNAPRFDLSSELQRVTGVDLTRIDGIDVMVAQTLLSEVGLDMSRWKTESHFASWLGLCPDNRISGDKVLSRGTRRVVNRAATALRQAANTLMRSRSYLGAQYRRLRTKLGAPKAITAMAHRLARLVYRMLKYGQTYVDKGTEYYEERFRQQQTA

SEQ ID NO: 407523 - protein, 389 aa, unidentified
MQATDPTFTTRSNSSDQATIVVSLELSRAAWLVTALLPGAAQKMSRHQVSGGDLAGLLSRFAELQRKAHARTGQLARIVVIQEAGLDGFWIHRVLVSEGIESYVVDPASIAVSRRHRRAKTDRIDGEALVRTLLAYKRGEPRVCAMVRVPTPEEEDQRRLCRELKTLVGERVRHVNRLRGLFFSQGIADYDPRRPDRRARLDELRTGDGRPLPPHLKAVALRELEVIELLDRQIEAVKAERDALLAAAQTAEVPSQAVQMLLGLKGIGSGFAGALWSEGLFRHFDNRRQVAAYAGLAPTPWKSGKIDHEQGVSKAGNPRLRAILVEMAWLWLRHQPGSALALWYHDRVGRLGGRMKKVTIVALARKLLVALWKYVIHGVVIEGAALKAA

SEQ ID NO: 407524 - protein, 406 aa, unidentified
MLFVGDDWSEGYHDVELMDATGRRLAKARLPVEMAEMARLHAMIGEALGEDAEVAEVAVGIETDRGPWVQALIAAGYTVYAINPLQVARYRERHSVSGAKSDAADAHTLADMVRTDSHQLRPVAGDTAQVQAVKVVTRAHKTLIWERTRHTQRLRHALRDYFPAALLAFEDLDAADALELLAKAPDPASAARLTITQISAALTRARRRNIADKAARIQAVLRGQYLGQPEVVTAAYAATTRAAVAVLKTLDEQVKILQGQVEAHFGQHPDAKIISSQPGLGPVLGARVLAEFGDDPNCYTDAKSRKNYAATSPITRASGKKKTVMARYVHNDRLIDALMSQAFSALNASPGARAYYDRLKARGAGHHAALRQLANRLVGILHGCLKTRTCYDEPTAWSHRVEQAAA

SEQ ID NO: 407525 - protein, 436 aa, unidentified
MRGCRCSMIMGFTKPIEHFNLQRKKVITMNTLYVGIDVSSKSNVVYLMLPNGDKHSNFSVANSHEGSTLLVKKIYSALTSHSLDTVLIGLEATSVYGDNLVYFLREDATLAPFNRKIHVLNPKQVKKFHDTYNDLPKNDYVDSFVIADCLRFGRINKEVYMGDYRYKALQNLTRARFFAVQNLVKEKQRFMNVLFKKYSTMTQEKVFSDAFSTTALAVYDEFESAEALANMDLHELTDFIIEKGKNRFPDPDAVAKAIQKAARSSYRLPKTVNDSVNQVLSISITSMKALESQIKEFDKAIKALMELLPNVLISIPGIGPVYSAGIMAEIGDINRFDNQASLAKYAGLAWKQHQSGGFEAEVTRLIPSGNRFLKYYLCEAAFSLVRCDKKYSDFYHLKYKEVNRCQHKRALALTARKFVRLVFRLLKDNRLYCPAK

SEQ ID NO: 407526 - protein, 394 aa, unidentified
MLEDGQEPNKHLKFSNDSLGVANLVDRLNNLISLYKPTTLKIGVESTNLYWWHLFELLSSNNSGLTLKPELYLINPNRISSYRKSFSNLPKTDPTDSWFIAEVVRIGRLKPNHPYDLRYAPLQRLTRFRFQLVESLIKEKNRALNLIFLKFSSYADKSNNPFSDIFGKTSSALIEHFTPDEIANTNIEDLVRFISKSSKNHISEEDILKCIEILNDLSKKAYRLNPKLLDTVNVTLTMTLENIRYFESQIKKIDKVIEREFSAFPEKQILSLVKGLGPVLAAGITAEIGDISKFKSDKKLASYAGLVWKKHQSGNYESEDTPLTRSGNEYLRYYLVESANCLRMHNAEYSEYYNRKYHEVRTHQHKRAMVLTARKLVRLVFALLSRSQNLLGRS

SEQ ID NO: 407527 - protein, 331 aa, unidentified
MQKHNRVGVDVSAKELVVAIEASGRREAPIVLSNDADGHRKLIKLATKRGALARVVMESTGTYGLDLALALHRTNRVEVMVANPRAITHFARASLQRSKTDRLDAVTILEFALRMPFAPWSPPGPSILELRALSRRIEALSKTVVQEKNRLHANDQSEALSEFVKQDIRELVAQLGDRIATLRKQALLVIEQAEDLAKAFAHITSVKGIADAAGIAILAELAVLPADMTTRQWVAHAGLDPRQFQSGTSVRRPARISKTGNTHIRRALFMPALVAVQWEPHVKAFYEHLLARGKTKMQANVAVMRKLLHAIHGMLAHNQDFVGEKFFAIKG

SEQ ID NO: 407528 - protein, 331 aa, unidentified
MQKKEIFIGVDVSKQTLDVSVHGTRNHIRIANSSEGFKQLTSWLKSLNIALCDCWFVMEYTGGYEYRLVQFCWSKQITFTRVPGLQIKKSLGMQRGKNDKIDSRRIAEYGYEKRDKLKEKKSCNAAIVRLKQLLTQRRAFVEDKKAHEHRMKELLAMEEFKAGDPLIKYYKQAVDFALKMIDKVETEIRKIISKDEAMSRNFHLITSIPGIGEVNGWMTIAYTENFECFPNGRTYGAYIGVVPYEHSSGTSIRGRSRVSPMANKPLKADLSMAAKASVQHDPEMKAYYERRIEAGKKHMSIMNEVKFKLVLRMFAVVNKGEVYVKNLKSAA

SEQ ID NO: 407529 - protein, 388 aa, unidentified
MSSIEHISEERASVRNDLSAIFVSLELSQSTWLITSLSPGGGEKMSKHQVRGGDIAGLLARFSQLQAKCKVRTGQPYRLIVIHEAGLDGFWIHRTLQNAGIESHVVDPASIATSRRRRRAKTDGIDGEALVRALLAYKRGEPRVCAMTKAPTPEDEDRRQISRERRSLIAERVEHVNRIKGLLFAQGVADYQPVRRDRRQRLEALGTGDGRVLPICLKQRLSRELDRLELLLEQIRTVEAQRDALLTPQAEAPQSPPVVLQKLRGIGPEFAMVLWSEGFFRHFDNRRQLASYAGLAPTPWQSGTVAREQGVSKAGNARLRTTMIQLAWLWLRHQPKSALTLWFHERTKAAGGRNRRVMIVALARKLLVGLWKLVTTGVIPEGAIMSAA

SEQ ID NO: 407530 - protein, 344 aa, unidentified
MKITTVGIDLAKNVFQVHGIDEHGKAVLKKQLRRDQMAAFFVNLPPCLIGMEACGSAHHWGRKLASMGHTVRLMAPQFVKPYVKTNKNDAADAEAICEAVGRPNMRFVPVKNIEQQAVLALHRVRQGFVRARTAQANQIRGLLGEFGLIVPQGIGHITTRVPELVEDGVNELPGAFRLLIARLLDHLKELDRQVQELEDKIQAWHRSSELSRNLAMVPGIGPITASALVASIGDARNFDNGHQVAAWLGLVPRQHSSGGKSNLLGMSKRGDTYLRTLLIHGARSVIYRISQRPDTCSWIGAVATRRNKNVAAVALANKNARIVWALLAHDRQFDPGFARSTATA

SEQ ID NO: 407531 - protein, 413 aa, unidentified
MILVCSVRYIYQINLRMVNGMVYVGIDVASQKHDCFFMNDKDVNANMLITINNDIDGFKKLEESIHSFMKKADDKDVRIGLESTGHYSHNILNYFVRSGFDTMLINPLLTNMERKSSSVRKTKTDKIDAKAICMFLMRNKEFKPYTHKSYHTVALKLLSRRRISLVKQLSKQKVQLHVLVTITFPEYLKVFSKLSGNSSLEILHKYAIPSVIAKTRIDALTNIIKRTSKGHHGRTTALLIKELAAKTVGDKDSFYAIQIKLIVEIIRFLQNQIKTYTDEIKDIVDENCPLILSIPGISYAIGAIIIGEVGDIMLFQSPDKLLAYAGLDPCVHQSGNYNAMNVSISKRGSSYLRCAIHQAASVIIWHDNTFNKYYMKKRNEGKHHLVALGHVSKKLIRVIFSILKHNNTFVGQN

SEQ ID NO: 407532 - protein, 369 aa, unidentified
MENRSMFVGLDVHKETIDVSIAEGGRAGEVRHYGVIASDVEPLEKVRRALRAPGRVLHFVYEAGPCGFGIYRHLTGRGEDCVVVSPSMIPKRSGDRVKTDRRDSQMLARLHRAGELRAIYVPDDTDEAMRDLVRAREDAVAVGIQAKYRVKAFLLRQGRRYPGRDGWTLAYRRWLADLSVPSTPQHVALQEYRDTIDETERRLERLTEQLRHLVPTWRWAPVVAALQALRGISFITAVGLVAELGDLRRFRQPRELMAYLGLVPSEHSSGPSVRRGGITKAGNPHVRRLLAEAAWAYQGIPRIGRQHLSRQEALPKVVCDIAWAAQLRLTARFRRLVARGKAKPKVATAVARELTGFIWAIACEVTPAP

SEQ ID NO: 407533 - protein, 324 aa, unidentified
MTISTVGIDISKLKFDLCLLCDNGKFKHKVFPNTPTGFLQLSAWLSKQKVERVHACMEATGTYGEALAVNLHDAGHVVSVVNPAAIKAYGQSRLSRTKTDKADATLIAQFCLERQPPQWQPLPAEIRELQALVRRLDALLEMRQMEANRLEVSAGATAVRESLVGHLAFLDEEVAATEKLIRTHIGNHQGLLEQHDLLVTIPGIGSTTAAKLLGEILDVKLYRGARQLAAFAGLVPRLHESGTSIKRKARLSKTGAPRLRKALYFPAIVAIKHNPQIRALGVRMKGRGKCSMEIIAAAMRKLVHIAYGVLKSGRPFDPEMAKTA

SEQ ID NO: 407534 - protein, 463 aa, unidentified
MTKKNKKQYGQRRQPVKVKQRLPLLNLHAAGIDVGASEHYVAVPADRDEQPVRRFGAFTEELHALAQWLLQCGIKTVALESTGVYWIPLFQILESYGLAVKLVNARHVKNVPGRKSDVQDCQWLQQLESFGLLRGSFRPEAKICVLRSYMRQREMLIHSAARYVQQMQKALTQMNIKLHHVISDLSGQTGLAIVRAILAGERDRLKLAAMKDRRVRSDVLTIAKSLEGDYRAEHLFALKQALELYDYYQQKIAECDVAICKEMQTLETRAAAPAAALKRKPRSKHNPLPFDSQAELYRIMGVDLTRIDGLHESTAQLIISELGLDICQKWPTEAQFTSWLGLCPNNEISGGKVLKRGTRKVVNRVANALRMCAQSLLNSKSALGAYARRMRAKRDSQVAITATAHKLARLIYRTVKYGQEYIDIGQEQYAAKYKAGILKSLHRKARQLGYQLVSCQSLEVVVP

SEQ ID NO: 407535 - protein, 324 aa, unidentified
MIDGVLGIDVSKNTIDVSMSGSNKVRARSFANSADGWRHLLAWLISQKIQRVHACLESTGRYSIGIASALYEAGHVVSIVNPAQIRDFARTKLGRNKTDGVDASHIREYCELFKPQPWAPASEAHRRLGELQTIRAGIIAGLTEWKNRKNSGMIDAVAQSLADVTISHFTGQLGAVDEAITQTIDNDPVLRRKRDLLLTISGVGETLAGVVLAELPGPDVLRSGAEVVAYVGLNPRLHQSGTSIDRMTRISKIGNAVLRAALYMPAMSAMQHNPAIVALVARLKSRGRLKPKQIVVAAMRKLLVLCFGVLKTGKPFDPAIAMGC

SEQ ID NO: 407536 - protein, 414 aa, unidentified
MPKIFQVLHSTCCGIDVHKKTVVVCLLKTDEYGEYTDTIRTFSTMTPDLERLKAWLLEEGCVKIAMESTGVYWIPVFNILEGAFEIILANARQTKNLPGKKTDPSDSRWISKLLALGLINGSFLPSKDLRELRELTRYRDKLISMRTSEKDRAHNILEVCNIKLASVATDIFGVSGMAMMNALIEKQESSDPAGIAELAKGRLREKIPQLIKALQGRVDGHHAETLSMILDHLAYLCQQIAKLEQRIEEMAKPYQQEIELLDTIPGIDKTSAQSIIAEIGTDMSVFETPERLASWAGLSPGNHESAGKKKRTRIGPGNQYVKTKLCQCALAASHTKDTYLSSKYHGIKGRRGPQKATIATARHQIVSIFYMLKNKEPYRELGGDYLLKLKPKNVANKMIKRLQALGYEVTKKVG

SEQ ID NO: 407537 - protein, 353 aa, unidentified
MIRTIGGSIMMTHFVGLDVSQKMTAICVVDNAGRRLWRGQCSTAPEQIAAMVRRHAGDESCIGIETGAMTPWLVHELRALGLEVICLDARHARAALKMQINKTDQNDAEGLAQIVRTGWFRSVHVKSFDSHRARALLGARAQLVGMTTRLSNHIRGVLKTFGLLPGAMRGLRFDRKVEVLLEDRSDVAPIVRPMLVAWRQLREQISAFDKAIRVLVRSNSPCRLLMSVPGIGVLSALAYVSTVENPARFSQSRSVGAHLGLTPRQYQSGDVDRSGRISKCGDTLARTLLYEAAVVIMTRVKKASELKDWAVAIAKRSGVGKARVALARKLSVILHSVWRSGKPFRWAERAIAA

SEQ ID NO: 407538 - protein, 315 aa, unidentified
MTQKTLFGGIDGGKDALDLAVFPGGDRGRVTNTRSGHQELIAWLAARGVTTVGIEASGRYERPVRDALRAAGMTVHVVDPARVRYLAKAQGQRAKTDAIDAAVIAAFTAQLGDTPAKPVDPDREALADLVRMRRLLVTKRADIEKAVSRLPDAVHACVSPVIDALRTAVEDLDAQIEQRIQANPSVAQTVQLLQSAPGVGLITAVTLAALVPELGRLSGAQAAALLGVAPYSDDSGQHHGARHIAGGREEARCALYMAALAGATGRAKGVLAAFYARLIAKGKPPKVALTACMRKLIVRLNAMLAHNQSWSDQPT

SEQ ID NO: 407539 - protein, 436 aa, unidentified
MTLINFVAANQKYYAFNLLSVFIMVFWSVQYLLQHLLVQTQVSHQLLQPLILILQLPQTPQFRHARPGKFFLPVNGIDYFLPLRLTVRNVLTRRITMNIVFLGIDLAKNVFQLCGLNQAGKPVYTKRTGRKELLQTLANIPACLIGIEASTGAFYWQREFEKLGHKVKVISPQYVRPFVRGQKNDGNDAQAIAVALMQPTMQFVPPKSPEQQDIQALHRARQRIVNHRTATVCQIRGLLLDRGIPIGSAVSRARRAIPLILEDAENGLSSRMRRTIAELYDLFNDLGRRIHFFDKEIETVFRQSEACPRIAKVKGIGPKTATAVVAAIGKGTEFKNGRHFAAWLGLVPRQHSSGDRQVLMNMTKKGDKHLRTLFIHGARAVVRVATNNNDGHMNQWVNQLKERRGFNKTTVAVANKNARIIWSMLRNDTGYQVVCN

SEQ ID NO: 407540 - protein, 345 aa, unidentified
MKKGITIGMDLGDKKHQVCILDKTGKIIAEETVTGTRAAMTVFFKQYRGVVVAMETGTHSRWVSQIAEAEGLQVLVGNARKLRMIWQSRQKSDTRDAVMLARIARMDSALLCPIRHRGEQAQMDLEIIRARDLLVRERTRMVNHVRSVVKSMGERLPPSSAASFGRKAKIPEALNEAMQPMLELIQELTKKIRGYDLMIKVTAADKYPETEQLRQVGGVGPLTALAYVLTLEEPERFAKSRMVGPYLGLVPRLDQSGQIDKQLRITKHGDGYLRRLLVGSANYILGPFGSDCDLRTFGLKLMQRGGKNAKKRAVVAVARKLAVLLHALWRSGQQYEPKRRQQAAA

SEQ ID NO: 407541 - protein, 347 aa, unidentified
MERQPLKKLEPNENELLKLFERWRAEAEKAGHKIKRITVAFEAGRDGFWLARWLRARGIEAHVIHAASVAVSREHRRAKTDRLDTQQLKRAFLGWLRGERDHCKMCAIPTFAEEDTKRPHRERETLVGEQTTIVNRIKATLARLGIRSFDPKLATAPERLGQLRTPEGEPIPPNTLAELRRDIERKQLVAEQIRQIEKARLEQLKEAPKTGPNLMVLLLVRVIGIGIETADMLVKEILSRNLRDRRAVARYAGLTGSPDESGSSWREKGLSRSGNARVRRGMIQLAWRFLKFQNESTLAKWFEARTKNTRTSRKKMIVALARKLLIALWHFVRDGLLPQGVVLRPAH

SEQ ID NO: 407542 - protein, 424 aa, unidentified
MEPTSKETKVDYAAWIGVDWGSEKHAIVMQAANSSGVEQCVIKQTPEALQDWFLKVRSRFPGREVAIAIEQSKGSVINFLLGFDLVHVFRVNPKSLKKYREALFPSGAKDDPTDAELLLQFVRYHRDRMKPWVPDDPQSRALLALVEFRRKTVAERTRLTNRLTQKLKEYFPQALEWAGDLDTVMACDFLTRWPTIEKLQKTRPENIRKFYQKHGSRNSHRIDERLRQIRSAIPLTQDSAVMDTSVLMVETIVNQLRPLFVSIRRIDGQVEKIFRMHPDFGIFDSFPGAGAALAPRLQTAMGSDRDRFDSSEEVQKYSGIAPVLERSGKKHWVHRRYACSTFIRQSFHEFAGHSIKQCQWARAYYTMQRDLGKGHHAAVRALAYKWIRIIFRCWKNHVPYDDATYMESLRRKRASCLAFVDAAA

SEQ ID NO: 407543 - protein, 456 aa, unidentified
MAHRKKKVPAQLVEDEEYQLRHEKVAGIDVAKDSAVVCTRLPPARAGGRRRSRVEEVAATVTAVLALAAQLLADGVELVSMESTSDYWRVWHYTLEAAGLSVQLVNSSHARQLAGRPKTDVLDAQWIARLAEMGLLRPSFVPPAEIRALRDWTRTRLQLVRDRTAEWQRLEKLLEGALVKLSSVVSKLAGNKTARAILEALIDGERESRVMSALALGSLAGRRGDLEKALDGMTFARHHASLARLHLDRIDALDKQVAAIDDEIGACLDGIRASWGVTAGGEPSPDPGPDAAVLSAAQRLAEIPGVSPDLAMGMIAETGLDMDVFPTAAHLVSWAGLAPVARQSGPRSRKPKKGQGDGYLRRYCTQAANGAARTDTFLGERVRRLGKRVGGARARCAVGRSILVIVWHLLRNPEARFTDLGADWHARKTDRDKKIRGHLRQLQALGLDVTITPTAA

SEQ ID NO: 407544 - protein, 339 aa, unidentified
MTTPTIIGLDIAKSSFQVHGVAASGRPTLRKKLRRGQVLEFFANLPPCVIGMEACGGAHHWARALTGLGHEVRLMPAQYVKPYVKTNKHDAADAEGCCEAVQRPSMRFVPVKSETQQALLMLHRIRDRLVAERTGTISAVRGHMAEFGIVAARRGPGMKELLAIIADLDDARLPPLARELLVLQVEHLRAIETRIAELDGRLQRQARSDEAARRLTAIPGVGPVIATAMAATVVDAQSFPSGRSFAAWLGLTPRQHATGGRERLLGISKRGDGYLRRQLMHGARSLVRLAAGRQGRFWTWIDGLVARRPFNVVVAAVANKLARIIWAMLGRDESYRAPA

SEQ ID NO: 407545 - protein, 311 aa, unidentified
MQPIIGIDISKDHLDAHALPSGVERQFANSPAGIRALLNWARRMQTTRVVFEATGAYHRHLEGQLVTAGLDGIKVNPLQARRFADATGQRAKTDRTDAAVLARMGTLLELPARPPKDENQHALRELYIARLALIKDQTAAKNRLKTVTQTILRRQLLARLKQITRQIGEIDTALDQAMRQDGALRERLDILTSIPGVGRTTAIAILIEMPEIGALNSKEVASLAGLAPITRQSGLWRGKDRIQGGRAGLRKAIYMPVLVALRRNPEFGAKYRQFREVGKPAKVAIAALMRKLIVLANALIRDGRKWTPHSS

SEQ ID NO: 407546 - protein, 347 aa, unidentified
MTIVDSTRPLVGGVDTHLDVHVAAVVDSNGGVLGVKSFPTTTAGYEQLSGWMGSFGPMQRVGVEGTGAYGAGLARHLAGRGLIVIEVDRPNRQARRLNGKSDELDAVEAARGALSGRVSGQAKAGTGNVEALRVLLIAKRSARSNRIATIVQLRHLVFTAPDDLRQRLAPLTAAGLVTEAARLRPRPGSDPVTHAFKTTAVVLARRVQALDDELTVLDAQIEPLVKATAPALLNIYGVGFDTAAVLLTAAGDNAGRIRSEAAWAKLCGAAPIPIMTGKRDNRYRLNPGGNRHANNALWRIVLTRLGQREPRTTAYMHRRLAEGKTKPEIIRCLKRYIARETFRALPR

SEQ ID NO: 407547 - protein, 400 aa, unidentified
MSKPKARVWAGVDAGKGHHWAAVVDETGATLWSKKVDNDESAILTALGEILGLADQVHWAVDISGTSSALLLALLAAHGQKAVYVPGRTVNRMSGAYRGEAKTDARDAYVIAETARHRNDFATIDVPAPLAADLALLTAHRSDLVADRVRMINRLRDVLTGVFPALERAFDYSSHKGALVLLTGYQTPAALRRRGRARLTAWLANRGVRNADAVAATALEAAQAQQTALPGEDAAARIVADLAAQILALDDRLKRVDKQIRETFRGHPQAEIIESLPGMGPILGAEFVVAAGDLSAYTDAGHLASAAGLVPVPRDSGRRTGNLHRPKRYSRRLRRVFYMSAQTSIIREGPNRDFYLKKRGEGCKHVQAVIALARRRASVLWALLRDGRVFTSAPPVTQAA

SEQ ID NO: 407548 - protein, 347 aa, unidentified
MAAVMIGIDPHKGSHTAVAIGADEGPLGELRVRASAGQARRLLAWAVAWPERTWAIEGAAGLGHLLAQQLLAAGERVLDVQPKLGARVRLLAAGAVNKNDPNDARSAAVAALRSASRREVAADDHAAVLKVWAKRHRDLGRARTQVACRLHAVLCELIPGGVSKRISAALAGQLLEGITPSGAVEAARCELAAAFLDDLRRIDAQMRDAKNKLTAAVQASGTTVTEVFGAGPIVAATVIGEVRDVSRFASQDHFAAYNGTAPVEVSSGRRKIYRLSRRGNRRLNHAIHMAAVTQVSHRHSPGRAYYDRKLAEGQTPKEALRSLKRRLSDVIFARLQADAHRAAAGPR

SEQ ID NO: 407549 - protein, 386 aa, unidentified
MIIIGVDPHKRMHVASAIDPATNRQVTALQVEASLSGYRRLLRWAGGFGERSWAVENAHGLGRHLAQWLLARGEAVEDVASTATARVRELSRGGRRKNDVIDAAAAASVAALRGDANPVLAEDITTVLGLLDERRSNVTTQRTRLVNQLHAVFRDLVPGGAPKGLTAAAASRLLAGIRPAGPVEAARKQLARDLVAEIRDADRRLKLLKAQIAETVAETGSHLIEVDGVGPIVSGRLLARTHKMSRFPTAAAFASYAGVAPVEVSSADRVRHRLSRGGDRQLNLALHVVAVNQIRMPGSTGRAYYDTKIAAGKTEKEARRCLKRRLADHIWRLMIRDEAGEAAGPGGHQGTTLQSSAAGSTPTTGSSDKSLPEPADSDSTTRQPAA

SEQ ID NO: 407550 - protein, 340 aa, unidentified
MEKRYIGIDLHRNRFTCCIRLENERTYLTDWELEDLGKFVKKLRPADEVAVEITGNTRLFFDAVAAHVARVVVVNTNQFRVIRQSVKKTDPNDARTLALYLSKNMLPEVRMKDKEHGQLASLTQTRDTLVKLRTALKNKINNILSARGLNLAKEALSSEKKLAEVLELPFDEIVRIELRVIVGEIRSLNQSIAELEKTIGEEGSKLDGHKGLSSIKGIGKITGAILLSVIGDVNDFADEGHLASYFGIVPRVSNSNETERSGRIHKRGTKLGRTALVQSALIAANYSPYLKRFYEQVKGRRGAGKAIIALAKKFLGIIYRTLKNKWVFEDFPNFVLAEAS

SEQ ID NO: 407551 - protein, 439 aa, unidentified
MTTPALPVLDPTAAAIDVGSEQLHVSIAGGPPKIFGTTTGQLHALRNWLKESGARTVAMEATGIYWLCPYEVLEQAGLEVVVVNGKYVKNLPGRKTDMKACQWQATLHAHGLLKPGFVPPEHIRRLQDYLRLRADHLTLAASHEQHMQKALERMNLKIHDVISDLTGASGLKMVEAILAGERQADALVALCDPQIRKKKAVRLREALEGNWKTEHLFALRQAHELWQFYQKKSGECDQAIEGVLRELAGPEDPQAPAPPPAKRGGINTPQIAGLHSLLYRLCGGKDPTTLPGGADYVLRQLIGEVGTDLGKHWKSEKHFTSHLGLAPGSRQSGKRRGSQKRSRNRAGRLFCVIARSVGRSVDKALGGFYRRLKGRRGGLVANLALARKLAELFWRLMVHGRAYVEEGLKTYEEKVAQSEQRLLQKLARKYNLVLQPKTA

SEQ ID NO: 407552 - protein, 347 aa, unidentified
MRFYTKQHRYYCGIDLHARSMYVCILDPQGEILLHRNMACAPELFLKAVAPYREDMAVAVECIFTWYWLADLCAQENIVFVLGHALYMKAIHGGKAKNDKIDAHKIAALLRGGMLPMAYVYPALMRSTRDLLRRRMHLMHKRSELLTHIQNTNSQYCLPQFGKKIAYKKNRQGVAEHFADSSVRKSIEMDLSLIDHYDKLLTEVELYITQNAKIHDVNAFNRLRSVHGIGKILALVILYEIHEIDRFPTVQDFVSYARLVKCAKESAGKRHGSSGAKIGNVHLKWAFSEASVLFLRANPAGQRYADKLTSKHGKAKALSILAHKLGRAVYYMLKRDKAFDMNKFLNS

SEQ ID NO: 407553 - protein, 314 aa, unidentified
MMQKVFVGIDVSSEKLDLFVDQPETHLIYRNTPDGWEEIAQYLGQISPERIVLEPTGNYEKGILRTLLSYELPVARVNAARVRAFANALGLKAKNDLIDARVLAIFAKSMTTFVTELPSQALQHLQEVRRYRDFLSDQLVSMKHLKRTSEAAKPLLEKHIFEIQQMLKEIEKQIKTEVERQPALKTQIKTLSTIPGVSFISAVAILTEVPELGLMSPKKISALVGVAPYVNESGKFKGRAQIFGGRARARKSLYMPVVAAVRCNPQIKTFYQNLKERGKPSKVALTACMRKLLCTMNAMLREQKPWATYDPSPL

SEQ ID NO: 407554 - protein, 366 aa, unidentified
MKKISTVQVFGNEILTGQKLTIGLDLGDRWSFYCVLDEAGKILLEQKVATTPEAMKQAFAKIPRSLIALETGTHSPWLSRLLTELGHEVLVAHAQKVELITKSNRKDDRHDAQTLARLARIDPQLLGPVRHRSAKAQIHLTVIRARAELVSARTALVNAARGLVKSYGQRLPKCGTQQVSRELGTGLPAELREALEPLLKEVESLNQRIQEYDEQMEKIAKESYPHVKLLKQVKGVGTQIALTYVLTLDDPQRFPKSRAVGCFLGLRPGRRNSGESEPQKGISKEGDRYLRTMLVQGAHYILGPFGEDSDLRRWGLKLAERGGKNAKKRAVVAVARKLAVLLHRLWVSAEEYEPLRNSQKAMRAVA

SEQ ID NO: 407555 - protein, 410 aa, unidentified
MRRCIGLDVHREFAEVAIWEDGVVRSAGQIPTTPEALRLFAESLCESDEVALEATCNTHAIARLLEGHVGRVVVSNPTKTRAIAEAKVKTDKVDAQVLAQLLAAGFLPSVWLADDETHALRRQVARRAHIVRQRTRLKNRVQSILHRNLVPRCPAADLFGHKGRAWLAEQELPADERQAAEALLRQLDFHGDELRLIDAELARVALDRGEVKRLMTIPGVDATVALSIVAAVGDFGRFRSPDKLVSYLGLNPRVRQSGGQPASHGRITKRGRAHARGMLVEAAWAAAKTPGPLHAFYERVRARRGMQIAVVATARKLAVLCWHLIVRGEDYAYGRPSLLTQKLRKLELRAGMPSRRGQRGSTHAYNLKEVRARERALSEQGELAYRQLVSDWQAKAPKRTGTGAATGVRL

SEQ ID NO: 407556 - protein, 386 aa, unidentified
MPQLNDLSRSLVILEQDATLIAVIEMGQSSWLVAGIVPGVERSPLKKLAVDESALLKLLNRWREEAEKAGHRIERIAIAFEAGRDGFWLARWLRARGIEAHVIHASSVAVSREHRRAKTDRLDTELLKRAFLGWLRGERDHCKMVAIPTLAQEDAKRPNRERESLVGEQSRIVNRMKAALARLGIRGFNPKLKKAVERLDGLRTPEGEPIPPNTLAELKHDMERRRLVRSQIRDIEGTRLERLKQAPGDGPHVMVRLLARVIGVGVETADMLVQEVLSRNLRDRRAVARYGGLTGSPDESGKKRREKGLARSGNARVRRGMIQLAWRFLMFQKGSALAHWFYARTKNAPQTRKTMIVALARKLLIALWRLAREGAIPEGIVLRPAL

SEQ ID NO: 407557 - protein, 421 aa, unidentified
MNKDNNSGKKSEPTKPTTKRAKPRGPIRRDTKEVLAELVGKLKEKLDPKKRAATSAGEKHKRGELRPNLDRLTVGVDLGDQWSNYCILDLEGETLAEGQFRTTQEDLAEFFQALNAARVVFEVGTHSPWVQEVIGGCGHEVLVANPRMMDGSKRRKRKNDRIDANKLARLGRVDPQSLHPIQHRSREVRQDLVVLRARDALVAARTELINATRGLVKSMGSRLPKCSSPSFAEKVEGTVPAELRDALLPLVRMAAALSDCIQEYDQKIEKLGREKYGHTALLRQVKGVGPITALAYVLTLENPDRFVKSRDVGPYLGLVPKQEDSGEIQPQLGISKTGDTMVRKLLVGSAHYILGPFGPDTDLRRYGLRLCERGGKNAKKRAAVAVARKLAVLLHCLWVSGEVYEPLRQGTSATIAPAVAA

SEQ ID NO: 407558 - protein, 458 aa, unidentified
MKTPSRAKRKRQNQPAPEFLQKLNLNAAGIDIGATEHYVCVPADRDPKPVRVFATFTADLHALAHWLKACRVDTVVMESTGVYWIPLFQILERAGLAVKLVNARHVKNLPGRKTDMRDCQWLQQLHTYGLLTASFRPSDDICVLRSYLRLRDNHSRAAARHVLHLQKALQQMNLPLHHVISDVTGVTGLAILQAILAGERDPHKLAALKQYQIKSSRDQIAKALVGDWRPEHLFGLRQALEGYEFYQSQIAACDQAIENVLAAFKPKVDPVQYPLAPAKPSQKKASDPLAQMRSPLYQMCGVDLTVVPGLGVLSAQVIVSEIGLDMSKWKSEKHFASWLGLCPEHRITGGAILKRHTRIVINRASIMLRRAAATLHRSPTALGAFFRRVSARRGAAKAVTATAHKLAKIIYRLLKFGQPYVETGQEQYEEKYRARLLNHLQKSADTLGLQLVPKQPST

SEQ ID NO: 407559 - protein, 345 aa, unidentified
MEGEDARYRVYVGVDIAAETFTAAWLAPGGKPTTPFTSEQTPVGFATLRHRLQGTGSPPAATLVVLEATGNYWVALAVALHEAGYRVAVVNPRQAHHFAKAQLRRAKTDALDARDLAQLAAAPRPAPWSPPPAVYHEVRQRLVARDGLLAMRTQARNQRHALLQWPVVVAAVRQHLDELIADLDQRVAVLEAEIGAVLKESVWAESLACLSSAPGIGLITASWLLVGTLNFALCAGPDALTAYAGLAPVPRESGRSVRGRPRIGHDGNGRLRTAFYMATLSAARYNPAIKAFYQRLRAAGKPPKVARCAAARKLLHQAWALGSKLQRFDPDHQQQQHEVLPELAA

SEQ ID NO: 407560 - protein, 308 aa, unidentified
MIVQNYVGCDISKQRLDFFDEASGRCQRIANQGDAIEAYVAGLCADRDFVVMEATGIHDRLLRHALAKAGVAFSRHNPAHTHHYAKSTTQRAKTDRLDARMLSDYGRRYKPVPEPAPCEKGEHLQSLARHRDHLVEMRARLKRYLSEAFDADVVADLQDMIADFDTRIGALESRIVKTIRQAEDTALDYALMVSVPGVSTITALSLLAHMPELGQRSPKSIAALAGLAPFDNESGKLRHRSKIVGGRPRVRRALYMAALGAIRANDRFKAFYVALATRSGSKKLAIVAVARKLLVTLNAIIRDKTAFA

SEQ ID NO: 407561 - protein, 361 aa, unidentified
MSIVAKRQSKEKRGHVNFDGKACWVGVDVHKISYAVAILDEEGQRQEFSTPAEPKKLLLQLLGMGMTIKALAYESGPTGYGLAWACQEFGIPVLVAAPSRIPRPVSRTGKTDRLDSMKLAEFLARDMIKGIAIPTEAENHLRSLERCRQQLVERRRTVRQQIKSLLLFHGLDEPAGLSSWSLASVQSLQAMTLPDVLRITLGCYLNEHAFLLEELSRLRKQLSAALQAEGKIQTVKHLCTIPGVGETIATTFMTEIFRPERFGRAEELCAYVGLAPVTSHSGSGKATAQLGQVGQDYLRSILVQCAWRFISAEPQYHDLFIKIRTKTGLSAKAVVALARKLLVLLWRVAVENRPYRPVSVQ

SEQ ID NO: 407562 - protein, 382 aa, unidentified
MQASSMSTPTAGHYGTIFIAIELSQKTWLVTLHSPDRDRISRHKLEGGDHAGLLALIDKVRARATEKLGSPPRVVSCYEAGYDGFWLHRLLEAAGITNFVFDAASIAVEQRSRRSKTDRIDGELLLRTLMAYLRGEPRVVRIVRVPSVEQEDARRASRERDRLVQEQTAHTNRIKALLRLVGMAVGNPRRRDWLAWLERQRDWQGQPVPPHLLAEVKREHARLMVLRDQLAALEQAQAAQDVTVPAPMVERRSQLQRLKALGPAFCTTLVNEVFYKDFRNRREVASYNGLAPSPWKSGGIDREQGISKAGNHRARLKAIELAWLWLRHQPDSALSCWFRARTANAGKRARRIAIVALARKLIVALWRYLTTGLVPEGAAMKA

SEQ ID NO: 407563 - protein, 343 aa, unidentified
MNFKKVSTWQEFANCPAIGVDVCKKYLDLVGLCGSTSFCRRIDNTAQAIGEFAKALVQQEFKGTILCEATSHYHLVLAVMSCEAGLDVRVINPLLSSKHAKSAIRKTKTDRVDAHVLATMVLTEPNLPPPLKLTRSHCLVRHTLGLIHSQEQHLQGIKRSLDSYQERLSQLNLEAGNAYKQAVEVFKQFKDCHKHLLSELESYLLETQPERQEAIERVCAVPGITRRNAALFTFVLDPKVSSAKSWIAYAGLDVAIKESGTWRGHGKITKRGPSWLRKRLFQSAWGTTMSGSQGRIYYDALKASGRKHKEALVIMAKKLLSIMHALITHQKTFDNSKAFQVTT

SEQ ID NO: 407564 - protein, 385 aa, unidentified
MTNQVQVSKFIPRDYDVFAGLDVDKKSMSVVFTDHADWQRALRMANSATPLLNYVRKHFAGQRVAFAYEAGPTGFGLHDELVRQAYTCVVVAPSKVPRARGERVKTNRLDSRKLAENLRGGQLQSIHVPTPVYRDLRHLVQLRDTHVRQLTASKLRIKSLLLYEGIPFPDPREKWTVRAMRELQTLPCSETVRFKLDDLLETLHFHFQAATRATKQIRQHCLHDPELQQSIELLLSLPGIGWIVASHLAARLGDPQQIKNGKQIAGFLGIVSSEHSTGEKDNRGEITRSGDSRLRNKLIQSAWTAIKKDPELRDFYRRIYQRHPKKVAARKAIVAVARKLTTRIYVVLKEQRPYVVRPDSSIAPLTAAETVGPRDRLDSAQNDQP

SEQ ID NO: 407565 - protein, 417 aa, unidentified
MKEEFTFYVGVDWGVEFHQACILNAHGEKICQRRIEHSGPGMLEFCDFLQALTNGEMSALAVAIEVPRGPIVEALLEHNYAVFSINPKQLDRFRDRHTVAGAKDDRRDALVAADSLRTDQHCFRRVRPEHPDVIRLRELSRTEETLGIDLRRCVNQLSQLLLRYFPQLLRLCSTPDEPWLWALLELAPTPQQAAKLTEKRLKQLLAKYRIRRWTAEKVGEILTAPPLPLVAGSAEAISEHALLLLPQLRLLHLQRKQVADRTQQLLDQMATSTNDFPMSQEHRDIPVLLSLPGVGRIITATMLAEGSHILSLRDYHALRAHAGIAPVTKQSGKSRQVLMRYRCNQRLRNAFYHWARTSIQHDPRSKQHYARLRQVGHDHGRALRGVADRLLAMLIAMLKSGQTYDPNRRSTANLTAA

SEQ ID NO: 407566 - protein, 410 aa, unidentified
MNKPIINTDQVIWVAMDIAKRKNDVLIEWPDGKQKKLKINNIQQDYRKFIGYLLSFKLPCVAGLEATSNYHRPIAYWLQQASFTVKLISSFAACKTREALHNSWDKNDPKDTRVILHLLKTGVVQTYYDPLINQCNDIQEISKTYKQISLRKVRVQHSIMNHYLPLYFPEVEKYFHSSRALWFSSFLSHFPTPNTVTQYSFDEFEEAAWKISGRKVNKKSWLLDFYQTAQQSIGLPVDNNSQAVAMFRTILKEHQELCQLMVTIETTAKNFLGNNQDYGFLQSIPGIGPIIALTVLAEAGDLRRFNHYRQFLKFCGFDLSTHQSGRFRGQSKLSKFGNARLRYAFWIAGTVAIRMRENTFRKKFENYIKNDPLDADLKRKGYSAVAAKMARVAYGVVKHQTNYRCYYENR

SEQ ID NO: 407567 - protein, 342 aa, unidentified
MESLVTIGLDLGKSVFQVHGVDAGGAVVVQRRLTRGKLLHFFGKQAPCLVGMEACAAAHHWGRELRKLGHTVRLMPPRYVKPYVKRQKNDAADAEAICEAVTRPSMRFVEIKTCEQQGTLVLHRVRLMLMRQRVQLSNAIRGHMAEYGLVAPVGRNGLQRLIAILGNPDDERVPAVARASLAPLVCQFGLVNDQVLENDRRVRASARSTELGCRLMEVPGVGPVLASAIVATVPDPTAFKSGRDLAAWIGLVPRQNSSGGKEKLGGITKQGDRYLRQLLVAGALAVIRYAQRHGTKRPWLVHLLARRSPKIAAVALANKMARMIWAMMMTGERYREPMVAAA

SEQ ID NO: 407568 - protein, 356 aa, unidentified
MIKSNKLDFTGQPIYVGLDVHKKSWSVSISTKYGQYKTFSQPPEIDKLVHYLRHHFPGALYFSTYEAGYCGFWIHDQLREKGIGCLVVNPADVPTKNKERKAKRDRIDCRKLSRSLRNGDLEGIYVPPRGKVEDRSLIRTRLSMGRKQTRCKNQIKSMLLFYGVVIPEEREMGHWSRRFIRWIEGIRMERASGDMALKIHLEELCHLRQIIAKLNRAILALSRTEEYRSWVLLLRTVPGISTLTAMILLTELGEITRFPSIDELTSYVGLIPDTQASGEKEHIGGVTQRSHSQLRWMLIEASWRAVQKDPALMMAFDQYCKRMRKTKAIVKIARKLLNRIRYVLKNRSEYVPAVLE

SEQ ID NO: 407569 - protein, 351 aa, unidentified
MIIIGVDYHPSMQEIAFMDTETGEYDERQLDHSSGEAEKFYRELKQKGGSVRVGMEATGHARWFERLLAELGFELWIGDPAEIKAARVRKQKRDREDARLLLRLLRENRFPCVWIPNPENRDLRQLLWHRHRLVQMRTRVMNQMQAIAMSEGVRLRKKLWSGTGRAKLESLQLAPWAAHRRKDLLELLDRITPKIEELNVAVEDEALKRPEVRRLMTHPGVGPVTGLAFVLIIGTPERFRCGKQVGSYLGLIPCEDSSGGRQRLGHISKQGNSLLRFLLVEAAHTAARDDAEWKRRYLHLAMRREKRIAKVALARRLGVQLFWMWRQGWDYQQVLEFGSHAGQLEGFHGVK

SEQ ID NO: 407570 - protein, 473 aa, unidentified
MVRFLRDEEVKEKRMRKAIGIDPDSKGYICCLVEADGNRMSRKGFVTTVKDLTSLLRWVKGEGEVIVAVEGSNGVSRPVEQAFSKEQIVFYSLAPNDVSKFRKVVLGRNKNNEKDAETVARYALALESQGKLEKFRRVWFPDDSLRLLTRGYERRSKELTAEINRMWKMLRLASPDLYLALSGTNPEVDITGKVLQQQGIVKLLERKPDLYEWRNLSMEEFKNAMGGKTYRGREKLIAELQKLSASFRPTSPAVSLMIKNAAQTILQMRQHLNEIKKMMGELTTENRAVKALEQIRGISVITSSTLIAEIIDIRRFANDDHLASYAGLGRSEYASGDRNKMIPNPQFNHRLKDCFITVAKNFVQNNPDSHLSGYFRNLVKKRKMKPNEAYKRVARALVRVIFRRLKSVVEDSSEEQKRSESDMASGSVVRSDQGHESNISLSAPTENDKEPEGKIKRERRSRKRPKKVVVEKI

SEQ ID NO: 407571 - protein, 435 aa, unidentified
MRGLVVLSVRSMLPEIAMLTTRPRPKTLHIDGLPTIHPNAAGMDIGADEIVVAVPPDRDPEPVRVFRTFTSDLAALVAWLVACGIDTIALESTGVYWLPIYELLEQHGIVPYLVNARYVKTVPGRKSDWNDAQWLQKLHALGLLAASFRPDIEIAALRTLVRYRAELIQHRAPHILHLQKALQQMNLQLERVLSDIMGVTGQAIIRAIVAGERDPLTLAKMRNGACKSSTETIAKALTGSWKDELLFVLPQALVISDVYSAQIAVCDSQIAHLLAAMESRGAPCAALPALPAVKDGSKTKNAPPAQRRAHYAGLLGVDLVAVMGLSASSVQTSISEIASDIERFASVKQLCAWLGLAPPHDSSAGKLLRSRTLKVVKRATQAFERAAQSLSRSDTALGAVLSSDAGAQRAAPSNSRHGAQARADREPSLKERRSV

SEQ ID NO: 407572 - protein, 362 aa, unidentified
MTKDNRFQFAKASKMTIGMDLGDRYSCFYTLDSAGENTESGRVQTTKSALEKRFRSCEAARVVIEAGTHSPWVSRLLAEWGHEVLVANPRKLALIAQNESKDDPVDAELLARLGRVEPQLLSPIVHRGAEAQADLAVIRARDAVVAARTQLVNHVRGAVKSLGSRIPRCSPRSFAQKVESGLPEPLRAALEPLLKVIGVMTEQIKGYDRQIEEACQEKYPETELLRQVGGVGAVTALAFVLTLEDPHRFERSRSVGSFLGLRPGRDKSGAQDPELRITKAGDQLVRRLLVGGAQYLLGPFGPDCDLRRWGLKLASRGRKNAKKRAVVAVARKLAVLLHRLWAGSEVYEPLRLARPTALSSPA

SEQ ID NO: 407573 - protein, 402 aa, unidentified
MVDGPTRFFGLDIHKEYFVAVGVNREREVIFGPQRVSNYQLDEWASRVLTIQDTVALEMTTNAYLFYDTLEPQVHSVIAVHPPNVTLVTGAQVKTDKKAALALAQLHAAGMLEGVWIPPHPVRDLRALIARREKMVHLSTTAKNRLHAALHRNHLVVPEKPFAPEQRSWWEALSLSATEQFLVRSDLDTLAFAQKQVEQAEECLKKASAEDERIPLLVQLPGVAMLTAITILAAIGDVTRFPNAKKLVGYAGLGTRVHDSGKSHNSGRITKTGRRDLRRSMVNAANHAIEHHPHWKKEFERLEPHLGRSKAVVAIARKLLVAVWHVLSEKAADRFADPANVARSFFTYAYRVGVRNLPEGRSALSFTREQLDRLGIGQDLLEIPWGSKPHKLPASKLLPENK

SEQ ID NO: 407574 - protein, 339 aa, unidentified
MWYSGIDQHKAFCLITTYGPDGPRVKQARVASSPLALQQYCAEFPGPHQAVVESTGGWYWLADTLAALGVELVLAHATRVKAIAAAKVKTDQVDSNTLALLLRADLIPRAHMIRPEARGPRDLMRTRLRVVEKVVSAQNSIDRLLEKFNLERVADLDDLYQLQASCHVAQIQLLEEQIRTVERALYPFLIPNADVQRLLWIPGLGKVNAFTVYTEIDGIARFPSERQFFSYCRLVPGADNSAGRTRHRSGSKAGNRYLKLAFSHAGIRAVQYYPEIRAFFKAKARRKPIRIARTLVALELARIVYHVLATQEDFTGQFKGRPLSRQKHPQWPRRASPSA

SEQ ID NO: 407575 - protein, 330 aa, unidentified
MKNWNIILGVDVSKLTLDVCWAERKLHIRIDNNSKGFGVFKKWCKTNQIKLEETLVVMEYTGGYEYRFVQFCESGNIAYCRVPGLEIKQSMGMTRGKSDQADAYRIGQYGEEKRRRLEPSKPLNNKVLKLRQLLSFRKRLIRETAGLECTIKERQHMYGVVQTDTIILVARAKIKENKKHIARVEDEVTDLIKNDESMLQNYRIISSIKGIGPVNAWMTIAYTENFTSFTNARKYAVYVGVIPFEHTSGSSIKGRKRVSHIAHKELKNELNQAAKAAMTHDSELNAYAERKLKDKAYPLVLNNVKFKLILRMFALVKRGVMYVENYRKAA

SEQ ID NO: 407576 - protein, 395 aa, unidentified
MISVGIDVSKGKSTVCILKPGGEVVKPPFEMIHNAEELDSFVSLINSFDEETRVVLEDTGHYHIPVATYLSSHGIFVCCVNALRMKKFCAQSIRRAKTDKIDAVRIASFGITYWSELTRAYDAPDTYDELRFLARQYYQITSILVKAKVNLSNLLDQVMPGISNLLQNQKDNHKLTEFVDRYIHFQTILDMGEEKFTADYCKWAKKKGYRCNERKAAEIFALAQNGIPSLSNSQSVKIAVREAIKVIHSTEESRNTILAQMQKICKTLPEYSVVRDMNCIGDVLAPRIIAEIGDVRRFKNKHSLIAYAGIDAPPYQSGAFNASERKISKRGNSYLRKTGYEIMQSLIKHKPTDDSVYDFIQKKRSEGKCGKEAMIAGLNKFLRVYYGKVMELYSE

SEQ ID NO: 407577 - protein, 368 aa, unidentified
MNTVKFIGMDVHKKTITIAIAEQGRQKQPRIYGTIANELDALDKFCRKMVSTSSRLYFVYEAGPCGYGIYRHLTAKGFDCMVAAPSMIPKKSGDRIKNDHRDAAMLARLHRAGELTAVYVPDAPDEAMRDLSRAREDAVMVAKKAKQRLKAFLLRNRVVFAGKSQWSKAYFNWLADIAMPYPAQQVALQEYIDAVHQSLNRVERLTDQIRQLVPAWRLAPIVSALQAARGVSLIVAVTMLAELGDLSRFDKPSQLMAQLGLVPSEHSSGDSIKRGGITKTGNGHARKALVEAAWSYRMQARVSRLLLKRQQGLPDQVCRIAWKAQLRLCARYRRLVAKGKTKQKVVTAIARELSAFLWAMAKQVQPLA

SEQ ID NO: 407578 - protein, 323 aa, unidentified
MSVVVGVDVAKRSFDIATPLANGKVRTKARLANDSKGFEQFEAWLQAHAEPDAWVVMEATGTYHEALAEYLHARHYRVCIVNPAVIAKFAEFELRRVKTDKADAKTIAAYAQHKGDSLRQWEPEPEAQRRLRALVRRLDDLKEMRQMEQNRLDVAPLTVQASIKAVIGHITDEMEKTRKAIEQTIDDDPDLRRRRDLITSIDGLGDTTAALLLAELGDPLKYESPSAIVAFAGLNPMVHQSGEKVGQTTISRVGSSRLRAGLFMAGTVSMRFNPVIKALAERLNTRRKAYKQIVCAAMRKLLHLVYGVVKSDRPFDPHIALAK

SEQ ID NO: 407579 - protein, 364 aa, unidentified
MQVRHIFVGIDQGDKNSVARIAVDREKSDRLGFVNNRAGRARLFREVKRRGEQAGGALIVMAYEASSCGFVLRDEAWAAGIECKVLAPTKMEKSVEQKKNKNDDRDADDVLEKLRGHVLAGNRLPTVWVPDLQTRDDRELVRTRLELGEKQTQVKAQVQMLLKRHGLEKPSELKSSWTVGYRGWLVALSQCGPLGEGARNSLSSLLRQLKGIEDEMGQLEKLLKDLADAERHSPIIKALRKEYGVGLLTAMVYRTEIGQASRFRRGRQVGKFVGLTPTSHESGEQNDRKGHISRQGPPRLRKVLCQASWVHVGHDPQSRQMYQRLVSKNPKKKKIALVAVMRRLAVKLWHRMREAELQLYQSKG

SEQ ID NO: 407580 - protein, 481 aa, unidentified
MKIKSIYPAGNSSQLREVLDKYSPGELLYAPIDIAKYNHKACAVNFFGDILTPAFEFSNNTHGVKFFISKITEAARNAKAKKIFIGLEATGHYHQNLTLHLRSLGYEVAVINPFDSWKERLNKSSKTDRIDLGSIAKSLISRKFSSSTVPQGVYYNLRRAARTRRKFVNRKTSSKNIITGLLDHLFPGLWDKEDTIFSDRWGKVSLLVLEHYPTPQMVLRLGEKRLTRFLRKNNTKLGEKTARKITSAAKVALTRSPYEQTMDILALRSHLQAYRLYEEIISHLEKEIAHLLVQTPGTYLLSVPGISVTYAAEVTAEIGDISRFAYAHQIISLAGTCSKKDQTGEHDPQNLPISKKGNKFLRTVLNQAGLSLNTWCPDFNAYYSRKVEEKKGRCGIARTATGNKFARLAFVLMKHESLYHPRSFNTLVQDPGNYYLSVHGEILKKLRAFSSEKILPQNNYLEKIKQKLEKEYAINLSEVKG

SEQ ID NO: 407581 - protein, 422 aa, unidentified
MLGVGIDWAEQFHDIALGTPEKGVIQQFRIEHSPAGVERLVTRCLALEEDPGEIRVVLETRHGLLVEALVDAGFTVVPVNPELVARRRGPARKKDDAKDARICCLLALDRHTTLRQLIPHGEVAGELRAIARDDERAARDHARLLNRLRADLQITYPAALILAADDLGAPTMLRLLARWPTQPELAKATREELVGFARASHHGWPERFAERIAEALATPALPVREHTVRAKATGIRLAATQLLALHEARRSWERRMAELLLGGPRTGRDRTVRDPDPGKAFPGGEIYLSMPGLGDRLAARVAGEIGDAIHQYQTPSALQCYAGTAPLPRRSGKSDFVVARRLAHNQYLGDAVHQWAFCSLTASAWAREFYDEKTTAGKSHHNALQTLSNRWLEILWHCLTKGVLYDEATHQAHRNRALRHAA

SEQ ID NO: 407582 - protein, 315 aa, unidentified
MSKAITSFVGLDVHIDSIAVGVAPAGRTEPHFVGTVAPQWAALAKTLGRLGKREALHIVYEAGPCGYGWARQLRAHGYRCEVIAPAKIARRPGDRIKTDRRDALLLARAARAGELVSVTIPDERDEAIRDLTRAREDAVRARLKARQQLKAMLLRHGHRYTGRSSWTAAHERYLASISFQQPAQDVAFAEYRGAVRDAHERVERLTEAMRSQLKHWRMRPVVEALMSLRGIELVAAMTLVAEIGDFTRFARAPELMGFLGLVPSEYSSGSTRRDHQDRQQSRPACAGGGRLELPLPGAPEPRTAAPPGGPAQGGS

SEQ ID NO: 407583 - protein, 522 aa, unidentified
MMRAKKDNGILENMIVWKVDEETGEVTMSDLDGTEITIEKYKGNEVLPAYPYAIGVDVHRDFMQISVMVRIDKQVKEYHFQCKTDYHSLLYAKDFAINIIKRYSSPHIDVDKDDVRYACESTGNYHQPLLKTWKGVPIVVNPSIAKAGRRKSDRLDAKTLCQNALLGTWPESYIVPDDVQVIRTLNLQRTHCEQKANQIGNSINSELLRYGVNLGTKGSVTLNSDVKELVLDQLSDAPRLEPGCINDMIPSEVKSVLKQCYSEWERQKTMSVEYFNQIRSKVYSTKWKCGDTTVDGKTMVDLLQTVPGVGEVTTFTWLATVICAHRFDTYLKCSAYCGFDPSNATSAGKVVNGKKRKGNLDIHSKLCQCAGLLIYHASEPFGRWGEQLKQRSGSFSKARSAVARKLCIALYYVQKNGVEFSYDSYRLEEPAVLDIPLEELVVIDSRFKRYVKKIIPLGVTETQEMVHWYQLCKFKRIKGLGKGFYSLVREFIDSQEQYKELYNSKFEKQECFENGERTDYNE

SEQ ID NO: 407584 - protein, 343 aa, unidentified
MKDTIYNHYIAIDWSIENMAIARMTKKSNKITAIDVPSDITDLQAYLKNLKGTKMLTIEETTTSQWLYTELKDYVDRILICDPNRNKLLNEGPKTDKIDATKLVQLLKAGLMKEVYHSTDKFLYLRRFVSGYEDLVKAGVRLKNQRYSLLRACGKRGFEGAGTKLDSEGDQFVLDCMDRQIEAHKQEKESYGKEFERLAKDYPEIRHQKSLPGIGPIHAVKIVARLVTPYRFADKGHFLSYTGLIKLEKISGGRSYGRKNSRYCRQLKGVYKTSIWAAIGGNNPINNYYEYLIQEKGYPEHNARHKACRKLAILSLGVFKSGKKYQPYRRDHVKGYQELKSGL

SEQ ID NO: 407585 - protein, 420 aa, unidentified
MKKRVYRATKVKDLNLEQLEKETDGKKIILGVDVAKEDFMAAIMTKDRKVISTISWKHPSESPFFLNVMLKELCWYSLEVAMEPSGTYGDCLRAQFLEQGIVVYRVSPKRCHDAAEVFDGVPSMHDAKAAAIIGRLHLDGSSEEWPMLEATQRELTAAIRIMEVYDDAYHRNINRLEGLTMRYWPELTQHLKLQSATLLELLMEYGCPEYVDQVSQEAKVLMIKTGGHSLKENKIDAVLTSAQNSLGVKSIDAEREQVRELCKEIRRLQKLRHQAKLKIEALTQNIDSVREMAPVIGKVTAAVLYMVLGNMKEYDNAGSVVKTLGLNLKERSSGKHKGLLRITKRGSGLARMYLYMAVLRLIQKDPIIKAWYQKKLSRDGKVKKKALVAIMRKLAGALWHVGQGARFDASKLFNVSSLAI

SEQ ID NO: 407586 - protein, 394 aa, unidentified
MNAPTTICTAVERTTILAIDLGKYKSVACAHDHTTGEICFTTFETTRHELQKLLARWQPAAVIIEACLLAGWVHDLCGQLGVRCLVANTASEAWKFKHLKRKTDKDDALRLAQLYVLGQLPTVTLPPSRVRQWRSLIAARQNLVGRRVAVQNRIRAIFAGQGLPAPRGAKAWSTTGLADMALQAKQIDECDPDELWRGLLELALIEYRQIGALVDQAEARLDALGKANADVKLLQTTPGLGPRTAEAVAAYLYQPRRFHSAKQVSAYSGLVPRQHQSGEMDRRGRISKRGPALLRKLLVECAWCMLRYNGWARGFSQRLTAGGQRRKKQAIVALARKILVRSWAMLRDQKPWHDPQAGPKPALAPSKQRRQAEAQQRRQEKARAAPVAAAAAST

SEQ ID NO: 407587 - protein, 350 aa, unidentified
MWIIGCDLHTRYQQVAALNTETGELVERRLSQEGNEVRQFYAALPQPSRVGIEATGHAQWFERLLAELGHQLWVGDAAEIRASVVRQQKTDTRDAQHLVRLLAEGRFPRIWIPSAEQREVRQLLLHRSKLVGMRTSVRNQLQALAMNQGLRRRRALWSGPGRKQLDALPLGCWGAERRKDLLALVEHLDARIATLNQEVAAEAHRRPEVTRLMQQPGVGPVTALAFVLTLGPVERFRRSKQVVSYLGLNPREYSSGGQQRLGRISKQGNTLVRWLLIEAAQTAARFDPQLHRVYLRLKHRRGARIAKVAVARKLAVRLYWMLRAFPNHAQPVSPQSCPCTVMVPQVGSNS

SEQ ID NO: 407588 - protein, 343 aa, unidentified
MAYFVGLDVSQKTTAICIVDACGRRHWRGICGTTPDLIEQAVRRHADIDAQLGIETGPMTPWLVHELRRRGLATICLDARHARAALKMQINKTDQNDAEGLAQIMRTGWYRSVHVKSLDAHRARALLGARSQLIGMTTRLSNHIRGVLKTFGLLPGTMRGLSFDRQVEMLLADRPDVAPIVHPMLQSWRQLREQIAIFDKAIRALVNASSTCRLLMSVPGIGALTALAYVSTVEDPGRFRRSRSVGAHLGLTPRQYQSGELDRSGRISRCGDRLARTLLYEAAVVILTRIKRALPLKDWALAVAKRRGVGKARVALARKLSVILHSIWRSGVPYCESEQPATA

SEQ ID NO: 407589 - protein, 316 aa, unidentified
MYVGIDVSKEHLDVASEDRAFVAQFSNDEQGHGELARRLLELKPTLVVLESTGPYQIEVSLVLAAAKIPLAVVNPRQVRDFAKAMGILAKTDKLDAGVIAKFGATVKPSAQPLPDAETLELEALLTRRRQLVGMIASEKNRLQALFGPAKDSEAAQSIRDHLSYLIKSLKKLERDLRKRLERSTAWKDKEDLLKSVPGIGKVTAMTLAIDLPELGTLSRKKIAALAGVAPLNRDSGKSSGKRRIWGGRATVRTALYMACYASLRHKKDPTSSRYDQLKQANKPHLVAIVACMRKLLTILNAVIRDGKPWNPALAGH

SEQ ID NO: 407590 - protein, 344 aa, unidentified
MSIVGVTGGVDTHADTHVAAAIDHNGGLLGIESFPVDPAGYESLLGWLVGFGPLEQVGVEGTGSWGVGLTRFLHSQDVMVVEVDRPNRQKRRKVGKSDPTDALAAARAALSGEASVTPKTRNGPVEQIRVLMVARRSARQQRIQTLNQLRHLVFTAPEEIRVRFKDRYKTGLVTEAANMRPNKGSDPVTFTTNLMIRNLARRVKALNTEIREIDGMLAALIAQAAPSLLELHGLGTDTAASLLVAAGDNPERLSSEGSWAHLCGTTPLPANSGKVTNRYRLNRGGDRQANAALYRIVLTRMSSDPETRRYVTRRRAQGRNTAEIMRCLKRYVARQTFKHLPTTT

SEQ ID NO: 407591 - protein, 453 aa, unidentified
MSEPSNESKGTSLEIVHPNAAGIDIGNAAHYVAVPPDRDPQAVRRFECFTEDLKKMADWLIQCGIDTVAMQSTGVYWLPAYEILTERGLRVFLVNAAHTKNLPGRKSDVQECQWLMKLHTYGLLSNSFRPTEEICVLRTYWRQRDAQVKAASMTIQRMQKVLTEMNVQIANVISDISGVTGMAILDAILQGERDRYKLAELAHPRIQASKEEIAKSLEGNWRSELVFVLRQERDIYREYQKKIGECDEAIQAHLKTMEDKAEPGSKPGTPKAGKRAGGNAPRFDLRGELYRISGIDLTRIDGINIMVAQTILAEVGLDMSKWPTEAHFASWLGLCPNNQITGGKVYHRGSRHVENRAATAFRMAATSLWRSKTYLGAKFKRLRAQLGAPKAITAMAHNLARLVYRMLRYGKEYVDKGMEFYQQRYQQQQIRWIEKKAKDLGLVFTLTPESDVS

SEQ ID NO: 407592 - protein, 313 aa, unidentified
MQAVTTIGLDIAKSVFQIHGVDAAGNVIVRRQLKRRYVLPFFQRLPPCLVGIEACASSHHWSRELKALGHTVRLMPPAYVKPYVKRQKNDAADAEAICEAVTRANMRFVETKTPEQQSCLMLHRTRHLFIRQQTAVINAIRAHLAEYGIVAAVGRNGVEELLGVVADPSDKRVPEIARACLAALGAQLRMLKAALATALVASVPDPKAFRSGRNFSAWIGLVPKQHSSGGKDKLGSISKQGDRYLRSLFTAGALAVIRYAKIHGTKHRPWLTALLARRPAKVAAIALANKIARMAWAMMAKGERYKEPVALAV

SEQ ID NO: 407593 - protein, 343 aa, unidentified
MQTITTIGFDIAKSVFQVHGVDAGGQVVIRRQLKRRYVLAFFQKLSPCLVGIEACASAHHWSRELQALGHTVRLIPPAYVKPYVKRQKNDAADAEAICEAVTRANMRFVPTKTPEQQSGLVLHRARHLFIRQQTAVINAIRAHLAEFGIVAPVGRHGVEELLNVVADPNDKRVPEMARACLLAFGAQLRGIKEQILEFDRLIRAWHRSNEMSMRLDEAPGVGPVLATALVAAVADPKSFRSGRNFSAWIGIVPKQHSSGGKNRLGNISKQGDRYLRGLFVAGALSVIRYAKIHGTNHRPWLTALLARRPTKVAAIALANKIARMVWAMMARGERYKEPVALAR

SEQ ID NO: 407594 - protein, 446 aa, unidentified
MELLYTHVAGLDVHKKTVVVCCRIAGPNGQPRRETRTFSTMTADLLALSAWLTSLEITHVVMESTGEFWKPLYNLLEASFIVLVVNAQHVKQVPGRKTDVKDAEWLAELLAHGLLRGSFIPPLPQRDLRDLTRQRTNLVRERATVVNRLHKVLEWANLKLTSVATNIVGVSARAMLEAIVDGQGDAAALAELAQGRMRSKRKALEQALTGRVRDHHRFLIAKHLIHIDFLDEQIAEYDEQILAHIAAQSPTPAPVDAPSPTVGPGRSISAAVPSDEVVPLSWEEAVSIWDDIPGIGRRVAEQLVAEIGTDMSRFPSAAHLASWARIAPGNNQSAGKNHSGKTGHGNQWLRSALIQAAHAAVKVKESYLAAFYHRLVGRRGKKKAIVAVAHKILTIAYTLLQKRERYQEPGATYWDERRKDQLVHRMRNRIERLGYTVQLEPVAVAA

SEQ ID NO: 407595 - protein, 319 aa, unidentified
MVDKEIAGFHDTANRMDDIYNKFAEVLEYGKIDIGEVLVCAEYTGKYIYPLVLACHKCRVDLWLESGYNIKCEARKERGKDDRTDARRIAEYGRKNQDDARIYRLPAESIATLRGLLSERAMYCSQRAAHKGQLRDMRGFMSPEAYTARAVRQLSLIKELDRLIEEVDNSMAEIVASDPELLRQQQLLLSVPGIGMVCAAALIAVTAGFSLFDNGRELCCFAGLAPFAYTSGTSIRSKRRVSCRADHQLKALLHMCALVAATRMKSGRFAEYYQRKTAEGKNKMSVLNAVRAKLMLTAFAVVRDNTPYDKNFKINLAES

SEQ ID NO: 407596 - protein, 428 aa, unidentified
MKYNTQNAKIKSITEKTLIVGIDVGSETHFARAFDWRNYEYSKKPLEFSNTEAGFMTLKAWMADFAEKYGKNVVIPGMEPTGHYWFNLGAYLQDNGMKPVHVNPHHVKKSKELDDNNPNKNDRKDPKTIAALVNEGRFSYPYIPTGIYAEIRSLSNLRLQTQEEITRIKNRIARWFSIYFPEIKDVYRNPDSVSGLMILKEAPLPQDIVKLGVDGINKIWRDAKLRAAGLKRAKTLVTAAEHSIGSQEAPDSARIELKNLLNDYEIYKNREEDLMSLTEEKLSEIPHIDKLLEIKGVGLKTVSGFVAEVGDIPRFDNQKQLQKLAGYAIVECSSGKHKGESHISYRGRKRLRYVLYEAAISLIARNEEFKEVHRYYRTRKENPLKKMQSVIAVACKVLRIFYTILTKGVTYDGAKMMQDIKRPQMLAA

SEQ ID NO: 407597 - protein, 349 aa, unidentified
MIVVGIDPHKQTHTAVALDAATGRVLAELTVRARTAGFDRLLGWARDLDAERTFAIEDGRHVSGHLERYLIARGERSVRVPPRMMGESRRTDRVSGKSDPVDAAAVARAALRHPDLPVATLAGVEREIGLLVAHREMLVNERTDKICKLRWLLHDLDPDLAPPLRTLDRFSTLDRLLATLEALGPSVQVELCVDLVRRCREITARANELERRIRALVRAHAPALLQIPGCSALTAGKIVAETARVSRFPTEGHFARYAGTAPIPASSGARHRQRFNRRGNRQLNAAIHRIAVTQLRIHEPAQDYVARKRSEGKTKTESIRALKRHITRTVFNTMASTDQPSDRLTAIAA

SEQ ID NO: 407598 - protein, 495 aa, unidentified
MAVDLEREKVAKARTPLERLQEFLQTGPDLAINSSKESYMPKPRDKANRVRTVSKQELENLPLLNPDAAAIDIGSAQHLVAVPPGRDTESVRSFGAFTADLHALARWLKQCRIRSVVMESTGVYWIPAFQILEQYGLEVLLVDARAAKNLPGRKSDVLDCQWLQRLHSFGLLSGCFHPAAEIVPLRAYLRLREELVRAGSQSVQHMQKALFEMNIQLANVISDITGETGLAIIEAILAGERDGKKLAQLKHRRIQASKETIAKSLEGNWRVELLFALQMALDTYQFYQQQIAACDQRIAQALAKLPTRQPAAQSEPAGQTDQSLKAQKLTPLQAELIRIAGVDLMRIDGIGEQIAQVILSELGTDLQSNFKSEKHFSSYLGLCPGTKISGGKVLKRKSRKVAHRVATALRLAARSLHSSDSALGANFRRLKARLGAPKAITAMANKLAKLVYRLMVYGKDYFDTGAQRYEQKFRLQQIRRLQKQAKMLNLKLVPV

SEQ ID NO: 407599 - protein, 389 aa, unidentified
MERPMQKLNDLSRSPSPLDPDGTLIAVIELSLSSWLVAGIVPGVERQPLKKLAVDESALLKLLHRWRDEAAKAGHRIKRIAVAFEAGRDGFWLARWLSARDIEAHVIHASSVAVSREHRRAKTDRLDTELLKRSFLGWLRGERDHCKMVAIPTTKDEDAKRPNREHESLVGEQSRIVNRMKATLIRLGIRGFNPKLKKAAERLDDLRTPEGEPIPPNTLAELRRDMVRRRLVSDQIRQIEDARLERLKQAPSDGPHAMVRLLARVIGVGVETADMLVQEVLSRSMRDRRAVARYAGLTGSPDESGRKRREKGLTRSGNARVRRGMIQLAWRFLMFQKDSTLAQWFRARTESARGTRKTMIVALARKLLIALWRLVREGVVPDGVVLRPA

SEQ ID NO: 407600 - protein, 419 aa, unidentified
MRAIGLDVHLDFCEIAIAENGRVRSAGRIATKPDELHLFAASLGPQDRVALEVTGNAWRIARILQPRVEQVVVVSPSDTGIRQARAKTDRLDARTLAKLLATGELDSVWMPDHDTWVMRRRLSRRSQLVHARSRAKNQIHAVLMRQLIGRPPMSDVFGVKGRKWLAGLVLPIEERETVDGAMRQIAFLDAEITAVERLIAQAALESPQIKRLMTVPGVNVICAATFLAAIGDIRRFESSRKLVGYLGLDPRVRQSGSGPATHGRISKQGSVGARHALVEASWSTVRQPGPTRAFYQRVRGRRGHQIAIVAAARKLACLFWVLLTREEDYAFGQPSLTKKKLRGLELIAGASSKRGTKNGLWAANGAMRQAERELAQQAESAYQHTVRQWQAAKVGASVTPGRASSGPSKGQVARQTTSP

SEQ ID NO: 407601 - protein, 353 aa, unidentified
MKCDKYMGMDVHQAMTVVAVMDANGKLIWETMVPTEASAIIPLVQSISGPLHVTFEETTQAEWLYEVVRFFVADVVVCDPRHNKLLTEGSKGDKVDARKLADLLRTGMLRRVYHGNQGGRRLKQLVRAYETLSTDTRRTMVRIKAIYRSRGLQTPGRNVYQPKQRDQWLGLLTEPGLPERVGWLYDELDHLKPLRRQAKQAMLSEGRKHRAVQLLRTIPQLGPIRAALIAATIDTPHRFRTRHQLWSYSGLAVVTHMSAEYEMKEGRVVRNRKPIATRGLNRNCNHRMKEVFIGAATAGSRTEPYRSYLQSLEHKGIRKEMARLTLARKIAAVALTIWKKGETFDPKKLNWTT

SEQ ID NO: 407602 - protein, 383 aa, unidentified
MMRDDKRKKKTVRIRRDMSNNSLIAGIDLGDTASLATLLTPTGDVADRFSFQMDDHGYTLFTEKVPRDARLAFEATSMAYPFYRMLKGRGYDDVTVAHPTELAWIVRSKKKNDRADSLKIAKLHLAGLLPESHLLPQTEQIERDLLIQRVKLGSEIGRMKSRIISYLKREGVYGHLPKSKDNFSARRRAAIASLRFNDDRDLVLKTMVDRLEFMERQCEPLEQRIRKNARENKYVKIIMSIPGIDYYLASLYASYIGDPHRFPSFDHVASFLGIIPESKDSANVKRRGRMSKDGPPIARWGLGIMTDTVMLFNPNIKAYYNRVKQRTRRGSYAHVLTMKKLARMIHHMMITEQNYKWENEALTEEKISRLGNDADADAAGGES

SEQ ID NO: 407603 - protein, 412 aa, unidentified
MDVLVERVAGLDVGKQVVVVCVRTPGPGGRRVSETRTYRTMSRSLEAMADWLVESGVTLAGMESTATYWKPVFYALEDRMGSWLLNAAHLKAVPGRKSDVKDAEWIAQLLEHGLVAPSFVPAPEIRRLRNLTRYRVQLMGDRTRDAVRLERLLEDASIKLSAVASSVTTLSAREMLAQLVAGNTDAVAMADLAHGKMRRKLPDLAEALTGHFDAHHALLVGAMLHRLEHVETALAELDVMIAAAMVPWAHQLELLQTIPGVGLKTAQVIVAETGGDMAQFPTAAHLAAWAVVAPAMHESAGKRRPAGSRKGNKWLASMLVEAASSVSRSKNTYLAAQYAQIASRRGRKRAALAVAHSMLVSAYYMLTRDEPYREVGNDWFDQRHADAHTRRLVAQLKRLGHTVVLDPADSPA

SEQ ID NO: 407604 - protein, 359 aa, unidentified
MAVMEGRERRIVGGVDTHKDLHVAAVVDEQDQVIETRCFATTRQGYRQMLTWMRSFGELQRIGIESTGSYGAGLLRFMQQAKVPVLEVTTPDRQDRRRRGKNDDLDAQNAAHAAFAGQRTVTPRSRDGMIESLRVLMACRKTAVSARRVALQMIHNTIVCAPDDLRDQLRSLTRMQLVRTLAAWRPDLTAYRDLDSAYRISLKSLARRYLELHDEITDLDAMITAIVDELAPNLVTRNSIGHIGAAQLLLTAGDNPERLQSEASFASLCGVSPVPASSGKIVRHRLNRGGDRAANSALHIIAIGRLRTDQRTRDYIARRMAEGHSKLDAIRALKRYLAREVFTLITQRRREINAARIAA

SEQ ID NO: 407605 - protein, 387 aa, unidentified
MPQQNDLSRSLIPFEQATTVVAVIELSKSSWLITANIPGVERQPLKKIVPDEMELLRLLHRWRDEGIRKGCAITRIAVAFEAGRDGFWLARWLTGHGIEAHVIHSSSVAVSREHKRAKTDRLDTAMLIRVFLGWLRGERGHCGMVAIPTIEEEDAKRPCRERENLVGERTRIINRLKADLTRLGIRGFKPQLRKAPQLLASLRTPEDGPIPPNTLDEMRRDLARLALIREQIKAIEQARQTRLEEAPQSGPNAMIRMLASIRGVGIETAEMLVQEVLSRHLRDRRAVGRYAGLTGAPDESGSKRREKGLAKSGNARVRRGLIQLAWRFLLFQKESALAQWFRGRTEGINGAHKTKMIVALARKLLIALWRMVTTGEVPHGVVLREAV

SEQ ID NO: 407606 - protein, 340 aa, unidentified
MPLYGGIDLHANNSVVVLLNEQDQVVYQKRLPNDLPTILEVLAPHHAEIKGLVVESTYNWYWLVDGLMEAGYRVHLANPAAMQQYSGLKYSDDHSDARWLAHMLRLGVLPEGYIYPKAARAVRDLLRKRAHWVRQHTANVLSVQNIMVRNTGARLSVKRIRELPKKELKRLLPEADQVLAITSSLAILDCLSQQIKALEKIVHQRLHHTPSYEQLLTVKGIGTILAQTIALETGDINRFPTVGNYASYCRCVDSTKLSNGKRKGQGNVKNGNPYLGWAYMEAAQYAIRFNPSAQRFYQRKLAKSNNNTTLARQAVAHKLSRACYDVMRDLVPFETTKAFG

SEQ ID NO: 407607 - protein, 354 aa, unidentified
MPHNTSRLEAVATIGIDIGKNTFHLIGLDRNGAIVLRQKLSRRQIEARLANTPPCLIGMEACVGAHHLGRQLKAYGHDARLMPAQYVRPYSKGQKNDFRDAEAIAEAVLRPTMKFVAIKTVEQLDLQALHRVRERLVCQRTSVINQIRAFLLERGIAVRQGPPALRSEIPIVLSMTDKLSPRMIQMIEDLCADWRYLDERIETVSDEIKTLSEQDEGAKRLMTVPGIGPIISTATVAAIGNGDAFSKGRDFGAWLGLVPRQMSTGGRTVLGPISKRGNRYLRMLFVQAAHAVLLHPQCWERHGLKSWIAAAARRLNRFKLAIALANKLARIAWGVLHGGRSFEVRSMKPAAQCL

SEQ ID NO: 407608 - protein, 353 aa, unidentified
MQIVGALDVHRRQITHKTLDLVTGDVRRGRLSPANRESVREWLECFRGYEAEFALEGTTGWRYVAEEIERAGQVAHLADPAETAAKRGSKRRAKTDRADCDLQLKLLLARELPESWIPPAHILELRTRVRTRKTLVDQRSAWQLRLTAQLFHQGVPAGINPRTRAGREALARVELSPAGRQLVAIALRMIDVLDLEIVPLDRELRAFAARQPGCRALSERLYGVGPVTATAVLAELGDCRRFSSSDDAVRHAGLDVTVYQSDSKRAAGHLSHEGAPVLRWALYEAGQQATRQTSPDHEYFLQVRERTDHKSASLSVARKLCRRAYHILRELGEQALAPVDVDAHVEEAIHAAA

SEQ ID NO: 407609 - protein, 322 aa, unidentified
MNPKNYGGIDVAKKNFVIGIYGQDKTKTEANTPKGHAKAVEYLQKHNVDLVVLESTGGLEVPLANALHAADIRVVIANPQRTHQYAASFSLGKTDHLDAKMLADYAQALDSRKMADDMCYAPPSEEALALEALVKRRSQLVEMRKMEKNRLEQTHASQKASVVAMIKHLGELIAALDKEIDQNNRGGFNGKGEILSEIKGVGRITCATLLSMLPELGKVPHKRAALLVGVVPPPRQSGEKERKSGCVGGRMVVRNALYMAALTATRSEPKIKAFYEKLMSRGKAFKVALNACMHKLLRILNARMRDYLASLKETEESELQGA

SEQ ID NO: 407610 - protein, 319 aa, unidentified
MQSKLTFGMDIGKNEVVVACHEGAFAILKMANAVAGLRRWLGSVPAGSRLGLEATGGYHEPVAELAYSLGFTVYILNPKDVHFYARALGARGKTDRLDAQIIAAYVAEHSVRLHPFVPLSADEKLLRELARRRATLVNAKSMLQQSLRVLPGFEREGRELLRAMGSFADRLERKLAQIAARSSERATLVKRLQTIDGVGTLTSIRCATLFTRVPFHSSDAVVAFFGLDPRPNDSGQHRGRRRLSKRGPSEDRRLLYNAAMSAIRTPAWRPLYLHLRNRGLASTEAIIIIARRIVRIAFAMYQNHSNFNPRLVPRPYCPA

SEQ ID NO: 407611 - protein, 449 aa, unidentified
MEQPVKGISLDCIELNAAGIDVGATEVYVAVPPERDSQPVRRFKTFTEDLRQMAAWLIECGITTVAMESTGVYWIPPHEILEEAGIRVCLVNSKHVKHVPGRKSDVSDCQWLQYLHSVGLLRASFRPDSQICAIRSLSRHRASLVESASVHVQHMHKALTQMNLQIHHVLSDITGLSGMAIAQSIVDGERDPVQLAALCQRGVRSDQQTVIKSLVGNYRPEHLFTLKQSLLAYRNYQQLMAECDREIEQLMQRLDGKSDPHQNGPTPPAKSGKRKRRKNQFYFEMAPELHRIFGVDLTAIPGISALTAHTLLAEIGPQLDRFPNAAAFASWLALCPANNKSGGKVISSKTRQTNSRASRALRLAAQTLARSRSHLGSFYRRMRARLGAHQAITAAAHKLARIVYHLLSTGQTYDETVFLNEDRKQAQRHEKRLRKQASAIGFQLVPIAA

SEQ ID NO: 407612 - protein, 403 aa, unidentified
MTVRPLVWVGIDVGKTSHHACAVDETGKVLWNQKVSNEQRAIEQLITRAHKGADEARWAIDLTSPMALMLITVLLGAEQSVVYVPGHVVNTMTGAFRGEGKTDAKDARVIAETARMRSDLSEVAMPDELVVELAQLTGYRTDVMADWVRGVNRLRSLLGSIFPGLEAAFDYSNRTPLILVAHLCTPAEIRAAGIKGVTAYLGDNGGWPTAIAKTAATAVAAAKQQPLALPGEAGTAALVKRLAGKLLDLDHEIKDIDKTITERFRDHPYAHIIESLPGFGPGLGAEFVVVTGGDLASFATAGRLASYAGLVPVPRDSGRISGNLHRPKRYNRRLRRVFYMAALSSIRGDGPSRQFYDRKRGERFIHSQALLALARRLVDVLWALLRDGREFTPDKPTPATAAA

SEQ ID NO: 407613 - protein, 339 aa, unidentified
MQLYSGIDLHSNKLVLGISDETGKRILKRNMPNDSETVLATLEPFRAELVGVVVESTYNWCWLVDALMEDGYRVHLSNPCANQQYSGLKYRDDNHDAFWLADLLRLGTLREGFIYPKQDRPLRDLSRKRLHLVRLRTSLILSLKGFIVRTCGIGIKTDSIKEDDINTLLRHMPTEENIRLLVKSNKDSIDFLGTQIDQLETSLLAQLKGKRLFKNLLTLPGIGKILAWTIQLETGPISRFGKVGQYSSYCRKVQSRWTSNDKVKGKGNAKNGNKYLAWAYAEAAEQARRFYPACRKFYNRKLSQTNAAVAHHALAHKLTRAAYYVLRDNVPYDEAKLFG

SEQ ID NO: 407614 - protein, 369 aa, unidentified
MVRPRSKRHLACPKRKSERRRTVGKKQNLVSVIKVIGVDLAKSVVSVHAVDAQGKTVVRKRMSPANFRKWMASVPTCLVGMEACGGAHHMAREVMQHGHDVRLMAPQFVKPYVKSHKSDALDAEAICEAVQRPTMRFVAVKTRDQQDMQALHRVRDLAVSRRTALGNQIRGLLLEHGIAVPQRIYNLRRELALLVDEAELGREFRWLLRELHGELVRLDEQVAAYDERLKAQLAQDETAQRLATIPGIGVLGATMLPAAIGDAAIFRNGRQCSAWLGLVPHQHSTGGKTRMLGITKRGNEYMRRLLVHGARAVLAAAERFHKMDALSCWARAVSQRRGKNRAVVALANKLARMAWALMAGGGRYEPQIA

SEQ ID NO: 407615 - protein, 270 aa, unidentified
MMIIGCDFHPRFQQIAFVNQETGEYGERRLSHPEEAEQFYRSLLGKQVRIGAEATGNFRWFRQLMQELGHEFLLGDPSAIRAASPRRQKTDKRDARHILNMLVEDRFPAVWQPPVENEDLRQLLLHRCRMVRFRARIKNQLDSMAKNEGLLSKRVWCAMRRRQIEELPLSGWNVERRKDLLFLLEELNKRIEPLDEAVLKAAEDNLEARRLMTHPGVGPVVSLFYVLTIGDWQRFPRGKQVASYLGLIPAEESSSDKRRLGYSRAVPPGP

SEQ ID NO: 407616 - protein, 348 aa, unidentified
MNKRIAVDLAKSVYQVAESVRAGQVSQRKRLNREAFRRYIQDQAEPVEWLMEACGTAHYWGRFAQSQGHRVILLHARYVKPYRRRNKTDRNDCDAILEAARCADIHPVPVKTHEQQQLQQLHGLRETWKKSRTQRINLLRGIFREMGLEAPAATAAFLHAANELVECPEVVALRGQLQIVLAEINLYEQCMVECEQQLQRWHADDAIVRKLDEVCGIGLLTASALKTVVGQPERFASGRQLSAWLGMTPREYSSGNRRRLGQISCLGNTYVRTLLIHGARAALLAAQRLYCRTPERLTQLQRWAVATAARIGHNKAAVALANKLVRICWAVWCHERRFSGNWQSSRPA

SEQ ID NO: 407617 - protein, 420 aa, unidentified
MKVVYQTCCGIDVHKSFLVATIIKTTSGVQPSYQKKRFSTFNNSILQLKEWLLQNECRDVCMESTGKYWVPVFNLLEDAINVTIANPKWVKAVKGNKDDTKDSKWIGDLFRLGLVPGSYIPCKPIRILREFTRYRYKLTSCRSSEKNRYQNALTVCNVALDSVVSDIFGKSATSVIDYLIEQSDNSINHEEIASRLLRSLKKKSDRVIESIEGYQMTDSQKYRMRLVCAHMDYITSTINDIDTMLDSLIAPYENAVQLLCTIPGVDRNSAITVISEIGIDMAPFSSSKRLCCWAGLAPGSNESAGKKKSVRITRAGVYLKPALVQVAHAAVKSGKSPYYKQKYERIMKRRGKKRAIIAIARMILTAIYQILSTGEIWSPTDLYKIDMPEPLKEKQKEKAIKQAKKLLIREGILSESQLAS

SEQ ID NO: 407618 - protein, 432 aa, unidentified
MKYALVQVLPDVPPGGVCAGIDWASADHAVCVVDRAGRVTDRFTAVHDRAGIAGLIARLRKSQASEVAIERGDGVLVDALLAAGLTVVVIGSRQVKNLRSRYVSSGAKDDRFDSYVLADTLRTDRARLRPLVPDSPATMALRAAVRARKDLVAHRVGACNQLRAHLAMAFPGAIGLFSALDSPVSLAFLAAFPSREAAAGLDEQALDRWLTSLSARGNPAPAGVLAARLAAAPPGSGNDAAQAAVTAGLAGAVADLARRIRALDAQIAAQLDAHPDAHVFTSLPRAGTLRAARLLAETGDCRPRYPDPWSLAGVAGVAPVTRRSGNYLSHAFRQNVNRQLRDAWCDFADGSRHASPWAAAIYHDARDRGKDHPHAVRITARAWICVIWRCWQDGTGYDPAKHNALQAILARPAQAASQQTQRQEQHEQQEDQ

SEQ ID NO: 407619 - protein, 342 aa, unidentified
MDHFAGLDVSVKETSACIVDDTGKIVREVKVASEPNALLAVLKNPAYHFKRIGLEAGPLSQWLCSALAEAGLPVICVETRHMRAVLKAQINKTDRNDARGIAQMMRVGLYRPVHVKTLRSQKLRMLLTHRKLLQSKAIAIENDLRGTLRNFGLKVGMVGKAKFEARIKELVENLPELAILIEPLLIVRRALREQVVILHRRLLAIVRDDAVCRRLMTTPGVGPVVALTYRATVDVPARFRKSKSVGAVFGLTCAKYQSGEIDRSGRISRCGDEMMRVMLYEAAQSMLRSKKWSWLKAWAMQIARRRGMKKAIVALARRLAVIMHRIWVDGTEFRWTREAAAA

SEQ ID NO: 407620 - protein, 342 aa, unidentified
MSQLKQYVGLDVSLKETSISVVDEADRTIWRGRSQSTPDDIAEKLSARAPHAVRIGLECGQLSNWLYVGLKAKGLPVICIDARHASAALSLKVNKTDTNDALGLAQLMRVGWYRETVVKGIDCRYLRSLLVVRQRLVSQITAIKNCVRGVIKGFGRVMPKALKRHFVPKIRAAIADDPMLAALIEPNLRTLEAAMEQLAVYDRAVLKQARDDATVRLLMTAPGVGPVVALAYVTGVEDPHRFRSSATFGMTPKRYQSGEVDLAGRISKCGDAMVRGLLYEAAKVLLSRSCRPSAIKSWGQSLARRVGAKKATMAVARKLAVVLHRMWITNQTFQWSREEATA

SEQ ID NO: 407621 - protein, 341 aa, unidentified
MQHELRTVAIDLAKKVFHLVGTDTLGKMLWRKRLTRHAFMPFIAQLPPVLIGIEACGGAHYWARRFREHGHDVKLMAPQFVKPFVKSNKNDMRDTEAIAEAVMRPTMHFVPTKEIDQQDMQALHRVRERLIGARTALINEVHGLMHEYGIVLPTGVSKFRQAVVDKLESEKEKLTALSQEMFRKLVEEFGELEKRLAYYQDKLEALATMHPECQRLMTIPGIGPITATALVAAVGDVGVFKNGRQFAAWLGLVPKQHSTGGQTRLLGISKRGDSYVRKLLIHGARATLRWVKLKTDDRSRWMRGLLARCGWNRTAVAVANKNARIVWALLSRGGVYGDNAS

SEQ ID NO: 407622 - protein, 462 aa, unidentified
MNENQQKTIGLETEEEGLPVVRPNVAGIDLGSQEHWVCAPRVDRTGREVARFGATTPDLEKMAAWLLERHVESVAMEGTGVYWIAPQEVLEARGLEVVLVNTRELARVPGRKKTDRVDSKWIQRLHSCGLLAGSFRPQEQICMLRTLVRDRGTLVADAGNWLRRMQKSLDQMNVRVHRAVSDLDGQTGMAIVEAIVKGERDPVKLAKLRHPNCKKSPEEFAKQCSGHWREDHLFSLKQSLEMYQAVQQRMKAYDQEILRKVEELEREDCHGQPAPKLKNQNKADAITRRGEEILRQALYRMTGVDLTAIDAIGVRAVEVVISEYGADLSCFATEDQFVSHITLAPRKPISGGKPVKKKRKPNSPSTRVAEVLRMAAQSMQHSQTALGAYFRRMAQRKDRGVATFATARKLAQYIYRLLRWGQPYVDIGAEAYEKLYQQARVKHLTEIVRNLGFEVIPKPAEA

SEQ ID NO: 407623 - protein, 399 aa, unidentified
MSLDRPFAEPAAIQTQLGAIFVSLELSRKTWLMTSLSPGGGEKMSKRAIKGGDVAALLARLEELRQKALARTGTSHPVIVIEEAGLDGFWLHRVLEEEGCESHVVDPASIAVPRRRRRAKTDNIDGEALLRALLAFKRGEPRVCSMVRPPTPEAEDERRICREREALIEERVRHVNRIKGLLFSQGVRDYAPLRRDRRQRLDALHTGDGRPLCPHLRAQIERELDRLELLLGQIKAVESARDKLLDRLAKRPRKDAPAPAGRQPSPVAQLFSLKGIAEELAVSLWTEGLSRPFVNRRQAGAYPGLTPTPWRSGQLDHEQGVSKTGNQRLRTKMLEPAWLWPIHQPQSALARWYRQHLPTMTGKAGRKRLTVALARKLFVALWKFVSAGVVIEGAVMKAS

SEQ ID NO: 407624 - protein, 357 aa, unidentified
MARYSLNDLKVFLADDPHLPYWMGIDVHKRSYHIALLRDDSTFTWAAPADPEKLVQRINEFEIPLAGICYEAGPTGFSLARLIIKSNIPVIVAAPSKVPRSVSPGSKTDRLDCLKLAHFASKGLIKSIAIPTVTEESQRALLRRRHQLVDSIRQSKQRIKGMFLYHGFEEPDAIRHWRADSLQRLRSESLPKELKLTLNSHVRELKYLQDELSKVMKQLNDIGRSQEHQETLQALKSVPGVGTVVATSFLLEMFNPERFERGEEVASYLGLAPTVHHSGEKSPRGHLVPVGQTRLRSLLVESAWVWMTKDQYAHQLYNKLIGRTGIPQKAITALARKLSIILWRLSIEQRAYRPVEK

SEQ ID NO: 407625 - protein, 338 aa, unidentified
MKLYAGIDLHSNNSVIDLLDEKDKVIYNKRLPNNLATILSALSPYQAQIEAIAIESTFNWYWLVDGLMEAGYRFHLVNTAAVQTYSGLKYTDDNHDARWLAHLLRLNILPTGYIYPKVDRAIRDLLRKRSQMVRLQTMNILSIQNLIARNTGDSMKGAHIQRMTAEEIALALPNDDHALAMRCNLSVLHQCQEQIKILESVIVKRIGLRKEFQFLLGVPGIGKILALTIMLETGDISRFNKAGNFASYARCVQSKRMSNDKKKGENNRKNGNKYLAWAFVEAAHFSIRYSDTIKSFYQRKSSKTKKVVAIKAVAHKLARACYYVMRDHVEFDVNKAFT

SEQ ID NO: 407626 - protein, 315 aa, unidentified
MNIVEPPNHPVHIGIDVAKASLQIDLQGKSRKLPNTKAGHQTLLGLLPEDAFIIMESTGSYHIAPMECFQAAGIPVAIVNPVRVKQFGKARGTLAKTDPVDAALLTDFGRAFLPSPTPPRDPERVLLGELVNLRDTLGAQITMWNNLAEHQQSSVARKLSKVQARAATKSMTDIEVRITKLIKDSTTMAPVAAVLQETKGVGAVTTAVLVAQMPELGRINRREAAALGGLAPCANDSGKHEGKRYIRGGRPRIKRALYLAALSAVRFHSTLKITYKTLRAAGKPAKVALIAIARKLLVILNAKLKEYYATLVPTH

SEQ ID NO: 407627 - protein, 315 aa, unidentified
MQDILEICCGLDVHKETVVACLLKGNVGEEPTKIIRTFSTLLAGLEELKAWLEAEDCRHVAMESTGVYWQPVYNVLEEAFDGSIALIVANARHMKNVPGKKTDMKDAEWIATLLRAGLLEGSFIPSKPIRELRNLTRYRKSIIEEIASQKNRIEKHLQSCGFKLSTFLTDIFGVSGRAIMDHLCRHGKISAREVETLVKGRAKCKLQEIKQAVNGKMDVHQREFLKLLLGWLDQHYKHLHQVEQKLEEKLGQYQRQLEQLDGIPGIDKTAAAAILAEIGIDMSRFKTAEHICSWAGLSPGNNESAGKKVHSHHPR

SEQ ID NO: 407628 - protein, 374 aa, unidentified
MENSVTYIGMDTHKKQHNVAVHYPDDEQIVQFSVKNNARDIQKMVKKIKKQAPATVAFCYEAGVCGFTLKRWIEKQDGRCEVIAPSLIPRKPGERVKTDRRDALKLLQLFKAGLLTEVHAPEEQDEADRELTRLRETAKENLKRSRHQILKLLTRHGYVYSDGSHWTQKHIAWLRTIEFTESMLNKVFESYFDEMVYCMGRLDNLDKEVERLADSEKYKEVVGLLSCFHGISTLTAMTILTEIFEFGRFDSARHLMSYLGLTPSEDSSGEKQKKGAITKAGNKRVRRLLNEASWHYRYRYVPSKALKKRRADKPSWAIEIADAAGRRLSKRHRDLLNNGKIPCKANIAVARELAGFIWAMMTQWQARKNTKDAA

SEQ ID NO: 407629 - protein, 377 aa, unidentified
MCSPFEVQHEEGAMEAFVDLLAKLDGEIRVVMEATGIYHLPILTFLHDKGYFVSVINPFAMKKYAKNNSIRGAKTDKLDSMMIANYGIEKWYKLQKYEGDEETYAELKLLGRRYRYYMELHVKALQELTHILDYVMPGIKKMFNSWNEANGKDKLSDFVEKFWHFDLITSKNLEEFTEEYLVWAKEKKYHCSKSKAEAVYELACNGIPTLSSDTPSTKMLVQEAVSVLRAIDSSLTLILARMQSLAKSLPEYSTVREMGGVGDVLAPKLIAEIGDVRRLHSAKALIAWAGIDPPPYESGQFIGSKRRITKRGSSTLRKVGYEVMRVLKSHPAPKDDAVYNYILKKEAEGKSKKHAKIAGLNKFLRIYYSRVMEVYQK

SEQ ID NO: 407630 - protein, 397 aa, unidentified
MIAVGIDISKAKSTVAVIDSDGTVLASPFTMAHTQPEMEAFVTYLKGLGEPTTILMEYTGHYHYPVLKKLQDEGFPVCIVNPYQMKKYGDVEIHKAKTDKKDALRIAAYALEKSYKLVPYSSMEQKYEDLKFLSRQYSQRITYVAKLKVQLIALLDQTMPGITRILPLNSRNPEKCALLLFIKRFKSFDEIQRIGKARFLASYDVLAKKASERSASSKGLSIYELAVDSITTRGENPYIWLSQNQCVDLLSATQNAADEIISQMRNIAETIPEYKVLRAMHGVGDRLGPIILAEIGDVHRFHSGKALNSYAGNDAPPYQSGQFESRNRHISKRGSSTLRKACYEVMQALKLTKPQDDPVYLFMLKKEQEGKPFNVAKMAGVNKFLRIYYARAMELYK

SEQ ID NO: 407631 - protein, 431 aa, unidentified
MYHFGGCDVKSTSTQPFSAYVGIDWGDAKHDICLQAAGSDQREFACIAHQVPRIDEWAKALYQRFGGRIAVALELTKGPIVYALQKYDFFVLFPINPTTLAKYRVAFKPSRAKDDPTDAEMALDLLLHHPERFKPLHPQSIAMRTLLSLTEHRRELVNDKTRLTNRLTDNLKQYYPQALDWFEQRDTILFCDFVSRWPTLTQVKRARQASLKDFFYAHNGRRPQVINARLDSIKAACALTNDPGVITPCKLRTLALVEQLRVTLQAIDRYDREIADLASTLPDYALFQPLPGAGPHLTPRLLVAFGEDRDRFQSADEVQKYSGIAPVTERSGKKHWVHWRLQCPTFLRQTFIEWAGQTINKSFWAGAYYRQQREKGSSYQVAVRALAFKWIRILYQCWKTRTPYDEAKYLNALRKRGSPLLRNLSLNAENA

SEQ ID NO: 407632 - protein, 347 aa, unidentified
MVVVGVDVHKRTHTFVAVNEVGRKLEAKTAKATSAGHTEAIRWARERFGTDLIWGIEDCRNMSARLERDLLSHGQKVVRVPTKLMAQTRASARSQGKSDPIDAEAVARAVLREPDLPIASHDEISRELKLLVDRRETLVGQRTATINSLRWRIHELDPEFVLGALDRDKHQQALWAVLDAHSGLVAELAGEELLEIIELTDKINALEKRIGARVREVVPTLLELPGCGELTAAKIVGETAGITRFSSEAAFARHAGVAPIPVWSGDNTGRVRLSRAGNRQLNAALHRIAITQIRCPGPGQSYYRKKLERKTKKAALRCLKRYIARDVVHRLRTDHQTHDQSPQHAAA

SEQ ID NO: 407633 - protein, 346 aa, unidentified
MKVLIGVDPHKTSLALAAVEEATGELLERASFPQNRKGLRSLERWAKRFPERRWAVENAGGLGRHLAGRLVAAGESVVDVPPKLSARVRVLSTGSARKNDGIDALATALAASRNGRLAQVNPEAASETMRLLSERREDLVAERTRALNRLHALLRDLLPGGVAGKLSADRAARILRGVRPKGASARLRRRLASEVLRDTRTLDRKIADLDGRIEVEVEASGTTLTQIFGIGPILAAKIIGTVGDVGRFPTRAHFASYSGTAPLEASSGEVVRHRLSLAGNRHLNYALHMVAVCQARSEARGGAYYRKKLAEGKSRKEALRCLKRRVSDAVFRSLVADSQAPSCSAA

SEQ ID NO: 407634 - protein, 345 aa, unidentified
MEIRTIGIDLGKTVFHLVGINAGGEVVVRKKCSRIQLLRFTSNLHKCLIGMEACGGSHFLGRALREQGHDVRLMPAQYVKPYVKTNKNDYIDAEACSEAVTRPSMRFVPIKTDDQLDLQSLHRVRERWVVRRTAVINQMRGLLLERGITIRKGRHHIEESLPGILEDPDNKLSGALRVLLTQLRLEMKYLHGQIEESDKLIVRIAGELEPCTRLVAIPGIGPITATATIAAIGNGAAFKKGRGFAAWLGVVPGEHSTGGKQKLTGTSRRGNKYLRKLFVQGAHSVLLQRTKQTSALSMWLASLTARKRKQVATVALANKMARMAWAVLYKGEAYRPPSLPQVIAA

SEQ ID NO: 407635 - protein, 419 aa, unidentified
MNYTQNEKISQITPSTLIVGIDIAKEKHVARAQDDRGVEFGKRMVFENREHGFETLLEWVGKHQKAQGKKHVIFGVEPTGHYWLSLAYYLKDRSYDFVIVNPMHVKKSKELDDNSPTKNDTKDAKVIAQLIKDGRYSVPNLLEGIYAELREGVKVRDQLSKQLMIIEGRIQNNLQRYFPEFFDVFKDWEGKAAMCSLRCFPFPTDLVALTAEEVLAQWKTEVKAGVGIKRAQKLVDKANKSIGVQEGLRFAKRELHHLLDQYALHQQQLEMMEEDLEELVQEIPGAEEMIAIKGIGSMTVAGFYAEVGDIKKYRHPQQVINMAGYSLKEHSSGKHKGQTKITKRGRSKLRKLLYMAVRPLVAHNPTFQALHDYYTKRKERPLKKQQSLIALCGKLIRVLFVIGQRQCTFDGNKLLQGIA

SEQ ID NO: 407636 - protein, 400 aa, unidentified
MLSIGIDVSKGKSTVCGMKPGGEIVYAPFEVQHTREGMLELVSLLRSSGEEVRAVLESTGSYHCPVVAALLENGIFVSVVNSLRMKRFCSQSIRKVKTDRIDAMQIALYGLAYWQELQPTKLPEDTYRELQLLARQYYQMTSMLIKAKVDFNAICDQVLPGMQELMNDHAGRHKLSDFVLRYRHTTHILEMGETRFRKDYCKWAEKKGYRNCERMAVLIFATAQNGIPVLPNAPSTQIVITEAIRVLHTVEASRDAILTQMQALAKTLPEYSLVREMPCIGDTLAPRLIAEIGDVRRFHSKRALIAYAGIDAPPYQSGKFCANNRHISKRGNRYLRKTGYEVMQSYVMHKPANDPIFTFIEKKRSEGKCGKLAMVAGLNKFLRVYYGKVTELYRSLPAIE

SEQ ID NO: 407637 - protein, 363 aa, unidentified
MKQEMSVLGIDIAKRVFHAIGMDNTGKIVFRKRLSRHDLMPWMAKLPPVLIGMEACGGAHYWARRFRAYGHEVKLMAPQFVKPYVKSNKNDSRDAEAIAEAVTRPTMRFVPIKDVDQQDIQALHRVRERLIGERTALVHAVHGLMQEYGMVMPTGVAKFRQAVVGKLEAEKDKRTPLSQEMFWQLVAEFAALEAQLASYQEKLDTLAQTHPACQRLMTIPGIGPFTATALVAAVSDASAFQNGRQCAAWLGLVPRQHTTGGKERLLGISKRGDTSLRKLLVHGARATIRWVGSKTDRRSQWMRHVLERRGTHRTAVAVANKNARIVWALLTSHQDYQPATSYGEQTRVSAAAKGLWVSILAVL

SEQ ID NO: 407638 - protein, 465 aa, unidentified
MEGPGTARLGRAAGRCSTRSTIASAPDRKGSSAPRKRVGVDVAKRESVARQHAAGSADRSRSRTVGYAEGRTSGQSYTRKEPAMTKDTTTDKGPATIKYVGLDVHKDTIAIAVADDSKPDGLVLGIYPNDEARLRSVLSKIGPAPGLRVCYEAGPCGYVIQRLLTRLKIDCVVVAPSLIPRKPGDRVKTDRRDARKLAVLLRTGQLTPTWIPDREHEALRDLVRAREDAVVDRTRCRQRLGKFLLRLGVLTPDGVNAWTVRHREWLTRLTMDQAAQQVVLEEYRQTLDESGRRVERLEREIESAVTTSAHVATVAALQAMRGVALVTAATIVAEVGDIRRFRTPRQLMSYAGLVPSEHSSGGRTRRGSVTKTGNAHLRRVVIESAWHNRRKPMVSEVLRKRQREAPAAAVAIAWTAQVRLNKRYHRLTERGKLPQTTVVAMARELLGFIWAVAHTAEPQTRRAAA

SEQ ID NO: 407639 - protein, 833 aa, unidentified
MSDVFALDVSKGHSYGVWYRGDQCLQEFECIHNKLGFAQLDQMLKQADDPVVYFEATGIYSQPLVRFCQDHQLRYGRLNPLELHLHSESLRRVKTDQKDAHRIALSVMHHQYRLTTPWAPEYEQLRQLNRFYQQVIDEVKLTRLRLYTALQQTFPEVEQLFSSRVSKLALNVILLFPHPAFVRGISRTCLKDKLMSETDKKLSQTKGLKYADKLIAFAKSSYPAADSASVQVQEVQYYCRQLIELTKQEESLRKQMTSAAEGLPQFQIYQSMPGIGALSAAQLVGELGDILRFDNANQVNAYVGIDLNRYQSGKYTRQDHINKRGNPHARALIYLIVKNMIRQKATSSNHIVDYYYKLKKALRYLELIGNLPANSFFHTIFIFEYTNGTSHCPFVTRPTKEKRNGVCVMPLTSKSIRLALEITDPNIIFFEDGEIETIQNQAALVYRAKLTVKPDHCPNCGFTDQIVRFGFNQVRIVAPSFGYRPTYLKLSCQRFFCQACQTTFQSRTDYVRPGCVISEPVRQMVLFDAISNHSLTDIGQRHHISDKTVQRVIDEEANLHNFQQTTWLPEHLAFDEFKATDRMSFIWANSDCQEIGAILPSRTSYQLTQYFERFPLTVRRQVKTVSLDLNAGYVHLVPRLFPNAKVVVDRFHIVQMVSTALNMVRVQVMKTVPKTSTEYRFMKREWKVFLKRFEELDAVNTVYHASVGYFDTVVNLISKCLDLDPAFRAAYETYQSVLTAVKERDVTALEETLVSYKALGNRMDQSMKSLRKYRCQVLNALRYDYSNGFLEGINSQIKKIKNTAYGYQNWSNFINRIFLERVWFWLSKRKLAV

SEQ ID NO: 407640 - protein, 422 aa, unidentified
MPNVQSTQSPAVLVAIDVAKLRHDVLIEAPGWKRRKRLVLLNTAVEFRRLADYLHSLQMPVHIVFEATGNYHRPLAHFLLSQGFHLELIPSLAVARTREAMHNSWDKNDPKDAQVLLHLLRTGVTQRYHDPLVNHTHDLQELSLTYAQVSMEKTRMQHRLLTHYLPLYFPEIERHYHASRSLWLLDFLQAFPTPATITSLDSEQFIQKAWPIIGRKVAKRRLLEDIYHRAQSSIGLPVAEDSEAVAMFRVLLNEVSRLCKLRQELEQRAEGYLGDNDDFRRLKQIPGIGPILALTILAEAGDLRRFHHHRQFLKFCGLDLATQQSGQFRGATKLSKYGNGRLRCALWMAGTIAVKQRENSFRDKFERYIRKDPLSAGRKRMAYVAVAGKMARVVYGIIKSGTEYRCFHEAAAPSGRAVSVGP

SEQ ID NO: 407641 - protein, 338 aa, unidentified
MYYTGIDLHKFSSYLTTVDSSGAIVKQENLKNVAHNFVQYFNSIPGEHQTTVESTMTWYWLNDLLTSINIPLVLAHAKYVKAIAYAKVKTDKVDSHTLAQLLRMDYIPAAHKISNDNRTLRDALRARLKIVQRHTSVTNSMHLLLAKYNYDSPTQLTGIPKFQFEQLSEVEELLNDQMLDLEKQLYPFLIPNDDIQRLLWIPGIGKMNAFTILLEVDDINRFPDVKNFFSYCRLVPSARNSGGKSKQRSSKDGNKYLKVAFSDAAIHAVQYYPVIRKYHNSLLRKKNKNIAKTIIAKEIAEIVYYVLKNKSNFNNTFRGQELEHKKSLQWPRVVNPYA

SEQ ID NO: 407642 - protein, 448 aa, unidentified
MSNGNGVSRGDRNRNARLNRLRELVPVTHAIVGIDLADSKQMVVVTDHDSKVLARRTFRCRAWDLGLALDWAGQHASKAGFAGVTVACEPTGHRWRVLGQLAADRGMAFVCVQTLLTSWARRSEDLTFDKTDEKDAVLIARLTAQLRCYVPEPLDETWGRLRHLGARRERLLAETVSQVQQVRDLLECVWPASLDTAKHPFRSRTWLAGMSVILGRTGGDPTRLRRLGPARFEAAVRREIVARQGKKPCLRIVRLLFAAATDPRGVTTHRPGALERVQFLLDDFRDTGRRQTETEARMVEVLDELQLTELVCSIVGLSALGAATILAETGDLTRFASARAVVKHSGLAPREKSSGTYTGRTRLTGQGRPGLRRAAWRAVWGAQKANPVYAAKFTHLTTRTENKLNRGQAHAALAAAILRQLYAVVSTGQRWDAAIAAGGRCEVIEPAA

SEQ ID NO: 407643 - protein, 393 aa, unidentified
MFIVGIDIAKRSHEAIVLEDSGKVAHKAFSFKNDVSGFQRLLDILLSLSADPNDFLIGMESTGHYWLALYSALRKHGFSVCVLNPIQSNALRNLYIRQVKTDQRDCLIIADVLRFGRYQQGNVPPSELYELRELCRARSFLVDTTADLKHKVIALLDQAFPEYETLFTNIFGLTSSELLLNCSTPEEILAIDTDKLAKILETPSRKRFGRAKAEQIKETAANSFGVILEFGSAGFLIKQYMEHIRYTESQIAQLEEKIAELFSHFDTQLTTIPGIGPTLGATIFSEIGDISRFPSPAKLAAFAGIDPSVKQSGEFQSSHAHMSKRGSPYLRRAIWQASVIAAMHDPAIRAYFEKKRSQGKSYMVAIGHVTRKMNNIIFAILRDNKPYYSSLDS

SEQ ID NO: 407644 - protein, 473 aa, unidentified
MIKSVGIDLGGIGEHKVRCLDEKAQMCDGFGFETSRAGLAKLEERIFSDGSNPVVVFEPTGLAWLPVAAYLKSRHPDSRLVRVQAQKVVALRKYLNRSSKSDKIDSLTLAKMPFIDPEKLEEIYFPPAKIYAIQRLARQRKRLENDIAGRKKRIGSIVDGHFPGIRSAFSDPWSAHARAFLRSRLNLLTVVRYGEKALCSFLIKARRHCRIEASVESHGIYLACREAATLYKASSSVGTIDDDFFTALQDEVSRELRLMEIEEDESAAIAKRIEKLYLEIHPSDNLLSIPGVGNHTAPVFLATIGDPARFRSQSSFANYCGIVPGANQSSDSEAKGLRMTKAGPSIMRMALYQAGDIGRRWDPQLAAVYYREMVYHGKNHRQALGAVMSHMSARVLAVLREDKPYEIRDIDGSIVSREEAKRIILAKYQVPEEIRRERRRRKTPGSPRLQKKLREMLVPRVHEAAAAPQPALT

SEQ ID NO: 407645 - protein, 341 aa, unidentified
MKQLHRKNYLGIDVSKLWFDVSLMPVIDHVKQAVATERFDNTTSGMNAFKAWLKSTGVSLDQQTLLVIENTGVYHRLLWGFCSKHNLPLHIGNAAHIKWSLGITRGKSDIIDSVRLCQYCYKQSDELKATAALNPVFMKLKDLMSSRSRLVTQLHSTRNYIKELQCSNDKVLQATLEKAHKAAIEGIKKSIGQIEGLIEQIIQDDQVVYKNYLLIKSVPGIGHLTAVYIICCTNNFASKVTGKQLASYAGVVPFEHSSGISIKGRNRVHKMANKDLKKMLHLCALTAIKYYPEFRQYFDRKKAEGKNGMLVLNAIRNKIILRVVAVVNKQQPYVSNLNIAA

SEQ ID NO: 407646 - protein, 370 aa, unidentified
MAEPTTLFVGLDVHKDSIAVAHASVDSASEVVYVGQVGTREADLEKLLRRLYSHAARLVVAYEAGPCGYGLYRTLTQKGVSCLVVVPSLIPKKPGERVKTDRRDAIQLARLLRSGDLTSVYVPTVEDEAVRDLARAREASIGVLKDAKLRLKSFLLRHGLNYSGRATWNDAHLRYLAKVVCPIPAQQIVFQESLRAVSEQTERVRRLEDELLEVAATWRLRPIIDAFQSMRGVQRHTAVTIAAELGDLTRFDNPRQLAAFVGLIPSEYSTGESRRLGPITKAGNGHARRVLVEAAWAYRYPAKVSAHLQKRIERCPKAIQDISWKAQVRLCKRHRRMVARGKNPNIVVTAIARELLAFLWAIAREVPIGA

SEQ ID NO: 407647 - protein, 341 aa, unidentified
MGRAIGVDLHKNSFTVCFYQAEDAYTFKTYRVSRVGLAAFRKQLTVDDELAVEATGNTAFFVRAIEAHVKRVRIVNPVQFKVIANSVKKTDSIDALTIARFLSRDLIPEVRMRSKEDSQRSSLIGTRDKFVKLRTALKNKLHNILNANGIVSKPEMFSSEKGLEKILGVPLEPSYRFEVELLVTEIRHLNEAIKKLDEELKRQGEQLPGHQNLTSIKGISDTGATIFLTAIGNLADFKDEKALASYFGIVPRVYQSNQTLHYGRITKRGNKIARTTLVQSTLVAIRYSPYLRAFYEQVKARRGSGKAIIATSRKLLGIIYNTLKHNWIFEDFTTFKLATSS

SEQ ID NO: 407648 - protein, 396 aa, unidentified
MFNTGKITETSYTVGLDAERSDASKPTAAGGRSNALRRSSADAVAEQDRRRSSEISPNSRLSRRPTASSSYLQGRDTSQMNFSHFIGIDVSKNKLDVADVEGTLCETVDNTDPGVQQLLKRLPKPGSCLIVLEASGAYEKNIVMHLVAAGHIVSVVNARQVRDFAKALGILAKTDRIDARVIARFGRDVKPRAVAQLRKNQDELSELVTRRRQLIGQRTAEKNRTDTITSSIVVRSLKKHIQHLSKEINRIDGEISKLVKSDDEWRGKFDVIQTVPGVGEVTATTMIAEVPELGELNRQKIAALIGLAPFNRDSGQFKGRRTIFGGRSSVRSVLYMAALSAKKHNPVIHAFAERLEVQGKRPKVIITACMRKLLVILNTMVKNNSPWNPNLDTQNT

SEQ ID NO: 407649 - protein, 363 aa, unidentified
MKIMVGIDLHSNNALCGLMDESGRRLVHKKLPCDLAAILQLLKPYKHRIATIAIESTFNWYWLVDGLQDHGYHVALANPARMQPYSGMKYTDDVSDAYFLAELLRLNLLPTGHIPDRQTRPVRDLLRRRLLLVRQRTTLILSFKSLNERTLGQRVPLTRVKTMSAEEAQARFAEPADQLLAGEQITLMAHQTDSIMKLEQHILGVAGEWPTYQRLQELPGIGKILGLTIALETGDAQRFADAGNFASYCRCVKSLRQSNGKKKGENNRKCGNKYLAWAFVEAAHFACRYDAQCRRFYDRKKQQANPVIATKALACKLAKAAWHVMVEDVPYDAMRVFGPGKRTDFGETGREPAKGSGHPSQQN

SEQ ID NO: 407650 - protein, 423 aa, unidentified
MYSSTLCVGADVHLKQITLRAVDKLTADQVIAPFDVANNLPGAQAAAARLAEVATRLGYTRIEIGYEATGMLWIPFDRFLATCQPLKPFDVQQVCFNPKLVADFKDALVLRGPKDDARDAFDVAARVQVGHWPVSYVPDDFWQGLRRLTRYRFHLSRYLSQEKVRFQAYAFLKCSDWKRVEAFSDVFGATSAALLTEFTAAELRQMTHDQLADLIAHRGRGRFYDPHATTRAVQHALSTSYPIDYQTDLMITATLATVWEHIRAIKRLMKRLDQHIARCIEPVPNPLITIPGLGPVISAGLLAEIADISRFPEHKHLAQYFGISWTKRSSGGSVSQNTSMTKVGNPYGRYYLVQGADKMRQHNLEYKAFYWRKFNEVSTHQHKRALVLTARKLVRLVHALLTKNVPYVRPQTTADLEEVNLLG

SEQ ID NO: 407651 - protein, 354 aa, unidentified
MSQIPNTAVAVIGIDIGKNSFHVVGHDARGAIVLRQKWSRGQVEARLANTPPCLIGMEACVGAHHLSRKLASLGHDARLMPAKYVRPYSKGQKNDFNDAEAIAEAVQRPTMKFVATKTAEQLDLQALHRVRERLVSQRTGVINQIRAFMLERGIAVRQGIGFLRTELPTILATRADALSPRMLRVVEELASDWRWLDQRIDDLSGEIEALARQDQACSRLMTVPGIGPIISSAMVAAIGTGDVFSKGRDFGAWLGLVPKQISTGDRTILGKISRRGNRYLRVLFVQAAWVVLVRIKNWERYGLKSWIEAAKRRLHHNVLAIALANKLARIAWAVLAKGRAFELTRTDDAGVRPA

SEQ ID NO: 407652 - protein, 339 aa, unidentified
MTTYAGIDLHSSNNFLGIINQKDQRVFARRLPNELEPILNALEPHKETLNAVVVESTYNWYWLVDALQANGYPVRLANPSAIKQYEGLKHTDDKYDSFWLAHLQRLGILPTGYIYPKDQRPLRDLLRRRLLFVKHRTAHLLSLQSMIERHLGRRISANQLKSVDTLQLMQWFESEHEQFIVRCQLDLIHYLKQLIDTIENHILSAVQLRKQFQLLLTITGIGKILGLTIMLEVGDIRRFAKVGHYSSYCCCVQSQRYSNGKKKAMNNRRNGNRYLAWAYVEAANFARRYCKLAQQFYQRKAAKSNPALAVKALSNKLARASYYVMRDQVPYQTQRLFRS

SEQ ID NO: 407653 - protein, 437 aa, unidentified
MRVLYEHVAGIDVHKDMIKVAIRSPGEKPWTRKTEILEFRTFYGVLQEMARLLRRRGVTHVVMEASGVYTDPVYYALCEQDFAEVAVVNPAHARALRGHKTDAADCRRLAELFECGLLRGSYIPPAELREVRDLTRYRMKTVQARTSEIQRLGKALESAGIKLGSVASDITGKSATAMIDSLIDGERRGAVLADLAIGRMRTAGKLAGLSMALTGRFTEHHALLCRLHRDRIAGLDAAVADLDDQIAGRAGRWQRELDLLKTVPGFGDVVAQTWLAEIGPAPHRHFASHEKLACWVSLCPGNNISARKRKHGRTGDAGTYIKPMLIQAAWNAIRPKGRLQARYSRLVRRFGGEKNPGAKKKAITAIAHTLLKIAYQVLKSEVPYQDLGADFYTRRESPDQQRAYLERRLRKLYPGCAITITISPPEAVLTSTVSNAP

SEQ ID NO: 407654 - protein, 412 aa, unidentified
METIVAYIGLDWADERHSVHLQAANGTIEHFELEQKPAVLHDWVAQLQRRFGSGKMAVALEQRKGAVIHALLVHDCFVLYPINPKALARYREAFRTSGAKDDPADSELLLDLVVRHRDKLRAWVPDTVESRTLQALCEQRRKLVNQRVALTNRLTSLLKQYFPQALEWVGEVASVQACDFLTRWPTLAAVQRARPSTVRQFYRAHNCRKADVIEARLAAIAGARPLTTDAAVVEPLSLAVQTYATQLRALMTAIQTFDDRIAQVFAAHADRGVFTSFPGAGEVGAPRLAAAFGTDRSRWDSAAELQAHSGIAPVTERSGKTVWVHHRLACPKFIKQTFHEFADQSIRFSRWARAYYDQQRARGNDHHAALRALAYKWIRILFRCWKERRPYDENTYIDALRRRQSALAKNFA

SEQ ID NO: 407655 - protein, 410 aa, unidentified
MQSAPTTLPRTPDGGLTSGIDWASSDHAVAVVNTDGLQVDRFITEHNQAGLLAMTRRLRKLGVGEVAIERPDGPVVDALLQAGFTVVVISPNQVKNLRGRYGSAGNKDDRFDAFVLADTLRTDRARLRPLVPDSPQTVALRQTCRARKDLVAHRVAVANQLRAHLQLVFPGAVGLFADIDSPISLRFLDRFDCQERADWLSPKRFEAWLASVGYCGRTDPAVLHARLIAAPRGAAGTTATVHITRAMIAVLRTLVDQIKALSEQIDEQLAAHVDAHIFTSLPRSGTVRAARLLAEIGDCRARFPTPESLACLAGVAPSTRQSGKVRAVGFRWACDKQLRDAVCDFAGDSRRGNPWAEHLYQQAIARKHDHPHAVRILARAWLFVIWHCWQDGVAYDPTKHRALQNLGLPA

SEQ ID NO: 407656 - protein, 403 aa, unidentified
MNSVGIDISKGRSTIAVMRPFGEVVISPFEVRHTGSELSKLAKQLKSLDGETRVVMEATGNYHASVAKLLHNAGLYVSVINAKLVHGYGNNELRRVKTDRKDAVKLANYGLDRWLTLPRYIPEEDTRLLLKNCYRQYRQYSKVQTVLKNNLISLLDTVFPNANRLFSSPIRGDGSEKWVDFVAEFWHCRCVSEKSERAFTSKYLRWCRKHGYNFREAKAHTIYAEASGHIGVMPKSETTKLLVEQAVAQLRATSTALAALKHEMQSLASQLPEYPVVMDLFGVGPTLGPQLIAEIGDVRRFYSKKALVAYAGLDAPPNDSGDVTGRHKSMSKIGASSLRRTLFLVMSVYLQTAPLDEPVYPFMDRKRAEGKLYRVYMMASANKFLRIYYATVKAYLESLEHTV

SEQ ID NO: 407657 - protein, 342 aa, unidentified
MKDAIIGVDLAKRVFQLHGATTTGHVMFRKKLTREQFRRFMAEHPPCVVVFEACGSASYWAREMTKLGHDAKLIAPQYVKPFVKRQKNDAADAEAIVIAARQPEMRFVSPKTEDQQAKGVLFRGRERLVHQRTELVNALRAVLYEYGHVFPAGIGHLKRIEALVEDPTCDLPALITAECRDLLAQIAEKTDRIDAKTKALKELAAGTDTARCLQTMPGVGPLTALAVEAFAPDMAQFRCGRDFAAWLGLVPRQHSSGGKERLGRISKAGQIDIRRLLIIGAMTRIMGRARHKIPADSWLGRMLARKPKMLVAIALANKMARQLWAMLTKNEDYRDPVLATAA

SEQ ID NO: 407658 - protein, 346 aa, unidentified
MMIIGCDFHPSWQQIAWLDVETGETRQQKLVHASGDAKQFYQQLTEPALIGIEATGNSQWFIELVEDLGHEIWIGDAAQIRASYVRKQKTDKRDAAHILKLVVQGRFPRLWTPDREQRDLRQLVLHRHKLVEIRSRVKNELQHLSMNKGMQKKRTLWSQAGMQALRELPLKPWASCRREDLLGLLQMLDQQVGKLDQAVQHAAEENPQAKLLMTQPGVGPNTALAFVLTIGDASRFPRGKQVASYLGLIPHENSSGDRRRTGAISKQGNRMLRSLLVEAAQTAVRFDPQFRKQYLHRCHQKPKGVAKVAAARKLAVRLYWMLRTEVEYPEIVRIENSPRVPLVGAS

SEQ ID NO: 407659 - protein, 340 aa, unidentified
MSTINILGIDIRKFTFHLVGHDSSGREVCRKKFSRPKLIQFLSTIELTTIAMEACGGCHWLARKCQEFGHKVKLIPPQYVKPYVKTNKNDFIDADAIAEATARPTMRFVSVKTESSQVISVIQRIRSSYVKDRTACMSRIGATLLEFGMSFPKSHAKMKVLFQWLAEHDEPIPPMLLLELRDHHDFYLKLNQLILTQEKKLKEIVDHDERAQLLKTIPGVGTLTASRCISDISNVADFKNGRHLAAWLGLVPRQFSTGGKPTLLGISKRGNKGLRELFIHGARAVLVRPEKAVAVFGNWILELLSRKHFNVVVIALANKLARIAWSVLSTKQAFEVRVQA

SEQ ID NO: 407660 - protein, 414 aa, unidentified
MEKQWNIVCGADIHKKFLIATILSRDGTKITKRFGMALNDLLNFKNWVIENGCEQVAVESTGTYWVPIHTVLEGSVGLIAGNAYKIKHTPGNKNDLADADWIAELCLNGMIEPSRIFPKADRDLRRLTRIREGYVNDMTREKNRIHHALDSCGIKLSSVLSDIFGKAGQSILNGLLEGRTIDDILKSINLKRIKAIAEEIREAIKSSLDFTQILLIRGSLEHMEAIQKRIDEIRKEIKSRIAYRKDDLKIAMSIPGVGFTSASTLLAEIGDITDFKKPEQLAAWAGLVPSVYQSAGKLITGSITKHGSRHIRWILVQVARVIARGRNSKLKRFFLRVKSKKGSNVAVVALARKVLCILHHLLTNREMYQEEGINKKVKIDVGKEFPQQEMGLEEMITYLVRAGYEVRKGLTEGG

SEQ ID NO: 407661 - protein, 371 aa, unidentified
MSESSKILYVGLDVHKDSIAVAYAPEDRGAEVVSLGAIGTRQSDIDKLIRRLESKSATLVFVYEAGPCGYWLYRYLTGKSLACHVVAPSLIPRKAGDRVKTDRRDAITLARLMRSGDLSSIYVPGIEDEALRDLSRGRDDAMQDLKRSKRRLKSFLLRQDIRYEGRANWNAAHLRWLSEVVCPTPPQQIVFQEYVRAVTEQQERVQRVERELHEAVKPWRLYPVVEAIQALRGVELTGAVILMAELGDITRFESPRQLMSYLGLTPSEYSSGARRRQGGITKAGNSHARRALVEGAWAYRYPAKVSRHLQLRLEKLPAEVQAIGWKAQVRLCRRYRQLTARGKHVNQVVVAIAREMAAFAWAIARLVPLAS

SEQ ID NO: 407662 - protein, 340 aa, unidentified
MALYGGFDLHSTNNYLAIIDENDKRILKKKLDNDPDLIISTLKPYQNELKGVVVESTFNWYWLVDLLMDNDFKTHLANPSAVKKYEGLKHSDDNDDAHWLAHLLKLNILPEGYIYPKKQRPIRDLLRKRGHLVQLRTSLILSLQNIIQRNCGTKLGANIIKQTKEDNPLFEMLNSDESLSLSGVISKESIDHLSNQIRQIEKKVENSMELHSSFIKLQSIPGVGKTLALTIMLETGTIERFNKVGNFASYCRKVPTKWTSNDKTKGSGNQKNGNKYLAWAFSEAAEFIKKFDPAAKSYYQRKMSKGNRMIAHSAVAHKLSRAAFYIMRDDVVYDSKKLFG

SEQ ID NO: 407663 - protein, 316 aa, unidentified
MRSNGGEVLVGADVSKAWIDVCQSGTMRVERIANTPDALAAWVARAQPALVAMEPTGGYERALCSALAEAGARYVKLHPNTILAFRKARGLRAKTDQIDARLIAQYLADATARADLPTPFRVDERLRALAARRRQLAEARQAEGCRADLANDPLVRESLALVIGALTQSLDAIEEAIERHIAGDGELGRLVKALRAVRGVGPVVAAALVADLPELGHLNGKQIAALVGLAPHTHESGKRSRRAKTGHGRPLVRSALFNAARAAIRHPCQMRDFYDRIVRNNNRPGKVALTAVMRKILVIANAVARDHLKAAQCQSA

SEQ ID NO: 407664 - protein, 380 aa, unidentified
MPHSTHSLNTTISTERLHMALDLGGETWKLGFVAGPGKPRIRTIPARDMVQLQCEVGKAKRRFKLAEDAPVVSCYEAGPDGFWVHRMLEKLGIANVVVDPSSIEVERRRRTRKTDRLDASKLVAHLVRYHSGEQRVWSTAQVPSEEQEDARRLHRERERLQKEKKQHMSRIASLLATQGCASSRRSDSWKRWDGQSLPPDLRGELERELARLELVRKQLREVEQERSRRLADQSSPQMAQVGLLASLRGVGPTSAWLLVMEMFGWRRYQNRRTAGSLAGLTGTPFASGGKTREQGISKAGSARVRTLMVELSWLWLRYQPQSELSRWFKERWSGSGRLRRIGIVAMARRLFIDLWRLVEHGLVPPGAEFKPSAEFKPSQG

SEQ ID NO: 407665 - protein, 314 aa, unidentified
MPENSMYVGIDVAKATLEIASRPEGLRLSVPNAGEGYGQLLAALKGRDVKLVVLEATGGYERAAAAELVCAGYKTVVANPRQIRDFARALGELAKTDRIDAAVLARFAELVKPEPRPRRSEEADTLAQLVTRRQQLVALLTQETNRMPHAREKAVKKSLKLMTRALAKQIAELERLIAAHIESDEALRQKNAILRSAPGVGPKTSAMLLSHLPELGSLNRQQIAALAGVAPWDVKSGTWSGRSRIWGGRAEVRAVLYMAALTAMRCNETIRAFAERLTAAGKAYKVVATACMRKILVILNTMLRNNTKWQNKNS

SEQ ID NO: 407666 - protein, 464 aa, unidentified
MEHNRRRSRKRKGSTPSLLKRINPHAAGIDCGSAEHYVAVPPESDPTPVRAFKAFTADLHRLADWLMSCGVTTVAMEATGVYWIPLYEILEARGLEVVLVNARHVKNVPGRKSDVMDCEWIRELHSVGLLRGSFRPVASIAALRAYLRHRETLVQTAAMHIQRMQKALVQMNLQLHLVISDITGVTGLRILRDIIAGRTNPVDLAQHRDHRCKASAAEITAALTGHYRPEHVFVLRQNLELFDMYQRQLAACDTEIEAHLQTLATQAPEPMSPLPPRRSSRKPRNNEPRFEIRAPLHQLAGADLSRIDAIAPYTALRLVSEIGTDMGRWRTEHHFTSWLTLAPNNKVSGGRIISSRTQPSANRAAAILRLAAMNLGRTQTALGAFYRRLAYRVGKAKAITATARKLAILVYRTLRGDFVYEDPGAVVYDAQQRDRVLRSLRQRAARLGFDLLNRKTGELLEGGA

SEQ ID NO: 407667 - protein, 319 aa, unidentified
MDAAERVETFAGIDVSKATLDLGLAGESRVVRYGYDAAGIEAVIADLQGYALSRIVVEATGDLEKQLVTALVMAGVPVAVVNPKRVRDFARASGRLAKTDRLDALVLAQFGQAFRPPLYQAQSAEADQMSAWVSRRKQLVEMLTAEKNRLKMTRDATVRRQIEAHIRWLEGEIAALDSQISHLIDADPQWQATRDVLRSVPGVGPVVVATLLAELPELGTLNRQQVAALVGVAPLNRDSGQRRGKRHVVGGRATVRRVLYMAALTATRCNPAIRSFYQRLLAAGKEKKVALTACMRKRVVILNAMVRDQRPWEASIIAV

SEQ ID NO: 407668 - protein, 348 aa, unidentified
MAIIADTYDHIVGVDTHARTHTYCLLRAKTGAVIDTATFPASAAGINRALTWLARRASGTVFAAVEGTSSYGATLAAALSARGIPIGEVRPQPRSAHAHAGKSDPLDAEAAARSVLGKECSRVPQPRDAGDRAALRVLLSARSLIDHQRTANRNALTALLRTVDLGIDARSPLADKQIVAIASWRNIRGANTVHVTARAEAKRLATAVVDQTRQLRRNHTQLAEHVERLAPSLQDALGVGPVTAAILICAYSHHGRVRSEAAFAALGGIAPLPASSGNTTRHRLSRSGDRQLNRAIDIIVRTRMSFDPATHDYLRRGLANGKTNREIRRNLKRYVCRSMFRQLQATMT

SEQ ID NO: 407669 - protein, 415 aa, unidentified
MALKIVYQICCGIDVHKTFVVACIASTNKQGVTTYKRHRFSTFTQGLKELLQWLLDNHCKDVCMESTGKYWIPIYNVLEKDCNIVLAHPKYVKAIRGKKTDKKDAKWIADLFKHDLVAGSFMPPADIRQLRDLMRYRFKLTCFMSSEKNRLQNCLTVSNIQLASVVSDTFGKSSQRILDKILENPDDTSFDIEPLIHGSMKKKLPELELAIDGFITPEQAGKLKVIKKHFEDLESRKAELEKLILALASPYQQELDLILTAPSFKNKFTAIGIISEIGVSMEAFPSAKHLCSWAGLTPTNNESAGKKKSVQVSKAGCYIKPLLVQCANSVVKSEKHPEIRNRYLRLRKRRGHKKAIIAIARMLLTALYNMLKNKEPYNTELYRKSDALPVNREITIEQAILIAQFQGYKIKSAAE

SEQ ID NO: 407670 - protein, 322 aa, unidentified
MSEFSLFVGIDVSKDWLDLCCFSPSSGQINLSQIDNTSEAIRSYVESLNHQVEQVLFCLEHTGHYSNVFLEVSSALNLTSWIEHPLQIKRSQGMQRGKTDAQDAERIAMYAYRFQDKAVFYQPSSQQITELKRLQSKRDLLVKMQGQIRQALTDKNDKDFKASVKAIAKDIETIEKKIKKVIASDSTLANQDELLQSIPGIGSVLSVTLITITEGFTSFNDSRKLACYAGIAPFPYRSGKSIRYRDRVSKLGNQRLKKLLNLAAWNAIRSVEHLKKYYERKVNEGKAKLSAINAIRNKLVAIIMAVIRRNEPFSKDYSVQNV

SEQ ID NO: 407671 - protein, 341 aa, unidentified
MKAPEYFVGIDVASLSFTAAVGKTPWQLVIRPTEFANDFDSFPKFLHWLQHHNLQPDNAILCMEATGVYSEALAYFIHANGYRIAVEPPLKVKRSFDTSGHKSDAVDSRQIAEYACRYFDELAFWQPKIDILEQIKVLLNTREQFSAQLTAHRNSLKTLQRKVVVTPLAEQLHQDNITQLKNHIKSIEEEIQRLIDQDPSYRQMVSLLMSVPGVGLLLAAQMLVIVENSPEPVSAKTLAAYIGICPYEHFSGTSVFKRSSSRHYGPAAVRKLLYLASMSVRTHHAQFRKYFLRKVAEGKSKRLVLNNIANKLLKIMCAVLRTQTPYIPNYRSVNPMLLKTT

SEQ ID NO: 407672 - protein, 408 aa, unidentified
MEVVYRCCCGIDVHKKIIVACLDQGGEQSLREFGTTTSEIKSLATWLTESGCEMIAMESTGVFWKPLYNLFELMDLDAMVVNAAHMKALPGRKTDVKDAEWIADLLRHGLLKASYIPSREQRELREITRYRKSLTEERCRETNRLQKILEGANIKLDSVVKDINGKSARKLLEKIIEDDVPTSEEEVSKMVHGRMRSKLGQLVTAIEGITTPLQRKLLAQVIDHIDDLNRRIADLDRLVQDYMDEYAAAIAALCDIPGIARRSAEVILAEIGLDMSRFPSAAHLCSWAGVCPGNYQSAGHRKHGKTTKGNKALKTILTQCAKSARSVKRSYFSAQYQRISARRGKNRATLAVAHSMLIAIYHMLKNNVPFRDLGADYYDSFNRDKKIHGYLKRLKALGWEPDTLPDSA

SEQ ID NO: 407673 - protein, 346 aa, unidentified
MIWIGLDVHQRFSRMGCFDPASGEVHDLGSVSNEASALEEALEELASPKTVVLEAGRSSYHMAGLLESMAQQVWIVDPGEVRRLQHTISKTDRRDAAALAWWAAKGVLTPQWRPDAQTMDLRELTRGKTALTRMSTQVRTMIRMLLARSGHECPHRDLMSERGQLWLEEVELAGHAGQLLAGLREILVVVQAKVDDFERLVEQASAKHPMARRLRTIPGIGPFLSLALAVEIGDISRFPGPAQLRGYSGLVPAVYQSGDKEARGPLTKTGNPSADGLRYAAVLAAQRIGQMKEPDPRLKRLFLSVAFRHGRNPAKIAVARGLLDLVYYMLKKEEDYRAPRARKAAA

SEQ ID NO: 407674 - protein, 429 aa, unidentified
MTNETLIRIMLFRQFKEEIRGSQEYLIVGIDISKDKQHAFFGTANGKTLLRRLIFSNNLEGFSKLLSRADAIKAQNGLSKIVFGLEPTSNYHKPLGMHLIRCDREVVMVSGVAVKRNRELLNGRWDKNDTKCAANVADLISQGKCLFYDSPSSEISGLRELLSLRERIKKNHHSLRMRIRGNLLAKYFPEFDRYFGQCPSESLAIVKYCLDPGKIAGMDFEQFMCTVTTRDRGIAQQRRLRKIYDLAIESIGCSMNRFAEFEATVLVDQVQQTKQLIGQIDDRIDQAASAFIEYHCLLTIPGFGPYVSALVLAKIGDPFRFENRGQVIKMAGYDLSAKRSGKSSNKAIPVISKKGSNSLRYALFQAALIASARNKHFIRYFTNTLKGREKERGIKIKMRVKLASKMLIIAWTLMKKRIDFNPDFLLTEE

SEQ ID NO: 407675 - protein, 410 aa, unidentified
MEVLYRRCAGVDVSKRDAKVCVRIQGSGRRATSSEVTTWGSTTNQILALRDYLKAAGVEAVVIESTGAYWKPFYYLLEEELNLILVNAREAKTVPGRKTDVADAAWLADLGAHGLVHASFVPPPPIRQLRDLTRLRTTVLRDRGREWQRLEKLLEDAQIKLSSIVTDLAGVSSRDILQAMIGGQTDPHQLARLARGRLKVKHDQLVEALTGRFTDHHRFLARLHLARIDAHSADAAKLEAAIEEAMAPFQAARELICSIPGIKTVIADVIIAETGGDMTVFPTAAHLCSWAGTSPGLHQSAGKITPVATRHGNTHLKAALGMAAFNIAKQHDTYFSARYRRLAIRRGKKRAIVAIERALLTAIWHMLTNGDFYQDPGPDYYLKHNPARRANRAIKELTSLGYHVTLTTAA

SEQ ID NO: 407676 - protein, 310 aa, unidentified
MEPIFVGIDVSKDRLDVHVRPGGEAFVVTRDGKGLEELVGRLQELGPTLVAVEATGGFETIVAAAVAGAALPLAVVNPAQIRHFAQAVGKRAKTDPIDAGVIAHFVEAVRPVPRALPDEASRLLAELVGRRRQIIEMMVAERQREKRAANVRVRKSLARHIAMLERELAAIDQDINTLVRGSPVWRVKEDLLASVPSIGKTLARTLLAELPELGSLDRRNIASLAGLAPYARQSGRWRGRSMIGGGRAAVRSATFMAALVASRCNPPLKDFYQRLISVGKPKMVALIAVARKLLTILNAILRDNRPWQSA

SEQ ID NO: 407677 - protein, 438 aa, unidentified
MSNKVIFNLDDLFISVGIDVGADFSWMSIALPNQQFVGKPYKILHSSIDSLTTAVSKIKEAEELYSLESRIFLESTGIYHYPLFCYLRDKGFNCSVINPIITKNSTNINIRKVHNDRFDSKKAALVGLKPDLKVSLMPSDLALNCRNLCREYYDLMNNRGAYVNKLQGELRMAFPQYLGIFSKVTINTSLTLLETYTSPSAFLEADKQEIIDIIKSTARFGLTYAQNKYNAIIQAATDANQFGYIIDSNIKRIRLYISFIRKYDEEINNILESLHELVDANEDADFVKQIHLIETFKGAGFLSAVSIMGEIGDFSAFSKPKQLFAYFGLDPSVKQSGKFEGTKVQMSKRGSAIARRVIHTLTLQSISISRNGEAKNPVLREYYLKKCDSKPKLVAMGAVSHKVCNMIFAILRDNKSFEIITPQEHIKQYNASKCDMAA

SEQ ID NO: 407678 - protein, 316 aa, unidentified
MPNEREEGVNVGIDVGKFQLDVHVHERALAFSVPNTQAGIRKLLGRLVRFKLARVVVEATGRREYDLVIASAERGLPVVVAQPLTIRRYAAAKGVLAKTDRLDARVLADYAATLRPDVRPIPIGPTRQIKDLAARRRQLVTMSTMEKNRLDVMPRSLHAELRRHLRQLQAQLDKLDRAIDKLVASVDAWRHKRELLVSTPGIGLQVANTLLADLPELGALTNKQIAALVGVAPFNRDSGTLRGKRRIRGGRSTVRTALFMAAMSAIQHNPVIRATYQRMVAAGKHKKVALTACMRKMTVTLNAMLRDDKPWTNVYA

SEQ ID NO: 407679 - protein, 480 aa, unidentified
MTNDQSGTDPATKSRRRKRQRKGLCLQDQPVQNPDAAGIDIGAREIFVAVPAGRDEDPVRVFGTFTEDLQRMADWLLACRITTVAMESTGVYWIPLYEILEANGIQPCLADARHMKNVPGRRTDWHECQWIQYLHSVGLLRAAFRPEEQVCAVRAVMRHRGQLVEMASQHVQHMHKALTQMNLQIHHVLSDITGQTGLAIVDAILTGERDPEALALLRDPRVKASPETVRKSLVGHWRPEHLFTLKQSCELYRTYQGQIEACDRQIEQMLGEFAPRVDPDAQPLPPDRKHRRKPSRAKTGTAPKGALRAGFDLRTEAYKLFGVDITQVPGLATMVLALFAEIGRDLSRWPTASHFASWLALCPDNDISGGRLLWKGGRKAKSRAGQMFRLAAYSLHRSSTPLGDYLRRMKAKLGPRAATTATAHKIAIIFYTMVRNQVEYDETIWAARDTHRTKRLEAKLHRQAKRLGYQLVPITELPAA

SEQ ID NO: 407680 - protein, 426 aa, unidentified
MNDWNQITHYAGFDWAKDHHDVTILDRAGQRVAEFRFDHTAAGWKQFQEKIAVYRGLAIAIEAKYGAAVERLLELNCGAVFPVNPKSAKSYRQRRVPSGNKTDKIDAWCLADALRVDGHGWKALGPQTPLVKELRLLCRDEISLIRDRTALISQLQQALYEYYPAALEAFEDWTKPSAWAFVVAFPTPQALAQAGRRKWEKFLHVQKLVRPKTYQRRLEIFARATQFQGSAPVVNAKSRLAAARARQLQFLQAQIEEYRAEIRRLFCEHSDAGLFGSLPGAGDKIAPRLLAELGDDRALFPDAESLQCLAGTAPVSYQSGRVHRVRVRRACNMFLRYTVHLWANLSRESCPWAAIYYAALKAKGKSHACALRALGQRWLKILWKMWQTRTPYNADLHAKNQLKHGSWVLQMQTVESSSGQRVAAAE

SEQ ID NO: 407681 - protein, 335 aa, unidentified
MHGVDAEGNGVVARRLRRKEVLAFLSNLTACLVGIEACGSAHYWAREIARLGHTVKLIPPRYVKPYVKRGKTDPGDAAAICEAVTRPTMSFVPIKGVEQQGLSMLHSARSQLIGQRTQLTNAVRGHLSEFGIVAERGLLGLAELAAIVRDESDKRLPVAARAALMVLVRQIDMISTEIDALDSTLRKENKASALGPRLETIPSVGPVIASALRARVTDAKLFENGRHLSAWIGIVPENNSTGGKLKQRGLSKKGDRYLRSLLVNGAMAVVRQAQKRPDKHPWVAKLLGRMSAKQAAIAIANKTARIAWVLMVHGGVYEAGHRAPQYRAQACVAAG

SEQ ID NO: 407682 - protein, 408 aa, unidentified
MNQDSGFDIWCGLDVGKTGHHACALDAAGRKVFDKPLPQDQKRLEELFDKLQTHGRVLVIVDQPNTIGALPIAVARSMGIQVAYLPGLAMRRAADLYPGNAKTDARDAFVIADTARTMPHTLRRVDAGEETLAELKVLVGFDEDLAAEATRLSNRIRGLLTQIHPALERVVGPRLTTKQGLAVIEQLGGPQAMAAASKSKLLRVISKAYPRGTQEFADAITTALAEQTVIVAGTAAAEQVLPQLAASLRQTLDQRHALAAQIEQVVDAHPLAEVLTSMPGVGVRTAAQILLDVGDASQFPTAGHLAAYAGLAPVTRRSGTSIRGEFPARSGNKHLKRALFLSAFAALRSDPTSKAYYDRKRAQGKKHNPALICLSRRRCDVLFAMLKNREPYRAPTPTREPSPLPLAA

SEQ ID NO: 407683 - protein, 360 aa, unidentified
MLYLGIDQHRKQLTVEDRNEAGDVTVKRQVSTKWEPVRAFFAEYAIRAQAEGGFVAILEVCGFNYWLIRLLQEYGCRQVILIQPEKRSKRKTDRRDAGALAELLWVNRHRLLSGKRVQGVRRVDWPTEQEAEDRQMTVLRQRLGQLRTRTINRIKHVLRKHNIEQDCPTKGLDTIKGRHWLETVTLGTMDRMEVDLLLAQWKLWDEQLKTLDQEIRKRQAEHPTALVLATIPGCGAYSSLALASRIGPIERFPRPGSLANYWGLTPGSRNSGEATDRLGSITKQGSATARFILGQMVLHVLRRDAWMRAWYGRIKRRRGSKIARVAVMRRLATIIWHMVKHNEPYVMGGPPRKKLEAQAA

SEQ ID NO: 407684 - protein, 377 aa, unidentified
MVWTAPARHLAQMKSRAKMVVVEATSKGATSVGKSIINLSSVTTVGLDLAKHVFQVHCVDALGRVVVAKAIRRNKLLEFFASLPRCLVGLEASGSAHHWARELIKLGHDARIMPPAYVKPYIRRQKNDAADAAAICEAVTRPSMRFVGVRSLENQAALMRHKAREMLVSQRTQLLNGLRGHLTEVGVIAAQGPRHARELAELIEACDETVPFEVCEALAPLVVQLRNLDEAIARLERIIAKLAQQDETARRLMSIPGFGPITASAMAATVQDTSGFAGPREFAAFLGLTPKQNSSGGKPKLGRISKMGNRNLRKLLVVGAHAVLFHRKPHTDPLRMWAKKLIEKKPFKLVAVALANKMARIAFAILRGKTVYREIPA

SEQ ID NO: 407685 - protein, 410 aa, unidentified
MLHPKMQYTYVGIDSHKDSHTAVFIDCFFEKLGVITFDNRPSKFEAFLQSAQPFLMDGTSFLFGLEDCAQYGRTLTTFLTENGYDVRHVNAFLVASERKSQNITQKDDNIDAECAARVLLSKFSELPTPTLQDKFWVLRSLVIRRDSLIDTNKRLKNHLHTLLTQHYPNYRSFFSEIDGVTSLAFFMRYPSPRTLQSTTVEELAAFLEIPSHGHIGIAKAQMILDTLENTAVEFQEVRDSAVQSAVRQLQFNLNEIEQLDKNLAYFLPKLDCTLTSMSEIDTVSAAQLLSCIGDIKRFPTPAKLARYAGIAPVTYASGKTDMQFANKRGNRELNALLFWLSVRVTSTAGRNRKIMNSFFYEYYHRKMSEGKTKRQALKCVQRRLANIIWTMLTNNEEYVNPPTFDAPPRD

SEQ ID NO: 407686 - protein, 385 aa, unidentified
MALTTATQTSPYPGSPCLYMGIELSAAKWGLALSAGGQRIREKSIRAGDCEQLLEEISAAKKRFGLPEAARVICCYEAGRDGFWIDRLLGRLGIENVIIDAASMKVDRRARRAKTDKIDAKRLLSDLIRHHRGEKDVWKVVRVPTEEQEDKRRLHRDLERLKKEKTQHRSRIFSLLATQGVRPGNLNAFLTDLDAARIWDGKPLPPGLKAEIERERDRLRLVEEQIRAIKKERREQLKQASSPELAKVKVLTKLRGIGVDSSWLLVMEMFGWRQFNNRGEVGGSAGLGGTPHNTGSSEHEQGISKAGNPLVRTRAVELAWLWIRYQPHSDLSQWFMRRFAGGGSRMRRVGIVAVARKLLIALWHLVEHGVVPSGAVIDLTESCSS

SEQ ID NO: 407687 - protein, 373 aa, unidentified
MVEHTTTYVAFDNSKDTLAVAIAEGGLRGEVRFWGRIPNQPEAVRKLVAKLAAKHPVLSFCYEAGPCGYGLYRQILGLGHPCLVVAPSLIPTKPGGHIKTDRRDATMLASLFRAGELQGVWVPDAEHEAMRELIRGRQTAMQEVRRSRQLVLSFLLRHDRVVPTRQHWTRAHRVWLARQSFSHPAEQIVFEELIQRMEAACSRQTRHEDVIRRLLPTWSLAGVVTAIQSMRGVALMSAVTLVAEIGDFGRFTSPRQLMAWLGLVPKEHSSGRKVARGNITKAGNTRARRVLVEGAWTYRLPARMGEDITRRNEGLPETIRATAWKAQVRLCTRYRRLQRTGKPQNVIVVAIAREMAAFVWAIARMAQPVIGAA

SEQ ID NO: 407688 - protein, 338 aa, unidentified
MRCYAGIDLHATNNVVVVLDEQDRLLYQKRLRNDLATVVTALAPFRDTLHGVVVESTYNWYWLVDGLMDAGYPVHLAHVPALPQYSGLKHRDDPHDARWLAHLLRLGLLPTGYIYPKAERALRDLLRKRSQLVRQKTMVVLSLQSLLARLTGARFSLRQLQQLTPETLPALLPVPEHVLSVTSSLTVLRCVETQIREVEQAVRQQGRERAGYQLLQTVTGIGPILALTILLETGDIRRFPTVGQFASYCRCVSSQHLSNGRCKGAGNTKNGNKYLSWAFVEAAHFAIRYDEVVRRFYQRKAARTHVLVALKAVAHKLARACYHVLREQVPFQVTRAFA

SEQ ID NO: 407689 - protein, 367 aa, unidentified
MTIVAQAHPFVVGVDTHARTHALSILATPHGEVVDDGEFPATSAGMARAIEWAGRRTGGDLEVLWVIECAATYGAQLARAVSAAGYQVVEAARMNAKANRGIGKSDPLDARRIAAAVLPVQVDRQRHLRKDDGVRAGLRILMAARDHMTSERTATINALTALLRVLDLGIDARKPLTSKQIAEIAKWRTRTEDIQAVMARAEAVRLAKRTLDLDDELAANVKTTTALLKDSPARVLLDKPGIGPVTAAVALTAWSHVGRLHSEAAFASLAGVSPIPASSGNTVRHRLNRGGDRRLNKALHMAVIVRMTHDAGTKAYVERRVAEGLTRREIRRVLKRYLARQIHRALTAASRADDIAEDTIAGTPLSD

SEQ ID NO: 407690 - protein, 321 aa, unidentified
MSTKKSRRSFIGIDVSKRLLEVATHQSDYHFRCPNEPKAFPALIAELINLRPARIVLEATGGLERPLLQALQAVGLPVVLINPRQVRDFAKALGQLAKTDRLDARVLAHFAAAVEPPLRPLKTAEDSELDALMGRRNQLSDMLSAEKNRRGSAATDAARADIEAHIEWLEQRLKTLNKELKEQLKHCVAWQQKDKILQSVKGIGFVISVSLLADCPELGQLNRHQIAKLAGVAPLNRDSGKQRGTRHIFAGRAQVRAKLYMATLTAIRCNPVIKAFYQQLIARNKLKKVAIVACMRKLLTIINVMVRENKCWNDKAQPVSA

SEQ ID NO: 407691 - protein, 321 aa, unidentified
MAIWVGIDVSKDTLDFGFIADGRKFHRKVPNTRIGFAEILKEVPQAAHFVMEATGTYYLNLALYLQEKGCYVAVVNPFRIKSHMKCDLRRSKSDKADSYSIAQFGKEKEPSAWVPVKRETFQIQQFQSLYDMITHQITQYTNQIHALKRTEISSPKVIRECLTIIKDLRKRRAVVMADMEKLAESVLAREIEILESIEGIGRKTAIRVASAIGDFRRFPTSRQLVSFAGLSPTTQQSGTSINSKGHISRMGGTRIRGALYMCAIVAKTYNPQCKAMWDRLKADKKHGKIIIVAIMCKLLRQMHALVTKNEAYDPNFFAKAA

SEQ ID NO: 407692 - protein, 433 aa, unidentified
MTPSSVSMENPMVAYVGLDWADQQHVMCWRAADSTQAHTAVVRQSPEELQAWVAQLRQRFPQGLIAIALEQSRGPVIAALMHYDFLRLYPINPKSLARYRETFSTSGAKDDPHDAALLLDLLVKHREQFAPWVPDDVLSRQLALRVQHRRQLVDLRTALTHQLSSHLKLYFPQALDWAGALDSLQACDFLQRWPTLPAVQKARPAQLEQFYHHHQCRRRQLIQQRIEQIQQARSLTEDRALVEASSHMVLALVAQLRVLIATLHQWEAEISQLFAQHPDAFIFASFPAAGPVFAPRLQTAFGSRRDRFSAAQDMVQFSGVAPVTQRSGKSLQVHRRWARPKFLHQSLVEYAALSIPHCGWARALYHQLRARGHRHWAAIRVIAYKWVRILFRCWKERVPYDESKYLQALQRRNPRLWLASQQPPPPRCKKPAA

SEQ ID NO: 407693 - protein, 423 aa, unidentified
MKQSNATQQAVVERAVAQRVSAAGNVHAAYIGLDVHKVSISVAIAEIGRQAPEFRGEIPNEPKAIDKLVRQLSERFAGQPLLFSYEAGPCGYGIYHQVQASGHDCEVVAPTLIPQRAGDRIKTDRRDAQMLARLSRSGELTPVWVPTPEQEAIRDLTRAREDMKAGELRARQRLNAFLLRHSKIYPGKSKWGPAYFRWLEETVRFDTPVQQIVLQEYVDHVKEAQRRVAGLEKQMEAALPTWSLAPVVESIQAMRGVSLITAMTVLAELGDITRFDSPRQLMAYLGLVPSEHSSGGSRRQAVSPRPAMATCDGCWWKPPGATASRPARHESLSSAPRRPRQRCRRSPGKRRSAYAGVTVACPPRAKPSSRSPPRWRVSWLVSCGRLPVRPWASRMAAGLPHDPRVPVPTAQERRAGGRPLTLL

SEQ ID NO: 407694 - protein, 342 aa, unidentified
MTNFNTKYQSVCGIDIAKNVIQIYQVNQDGECKNFQVKRKEFLQLFENREPSLIGMEACGGSQYWARELQKLGHTVNLMAPSAVKPYVSGFKSDRKDAIGIFNAMLAGVRKVAVKTEAVTDLATLLGIRARRIRARTAKVNMVRGYLMEYGIVMARGLRQFKNSIADSLLQLERAQASNMVKEEFKFLVDEVDKETEAILRLDREINSLAKQCKNFDHFLTAPGVGLITAATMCVKLADPQVFKNGRQFAAYIGLVPQHYGSGGKNVNTTIPIKCNKELRGLLVQCAQSIRRTKNKSSWVTQIEDRKPNSVATIAVANRLARRLWAIASKGEDWKRMDINFG

SEQ ID NO: 407695 - protein, 412 aa, unidentified
MQAIIERCCGLDVHQETVVACLLVGAPGAQPRKEVRTFRTVTRDLEALRDWLREAGVTHVGMESTGVYWRPIYAVLEGHFELIVGNARHMRNVPGRKTDVKDSEWIADLVRHGLIAKSFVPPRPLRELRDLLRYRRKLVESQSAERNRLLRLLETANIKLASVASDVFGVSGRAMLRALVAGQASPEAMADLARGQLRRKRDDLILALDGRVEEHHRYLLAMQLRRLEAIEADIAALDQRIGERLEPYRAPHALLMQIPGVDWVVAAVLIAEIGVDMSVFLSVHHLSAWAGVCPGNHESAGKQKSGRARKGNVHLRAILVGAAISASRTKGTYLKDKYHRLKARRGGLRAALAIAHKILVSAYHMLAKNVPYRDLGEAYLDQIGQTRTVANLKRRLERLGYRVTLEPNGAAT

SEQ ID NO: 407696 - protein, 350 aa, unidentified
MIIIGVDFHPEFQQIASVDTDTGEFQEKRLTHREEAETFYRALACAGQKVRVGMEASGHARWFERLLAELQIELLIGDAAEIRTKRVRKQKTDRQDAQLILNLLLEDRFPQIWVPSWENRDLRQLLWHRHRMVQARTRIMNQLQAVALNEGLRCKKKLWRERGREQLESFRLAPWASRRRRDLLELLDRLNPTIAELSQAIQQEVEKCPEARRLMTHPGVGPLPALAFVLIIGEADRFHCGKQVASYLGLVPLEDSSGNRRRLGHITKQGSSMLRFLLVEAAQVTTRSLPQWRSKYFHLMMRRGRKIAKVAMARRLAVRLYWMLRKQWDYQQVLKFGSHAGQLGNRHGVQ

SEQ ID NO: 407697 - protein, 443 aa, unidentified
MLRIVVKRGAGLDIHKKTVVATRMRVTEDERMVWETKTFSTMTTELLGLYDWLQEWECTHVAMESTADYWKPVFNVLEDAFEVMLVNAQHVKHVPGRKTDAKDSEWLAELLIHGLLKPSFIPPRPQRELREMTRYRATLVQERARVVNRVQKLLEGMNIKLASVATDVLGASGRAMLEALVADRLRPEEMAQLARGRLRTKIPELEKALTGIVAKHQRKLLALQLAHIDFLDEQVEEVSAEIGRHMEGMDQPPHSGNLQSENGLSEGTPTDGSLPPLSYGEALIVLDTAPGVNQNVAETVLAELGADMNRFPTPEQAAAWAGIAPGNNESGGKRYSGRIRDGNRALRQALVQAAWSAVRTKESYLKAKYERLVVRRGKKRAIIAVAHSLLKSIWYMLAYHVPYQDLGGDYFDNRRKESKINYHLRQLQKLGYSAQIEPQLVTG

SEQ ID NO: 407698 - protein, 378 aa, unidentified
MNTPRTALQGQNTTITGWLYMAFELGEKSWKLALGDGVRGPSRHTLVAGDLNAVLQVIAKARARCGLASQAPVRSCYEAGRDGFWLHRWLTEQGIVNLVVDSASIEISRRARRAKTDRLDADKLLSMLMRYHAGERRVWAVARVPTEEQEDERRLHRELGGLKQERTAHSNRIRSLLVLHNLRVTAIGGRSWNHWWNDHGAQLPAGLAAEIEREVVRLALVVTQIKTIETQQHKAVQAGAQPAVALLAQLSGIGVGSAWLLIKELFGWRRFHNRREVAGCLGLAPTPYSSGESQVEQGISKAGNKRSRWLMIELAWSWLRYQPTSQLTQWFNERFAPGSKRMRRVGIVALARRLAIALWRYLEDGEIPPGASLKSVVR

SEQ ID NO: 407699 - protein, 346 aa, unidentified
MRILALDLGKFKTVACEYEAETGEHRFATVLTTPKALHDLIVDYEPQRVVIEICSIAGWVSDLVRSLGIELQVANTADERWRWRNVKQKNDRRDALKAAQLSAVNQLCPVHVPEQTMRQWRALIAYRAKLVQRRTKIKNHIRDLLLREGQLLPRGRSAWTDSGMAALRALAQPLAEVSSDQLWRGELGVELAQLTELQQQILIIHVKLDELAAADPRVALLRTIPGVGPRLAEAIVTMFDDVTRFATAGQVGSYIGMVPKSFDSGETQRSGRITRHGNRLVRSLLVEIAWAALRHNAWARQTFQRISGGKKSRRKIAIVAVGRKLLVKCWGMLRHHTPWQWQTSVA

SEQ ID NO: 407700 - protein, 350 aa, unidentified
MKRPKDKLFAGIDLHGNNLVTGIMNQNGDRLAHRKLDCDLNQVEAFLRPFKPQLQSLAVESTFNWYWLVDGLRQRGYPIDLANPAQIQQYNGIKHADDKHDAFHLAELQRLNILPKAYIYEAQLRPVRDLLRRRTNFVQQRTELFLSFKSLYARTTGQEMPLRELKRLEPKQGKKLYQHPANQLIAELQLEHIQALNRSVGCIEKEVLGWAREIPIYDKLLTLPGVGKILAMTITMEVGDIGRFKTDGDFASYCRAVDSRRMSNNKQKGENNQKCGNRYLAWAFVEAANFARRYDENCRRWYDRKKARTSAVIATKALACKLAKAAWFIMRLGTEYDASRMFPERAARKK

SEQ ID NO: 407701 - protein, 343 aa, unidentified
MQTIATIGLDIAKSVFQVHGVDAAGQVVVRRQLKRRQVLAFFAKLPPCLIGIEACASSHYWARELQALGQTVRLIPPAYVKPYVKRQKNDAADAEAICEAVTRPNMRFVAIKTIEQQGCLVLHRTRHLLVRQQTATINSIRAYLAEFGIVAPVGRRGVEQLLEVIADFNDARLPEVARACVAALGVQLRQLKAQILELDRRITAWHRSSETSRRLNQIPGVGPLLATALVASITDPKVFRSARDFSAWIGLVPKQNSSGGKDKLGNISKRGDRYLRSLFTTGALAVIRYAKIHGTKHRPWLVALLARRPTKVAAIALANKLARIAWALMTKGSSYRQPAALRV

SEQ ID NO: 407702 - protein, 417 aa, unidentified
MTDANKSSANQVLIAIDIAKQSHDAVIAWPSGRTKAVKIANSLAGYERLISCADTDPHSLCVAFEPTADYHRNIAYWLQAHGVRCCLVSSLACARAREMLFKTWDKHDRKDAHVILYLMQQGLMQPFYDPLVAETMDIQELSNTYHQISLARTRCQHSLVNHYLTLYFPEMERYLHNSRSEWFCRLLLRYPTPRAITRYKPAAFVKHAWDVVGRKVNKQRFLEELHETAASSIGLPVDPTGLAVRTFKLQLERYLTLSLQRSELEKTADNILLQRDDYRLLRTLPGVGPVIALMIIAESGDLKRFRHYRQYLNFCGFNLSAVQSGQQQGRYQLSKRGNARLRYAYWLAAVSATRQRENSFRYKYERYIRNDPDNADLKRKARVAVATKMARVAHALVKQNTDYRGFYEFGHGDVTPS

SEQ ID NO: 407703 - protein, 432 aa, unidentified
MFIVGIDIAKRSHMVRVIDDQGRTVYKPFSIRNSCSGCSAMLERLRKLTNRKGEFLFAMESTAHYWLALYTRLRKEGYQVVVLNPIQTDAMREMLMEENKTDEIDTLVIAETIRFGRYRASSVPQEKLLALRELCRNRFYLIDMGSDLKRKITALLDQVFPEFESQFSTIFGKTALAVLRQYPTPEKLSRAQTGKLTEVLQTASNGRFGEWKARQLKELARDSFGIPDCEGAYSALLLLYLDQFQSLQDAAAALEKRIAELFSQFDSTLTSITAIGPVLGAVILSEIRDISCFASAHKLAAYAGLNPKVNQSGDKKSSAVHMSKRGSPYLRRAVWMAGAVAVQYDPMFRAYYEKKAAEGLRYMNIIGHVSKKMTSVIFRSCGTPRYTSLFCPLRNGGMAYFLTAHCGGLSSLHPLSSPVHSTLSEFLYLTNP

SEQ ID NO: 407704 - protein, 440 aa, unidentified
MSDLPVLDPRAAFIDVGSEQMHVSIAGGQPEVFGTVTSQLHALRDWLLAREVRSVAMEATGVYWLPLYGVLEAAGLEVLMVNGRQTRNLPGRKTDMKDCQWGATLHAHGLLRAGFVPPAHIRRLQDYMRLRGEHIGAAGTHVQHMQKALERMNIKLHDVISSLTGTSGLAVVRAIVDGERDPERLLGLCDTQIRRAKAERVKESLRGTWAEEHLFALRQALQSWEHYQRQIAECDRQVQAVLQDINGDDEPGERGNPAQPRKHPGVKAPQIDNLRGILAQMCGGNDLTTLPAHTEYSVLQIVAEVGTDLTKWRTEKHFTAWMGLAPGSHQSGKRKGSVKRNRNRAGRLFCVIARSLARSKDIALGGFYRRMAARRGGLVANIALARKLAVLFWRVMVKGLNYVEHGLAQYEAKVLQTKQRTLRRLARQLGQELVPIPTPA

SEQ ID NO: 407705 - protein, 448 aa, unidentified
MRTRKPARAKKMKLPKHLQHINPHAAGIDVGSRSHFVAVPEGSCEQPVREFTSFTDDLHRMADWLLACEVTTVAMESTGIYWIPVFEILESRGLEVRLVNARHVKNVPGRKSDVLDCQWLQRLHSYGLLEGAFRPTEQVCTLRAYVRQRMNLVRYAAAHIQHMQKALSQMNLQLANVVADITGVTGMRIIKAVLAGERNPLVLARLRDRRCKSSESTIARSLHGNFRPEHLFSLKQAVDLYEFYQGQIVECDRQILDQLASFDGADASGNGPPESVDEALQRMAGVDLTQIDGIDTNSALKIIAEIGTDMNRWRSAKHFASWLGLCPGTKISGGKVLNARSKPVANRAAATLRMAAFALFNSKSALGAYLRRQRARLGAPKAITATAHKLARLVYSMLKHGTAYVDEGQKRYEERYRTRVVQNLKRKAKELGFALVEAVEKQPKLETT

SEQ ID NO: 407706 - protein, 317 aa, unidentified
MQEVTTFVGVDVAKDELMVCVHGQPGTQRLPNQAQAVRQWLKSLPAGSAVAVESTGRYHQLLVAQAHALGMPVFVLNARDVFFYAKAMGARGKTDRVDAQLIARYLVEHYTCLRPFQPPTATQAEIDRLLNQRWSVVSKRTALRQSLADATALGECLDELEFAFKKMLDRIDARIQSLIDANTDLRHAQQRLQSITGIGLQSSALLASLLSRIPFASADALVAYSGLDPRPCDSGRYRGRRRLSKRGPAALRRQMYLVAFSACHSKLLHPIYQKLRDQGFKTTEALVILARKLLRVAFAVWKSGQPFDPALIGQKKP

SEQ ID NO: 407707 - protein, 338 aa, unidentified
MVYGAIDLHLRSSQIRIIDAAGGVIRERRVVTSPAALVAAFAELGTMRVLLESGTESEWVAQVLEAAGHTVVVADPNYLPMYGERQRKVKTDRRDVAALAEANRRGWYRAAHRTSAAQRAVRQQLRTRRHLVRLRSGTMSVLRALLRQCGYRLPAGSPERGPARLAALTLPAALGETVAPLRRTLETLNEEIAALDAQCETLAAADTVVQRLQTVPGVGPVVALTFRAYVDDVGRFASASQVSAAMGLVPREASSAERRHRGHITKAGPSELRSLLVQAAWACWRSKRSGSLHAWAQGVAGRRGRRIAVVGLARRLSRILYALWRDQSVFVAATLAAA

SEQ ID NO: 407708 - protein, 326 aa, unidentified
MEHELHYIGIDTAKEKLDVDVLRPDGRHRTKKFANTTKGHDELVSWLKGHKIDHAHICIEATGIYMEPVAECLYDAGYIVSVINPALGKAFAQSEGLRNKTDTVDARMLAEFCRQKRPAAREAPHPLERALRALVVRHQALTDMHTQELNRTETAREVQRPSIDAHLLWLEAELKRLEKQIKDLTDDDPDMKHRRKLLESIPGIGEKTSAVLLAYIGLKDRFAHARQFAAFAGLTPRRYESGSSVRGASRMSKAGHVSLRRALYMPAMVATSKTEWGRAFRDRLAANGKKGKVILGAMMRKLAQVAYGVLKSGVPFDASRHNPVAA

SEQ ID NO: 407709 - protein, 349 aa, unidentified
MRFYTKQHRFYCGVDLHARTMYLCILDADGQVVFDKNLPARADAFLAAVEPFRDGLVVAVECLFCWYWLADLCAKEHIAFVLGHALYMKAIHGGKAKNDKIDAGKIARLLRGGNLPQAYVYPAGMRETRDLLRRRQYLVRKRTEALGHIQNTNSQYNHPPFGKQLGPAANRAELAVADRFTHPSVHKTIAIDLALIDYYEELIDDVERYLIDTAKVDDLQAYYHLQTIVGVGKILGLVLLYEIHDIRRFADVGHFLSYARLVRCAHTSAGKKQGSGGKKIGNPHLRWALGEAACMMVCHSERAKKWMQRQEKKRGKGKAMGILAAKLGRAVYQVLTKKVAFDERRFWAC

SEQ ID NO: 407710 - protein, 355 aa, unidentified
MTSTKYIGLDVHKESISIAVMNSVGKVVMECVIETKASTIVQFIDGVRGDVRVTLEEGTWAAWLYDLLKPHVTEVVVCNPRKAALLKDGSKGDRIDAHKLAELLYMNKIKSVYHGEHGLRTMKELARSYLTISKDLARVMNRLKSLYRSWGIPCGGKEVYAPRYREEWLGKIREAGVRRRAEHYYQQLDVLRLLRPQVRRDLLVEAKKHKAWKLLRQIPGIGPIRAAVLIAVMQTPHRFRTKRQLWTYSGLGLETHDSAQYHAVKGELRRSKRPATVRGLNKDHNHDLKDIFKGAAMRASTAAGPLHDFYENLLAKGRKPTMARLTLARKIAAITLIVWKKEVRFDANHLKPQAA

SEQ ID NO: 407711 - protein, 391 aa, unidentified
MILVGVDVAKDKHDCYIMTSEGEVLFKSFTIANNMEGFNQLYEKILSVIDNFDNVKIGLEATGHYSYNILGYLLDKGLTPYVINPLHSNLYRKSLSLRKTKTDKVDSRIIASMLMSDVSLKPYSNTLYHNEELKSLTRYRFTKVQERAKLKISISRLVTILFPELEKLVPTLQMNSIYALLYEFPSAHAISKAHLTRLTNLLNTTSKGHYTKDKAVLIREAVKNSIGSNMPAKSLELKHTIKLIKELTSEINEIEEEIKIIMNKINSPILTIPGICLSTGAQILAEIGDFKNFSSPDKLLAFAGLSPSTYQSGNMYSSNAKMEKRGSKYLRFALFNAAIYVSYWEPTFSQYLKKKRVEGKHYYVAISHVVKKLVRLIFHLEKTNERYSTVI

SEQ ID NO: 407712 - protein, 351 aa, unidentified
MSQTPRTSITAVGIDIGKNSFHIVGQDDRGAIVLRQKWSRSQVEARFANMPPCLIGMEACVGAHHLSRKLKALGHDARLMPAKYVRPYSKGQKNDFRDAEAIAEAVQRPTMKFVATKTADQLDLQALHRVRERLVSQRTGIINQIRAFLLERGIAVRQGQRSLRAELPRILATPPDVLSPGMVRVIEGLAADWRQLDERIEGLSREIEELAKRDAGCERLMSIPGIGPIISSAMVAAIGTGDGFAKGRDFAAWLGLVPRQISTGDRTILGKISKRGNRYLRVLFVQAAWVVLVKVKPTRWEGHGLKHWIEAASKRLHHNVLAVALANKLARIAWSVLARGRAFEASKLQAA

SEQ ID NO: 407713 - protein, 369 aa, unidentified
MADYREAFVGIDVAKQRNAVAIAEAGREGEVRFIGEVDASDTSMHRVIQRIAAKFDRIHLCYEAGPTGYGLYRLIRSLGHECTVVAPSLIPRKPGDRVKTNRRDALSLARLLRAGELTAVWVPDEDHEAMRDLVRARAAAVETLRVHRQQVGAFMLKHGRAYPRTKNWTMRYLRWLQEQRFDYPAHQIALQEMVEAVRISKERVERLERVIEEFIPNWSLAPIVRALQTLRGVDLIVAVTFATEVGDVSRFDSPRQLMGYLGLVPGERSTGETIRRGGITKAGNGRVRHMLVESAWTYRHPPRIGKAKLYRLEQAPPKVREIAWKAQARLTTRYRKLVARGKRTTVVCTAIARELVGFMWAVAREARST

SEQ ID NO: 407714 - protein, 352 aa, unidentified
MDATTVAVDLAKDIFEVAMANRAGRILDRKRLTRRQFERYLDELAPGTEVIMEACGTAHYWGRRCVARDLRPRLLPVQYVRPYVRRNKTDRTDTEAMLEAARCGEIRSVPVKTVEQQTLQALHRVRTQWQAARTARINVVRGLLREQGLPVPVGAGKVLARVAAILEDADAPLPDLLRHTVGLVVDEIRALETRIVTIDQQLARVAAEHPIAQRLQQIPGVGVLTATALVGAVGHIHAFRRGREFASWLGLTPRESSTGGRRYLGGISKRGDVYLRCLLTHGARAVLLTAQRTARTTPHRLTRLQQWAVTTAARRGHNKAAIAVANKMARIIWAVWHRDVDFHAHAAVTTAA

SEQ ID NO: 407715 - protein, 447 aa, unidentified
MAQGNGLTRGDRNRNRKLGELRAVVRADRAVLAIDLGEDKQVAVVMDHDNRVLARTTVRAKAHRLGGLVEWGEKVAGKQGFAGLVVACEPTGHRWMALMALGEWRGHGFVGVQPLAVHRARESDDYTYAKTDHRDSYLIGKLAARLECYLPEQATEEWAQLRHLGARRAELITAVTGYRQQAGDLLGCAWPAALDVARRPLESVTWQAAMMVVLSRCGGHPGRLRRMGYEKFLAAVRRELPRWGGQKLCHAIVKGLWDALADPAGVTAQRPGALERLHMVLEDWLALRARLAGTQKRMLEVLDSLGLTELAGSIDGVSPLSAAVILAESGDPSRFSSGRALVKHAGLNPSEHSSATMTGQSRISRRGRPGLRTAAWRAVWAGLRHNTVLQAKYRHLTTREESRLAAGQARVACAAAILRWLRAVITAGTAWDPAIAAGHAAPEAIAA

SEQ ID NO: 407716 - protein, 367 aa, unidentified
MKKVSIAATKQSRNISQQKLTIGLDLGDRNSWYCVVDEAGQIRLEQRVRTTAKALQEVFGTMPCSRIALEIGTHSPWISRMLSDLGHEVIVANARKVRLIGESRKKDDRLDAQTLARLARIDSELLFPVKHRSAQAQADLTVIRARAGLVRARTGLVNSARGLAKSYGERLRGCNVRNMNPEKAESLSPELQSALEPLLNAIDSLSERIVEYNERIENLAQQDYPQVALLKQVKGVGTLIALTFLLTLEDPHRFGKSRDVGCYLGLQPGRRNSGRSEPQLHISKAGDPYLRTLLVQGAQHILGPFGIDCDLRRWGLRLAERGGKSGKKRAIVATARKLAVLLHHLWVSGEAYEPLHNSSRTAVAAAA

SEQ ID NO: 407717 - protein, 387 aa, unidentified
MTKVNDLSRSLAALDQDTTLIAVVELSSKSWLVAAAVPGIERHPLKKLDPDASALLKLIERWRGEAERRGRTIKRVVLAYEAGRDGFWLARWLKERDIEAYVIHPASVAVSRERKRAKTDRLDAAMLLRVLLGWLRGERGHCSMVAIPSMDEEDARRPSRERETLVGERARITNSIKGALVRFGIRSFNPLLRKAPQSLEKLQTAEGGPLPVNTLEEIKRDLARMAVVREQIAAIEKARVDRLKQAPKTGSNAMVQLLARVIGIGIETADMLVREVLSRTLRDRRAVGRYAGLTGSPDESGSRRREKGLTRAGNARVRRGLIQLAWRFLMFQKQSALTQWYRARTAGATPTQRKSLIVALARKLLIALWRLVTTGEVPHGVVLRPAI

SEQ ID NO: 407718 - protein, 407 aa, unidentified
MDVVHPTCAGLDVHQQTVVACARAGSGKAVTYAVRTFGTTTQDLLALGDWLITHGCTHVAMESTGVYWKPVWQVLDGLFELVLANAMHIRNIPGRKSDVNDATWIADLLAHGLIRSSFVPPAAVQELRDLTRTRKQLVREIAQHTLRIQKTLETANVKLTSVLADIMGVSGRAILAALGAGESQPERLAALASDKVQASRAELTAALHGRVTAHHRFMLKLHLRQIEALEAAVRDVEARLGEALAPFRAAVDHLITMPGVSETVARVIVAEIGFDMTRFPSPAHLVSWAGLCPRLHQSAGKRLSTRTRSSNPWLKTTLVQAAWSAARKKDSYFRAQFLRIKSRRGPKKAVLAVAASMLTAAYHMLRDGTDYRDLGADHFDRRDKAKLAKRLIARLHDLGLVVDVRAA

SEQ ID NO: 407719 - protein, 409 aa, unidentified
MEQVFERVCGLDVHKATIAACVRVPDAKGKRVQYVQTFGTTTADLLALAEWLEAHGVTHVAMESTGVYWKPVYYVLEERFTCLLVNAAHVKRVPGRKTDVQDCGWLAQLLEHGLLRGSFVPPAPIRELRDLTRYRKSLIQERAREANRVHKLLEDAGIKLATVATDVLGTSGRAMLEALVHGTRDPGVLAELARGRMRTKLPALREALVGHFRAHHAFLATQILAHLDHLEVTIATLSDRIAAALRPFPNAIQCLDTIPGINERTAEVLVAEIGVDMTRFPSDRHLASWVGICPGNHESAGKRKTGKIRKGNVWLRAALIEAALGATRTKNSAVAARYRRIMRRRGHKKAIVAVAHSLLVTAYHVLARQTTYQELGADYYDRRHTERVTRRAIQALEEQGYHVTLERVA

SEQ ID NO: 407720 - protein, 349 aa, unidentified
MIVVGIDPHKKTHTAVALDGATGQVLGELTVRARTTGFERLVGWARDLGAERSFAVEDGRHVSGALERYLIGRGERSVRVPPRMMGEARRTDRVSGKSDPVDATAVARAALRHPELPQATLAGIEREMGLLVAHREMLVNERTDRICKLRWLLHDLDPDLEPPLRTLDRLGSLDRLSARLRALEPSVQTELCLELVARCREITVRANELERTIGRLVRTHAPALLQIPGCAALTAAKIVAEAAQVSRFPTEGHFARYAGTAPVPASSGARHRQRFNRRGNRQMNAAIHRICVTQLRIHEPAKAYVARKRMEGKTKTEAIRALKRHLTRVVFKTLTTTTEPAGRLTAAAA

SEQ ID NO: 407721 - protein, 338 aa, unidentified
MTITTIGIDLAKNVFELCGLDDSGEIRLRRRVRRETLLRAVAEVTACVIGIEACTGAFYWQRQFEALGHEVRIIAPQHVKPFGRRQKNDRNDAEAIAIAVVQPRMRFVPKKSVAQQDVQTLHRARQRMVNHRTALVSQMRGILLDRGIAFGQSITRARAMIPRIIEDESNELTKLCRETLSSLLALMAEIDKRVREFDRRIDQVYRESEACRRVGKIRGVGPKTATAVVAAIGDGRDFDNGRHMAAWLGLVPRQHSSGNRTVLMGISKRGDQHLRTLLVHGARAVVRTAVGKTDRFSQWVNELRERRGTNRATVAVANKNARIIWALLAKNEEYRPAT

SEQ ID NO: 407722 - protein, 355 aa, unidentified
MNDEKYIGLDVHQATIVVAVLDSTGKLIMESILETEAATILQFFAGLRGTLSVTFEEGTWSVRLYDLLKPHVDKLVVCNPRKNALLKDGNKNDRIDARKLAELLRGNQLKPVYHGENGVRMLRELSRSYLTIVKDLSRVMNRLKAVYRSWAIPCAGRDVYYRRHRAQWLAKIREAGVRRRAERLYEQLDMLQYLRQQARRELLVESRKHAITAKLRQIPYLGPIRSALAVALIQTPHRFRSKRQLWAYSGLALETRISAEYRMVEGQVRRSKKLLSIRGLNKDHNHDLKGLFKGAATMASVRPGPFQDFYQAALAKGIKPTMARLTLARKIAAITLTLWKKGENFDAEKLKSQAA

SEQ ID NO: 407723 - protein, 394 aa, unidentified
MIYAGVDIAKTDHVIGAVDERGAEMCRPMPFKNTEAGLERAVAWLEGLAGSPSDVVVGMEATGHYWMACYSFLIARGYSVAVINPMQVKAVRKLKKLDKVKNDRIDAWLIAETLRIGQYDETRLATDEVASLRSLSRYLQSLRGMAAELKTQCVCLMDAHFPEYAGIFSDMFGAGSRAVLSKSPLPFELARRRADSLARDVAEASRRGGKSAGYAARIKAAARSSIGVRLGQEAASFQVKSLIRQIEFADSECAKVEARVRALLDEVEPLVLTIPGVSYATGAQIVSEIGDVSRFRNASALVSYAGLNSSVSQSGQFDSGGGPITKHGSPYLRRALWLAANRARQYDPGLRAFYDKKRAEGKPHRVAVTAVARKLCHIVFAVMRDQVPYDPGRE

SEQ ID NO: 407724 - protein, 350 aa, unidentified
MVVVGADVHKRTHTFVAVDQAGRKLGEKVVAATTVGHHKALVWARAEFGNELVWGIEDCRHLSARLERDLLSAGQQVVRVPPKLMAQTRASARTRGKSDPIDALAVARAVLREPDLPVASHDAVSRELKLLIDRREDLVAQRTSAINRLLWRVHELDPERAPKPRSLDLAKHRELLRAWLATQPGLVAEPARDELADISRLTEAINALAKRIAERVRVVSPALLALPGCAELTAAKLIGETAGVSRFKSESAFARHAGVAPIPVWSGNTTGRVRMTRSGNRQLNAALHRIAVTQVRLDGIGRAYYRKRRDAGASKTEALRCLKRRLARVVFHHLHTDHQTRNQPCQTAAA

SEQ ID NO: 407725 - protein, 338 aa, unidentified
MAVLDSAGNLVMEAILETKAETILQFLHGLRGSLHVTFEEGTCAAWLHALLKPHVTQVLVCDPRKNALIKAGNKSDRIDARKLADLLYLNKLNPVYHGETGIRALKELARSYLALTRDTTRVMNRLKALYRSWAIPCAGQRVYAPRYRSEWLAKITEAGVHRRAEIYYQQLDALRSLREQVRRDLLAEGRKHSAMRLLRQIPSIGPIRAVLLIALMQTPHRFRTKRQLWAYCGLALKTSTSGEYRIVEGQLKRSRKFLAIRGLNANHNHDLKNIFKGAATRAAAVPGPFQEFHAGLVARGMKPRMARLTLARKIAAITLIVWKKGVRFDAEHLKQQAA

SEQ ID NO: 407726 - protein, 322 aa, unidentified
MIKPSLGIDVSKLDLSLSLLIDNKHYQTKIDNNQHGFKSFEKWIKKHNIQHVKACMEATGSYGRSFAHYLYNNQHDVHIVNPLCINAFAKSKLSRHKTDKVDSKLIAEFAQQNDLPLYSPREKNLQVLQDLYRCLQNLKHQAKQVQNYLENKKHLANSVCKAYARLAKSISKETIAVEAEINTLIDKTEDIKNKVTHMQTIPGIGKLTAVAILAEAPCLDNFTNARELAAYAGLTPKHKTSGTSVRGRSTISKMGSSTVRKALYFPAIVAKKHNPIFVKLNQKLASKGKPTKLILIAIMRKLLHIIFGVVKHNKPFDPNFCS

SEQ ID NO: 407727 - protein, 402 aa, unidentified
MNAVGIDVSKGKSMVAIMRPFGEIVSAPFEIKHTASGINSLVELINSVEGESRIVMEHTGRYYEVLAHQLLEANLFVSAINPKLIKDFDNDSLRKVKSDKADAVKIARYALDKWQNLKQYNVMDELRNQLKTMNRQFGFYMKHKTAMKNNLIGILDQTYPGVNTYFDSPARSDGSQKWVDFASTYWHVDCVRKMSLNAFIDHYQNWCKRKKYNFSQSKAEEIYGKAKELVPVLPKDAITKLIIKQAVDQLNSASTTVESLRTLMNETASKLPEYPVVMAMKGVGTSLGPQLMAEIGNVSRFTHKSAITAFAGVDPGVNESGTYEQKSVPTSKRGSADLRKTLFQVMDVLIKTHPQDDPVYQFLDKKRAQGKPYYVYMTAGANKFLRIYYGRVKEYLASLPES

SEQ ID NO: 407728 - protein, 355 aa, unidentified
MKRSHFIGVDVHCRFSEVAVIDSAGAIVSRAQCRTNIPALILELEKVARPRRVVIEEGPLADWLLRNLQSHVDGMVVCNPRRNRLIAQEGDKRDPLDAAKLAQLYRGGYVKLVHHPESLTRALLKQHVGLYHDRVRHRVSEALRIASLFRRHGVFVRERDFASVAERGPLLARLPKSRLLREDVRLLWKGYDMAVVQEEWLRRRLVQLAKKEEVVRRFAELPGISWIRGLTLFVWLDTPWRFPTKSSLWKYLGIGLEQRSSGTGLKRLRVPAVVNRRLKSTILGAARSAVAQGDNPFADQHRRWTEKGLSPRTARRNVARSLSATMWGLWKNGSAYRPDWVGVAAAAVNVAEVSA

SEQ ID NO: 407729 - protein, 443 aa, unidentified
MRSIYLPGKGCLSGKEKKEEILMKGLRTKKVNTINEGTLIVAVDVGMVSNHGCCTTADGRSTKTFRFDNTREGLDTLWNMVLASKSRFQCNEVIIGYESTGPYGEPLIHYLKQKPVTIVQVNPLHTKRMREINDNSPLKTDRKDPRVIADVIRIGHALSVVVPEGDSAYLRRLNNARERHTKERTALLNQLQQFVFLIFPEFTRIIKTIFCKTALHILKKYTTPAKVCSVNIEKLGEEMRRRSMGKFGVEHAAALINFAKTTIGIQEGLDGLVMDIQHALVQLEMVDSLMAELEHEMDTTLQRIPYSRKLLSIKGLGIVTVAGLIGEIGDFTKFTTQSEIAKLAGLDLYEVSSGKRQGQRRISKRGRSLLRKILYYAAMQTIRKNGIMHDYYQRLIGRGMKSMMALVAVSRKLLRIIFAIVRDDTEFILNHEFQKKEEMRKAA

SEQ ID NO: 407730 - protein, 355 aa, unidentified
MNQDKYIGMDVHQATISVAVMDSSGKLIMECILETKAATILEFIAGLRGTLSLTFEEGTSAAWLHDLLKPHVSHLVVCDPRRNALLKDGSKSDRIDARKLAELLHGNKLHAVYHGEHGLRTLKELGRSYLTITKDLPRVMSRIKALYRSWAIPCSGATVYAPRHRAEWLAKILEPGVRLRAERLYQQLDLLQPVRQEARRDLLVESHQHHAVKLLRQIPSIGPIRAALLVALLQTPHRFRTKRQLWAYSGFAVETHDSGEYRFVRGKLVRNRERITVRGLNHNHNHDLKNLFKGAALSASTRPGPLCDFYVARVEKGMRPTMARLTLARKMVAITLTIWKKGVEFDAKPLNRQAA

SEQ ID NO: 407731 - protein, 343 aa, unidentified
MDYFAGLDVSVKDTSVCVVDDTGKITREVRVASEPDALLAVLSNPTYRFKRIGLEAGPLSQWLLSALAEAGLPAICVETRHMRAVLKAQINKTDRNDARGIAQMMRVGLYRPVHVKTLRSQKLRMLLTHRKLLQSKAIAIENDLRGTLRNFGLKVGIAGAMKFEARIRELMNDLPDLAVLVEPLLAVRRTLREQITVLHQRLLAIVRDDDVCRRLMTVPGVGPVVALTYRATVDTPARFRKSKSVGAAFGLTCAKYQSGETDRSGGISRCGDEMMRVMLYEAAQSMLRSKRWSWLKAWAMQVARRRGIKKAIVALARRLAVILHRIWVDGTEFRWTRDILAAA

SEQ ID NO: 407732 - protein, 336 aa, unidentified
MEEETGEYLERRLSHRGEAEAFYRSLAGKAVRIGVEATGNDRWFHKLMSELGHELLVGDASAIHASAPREQRTDKRDARHILRLLMENRFPAIWQPSVGNQEQRQLLLHRCRLVRMRTRIKNQLDSIAKNEGLTGSRVWKAKRRQQIEALPLSGWYAERRKDLLALLDEMDKLIEPLDEAVRAAAEQNAEAQLLMTHPGVGPVVSLSYVLIMGDWRRFPRGKQVGSYLGLIPAEASSGKHQQQMGHITKQGNTLLRWLLVEAATKAQSKDPSWHRQYVRLSMNKHHGVAKVAIAHKLAVRLYWMLRSGQNYTQIVERGSHAGQSDLAGGCGLRPIN

SEQ ID NO: 407733 - protein, 371 aa, unidentified
MAESSRTIYVGLDVHKDSIAVAYAPEDRGAEVVALGASGTRQCDIDKLIRKLESKGATLVFVYEAGPCGYWLYRYLTRHGLSCHVVAPSLIPRKPGDRVKTDRRDAITLARLMRSGDLSSIYVPEIADEAIRDLSRGREDAMRDLKATKYRLKAFLLRQDIRYAGRASWNAAHLRWLSEVVCATRAQQIVFQEYVRAITEQHERLQRLETELHEEVKHWRLYPVVEAVQALRGVELTGAVILIAELGDLTRFDTPRKLMSYLGLTPSEYSSGDRRRQAGITKAGNTHARRALVEGAWAYRYPAKVSRHLQRRLEKLPAEIQAIGWKAQVRLCRRYRQLIARGKHVNQVVVAITREMAAFAWAIARVVPRPS

SEQ ID NO: 407734 - protein, 399 aa, unidentified
MLAVGIDISKSKSVAAILNQDGSMHTSPFEFHHTQPELDAFIKYILNSNQSATILMENTGHYHYPVLKAFQEAGLPVCIVNAYQIKKFGDMDLRKAKTDKKDAVRIARYALEKSYSLVPYTSMEQKYEDLRFLARQYNQRMLTLKTNKVFLLNLLDETMPGITNILPLTSRTPETSLSVLFINRFKSYDRIKKMGKNRFLDAFEKIARKSRNRQTKTYGLAIYEAALRNITTRGENEYTLAAQDQCLELVCESQKAADSIILKMQTLAETLPEYAVLRSMAGVGDRLGPLILAEIGDIRRFHSGKALNAYAGNDAPPYQSGTFESHNRHISKRGNAALRKYCFEVMQALKLTRPQDDPVYLFLLKKEQEGKPYNVAKMAGVNKFLRIYYARAMETLKQQ

SEQ ID NO: 407735 - protein, 350 aa, unidentified
MAKAMVAQADEIVVGVDTHGDIHVAVVLSGVGARLGSISVPTTPPGFAELMRWAEGFGRVRCFGVEGTGSYGASLHRHLVHHGQVVVEVDRPDRRTRHLKGKSDAGDAEAAARAVLSGEATGAPKAADGRVEMIRALRVARRSAMKARTQAANQLGAIVLTTPEPLRTSLRGFTVPRLVDVVARFRPGPLVSPEAAAKLALRHLARRHIALSAEIAELDRDLDALVAQAAPTLLALPGIGTDVAGALLVAAGDNPGRLSSEAAFARLCGVAPLPASSGKTNRHRLSRGGNRIANNALWRIVIVRMSHDERTRSYVDRRTKEGLSKKEIIRCLKRYVAREAYRCLEGVDGL

SEQ ID NO: 407736 - protein, 341 aa, unidentified
MPVVTVGIDLAKSVFAVHGVDEAGKAVLIKPRVSRDQLLTLIAQLPPSLIGMEACSGAHHWARIFQQYGHTAKLMAPKLVAPYRMSGKRGKNDAADAAAICEAVTRPSMRFVPLKDEHQQATLCLHRTRQGFVEERTAIYNRTRGLLSEFGVVLPLSPERLRKEIPTHLDTLPGWARRCISDLLEHASNIEARLAEYDRAISEIARDDERRRRLMHLRGIGPTTASALLASLGAGHDFRNGRQVAAWIGLTPSQYSSGGKERLGAITKTGDAYLRNLLILGARSVMASLGDRQDRFSRWVRSLVERRGYWRAAVAIAAKNARMAWATLKYGDAFKYISATA

SEQ ID NO: 407737 - protein, 445 aa, unidentified
MFIQSQDDSHCCYSFFIKVVILLMKLKYSICCGLDVHKNVIVATIVTTNKDGISEYKQKSFSTINSDIQRFHNWLIENNCYHVCMESTGKYWIPIFNYLEHDIDVCLTHPKYVKAIKGKKTDKKDSKWIADLYKFDLVRCSFIPPKDFRQLRELSRYRFKLVCMKSSEKNRIQNCMTVSNVGIASVLSDPFGKTATEIISYLLEHTADSMDEKAVRKLIKKGAKSKSDEIIEAIKGYTIETDQAKKLELARGHLEYLDDMITQTEVELYVRIKPYYEFVEFVSTMPGMTELSSTIVLAETGVDMSIFDDAKHLCSWCGLSPANNESAGKKKSVRIAKAGDYLKPMMVQCALAAIKSKKQPYFAIKYGRIKKRRGHKKAIIAIARMMIVCIYHMISEKKPFSPTDYEELMDPQNHVERVVLTENNVFAYLESLGYDSSKLVKRNDN

SEQ ID NO: 407738 - protein, 343 aa, unidentified
MYYIGLDVHKKTISYCVKDAAGCVHREGKIGATRRELDAWIRTLPQPRLMAMEATIFTGWIYDHLLPHAESVKVAHPLMLRAIAAAKKKNDRIDAAKIADCLRCDFLPECHMVSTEIRDRRRVLRYRNLVVKQMVQMKNRVSGLLMETGVSYNKQQLHKVGYFGELMSTNEEINDAVRPLLNLSRGMIRRSQKLEYDLVSSLERDPLLRERLRRLRTVPGVGSITALTWALEIGDYTRFRSNKQAISYCGLCADERSSADKVMRMPLSKQRNKHIQRVLIEAAKLAPRESPELAMIRARELERGNPNRATLAVARKMVCYMLAVERRKQDFVPAGEVVLAAAV

SEQ ID NO: 407739 - protein, 476 aa, unidentified
MNSKTKRANNQVNSVMNIQEQREMVEKANRILNEMKSYTWRDFETQGKFSKNDKLSFISDDMLIVGCDIGSETHYVRAIDARGRELSKKVLAFENDAEGFWKAHDWAVQLAAANDKKQIVLGLEPTGHYWFCLAAWMVSNGISVVQVNPYAVKQTKELEDNSQQKDDRKDPKLIANLVKDGNYGMPYLPEKVYAELRRLSMFREQLTEDRNRSMNRLHREMKIYFPEYKDAFGKIDGAFCMAVLKEAPFPEDILKLGGEGIREIWHQAKLRGRGYSRAAEIVKYAETSIGLKDGTAAGREAVRWFAEKIMELDEELAEIENKLNEKCREIPHAENVLEIPGIGGKILSGILAEMGDISRFDDAKELQKLSGLGLVSCSSGKHKGETRISHRGRKRLRYWLFQAARSAVAHGEEYKWIHAHYTTRAGNALQKMQSLIVIACKLLRVIYTMLKTGKPYDPEKLLKDIRYPENVQTAAA

SEQ ID NO: 407740 - protein, 318 aa, unidentified
MYYIAFDVSKKVLCGFDGEKELAFDNKKGLKAFKSYLKKKYKDLNDLVIVFEATGVYSNYLKAFCADNNLKVYIINPKRSSNFSKAIGNRFKTDKIDTKKTIYEYRKIIGPEDIKVPKIDKVAQTLSTYLASYKFTVKKRVSISNHLEALERNTSSLELVALLKGELKRTKKTEEKIKAKIEEYIKKDSQLKEDYKRQMTIPGVGKVSAICLLTLFNKYKDTNQAQITALVGLDPTKRESGTSVKGKMKISKNGDRMIRGTLYFPLLSAIRFNKKIKALYDRLLANHKPKQVALIAAMRKLILISHAIYKNKTVYSAV

SEQ ID NO: 407741 - protein, 345 aa, unidentified
MNENSSRNISMGTHWVGADVAKSTFDAALVRCNQHYPDTPLREIPACTFERSSKGVQAFLSWLDAQGLEDTDVRVVMEATGNYSTELAVWMLSQRQTLRPAIANPRHTSAFIKSMGLRNKTDRLEARALGFYGVERRPLAYEAPSPEQAELRALSRYRDSLVRQRTALKNQMKETCGSTFVQKNQAKRLRLLTRDIERVEEQMKALVAQHEDLNRDIELLMSIYGVAFINATTVLAELGDLRRFTLARQLSAFAGMSPRHRQSGTSIHGRSRLCKQGNSRVRQCLYLSALAAIRGNNQLRDTYQRLLAQGKPRMVALGAIMRKLLTLMRAILISGKRYQPLGITR

SEQ ID NO: 407742 - protein, 343 aa, unidentified
MKLSRVGVDLAKNVYQLHGVDRHGKVVWKRRLHRGQWLQALLDKTEPGCEIGMEACTGAHHWARELQSRGYTVRLIAPQFVKPYVKSNKNDANDAEAICEAMSRPHMRFVTVKSVEQQDIQATHRVRTELKDHRNAKANQIRGLVAEYGLVAPQTLLALRRAIPEWLEDAENGLTDSFRCLLHGLWDDLLSLDDRLKELDKEIEKLARSNDVTKRLQQLRGVGPLVATALVATVGTGKQFSKGRQMAAALGLTPRQNSSGDKHRLFGISKRGDVYLRTLLIHGARAVVSQAKHRDDPLSRWATDIAKRRHPNVAAVALANKTARMAWAMLQNETDYDPALAVG

SEQ ID NO: 407743 - protein, 363 aa, unidentified
MNNIRFIGLDVHKHSISVAVADGGRSGTVEYLGEIDNDPVAIGKLCERLRRSGKTLSFCYEAGPCGYGILRQIQGLGHRCDVVAPSLIPRKPGDRVKTDRRDATMLARLHRAGELTAVWAPDADHEAMRDLIRLRGVVRQVVTRARQNLQGFLLRHGRKHGRGTAWRMAFRRWLSTLAFEHPAQQIAFQDYVDAVTDGERRLKGVEEQILKLLPAWNLCPVVDALQAIRGIALVTAVVLVAEVGDFTRFANPRQLMAYFGLVPGERSSGETTRRGGITKTGNSHARRALVEGALAYRMKPRVGRHKVDRIEPCQKRFATSPGRRRSAFAPVTVSLLRAAKPPTSSLSPSRVRWWASSGPSDAG

SEQ ID NO: 407744 - protein, 398 aa, unidentified
MTESSDYESVQIFIGVDVGKDTHHAVAINRSGKRLFDKALPNDENKLRSLISDLKQHGQILLVVDQPATIGALPVAVARSEGVLVGYLPGLAMRRIADLHAGEAKTDARDAAIIAEAARTLPHALRTLKLADEQIAELSMLCGFDDDLAAQTTQASNRIRGLLTQIHPALERVLGPRLEHPAVLDLLQRYPSPEKLASLGEKKLAAQLCKLAPRLGKRLAADIAQALAEQTVVVPGTNAAAVVLPRLALQLITLRKQRDEVALEVEQRVLAHPLYPVLTSMPGVGVRTAARLLTEVACRAFASAAHLAAYAGLAPVTRRSGSSIRGEHPSRRGNKALKRALFLSAFAALRDPLSRAYYTRKMSQGKRHNQALIALARRRCDVLFAMMRDGTFYTPQGS

SEQ ID NO: 407745 - protein, 350 aa, unidentified
MSDGISNRQYVGVDLHLHRSVIVRIDERGRQLDCVQIDNDPKALVREVRKAGRGAPVAIEAAYGWYWAVDALQAARFEVHLAHPHGMKAMRKRKRVKTDARDAYELANLLRLGSLPEGYIAPAGLRELRELVRHRRQLIKTATSVKSQIRALLAKHGVRLAVTHLESPAGQDLLDAVQLAECAAGRLEARRRLMLLLTNEIDALDVEIDRRLKHHQGYRNLLKVKGIGPVLAAIFVVEIGDITRFNTAEQLACWAGITPRHYASDKTVRRGHVSKEGCALVRWATVEAVQRQCEPAVAKVRDDLLARRGRQARNIAKVAAGRKMLEVVFYVLRDGQARCLSAAPDQPKAA

SEQ ID NO: 407746 - protein, 373 aa, unidentified
MAVGKKRGKAKDCKMNSIVAGIDLGDRESLATVLSPIGDVADRFTFPMNEEGYAFFASRVPKDARVAFESTIMAYAISRALRMHGYSDITVAHPKELTWIVRSKKKNDRVDSLKIAKLHMVGMLPESHLLSREQQIVRDLLVQRVKLGVEIGRLKNSVIGYLKREGVYDSLPKTRDNFSLKRRRAIRSLRFHDERDLVLVTMTDRLHFLEKQCTPLEDSVRKNARVSDDVKILMTITGVDYYLASLISSFIGDVERFPSDDHLASFFGIIPTSRDSADVKRRGRMSKDGSSIARWALSIMVDTVMRHNEPIREYYASVKKRTGSGKLAHVSTMRKLTRMTYHMLKTRQHWKWENPRLTERKMTRLEMGGGDVS

SEQ ID NO: 407747 - protein, 389 aa, unidentified
MEARTVNNLPPAGTHDDAVCCILAIELSKKSWIVAVNTPLSDKISRHTLKPGDGKELLGLCERIRTRVARETKKRVEMVSCYEAGYDGFWLHRLLQTHDIRNHVIDPASLQVDRRARRAKTDRVDAERLLRSLMAYLRGEPKVWSVVRVPSVAEEDDRRLHRERGRLINERIQHVNRIKGLLAIHGIYDYQPLRRDRIQRLEQLHTADGRTLPPRLEAEILRELQRLEIVIGMIKTIEAKRDAIASANTETERGSAKKIQHLAKIKSIGPEFATTLVGEVFYRSFDNRKQVASYVGLTPAHFQSGAMSRDQGISKAGNAKARTVMIELAWLWLRHQPDSDLSAWFRDRVGKLKGRIRRITIVAVARKLLIALWRYLETGLVPKGAALKV

SEQ ID NO: 407748 - protein, 353 aa, unidentified
MNSIDYIGFDIHKKTISFCAKAQDGRILDEGIIPARRTDLSAWAKRRSRPWWGAMEATLFTGWVYDHLKPLAQELKVAHPAMLKAIAASKKKNDKVDARKIADLLRCDLLPECYMAPSATRELRRVLRYRNLVVRQATRMKNRIAGLLMETGTLYNKERLHGKAYFSELLGSLREIPASVIELLKLSRAQLEFFATIQKRLVKGLRADAGLRERVQRLQSIRGVGEILALTWALEIGEVKRFPSIADAVSYCGLTSAQHNSAGKEQRGPISKQRNKHLQTILIEAAKLAPRYNPQLAAVHEGELKGGHRNQATLAVARKLVAYLMAVDKSGKPFQVRASAAGEEVSKDEQPVG

SEQ ID NO: 407749 - protein, 346 aa, unidentified
MCYSTTVGVDLAKNVIQISVVSPRGKELLNRSFTRRKFAEFLGKQKPSLVAFESCASAHYWARAAKRHGHEARIIPAKSVAPFRQGHKTDSNDALAVAEAARRPNIKDAPMKTAEQQGLQAIQRSRELLIGECTALSNHLRGILLEFGVAIPQGFASLLKALPEILEDGENELPHLYRPTLHRMHQRLLELRQDIESMTREVDGLVKQHPVCKRLTAIEGIGPIGALSLYAVMGSGKAFTRSREFSAYLGLTPRQYSSGGKTNIVGISKKVGNRRLRSILIQGARAYVYRMKEPRSLKDRWLKDLIERAGPNRAAVALANKNVRTAWAMVTQGTDYQRRLQLEMAA

SEQ ID NO: 407750 - protein, 346 aa, unidentified
MEYIALDVHKNYTWARVENGKGDRLYESRLAHVHGSIKNFVNRWTGGSPVAVETVGNWYWVVDEIEAGGGTPQLVNARLAKLMMGNVNKSDKLDCKGMNRLQRTGTLPTVWIPPSSVRDVRELPRTRMVLSRQRTQLKNRVHATLGKYGYTVQGASDAFGKKGRKIVEELLLKLPPHTQQALRLILNELDHVRDNLKEIEGQMIEVFSPCPQTHWLTSLPGVGNILAVVIWSEIGTIERFNRAEQLASYSGLVSRESSTGGKIRLGPVRRDVNVYLKWAFVEAANSSLLNAERCGYGHISRLYQRIKPRRGHGKAKVAVARHLSEASFWMLKKGEPYREPVSSTQR

SEQ ID NO: 407751 - protein, 429 aa, unidentified
MTMSRRCIGLDVHRDFAQVAIWQGGVVTQEGRFATTPEEVRAFANSLAPTDEVALEATGNTWAIASLLASCAARVVVSNPAKTRAIAEAKIKTDKVDAAILAELLAADFLPAVWMPDEQTAALRRQVQRRGHIVRQRTRLKNQVQAILHRNLVVRCPAADLFGIKGRRWLAEQELPADERATATALLRQLDFHADELALIDKDLAQVALRREDVRRLMTIPGVDATVALSIVAAVGDFTRFRTPERLVSYFGLNPRVRQSGNQPAAHGRITKSGPGYARGMLVEAAFSASKAPGPLRAFYERVRARRGIQVAIVATARKLTVLCWHLMIKGEDYAFAMPSLVAHKQRKLELHAGLPPARGRKGTAAPYSLKQVRAAERDLATQSELAYRTMVANWRPTAPTRKTPTRAAAPIGSGRGRQHRDTTLTPAG

SEQ ID NO: 407752 - protein, 315 aa, unidentified
MTTKAEVHVGIDVSKDRLDLAVLEGKRIEQYANTAGGIKELVKEMMKLEPAIIVVEVTGGYERAVVNALFEAGLPVARVSGYRARQYARAKGLLAKTDELDALNLADYGKHVQLRLFEAKSEQGQWLSGKLARRRQLGEMVKAEKNRLRLVYGDTGPSIERVIEFLQGELKQLDEEIRAYVDNDAQWLEQEQLLRSVKAVGPVTAVTLLAELPELGKLDRKEIASLVGLAPINQDSGKRSRYRKTGKGRPSVRSVLYMSVLTGIRYNPVIKKHYDGLVARGKVKKVALIACMRKLLTILNAMMRDQQPFREVVRA

SEQ ID NO: 407753 - protein, 348 aa, unidentified
MQQELTTVAIDLAKKVFHLVGVDTTGTILWRKRLTRHALMPFLAQLPPVRIGMEACGGAHYWARRFREQGHEVKLMAPQFVKPFVKSNKNDMRDAEAIAEAVTRPTMRFVPPKDITQQDIQALHRVRERLIGERTALVNEVHGLLHEYGIVLPKGMAKFCQAVGVKLVSDTDKLTTCGQEMFRKLLEEFASLEEQIAYYQEKLESLAATHPECQRLMTIPGIGPITATALLAAVGDVGVFKNGRQFAAWLGLVPKQHSTGGQTRLLGISKRGDRYLRKLLIHGARATLRWVKLKTDARSQWIRGLLGRRGWNRTAVAVANKNARIVWAILRRGGVYRANVSASGEQAP

SEQ ID NO: 407754 - protein, 443 aa, unidentified
MCATCESGGGKHETVRSMVSASSAYPRNGTTMTGKIAGIDVHKRVLMVAVEEETGEGEKEGFGLRRFGTTVAELEHLRAWLQNQGVEEIVMESTAQYWKPVWFTLEGQFRLFLAQAWSNRAPRGRKTDFKDAQRLARRHRAGELTLSFVPDEVQRQMRSLTRRRFQLTRDRVRIQNQVESLLEETRIKLSSVVSDLFGGSGLRILEALSQGQCDPHALASLADARVQCGEEVLREALAANLGPMHRSLLQQHLEMLRLVETQIEQTAGLMAESMRSQVSEIERLTAIPGIRVLAAQQLIAEIGPRAAAFASAPQFCSWGGLAPGRNESAGHNSSSRCPKGNSFLRRTLCQIAQAAVRTKNSSFEQKFRRLLPRLGYPKAIWAIARSIAVVVWKILHDGVTYIERGTPSTPGAIKRRVQRLRKELRALGYSDDLKPLAPEAIVS

SEQ ID NO: 407755 - protein, 398 aa, unidentified
MSRIWAGTDCGKTHHHCLVLDAEGDTLLSRRVANDEPELLELIGDVLDIADGGRVTWAMDMTGGEPALLIELLIAHGQELVYIPGVVVNRATDSYRGEGKTDARDAKVIADQARMRRDLLPIRPGDEAAIELRLLTEHRSDLVEDRTRTLNRLKSLLNSMFPALERALDMGTVGALVLLTGYQSPAAIRRTGKRRLTTWLRNRKVYRAEALAAKAVEAAERQHTAVAGERAIAKMVHTLAREVMALNEKITETDKLIEGRFREHELANVITSMPGIGTTLGAELLAATGGSMDAFPTPDRLAAFAGVAPAPRDSGQVSGNLHRPKRYHRRLQRVFYTSALVSIRCDPNSRRFYDRKRAEGKRHVQAVLALARRRVNVLWALIRDRRCYTVTPPVTHAA

SEQ ID NO: 407756 - protein, 342 aa, unidentified
MYYIGLDVHKKTISYCVKDASGRICQEGKVGATRWELDIWIKTLPQPWTVAMEATIFTGWIYDHLKPHAAEVKVAHPLMLRAIAAAKKKNDSIDAGKIADCLRCDFLPECHMATTEIRERRRTLRYRHLLVRQMVQMKNRVSGLLMETGVSHNKQRLHKVGYFPELLANADAVSASIRPLLQLSRESITRLQRTEGAIIRSLQRDPLLAERVRRLQTIPGVGKVTALSWALEMGEISRFRSIRQAISYCGLCGDEKRSADKVARTPISKQRNKYIQRVLVEAAKLAPRRNPDLALVYENARQKVNANCATLAVARKLVAYLMAVDREQRDFEPVRGIAGIAA

SEQ ID NO: 407757 - protein, 397 aa, unidentified
MSLDAHEEAAAIQTHISAIFISLELSRSRWLVTSLVPGGGQRMSRHWVEAGDLAGLLARFWAIREKASARTGISYPIIVIQEAGLDGFWIHRALEQEGIESHVVDAASIAVSRRRRRAKTDRIDGEALLRVLLAFKRGEPRVCSMARAPTPDAEDRRRICRERKTLLAERIRHVNRIKGLLFSQGIGDYEPLRGDRRRALEAVRTGDGRALGAHMKAQIGRELDRLELLLGQIAAVEGERDAMLAREVEAARDAERTPPTAVEMLMDVKCLGPDTVALLWTEAFYRSFDNRRQVAAFVGLAGTPWQSGSIDNEQGVSKGGNQRLRTAMIQLAWLWPRHQPGSALARWFVERTKGASKSHKKKMVVALARKLLVALWRYVDAGVVIEGAVLKSAAKAS

SEQ ID NO: 407758 - protein, 323 aa, unidentified
MIYFGIDISKLTFDVVVLNNNQISNFKYDNNSKGSKAFIKKKSSFDDKIICCMEATGIYGLSLAKAIYKSNHNVIVANPVKTHGFAKIQMLRNKTDRADAQSIAQFCKHLDDQGQIESSLFKPKSECYERLQYMFTRLQQLKKQHNQETNRLEASIDKICQKSIKAMIKFIEKQMNAIENEIHDCIQLDKELNTQVELLTSIKGIGSNTAWAILAYLGDINLFKNSRQVTSFAGLNPRIEQSGTSINKSQLSKMGHRRLRRALFMPSVVACHHNIVAMDLYQRMLKKGKPKKVAITAVMRKLLVIAYGVLKSQTKFDPNYQAR

SEQ ID NO: 407759 - protein, 338 aa, unidentified
MNIVFPGIDLAKNVFQICGLNQAGKPVYTKRTGRKELLQTLANIPACLIGIEASTGAFYWQHEFEKLGHKVKVISPQYVKPFVRGQKNDGNDAQAIAVALMQPTMQFVPPKSPEQQDVQALHRARQRIVNHRTATVCQIRGLLLDRGIPIGSAVSRARRAIPLILEDAENGLSSRMRRTIAELYDLFNDLGRRIHFFDKEIETVFRQSEACQRIAKVKGIGPETATAVVAAISKGTEFKNGRHFAAWLGLVPRQHSSGDRQVLMNMTKKGDKHLRTLFIHGARAVVRVATNNNDGHMNQWVNQLKERRGFNKTTVAVANKNARIIWSMLRNDTGYQVV

SEQ ID NO: 407760 - protein, 331 aa, unidentified
MKACKTAAVFGVDIGKNIFHVVGVDVGGKPVFCGKFRRDGLLKFFVNTPPVTIGMESCPGSQWLARKLQGMGHTAKIIPAQFVKPFVKSNKNDTVDAEAIAEALTRPTMRFVQLRNPEQISVQALHRVRDRFMRQRTGLINQIRGFLLEFGISIRQGASVFKLDFPRILEDTENELPHSLRCLLADLWNDLKGLEIRIEEITLAIQRTVQSSDTARRLITVPGIGPLAASALEAAAGRGQHFKNGRFFAAWLGLVPRQYSTGGEPTLLAISKRGNTYLRRLLIHGARSCVQTCDRGKHPLGAGLPSSNNECIATKLSLHWPTKSLEWPGKF

SEQ ID NO: 407761 - protein, 284 aa, unidentified
MLTERTPAPATRFVALDVHRQYLMVGAVDSQQHVVLSPRRFGFAAFAEWAHVHLTHADAVVLEATSNAWLLYDQLQPLVSEVVVAHPQAVKLIAAARVKTDSRDTIKLASRLSANLIPAVWVPPQEVRELRALVTHRNRLVHQRTQAENRLHSVLHRHNFDPPPGTPFAVHQREWWLTLDLSLAEKLRVQQNLSLYQTLETLIQEIEAELGRLSTCDPWVNQVPFLVQLPGLGVLSALRILAAMGEITRFPSAKHLVGYAGEGGQRSPVGGDQSRGAHHQGGAQ

SEQ ID NO: 407762 - protein, 328 aa, unidentified
MDHFAGLDVSVKETSVCIVDDTGKIVREVKVASEPKALLAVLKNPAYRFKRIGLEAGPLSQWLFSALAEAELAVVCVETRHMQAVLKAQINKTDRNDARGIAQMMRVGLYRPVHVKTLRSQKLRMLLTHRKLLQSKAIAIENDLRGTLRNFGLKVGMIGKVKFEARINELVESLPDLAGLVEPLLVVRRALREQIVVLHRRLLAIVRDDEVCRRLMTTPGVGPVVALTYRATVDVPARFHKSKAVGAVFGLTCSKYQSGEIDRSGRISRCGDQMMRVMLYEAAQRHVAFEEMVLAQGVGNADRQAPRDEEGDRGAGPSIGRDHASHLG

SEQ ID NO: 407763 - protein, 442 aa, unidentified
MHISFRCKIAYSRQKPRKEMVMRKADTRKVKFVRDDTLIVAIDVGMEMNHGYCTTPDGKDIKPFKFDNTRDGMDKLWGMVMASKNRFQCEEIIVGYESTGPYGEPLVHYLMKKPVMLVQINPMHTKRVKEISDNSPLKTDDKDPRVIADIIKLGRTLSIVIPEGDAAYLRRLNNSRERHVKERTALVNQLQQLVFLLFPEFKKVLKNIKCRTPLYLLKKYPTPESISVLETPVLGEEMRKKSRGKFREHHADMLINLAKNTVGIREGVAGISMDIRHILVQLEMLKSLIAEIENEMEIALGRIPYSSKLLSIKGLGIVSVAGIIGEIGDFKKFQTQGEIMKLAGLDLYEISSGKMKGQRRISKRGRSLLRKILYYAAIQTIRKNGILYDYYTRLTDRGMKRMMALVAVSRKLLGIIYAIVRDDSEYLVNFESIKRQVIKKAA

SEQ ID NO: 407764 - protein, 406 aa, unidentified
MKVLYERCCGVDVHKKSITACTITPEGKEIRTFGTMTDELLEFVNWLKEKGVTHVAMESTSVYWKPLYNLLELEQIETLVVNARHIKAVPGRKTDMRDAEWIANLLRHGLLKGSYIPDRAQRELRELVRYRRSLIEERARELNRIQKVLEGANIKLSSVVSDINGASARKMIRALIEGKNDPMIIAQLAKGKLKQKVEELQRALHGVIGPHQRMMLAEQWRHVEYLDEAIARLDQEIEERTRPFEEALELLDTIPGVGRQSAEQILAEIGTDMSRFASASHLASWAGMAPGNYESAGKRLSSRTRKGNKKLRACLVECARAAARKKDTYLSAKYHRIAARRGANRASMAVGRTILEIIYYLLTRKEPYKELGADYWDRQREAKIVRQTVKKLEGLGYEVKLEKVGA

SEQ ID NO: 407765 - protein, 357 aa, unidentified
MSAITPHDVPVLEVVGGVDTHQDTHTAAVIDAVGRVLGTEQFPATPAGYAALLAWMHPFGRLLRIGIAGAGAYGAGLARVLDDKGVEIVEVDRPDRRTRRFQGKSDPIDAVQAAKTALAGQRTGTPKQRVGHIEALRNLRVARRSAVDQRADTQRQIKALIITAPDDLRGQLRHLPTKQLIAACAAFEPNRDDAATSATATKIALRSLARRHQQLSTEIIDLDELLEPLVTAINPTLMAVHGVGPDTAGQLLVTAGDNHDRLTSEAAFAMLCGVAPIPASSGKTTRHRLNRGGDRQANAALYRIALVRLRWDPRTRTYMDRRTQDGLSKKEIIRCLKRYIARELYQIITKNDHERPA

SEQ ID NO: 407766 - protein, 346 aa, unidentified
MLYAGLDLSRKRLDFHLLDGEGTTVELGAAPPDADGLLGLTRRLDRHREPIRAAIESMNGARFVHDRLELAGWQVEIADAQKVKGLAPLACKTDRIDAWVLAELARRDLVPAIWLPDPLVRAERERARWRLHLVRHRSSLKQRVHAVLLTHGKPCPVSDLFGVRGRQLLARLGLPEPWQGTIEASLRLIDQLEREISDCERELRRLGADHRYVPLLCTVPGISWVLAYTIAAEIGDVSRFASPRKLAGYSGLCPRVYQSGERDLRGPLSKQGPRYLRWALVEAATHACTAAVYRDRYQQTKARIGKQRGAKVAQIDLARRLSEAIWHMLSRGEPFAPKGATDPLAA

SEQ ID NO: 407767 - protein, 343 aa, unidentified
MQVITTIGLDIAKSVFQVHCVDAEGRVVLRRQLKRRYVLAFFQKLPPCLVGIEACASSHHWSRKLQAIGHTVRLMPPAYVKPYVKRQKNDATDAEAICEAVTRPNMRFVATKTPEQQSCLTLHRTRHLLIRQQTSVINAIRSHLAEFGIVAPVGRNGVDQLLGIVADLADKRLPEVARICVAALGAQLRMLKAQILEFDRMIRAWHRSSEISRRLDAIPGVGPALATALVASVADPKAFRSGRDFSAWIGLVPKQNSSGGKDKLGSISKQGDRYLRSLFTTGALAVIRYAKIHGTKHRPWLTALLARRPTKVAAIALANKIARMAWAMMARGERYKEPVALAT

SEQ ID NO: 407768 - protein, 388 aa, unidentified
MNITTDQPEAPTAIRTDLGAIFVSLELSRASWLITSLSPGGGEKMSKHAVRGGDVSRLLERFLQLREKARARTGKVFPLIVIQEAGLDGFWIDRVLQNEGIESHVVDPASIATSRRRRRAKTDKIDGETLVRSLLAYKRGEPRVCSMVKAPTPEEEDQRRLCRERKVLTAERVLHVNRIKGLLFCQGICGYEPLRRDRRDRLEELQTGDGRPLPPHLKAQVERELDRLELLLKQIKTVEGERDALLAVAITSMPAPAAMLLDIKGIGPEFAAVLWSEGLFRHFDNRRQVAAYAGLAPTPWQSGAIDREQGVSKAGNPRLRTTLIQLAWLWLRNQPQSALTIWFHERVLRNGGRLRKTTIVALARKLLVALWKYVTTGVVIEGATMKAA

SEQ ID NO: 407769 - protein, 315 aa, unidentified
MQKLLNIGVDVAKDAVVVGCDEQGSASRSVPNQRTALTAWLTSLPSGSRIGMEATGCYHELLADLAYQSGHTVFVLNPKDTRHYAQAVGLRAKTDRVDALLIARLIAHEHARLHPYHPATCAQRQLGRLLRRRAQLVKLKGALKQSMRGMTGLVRDTSALVERMDALIAKLEQRMDALIASMPGTREDRRRLETIDGVGAVVSAALIEPLTRLPFSSSDAFVAFAGLDPRPRDSGHKVGKRRLSKRGPAELRRLLFNAAMAATRTHVWKPIYEHYRARGLPTTAALVIIARKIARIAWSIHRYHTNFDPQRLKTT

SEQ ID NO: 407770 - protein, 421 aa, unidentified
MSHNLIVAIDIGSLTNSVNLMDHNGNSLYELKKLSNNLPGISNLWKVATTLLKEYNLDGIDFVMESSGPYWFGSYWWLKNQCSTLQSSSVTALNSQIVSGFKGKFSHKKQKNDQKDAKTIGDRFRFGNFDPVYVPQGDVLALRFLTRYRLSLVQKLVASKGFFLGYLFFKMNEYSRYSRKGNKQKQKLFSNTFGAASTALITKYPSAEDLAAAPLDELISLIKDASRGLIKDASEKATFAHKIAHDSYPLPEELKEPIHFILQETLSLIEFLQKQIQRVDKKIEPIMAFFDDPIRTIPGIGPVFAAGIMAEAGDLSRFRGHPQVASYFGIIPSMNDSGEFKSSMNHMTKTGNSYGRYYLIEAANAVRKFNPVFRNYFQKKFAETTPKRFKRALGLTARKLIRVYYAMKIKNCEFNKSLLPT

SEQ ID NO: 407771 - protein, 388 aa, unidentified
MDVLYQSCAGMDVHQATLVVCILHGPLTSTRPKREMAQFDTTTKGLKACHDFLSQFHVEAVGMESTGVYWRPVWHELCDDFELILAQPAHMKAIPGQKTDKKDAHWIAQLTRIGLLPRSFVPDETIQELRELTRQRKHYVESRNRETNRIHKILQSGGIKLTTYIEDIMGASGRNLLQLLIDETPLTPRMIHQSVYTSLKRKVPQLLEALDGYFSAHHRFMLGQSLEIYDFYQKQIDCLEERMNGYLNLYDRPVEILDSIPGIDLITASVIIAEIGVDMSQFPTAGHLASWAGLCPGNNESAGKKRSTKIRHGNSYLKRCLCQTVFAAKKQKGSPLAERYYQIQSRRGPQKATIALAHQLLKIAYILLKENLTYQEFVLQKRLLETSQ

SEQ ID NO: 407772 - protein, 347 aa, unidentified
MRFYTNQHPFYCGIDLHARSMYVCILRHDGEILLHRNMKAAPEPLLKAIAPYREGLVVAVECMFTWYWLADLCAQEGIAFVLGHALYMKAIHGGKAKNDKIDSQKIAVLLRGGMLPQAYVYPAQMRATRDLLRRRTHLMRKRAELLAHVQNTNSQYNLPEIGKKIAYKANRDGVADRFADPAVHKSIEIDLALITYYDQLLNDVELSIVKAAKNHDAHTLYLLQTVPGIGKILSLVLLYEIHDIARFPTVQDFVSYCRLVKCAKESAGKRLGTSGKKIGNAHLKWAFSEAAALFLRNNPAGQHYVARLEKKHGQGKALTLLAHKLARAVYYMLKRKTAFDMEQFLHG

SEQ ID NO: 407773 - protein, 356 aa, unidentified
MRYGKYHGGTESLNLGKGGYMGKYIGMDAHMSTCTFCVMDESGTELDNATIRTNGRLIINYLRGMKGKKSLAFEECELSNWLYEITKDEVDELIVCNPVANKEYKKKKTDKLDARKLAKLLRGNFLTPVYHDGSKRERFRGLMSGYQDLVNDTVRFKNRYKSLFRRSGINVKGESIYRDRDSLKSLERPDFRFIGIQLHYLLERMNESLTIYQGQIERSKNHFKEIKNLMSIPGIGSIQAAKIVSQVINPERFPDKYKYFAYCGLVRHKKESGGRRYGNEKIWGNRTLKCVYKMAGHQALKGTSALRKYYEHLLSKGASDKKAYNAVCRKIAAISLSIWRNNTRYDDSIILNNLIK

SEQ ID NO: 407774 - protein, 412 aa, unidentified
MSIALPNQQFVGKPYKILHNSMDSLTAAVSKIKEAEELYSLESRIFLESTGIYHYPLFCYLRDKGFNVSVINPIITKNSTNINIRKVHNDRFDSKKAALVGLKPDLKVSLMPSDLALNCRNLCREYYDLMDNRSAYVNKLQGELRMAFPQYLGIFSKVTVNTSLTLLETYTSPAAFIEADRQEIIDAIKSTALFGLTYALNKYNAIIQAANEANEFGYIIDSNIKRIRLYIGFIRKYDEEIKGILGSMHELVDANEATDFVKQIHLIETFKGAGFLSAVSLMGEIGDFSAFPKPKQLFAYFGLDPAVKQSGKFEGTKTQMSKRGSAIARRVVHTLALQSIGTSRTGEAKNPVLRDYYLKKCESKPKLVAMGAVSHKVCNMIFAILRDNKPFEIITPQEHIKKHNAAKCDIAA

SEQ ID NO: 407775 - protein, 360 aa, unidentified
MPIAVADGRPTHLWDTKPVGEPGSPSAVPLNPNSRQGRLRRQSPLRQGWDQMETIVGIDVSKDRLDVAVLPQGEAFAVDNDDAGIGELTGRLKAIGADAIALEATGGFEMQAVAGLSSAGLTVLVVNPAQVRAYANAIGRKAKTDPIDAAVIAAFVLATKPEIRPLRDAETQALSELVARRRQIVQMIVAEENRLRMVLARQAQKSIKRLLAALRRELDSLDADLDDHIRKSPIWRVRESLLVSVPGVGPTTARTLLAELPELGSLDRRQIASLAGLAPWTRQSGKWKGKSFIGGGRGKVRAVLFMAALVASRHNPGLKEFRDRLVAAGKPKIVALVATMRKLLTILNAIIRDAKPWQNA

SEQ ID NO: 407776 - protein, 394 aa, unidentified
MILVGIDIGKNQHTFSIIDKNTGEILSNPSFFPNNREGFLFLIKKLNTYSKSDLLIGMEDTGHYHFALLKHLLDSRYTVALINPTTTDLTRKLQGGITKNDPLDSLTICDVIGSNQHNKPYRITKVNRFDLYEQKQLTRHHHNLKEELNTYKNRLQKCIDIVFPEFNSLFRSKYGIVYMNVLKTFSSAEKIANSDIRTIRKCFEYNKRGKRISLSAEQLKAAAKTSIGMPSVAEEIQIRHLVCQIEMIEEQLSEIDKKIEEFSLQNNSPILSIPGISHFSGTSILAELGDICNYTKAAQIIKFAGVAPYHYESSQFNAQHTAITKKGSRYLRKTLYQIIFPVIYHNKVFNVYYNKKLAEGKGHRCAQGHCVRKLLRIIYHLLSTGQIFDPALLR

SEQ ID NO: 407777 - protein, 409 aa, unidentified
MRVDSQANDSRSTLTQRYSLILFYLLESEQNVRNYASRIIQNIQPGEKTKGDSSLYSFILKTKVMKLLKQVLGVDVAQKELVVTLGRMYDDFKIELYAHNVFKNTENGILKLSEWVNKLTDKAIKVRYVMEATGVYHQKFAYYLEEKQEDVSIVLPNKISNYMRTLDTKTITDKTCSEAIARFGLERNLENWKKPKDIYRVLKQLTRERRQITDERTIVKNQLHAEEAEAMPHPASIERLKKRIVFLNTLEKEIKNEIQNSVKEHKELMIDITNICTIPGISILTAATVIGETNGFELIRSKKQLTSYAGLDVKEKQSGTSVKGKPRISKKGNRYLRSALHLPALSSIKWDDNFRDQYARIVAKHGIKMKGCVAVQRKLLELIYVIYKTKMGYDKDYESKKNSVLAQKA

SEQ ID NO: 407778 - protein, 417 aa, unidentified
MTKSNDREILSIVNPVCCGLDVHKAKISACLITIDDAGKQHYEIREYSTFTCELLKLREWLRENSCPVVAMESTGVYWRPIHNVLEGHMEVILVNARHVKNLPGRKTDISDSKWLASLLRMGLLKGSYIPGKEIRQCRELVILKKKYTESLGDYKRRVHKVFETANIKIDSVVSDLFGVTGRNLINLLCTHEKITRTEVEECVRGSLKEKVAELYQSIQGFFESHHCFEIKLLMKTIGHLEATIMEISQQLDTMTKSHKELLDHLDEIPGVDKGGAQSIISFVGTTMKEFKSDSHLVSWGGLCPGNNESAGKRKSGRSPVVKNPFKTHMIELSWAAIRKKGSYYRDKYYRLKARRGAKKAIVAIANRITRAIYHIIKYGISYVELGENYLSQRKKKTSLNYLQKKAKLYGFQLIPYE

SEQ ID NO: 407779 - protein, 387 aa, unidentified
MPQHNDLSRSLLTLDQGSTLITVIEMSQSSWLVAAIVPGIARHPLKKINPDETALLGLLRRWQDEAAKAGRTIKRVAVAFEAGRDGFWLARWLRARGIEAYVIHPTSIPVSREHRRAKTDRLDTELLKRAFLGWLRGEPDHCSMAAIPTLDEEDAKRPSRERETLVSERTRLVNRIKGTLVRLGIRGFHPTLRTAPERLEAVRTPEGAALPPNTLAELRRDMARLRFVRDQIKEIEQTRIERLEQAPAAGPQAMVCLLARVIGVGIETADMLVHEILSRNLRDRRALARYAGLTGSPDESGAKRRERGLAQVGNARVRRGMLQLAWRFLLFQKESALAQWYRARTADARGGTRKTMIVALARKLLIALWRLVTTGEAAQGLALRPVT

SEQ ID NO: 407780 - protein, 372 aa, unidentified
MGWLPSAPNGIGMCQDGGVNSHWMERTATVTKTIMIGVDLAKNVIQLHAARMTGEVEYRKQLSREKFRRFMAEQPPAVVVMEACGSANYWARELSRVGHTVKLIAPHYVRPFVKRQKNDAADAEAIVIAAQRPEMRFVAAKSEDQQGRAMLFRTRTRLVHQRTELINMLRAFLYEFGHAVPQGVQQCQRIEAIVKEANSDLPEIVRSECLEILDQITGMTARIKRSDERIRALAAQTDTARRLQTMPGVGPMTALAVDAFAPPMESFKSGRDFAAWLGLVPRQHSSGGKARHGRISKAGQADIRRLLIIGAMSRLNWMGRKSIIAGSWLANLSARKPRMLVAIALANKMGRGVWAMLTRQENFRDPMAATVA

SEQ ID NO: 407781 - protein, 343 aa, unidentified
MQAITTIGLDIAKSVFQVHAVDAKGNVVLRRQIKRRYVLAFFQKLPPCLVGIEACASAHHWSRQLQALGHTVRLMPPAYVTPYVKRHKNDAIDAEAICEAVTRPNMRFVATKTREQQSCLTLHRTRHLLIRQQTSVINAIRAHLAEFGIVAPVGRNGVDQLLGIVADASDKRLPELARACVAALGTQLGTLKAQILQFDRLIMAWHRSSEASRRLDDIPGVGPALATALVATVADPRAFRSGRNFSAWIGLVPKQHSSGGKNRLGSISKRGDRYLRFLFVAGALAVIRYAKIHGTKHRPWLTALLARRHTKVAAIALANKIARMTWAIMAKGEHYKEPVALAA

SEQ ID NO: 407782 - protein, 358 aa, unidentified
MSEITRVGVDLAKNVIQVHAVDAAGKVLTNKALQREKFILWCAMLPAGCLIAMEASSSAHHWARQLVGLGLDARIMAAHLVAPYRLQGKSGKNDANDAAAICEAASRPMMRFVAIKTQAQQGILCVHRLREGFKEERTACINRIRGLLAEFGLVFAQSVGVLRTVLSSVLEDASNDLAGLARLAIERAQLQWAQLDAHIAWCDERINAHVKQDKNVSAAMQLVGVGPVTASAVVATVGDFKQFKDGSQFGAWLGLTPKQNSSGGKNNLGSITKRGDMYLRMLLIQGARSAVFSAHRRDDPISKWAHQLQQKSGWQKAVVALANKNARILWAIFARGKPFDAHHVSVKPGLVLAAMSPA

SEQ ID NO: 407783 - protein, 350 aa, unidentified
MIIIGCDYHPGFQQIAFVDTDTGDYGEQRLEHSEGAEKFYRDLAAQGKKVRVGMEASGQARWFERLLAELNFELWIGDATEIARKRERKQKTDRQDAQHILQLLMENRFPKIWVPSGENRDLRQLLWHRHRMVQMRTRIMNQLQAVALNEGLRCKKRLWRQHGREQLESFRLAPWASRRREDLLQLLDRLNPTITDLTQVIEQEVEKCPEARRLRTHPGVGALTALAFVLIIGRTERFQCGKQIAAYLGLVPLEDSSGNRRRLGHITKQGSSIVRFLLVEAAQVTARSIPEWRSKYFHLAMRRGAKIAKVAMARRLAIALYWMWRKGWDYEQLRKFGSHAGQPGNRDGVK

SEQ ID NO: 407784 - protein, 317 aa, unidentified
MQTYIGVDISKNDFLACFNEMDKPIRFVNNNLGLTKFFNHLKINSYAKEETIIGVESTGAYSLPLAIVGARKKYIVKIINPIVTKSYLGSSIRKVKTDKADARVIRACLIDGAGAEFKDTAEETVFKNLIRQRYFLVKLKTELTLKQQDITLKEECLKMPISNINSELKEIIEKKIIYLEQQLSACLPEQQALLQTIPGVGKITAMTFATEIGDITKFSSPKKLVGFVGIDSKIRQSGTSLNIKGHISKRGNRIIRKTLYAAALTAIQRPSLFRDFYQKKLSEGKAKNVCIVAVMRKMIHVIYAVLKRQSPFVEKEA

SEQ ID NO: 407785 - protein, 410 aa, unidentified
MKKHNYRTKKVNEINWPELGQQLGGQAVTFAVDVAKAQQFALLTNNEQSISILVKWDVFETIHLIHELKQLNSPITVVMESTGTYGDAMRHQFRQAGFALYQASAKRVHDAKEIFDGVPSLHDAKAACLIAKLHREGLTKPWHELDEAARALNAARREYDLHQSHYERNQNRLEAYLSRHWPEALALFDLDSVTLEKLLIAYGSPQAIAADAEQAARHMQAWGGHFLSMDKIARVIDSVGATLGQPCIDAERRYLQALATEMQHSRCQRQTAKQLLEASVVADAGLKEMAAVIGKLTTAILIGLHLDPRNFSSAHSYQKALGLNLTEKSSGQYHGQLKLSKRGSATARKYLYLAALRLIQKDPVIGQWYQAKADPKVKMKTVIACLRKLAKALWHVARGERFDARKLVTL

SEQ ID NO: 407786 - protein, 333 aa, unidentified
MINQYDHYIAVDWAQTNMAIARMTKSSEKIDVRDVPASVKELKVYLKSLKGQKALTIEESSTSQWLYIELKDCVDELIICDPYRNFLLSEGTKNDKIDATKLVKLLRGNLLKPVFHSADDMIYLRKIVSAYDDLVKMGVRLKNQRAALFISRGLDKKKDSLERVEEKFIVDGIDQSIQVYEDEKKRYEKEFSRLSRQHQALRDLKSLPGIGEVHALKIASMVVDANRFPTKGHFLSYCGLIKLDQSTGGKSFGKRQPRCCRLLKNVFKTAALSATQDHVNNPMRDLYLILQNEKRYPEFKARHMIARRLAILAYGILKTGKKYDTERRILQAA

SEQ ID NO: 407787 - protein, 346 aa, unidentified
MQQYVAFDVSKQSSEAVIVDEAGNRLVTRKVRTDPSAMAAFVATYGANVALVGFEAGPLSTWLYHELKGAGLPVVCIDSWRARAALSARLNKTDRTDAAGLADLLRAGFHHEVHVKSYAAHEVRTMLKARDSLVAQRRTLQNTIRGLLETFGLVLGKGAGRRFAVLVEDALGSRPSLRPAIEPLLRVWHAARETAAAMHRRLRAMARADADCRRLMTTPGVGPINALAFTSAIDDPSRFHDSRAVGAYFGLTPRRYQSGKSDHAGKISRAGDGFMRSLLFEAAQCLAFRSSRAPALKAWFEALAARVGRKKALVALTRKLAVILHAMLVHERDFDETLQATAAAAA

SEQ ID NO: 407788 - protein, 430 aa, unidentified
MAFVHCKLILGVLSMNAAGIDVSSRKSTVAVLRPFGEVVRVPFEVSHTAEGLASLVRQLKAIDGETRVVMEHTGRYYEAVANVLHEAGFFVSAVNPLLIKEYGGNSLRRVKTDKADAVKIARYALDNWAELRDYTPMDRIRYDLKTLNRQFHLASKQKTATSNNLIALLEQSFPGIHKCFDSPVRRDGTQKWVDFVHTFWHADCVRKRSLAAFTERYRKWCKRHGYNFKQSTVQEVYNLAKSAVVLVPKHDLTKVLVQEAANQLTIISKSVETYRAEMDRLASQLPEYPVVMGMYGVGDSLGPQLMAEIGDVRRFERKQSLVAFAGIDPMPNQSGEKNVRSNKASKRGSPYLRKALFNVMTCYLQKAPADEPVFQFLNRKRTEGKPYYVYMTAGANKFLRRYYGKVMEYLSTLENLPPVDLDSTGLLKHQ

SEQ ID NO: 407789 - protein, 372 aa, unidentified
MTSIIYVGMDVHTTNYTLCCYSMEDDRFFAEVQVEPDAKNILKYLARIEKQQSRGCRIVCGYEAGCLGYSLYHQLHAHGIDCVILAPTTMMTKPGKRIKTDRRDARLISKCLAFHTYSPVYIPTEVDDAVKEYIRMRDDANSALARVKQQIIAFCIRHGKIHDGKSYWTNKHLEWLSSLDLGNKILSEVLQEYLIRYYQLREQVDMYDMRINELAQAEPYRQKVEKLGCFRGIAAHTALSFCVEVGDFRRFATAQQFASYLGLVPGECSSGDKQQYTGITKAGNSHLRKLLVETAQVFGRSATKSGKSVALKERQAKCDSLTVAYADKANARLKKKYFKIAMRSRVNIAKTAVAREMACFIWGMMTDNISCA

SEQ ID NO: 407790 - protein, 368 aa, unidentified
MKQVTTYVGIDAHKKDLFVAMLAGAEKTPVTWQLANEPQAVRRLVRKLERESPGPVQVFYEAGPCGYALQRQVTTARVSCDVVAPALIPRKPGDRVKTNRRDARKLVELGRAGLLTAVQPPTPEDEAVRDLARARDDAREDLQRCRHRLGKLLLRRGLHFSGRNWTRAHRQWIDSLEWTHAAERAVVDDYLLAIDHTEARLLELDARLSEVAATEPYWEPVGWLRCFRGIDTLTAMLILAELHDFRRFASAPALMAYLGLVPGEDSSGEKHRRGRITRTGNALVRRLLVETAWHYQHRPSVGVALTRRRKGQPGRVIAIADKAQQRLCRRFRKLAAEHKPPPKIAVAIARELAGFLWAALQPAPVSVP

SEQ ID NO: 407791 - protein, 320 aa, unidentified
MTILDSQAVVGVDVAKNEIVAYRQDSDQSVAIANEGRALKKWLKTLPAGSSIALEATNIYHLETVELAYSMGHRVFIVDPGKLNKYRDSLGQRAKTDASDARLLARYLSKEEDRLRLWSPPPAVYTRLKQLLHRRAALVRMRVSFKQSWGSDPSLKKELDATLASFDTLDQSLQNLMKETLGEAGLTPQIKRCEAIEGVGFLTATGFLTAFMRGEFENSDAYIAFLGLDLRVRDSGNKHGRRRLTKKGDPEIRRLGHNAAMTASRSATWKPFYEANLARGKAKTQALVILTRKLARVAFSLMKNQTDYIPNSMSGGSPQT

SEQ ID NO: 407792 - protein, 319 aa, unidentified
MAQNGLVVAGIDIAKDKADVSVRALSQRQTFSSTAEGRRQLITWLRKHKVTKAVMEASGGYEREWAKALREKDIEVRVVDPKRVRHFAQSAGRLAKNDVIDADTIAWFAETFGETPSQAHDAARETLRQLVNARQGLLDIRTVLSNKGEHDVPEPVQKSHARLLKAIAVELAKLEAAITAMIKATPHFAERAEIIESVPGIAGTTSAGLIAAMPELGQVSNEAISALLGVAPYDDDSGKRRGERQIKGGRRKVRNLFYMACLGAATLHNPALKAFYRRLIAKGKKAKVALVACMRKLIVILNTMIARGEKWDASRYPVS

SEQ ID NO: 407793 - protein, 349 aa, unidentified
MGIIGGLDVHRSQITYDWIDSDTGQGQRGQLAPAHREHLREWLGRFAGHPTAFALEGCTGWRYVVEELQRAGIQAHLAEPADTSAARGPKRRAKTDQLDARHLRELLAAGRLPESWIPPVHVLEVGTQVRLYKALGDDHTAWLQRVQATLFHHGVPAERRLLAPDRRQRLERGSGLSPAGHQLLTVTLGTLDHLDGELDLLRGELTRFARQQPGCQALDALYGIGPVTAVAIWAELGDVRRFTSSRHVVRHTGLDVTVYSSDGKRTPGHLARQGPPVLRWALFEAATCAARASSPDHAYYTQVKDRLGGNRATLAVARKLARRCYHTLRALGEQAYAPPADPQPVGQVA

SEQ ID NO: 407794 - protein, 351 aa, unidentified
MDHIGIDVHKRESQIYILAEGGEVFEQRIRTEPERFAAVLGARPRARIVIEASTDSEWVARCLEALGHEVIVADPNFAPMYATRTRKVKTDRRDARALAEACLLGAYRPAHRLSDPQRHVRGRLLVRDAVVRTRTRYISVIRTLLRQQGYRVPSGSAESFIHRVHDLPLPGRLLSVVAPLLAIMRPLNAQLTYSDATIEHLAVQDPRVPRLRSVPGVGPVTAAAFIAAIDDAQRFRHAHQLEAYLGLVPCEYSSGETQRRGSITKAGHSHTRWLLIQVAVSILRRRPPLAEDLWTWALRIAARRGKQVAVVALARRRAGILYALLRDGSVFEPQRGRHPRHPAAAAAPVGM

SEQ ID NO: 407795 - protein, 470 aa, unidentified
MSLKEAPVKRQHRSPRPRSSPAALDRLHPDAAGIDCGATEHFVAVPPDRDATSVRAFPTFTGDLQRLADWLTACRITHVAMEATGVYWIPIFDILEARGFQVILVNARHVKNLPGRKSDVSDCEWLRDLHILGLLRGSFRPADGILALRGLLRHRATLIESLSAVVQRMQKALIQMNLQLPLVVADITGVTGLRIVRAIVAGHRDPVQLAQHRDYRCRASEADIVAALTGHYRTEHLFALQQHLELFDVYHRQLAASDGAIEAQLTRLTATVPPVASALPPARRTRPPRANEPRLDLRTPLHHLTGVDLSQIDGIGPYNALRLLSEIGTDMRRWPTAQHFTAWLTLAPQNKISGGRLLSSRTPASANRAAAILRLAAMNLSRTQTALGAFYRRLAFRIGKPKAVTATARKLAILVYRTLKDRLVYADPGAAAYDALHRTHVVRRLRQKAQLLGFQLVDLSTGELLKGAVS

SEQ ID NO: 407796 - protein, 421 aa, unidentified
MKELRARSIRMVKEGTLIATVDIGITNNTGYCTTLDGRSTKSFRFDNTKEGFEKFWYMTVASKNRFGCDEVLVGYESTGPYAEPLVHYLANKQVKIVQVNPMHTKKMKEVNDNSPLKTDDKDPRVIADIIRLGRALSIVVPEGDAAYLRRLNNARERHVGEQTALLNQLQQLVFLIFPEFKTVLKNMKGKTAQHILERYTIPGRIGTLSKEVLGEEMRKRSMGKFGIKEAESLIGLARETVGIKEGLAGIFMDIRHILMQLEAEVRFISEIEAEMRATLERIPYSVRLLSIKGLGTVSVAGLIGEVGDFSKFSTQSEIMKLAGLDLYEISSGKRKGQRRISKRGRSLLRKILFYAAIQMIRKNGIMYDYYARLTGRGMERMRALIAVSRKLLRIIHAIVRDNRDYVRQYQALERRVIKMAA

SEQ ID NO: 407797 - protein, 343 aa, unidentified
MYYIGLDVHKKTISYCVKDAAGHVHSEGKIGSTRRELDAWVRTLPQPRMMAMEATIFTGWIYDHLLPHAEKVKVAHPLMLRAIAAAKRKNDKIDAGKIADCLRCDFLPECHMAPTAIRDRRRVLRYRNLVIKQSVQMKNRVSGLLMETGVSYNKQRLHKVGYFSDLLSHNEEVSDSIRPLLKICREQIERSRKLDYALVSKLERDPLLKDRLERLRTVPGVGSITALTWALEIGDFTRFASIKEAISYCGLCGEENSSADKVMRMPLSRQRNKHIQSVLIESAKLATRYSHELAMVYDKERLRGNPNRATLAVARKLVAYMLAVERRKQNFVPAEEFRATAAA

SEQ ID NO: 407798 - protein, 351 aa, unidentified
MAVADIGGEVRYMGEIVNTPEAIAKVVTRLKRSTGRLAFCYEAGPCGYAICRQLRELKQDCQVIAPSLIPKKPGERVKTDRRDALSLARLHRAGELSPVWIPDEAQEALRDLTRAREDMKHLQRQAKQRLLSFLSRHGHRYNGRSRWTQAHWRWLEGMKFARPEQQIVLQEYIDTVQACGRRVASLDREVETAAHASPVWPVIEALMALRDISLLAAVTVVAELGDLARFADAPQLMAYLGLVPSEHSSGKRERRGGITKTGNGHVRRILIEAAWTYRHAARKTAILQRRAERTPPEVQEIAWSAQKRLCQRFRNLMARGKLKNQVCTAIARELVGFIWAIGQHVIPLSRA

SEQ ID NO: 407799 - protein, 403 aa, unidentified
MYSSFVGIDIGKWNHQAAFLEVSGKETARSIAFQNTSEGFQSLSESLAPFDKGQTVIGLEATGHYWLALFSFLVDNGWTVKVINPMQSDALRNMNIRKAKTDRKDCVVIADVLRFGRYTETVLPDEDLLQLRELSRCRVAHVELLGDLKRRVLGILDRIFPEFASCFSTVFGAAPTELLQECTDPEELADYDVDKLIKLLEKESRGRHSREKAEELKAKASRSVGTRFGRDALKFELKMLLEQLDFIKGQVKEFDKFLKKLMKNHELIYTIPGISVTLGSAILGEIGDVKRFGTPQQLQAFAGMDPSVTQSGNFQGTQGKMSKRGSPYLRRAVYLAANAARRFDPVFKEFYDRMIARGKHPKQALAAVGTKLLRVIHAVMTSQKPYNPQKLLPPAARISQVTP

SEQ ID NO: 407800 - protein, 364 aa, unidentified
MFTERTSVGLDVHARSVAAAAIDGATGAVIQSRLTPSFDHIMSWLAERVGPVAVAYEAGPTGFGLYRQLRAAGIRCEVAAPSKLQRPAGDRVKTDARDALHLARLLRLDDIVSVAVPTIEQEAARDLVRAREDCRGDLTRARHRLSKLLLRHGIVYYGGAAWTGKHDAWLRHEALPQLTGQATRQTFDSDYETVLAVKARRERLDTAIEQLAAGSEFSPLVRRLGCLRGISTLTGFALAVEIGDWTRFTGATIGSFVGLTPAEYSSGSSRTLGPITKTGNSHVRRLLVEAAWHHRASYRPGKTMHDRWALASAAAQARGDQGNRRLHQRWVSFLDRRKRDTIANVAVARELAGWCWSLATLEQP

SEQ ID NO: 407801 - protein, 344 aa, unidentified
MDISVLGVDLGKNVCSVVGLDASGAVVMRRKVRRETLIALAEKLSPCVVGMEACCGAHHLGRVFAAHGHDVRLMSPEYVRPYIKAQKNDDRDAEGIAEAVTRPTMRFVELKSQDQLDMQTLHRSRDRLVGERTALINQLRAILLERGMVAPQGKRKLEQFLAVLMDEQGGAGLSPRMIVLVADARAQWAELDRRISAFDAEFVRWVKENEEARRLTTIPDVGPIVASALVAAVGRAESFDRGRDLAAWLGLVPRQFTTGGKPKLLGISKRGNKYLRRQLIHGARAALPYVAERDTPLGRWAKELMSRAHHNVAVVAFANKLARIAWAVLRRGERFAVTEMPVVS

SEQ ID NO: 407802 - protein, 342 aa, unidentified
MPITRIGLDTAKHIFQLHAVDQQEKPVLRKPLRRAQLLPFFANLPPCLIGLEACAGSHYWARELSKLGHEVRLISPQFVKPYVKGNKNDANDAEAICEAVGRPSMRFVPVKTTEQQDILLVHRVRQGLVKERTALANRTRGLLGEYGMIIGQGLNQVRRRLPEILEDAEQRLSGPTRAVFADLYAQLQVLDAQIATYDAKLQALHHASADSQRLAAIPGVGPVTATAMLAALGNGQAFADGRQVAAWLGLVPRQASSGGKAQLLGISKRGDAYLRTLLIHGARSRVQAATRKDDADSRWINALVERRNKNIAAVAVANKHARTIWALLTRGEHYRPALAAAA

SEQ ID NO: 407803 - protein, 443 aa, unidentified
MKSLIQTLTATAAIDLGATFHMAALNPELSEAPIQEFGVDTGSLRQMAAWLLSHNVGHLAIEATGVYWMPVYEVLESFGLRVMLVDGRKSMSLPGRTKTDVLDAAWLEKLLRHGMLSPAFVPEADLIALRTYRRLRGQYVEKASCEIQRMQKALQQMNVRLDRAVTDVTGVTGMAIIRAIVSGERNPRKLASFRKHGVKKNEQEIALALDGHFQEHYIFTLGIALSEYDHLMERLRQIDEKIETELARLSAQSAPKEDYVATKAKARRKNQPFFDLRSYLTSLVGSAVLNIPGVDASTVLTVIGECGLDMSCWPTENNFVSWLGLCPMHRITGGKVKRSKSKRVRNDAATAFRLAAQSLSRSSSALGCMLGRISRRRGMPKAITALARMLAILYYRAVRYQKPYEDIGKDAYEERYRQQTLRRISKTAEKLGFQLVPVNLNAA

SEQ ID NO: 407804 - protein, 429 aa, unidentified
MNSTQNKKIEQVKETTMIVGIDVGSEKHYFRAFNWRGIELTRKPVVFSNSMEGFNSFYNSVVELMQKNELKEALVGIEPTGHYWFDLGQFMGEKNIKFVMVNPHHVHKTKELDDNSPSKNDRKDPRVIAGLVRDGRYFYSYMPTGVYAELRNASNRRFVLVEEQTRAKNRLQKWVAVYFPEYKGIYTHIDAKGGLLVLKQAPTLEEIVRLGVEGIIKIWKDAKLRGNGHKKAMLILNAAKKSIGLKAGLTEARMEIQDLIEDYELQTKRLERVNDLIKELCQQVRYADKLLEIKGIGITTVAGFIAEVGDITRFDSTKELQKLAGLELVADSSGKHDGKTKISKRGRKRLRYLLFEAAISVVGKNEEFKEIHRYYTTREKNPLKKMQSLIAVACKLIRVFHVILTKGISYDASKMLKDIRRPGEQLKAA

SEQ ID NO: 407805 - protein, 414 aa, unidentified
MDIIYTSCCGLDVHKRTIQACVRRMDKSGKIHHEVRTFSTMTGDILALADWLGAQEVTHVAMESTGVYWKPVYNILEGDFTILLVNARHVKNVPGRKTDVKDCQWLAQLLQCGLLKGSFIPDRPQRELRDLTRHRSQLVAERTAVANRIHKVLEDTNIKLGSVATDILGTSGREMIRALIAGEKDAEKLADLARKRLREKIPELRLALQGHITDHHRFVLGELMDHIEYLERQIDRFSARIEEICQPFRKAIEAVAQMPGFEKRSAENVIAEIGINMGQFPSAGHLASWAGMCPGNNKSGEKSKSSKTTKGSRWLRCALTQAAWAATHKKGSYFQAKYRRLVGRRGKKRALVAIGHSMLVAIYHILKFQVEYQDLGSDFFDKLNSEKLVKHHVNKLKSLGYNVTLTEPQQQEAA

SEQ ID NO: 407806 - protein, 331 aa, unidentified
MFPVGIDVSKNTLDLCMLYDGIKGRIKTRNIQNNRHSVENILRWLRLQHCGPEDVHVVMEATGVYHERLATELHDAGFRVSLANPHRSRKFARGMGIMTKTDKVDAYMLACYAFLKKPHRWEPPAPEIRYLGALLRRRDVLLGDALREENWLEKYLSTDTPADIISSCRRMAQLLREEVSNIERQIKAHIKACPALRRDYTLLTSIKSVGPQLGMHMLVVLRSHNFASAEQAAAFLGVVPIEKRSGTSVRSRPRMSKIGPPQLRAKLYMSALCGKIYNKRMRNIYDEICLRGKPKMVAIGALMRKLVHWCYGVLKTGTVFNDESLKQVLST

SEQ ID NO: 407807 - protein, 326 aa, unidentified
MEHELHYIGIDTAKEKLDVDVLRPDGRHRTKKFANTTKGHDELVSWLKGHKIDHAHICIEATGTYMEPVAECLYDAGYIVSVINPALGKAFAQSEGLRNKTDTVDARMLAEFCRQKRPAAWEAPPPLERALRALVVRHQALTDMHTQELNRTETAREVQRPSIDAHLLWLEAELKRLEKQIKDLTDDDPDMKHRRKLLESIPGIGEKTSAVLLAYIGLKDRFAHARQFAAFAGLTPRRYESGSSVRGASRMSKAGHVSLRRALYMPAMVATSKTEWGRAFRDRLAANGKKGKGILGAMMRKLAQVAYGVLKSGVPFDASRHNPVAA

SEQ ID NO: 407808 - protein, 400 aa, unidentified
MNTEYDVWLGLDVGKTNHHGCGLGPAGERVFDHELPQDEGKLRDVITTLQDGHGRVLVIVDQPNTIGALPVAVARDCGADIAYLPGLAMRKAADLYPGQAKTDARDAFIIADTARTMPHTLRSVDRESDVLANLKVLAGTDEDLAHDITRAINRLRSLLLQIHPALERVFKGTVLTRNIVLDLLIRYRGPAGLRAAGKSGVKRWARNHTRKDPSALIDVIFDALAEQTVTVPGSEASESVVPRHAARIKALKAERKEIEAEAEELADSLPLLQVLTSMPGVGVKTASQILLAAGDFSAFRTPGHLAAYAGIAPVTRRSGTSIRGEFPSRAGNKRLKNALFHSAWVASCHDPLSKAYYDRKRAEGKRHNAAVMCLARRRLNVLFAMVKHGVFYEARTPVAA

SEQ ID NO: 407809 - protein, 365 aa, unidentified
MWEAPVRNYRTSVGLDVHARSVVACGLDQDTGEVFQRRLCPDHREILDWLQSLPGRVAVTYEAGPTGFGLARFLLAAGVLCLVAAPSKLVRPAGDRVKTDGRDAAHLARLLHLGQIVEVAVPTVTQEAARDLVRAREDCRGDLMSARHRLSKLLLRQGIVYCGGQAWTGKHEMWLRAQRFDNPALRLAYEAALDAMVACVHRRDRLDEAITTMAADSEFTPVVARLGCLRGVSTLTAFGLAVEIGDWHRLTGRSIGAYVGLVPTESSSGATRVQGGITKTGNGHARRLLVEAAWHHRAPYRPSRDLRRRWDAATLTARDRAHAANHRLHARWAGFDQRKKRPVVANTAIARELAGWCWSLAVMPD

SEQ ID NO: 407810 - protein, 385 aa, unidentified
MEVLYDRVAGLDIGKASLTVSVRTPGARRGRHQETRTFKTTTGSLVVMRDWLLEQGVTIAAMESTSTYWKPPFYCLEEVMEVWLLNAAHMKAVPGRKTDVRDAEWIALLLEHGLLTPSFVPPPEVRRLRMLTRYRIQLHGDRTREIVRLELMLEDASIKLSTVASSLKTVSARAILGAMIDGETDPRVLAEMAKGKMRRKIPDLAQALEGHFDAHHARLARSILDRLDRVEHAMVELDEAIEAACVPWAHQIELLQTIPGVGPKVAQVIIAETGGDMSKFPTAAHLASWAGLAPAIYESAGKRTPAGRRRGNRWLSAMLVEAAGSVGRMHDKNYLAVQHSRLTRRRGMSRAQIAVAHSILTTAYYMLKRDEPYRDLGPDWLAGQA

SEQ ID NO: 407811 - protein, 343 aa, unidentified
MDYFAGLDVSVKDTSICIVDDTGRITREVKVASEPDALLAVLMNASHRFKRIGLEAGPLSQWLFSALAEAGLPVICVETRHMRAVLKAQINKTDRNDARGIAQMMRVGLYRPVHVKTLRSQKLRMLLTHRKLLQSKAIAIENDLRATLRNFGLKVGMVGTARFEARIKELVENVADLVVLVEPLLVVRRVLREQIGALHRRLLAIVRDDEVCRRLMTVPGVGPVVALTYRATVDVPARFRKSKSVGAVFGLTCSRDQSGERDRPGAISRCGDEMMRAMLYEAAQAMLLRSAKWSWLKAWAMQIARRRGMKRAIVALARRLAVIMHRIWADGTEFRWTREAAVA

SEQ ID NO: 407812 - protein, 423 aa, unidentified
MKTYLLKTSPAVEPKARRQPARHTQSSPTSLDRVSSRGSQPSSPPPPPDLFIGLDVHNDSIAVSLAPSGSTEVRRYGILGGTHDDVLKLAKKLQAAHPGVALKFCYEAGPRGYPLCRFLRAHGHGCILVAPSKIPRQPGGRVKTDRRDADQLARLYRAGELTAIHVPDPQDEAVRDLIRARYQVQKQQHRARQQLKMFLLRHHLRYAGKTAWTPAHLRYLATIKMPFAEQQFLFQEMVNVITEAGQRLARYDQQLPGVVEGWRWQPVVKALMSLRGVALLNAATLVAELGDLERFATARQLMSYLGLVPSEDTTGEDRQQGGITKMGNGIARRALIEAAWHYRAPARITAHLQARQEGLPKAVTDTAWAAQTRLHQRYQHLVGAGRKKSPVAAAALGRELAGFVWAIGRMVKPRPAPSSPPSV

SEQ ID NO: 407813 - protein, 373 aa, unidentified
MSQNVIYVGIDVDDVRYHVSALDQSTGEVLDFHCRATLRGLVQRLEKVREYFGAEQLKVCYEASYVGFSLQRDLADRGYCCDVVAPSSIPRRGGKSVKTDRIDATELAEFYAKELLTIVAAPDAQIEQDRDLLRSRQQLIHQQGDLRRHIQSLLRRNGIHYQAETERKTHWRTHHYGWLEETIDRCSGSLKVNLSLLLRQLKGLNETLAAYDEEVEALASTSRYRESVQALTCYKGIKHLFALTMITEIGDVKRFAHPRQLASWMGMDIREYASGGKSNRFGITRQGNRYLRTAFIEANQRGYRSARLGKDLKARRSTIEREYIAVADRCLRRLNRKGNRLLLAGKHPNKVKVACAREMVGFVWESLNLAAAA

SEQ ID NO: 407814 - protein, 346 aa, unidentified
MLYIGIDTHRSFSYCTILNDEGQTIFGGKVPHSDELYEELFLKEFQEEKIAVVEAGYNWGTVYEMLTSIGIETKVGHPANIKAIASAKIKTDKRDSQTLAYLLKADLIPEIYVPPKENRELKCVLRERQFLVKQKTKAKNKINNLLVRNRVFPENFSDIFGKAGRNYIDSLKLGDKSGFLLQHYLKELDEKEKEVKNFEKYLKQNLKESEDIKFLQTIPGIGEITSTLISLEIHTIERFPTAKQFSSYCGLVPTVHSSGQKKVMGHLIPHCNKYLKTALIESCWIAKANSTYFAYHYNRLLKKKNKKVAICAVARKMSTVIFHMLKERRGFIDKIPKNMYKRNIER

SEQ ID NO: 407815 - protein, 437 aa, unidentified
MGRVIVGVDPHKKSVTIEAVDEHGTVLARGRFGTDTAGYRLLVKHVREQWPHHRWAVEGAQGVGRPLAQRLLAQGETVLDVPAKLAARVRVFDTGNARKTDATDAHAIAMVALRTPRLRQLRYDEELIALRLLTDRRDELSHRRVQTVNRLQRLLTELIPGGAKRDLSALQAKRLLATVRPRTLVGKTMRRMAAEEITDLVAVDAKLKAIKKELRAAVTDRGSHLMDLFGVGPAGAARILCDVGDVARFPDRNHFASWTGTAPLDASSGEQIRHRLSRAGNRRMNHVIHIAAIVQIRHDTAGRAYYRRKIAAGKTPMEALRCLKRRLSDAVYRRLVSDATQAAGDVEASPGGHSGASSQSSAADLSTPVIGSSDQPLPGPADPTLPATAVPANPHAATTPSPPRRRAGAVKVERPTGRTTLTATSDDAHFRASRPRP

SEQ ID NO: 407816 - protein, 349 aa, unidentified
MQTQKNELNFNGQNIYVGIDVHLKSWTVTIRSEHLEHKRFSPPPNAEALHNYLTRNFPGATYYSVYESGFCGFWVHRQLEALGIHNIVVNAADVPTKQKEKVQKDDPVDSRKLARSLSAGELDAIYVPSESTLEERVLVRMRSTLVKDMTRFKNRIKSFLNFFGISYPERFNSSGSYWSKNFIKWLKEEVKLSQPCGQYVLNMQIQEVEEQRKLLLLTNRQIKALSETEKYASNVELLRSIPGIGLTVAMTILTEIETIERFENSDQFAGFVGLVPGRRNSGETNKNGEMTFRGQAKLKTVIIESSWTSARRDPALFLAYNNYVKRMESNICNTKKGDGTNTISLLVTA

SEQ ID NO: 407817 - protein, 341 aa, unidentified
MIYLGMDVSSKSFVVHAMNEKKKVVFEGEIEPSRLGLKRLIGKLGKETKLVVFEAGNQLKWIALTLKKMEGVEVHVVHPNEIKWINESSGKTDKIDAKKLAQLARGDMLPRKVHIVEGKIRELRELISARDTLQSKRIALINSLRGYMKQEGYRLPIKFFQRVDWAGTLAKLKVGQIQKVIIENFMKAIEHLKAAEGELTERVVEIQDERIALVETIPGVGKLTSRVLVSAIDTADRFENKKRVAKYGAVTPRIYQSGGVTHLGRISRNGRHEVRRVLLQCAHTIARMKSYEAYPLKAFFERIKRRRGKKIAIVAVARKLLTIAYGVLKTKVAYNPARLAV

SEQ ID NO: 407818 - protein, 348 aa, unidentified
MMIIGCDYHPSWQQICWLDTLTGETGEKKLEHASGEAERFYRQLPAPALVGMESTGNCQWFVEMAAALGHDVWIGDAAKIRAAEVRQQKHDRRDAALILKLLLEGRFPRIWTPSGEEKDLRQLLIHRYKLVRIRAQVKTELQHLAMNQGITKKRKLWSKAGEKVLRELPLKHWASRRREDLFRIREMLNGQIDLLDQAVVEAAEKNEKARLLMTQPGVGPITSMAFVLTMGDVSRFQRGKQVASYLGLIPREYSSGGHRRYGSISKQGNRFMRMLLVEAAQGAVRCDPGMRSEYLHRCHRKAKGVAKVAAARKLAIRLYWMLRTNTGYPEVVRVESSSRVPVVVRHGG

SEQ ID NO: 407819 - protein, 386 aa, unidentified
MQTVADRSEAPTAIRTDLGAIFVSLELSRSTWLITSLSPAGGEKMSKHVVRGGDVAGLLERFAQLREKTRARTGKVFPFVVIQEAGLDGFWIDRVLQNEAIESHVVDPASIATSRRRRRAKTDRIDGEALVRALLAYKRGEPRVCAMVKAPTPKEEDRRRLCRERKVLIAERVRHVNRVKGLLFSQGISGYEPQRRDRRERLDTLQTGDGRLLPDHLKAQVRRELDRLELLLDQIKAVEAERDVLLAAQQAPAPAAMLLDIKGIGPEFAAILWSEGLFRHFDNRRQVASYAGLAPTPWQSGSVDREQGVSKAGNPRLRTTLIQLAWLWLRHQPQSALALWFEERVRRNGGRLKKKTIVALARKLLIALWKYVTAGVLIEGAVMKAA

SEQ ID NO: 407820 - protein, 429 aa, unidentified
MNCTQNKKIEQVKETTMIVGIDVGSEKHYFRAFNWRGIELTRKPVLFSNSMEGFNSFYNMIVELMQENKLEEAMVGIEPTGHYWFDLGQFMGGKNIKFVMVNPHHVHKTKELDDNSPSKNDRKDPRIIAGLVKDGRYFYSYMPTGVYAELRNASNRRFVLVEEQTRTKNRLQKWIAVYFPEYKGIYTHIDAKGGLMVLKQAPTPEEITKLGEEGIIKIWKDAKLRENGHKKAMKILNAAMRSIGLKAGLTEARMEMQDLIEDYELQTKRLERVNDLIKELCRQVRYADKLLEIKGIGITTVAGFIAEVGDITRFDSTKGLQKLAGLELVADSSGKHNGRTKISKRGRKRLRYLLFEAAISVVGKNEEFKEIHRYYTTREKNPLKKMQSLIAVACKLIRVFHVILTKGVSYDASKMLEDIRHPKEQLKAA

SEQ ID NO: 407821 - protein, 398 aa, unidentified
MTESSDYESVQVFIGVDVGKDTHHAVAINRSGKRLFDKALPNDENKLRSLISDLKQHGQILLVVDQPATIGALPVAVARSEGVLVGYLPGLAMRRIADLHAGEAKTDARDAAIIAEAARTLPHALRTLKLADEQIAELSMLCGFDDDLAAQTTQASNRIRGLLTQIHPALERVLGPRLEHPAVLDLLQRYPSPEKLASLGEKKLAAQLCKLAPRLGKRLAADIAQALAEQTVVVPGTNAAAVVLPRLALQLITLRKQRDEVALEVEQRVLAHPLYPVLTSMPGVGVRTAARLLTEVACRAFASAAHLAAYAGLAPVTRRSGSSIRGEHPSRRGNKALKRALFLSAFAALRDPLSRAYYTRKMSQGKRHNQALIALARRRCDVLFAMTRDGTFYTPQGS

SEQ ID NO: 407822 - protein, 340 aa, unidentified
MEKAIMIGLDIAKNMFEVHGRNAAGEVVIRRSLKRGQVEKFFAKLPAALIGMEACGSAHHWARVLGKLGHEVRLMPPAYVKPYVKRNKSDAIDAAACWEAVGRPDMRFVRIKTVEQQAALSLHRSRDLLVSQRTQLANALRALLSEFGIVAGKGRAGLARLVDELRAGTLELPADAVIAATALADQRAALDAAADALERRIVAQAKADKNAAMLQTAPGVGPLSAHATLATMPDPALFKSGRDFAAWLGLAPRLSGTGGKTRTGAITKQGNSPLRRLLVLGATAWLRQVKARPEKASPWLRGMIARRPSKVVAVAQAARTARILWAMLSHNQPYRAPAIG

SEQ ID NO: 407823 - protein, 316 aa, unidentified
MKSSQSFVGIDVSATRLDVAVLPAGTHFTVPYTDDGIAALVHTLRDLAPQTVVLEATGGYEIPVVYAMSGASLPVVIMNPKTLRHFAKSTGKLAKTDKLDARVLAHYAQSIQPPVRPLKDPEQLELGTLMSRRRQLRDMIVMEGNRRRTSTPKIRHNIDQHLTYLRQLLKDLDREIHDFIRRTPLWHEKSAILQGVVGIGPKVSASLIADLPELGTVPRPQISALAGLAPMNRDSGKWRGKRTIQGGRPTVRQALYMAALVASRHNPVIRVFYQRLLAAGKPKKLALTACMRKLLVILNAMLKNRLHWNQQLPLAA

SEQ ID NO: 407824 - protein, 391 aa, unidentified
MKNDSSSDKQQKTVATRKKTTKAATEFGEKQLYAMTAVGGGGSGRPTIGLDLGDRSSRWCALGADGEVIGRGEVESERQELERFFGRIPKSLVALEVGSHSPWISRLLEKLGHEVVVANARRVKLISESSRKNDDVDAELLARLVRADRQLLSPVKHRGEEAQADLMAVRVRAQLVELRTQAASAARGLVKPFGQRLPSCDADSLSKAHAGHLNAAIRGHAERLLGVVEELTKQIEACDKELERIAKERYDKETTQLRQVPGVGPITALTFVLTLDDAGRFAKSRDVGCFLGLRPRSRQSGASEPEMRISKEGDGYLRTLLVQCAQYILSRRGPDSDLKRWGLLMAAKGKKKAKKRAVVAVARKLAVLLHRLWVSGEEYERRRSSAMKVAA

SEQ ID NO: 407825 - protein, 298 aa, unidentified
MFQKCRWILCLIKRLDHSASNDVDGFDVIIAELKQHSIALVLMEATGGLEAAVACSLQTQGFDVAVINPRQARDFARSMGYLAKTDRVDAAMLAQLAEVINRHPERARFLRNLPNAEREMLNTMVVHRRQLITMLTAERNRLYPSHPQSRKSISTIIGVLQDELKCINKSMEVHISTHFKTLAEILGGVKGIGAATIATLLAEVPELGHLSRREISALIGLAPFNRDSGNMRGRRTIFGGRANVRSALYMATIVATGHNPVIKQFYNRLVESGKAKKSRTGSLYTQTPDNPECDDKEK

SEQ ID NO: 407826 - protein, 412 aa, unidentified
MIHPLLVGVDVHRKTNTISAMDVSGREVTSRFTVENNRPGTAALAQELSSLAAEGGYDAILLAAEATGWYWWHFFRALDEDPNLQRTPLTLYPFNPRLTAHFKKTYADLDKADLIDAFVVADRLRLGRDLPQPFAYDEPGLRLRFLTRHRFHLVHQIVREKAYFLAHLYLKASEYTHLKPFGDVFGATSRALIQGYPSIEELAAIPFDDLVEIIDLQGKRRFADPADNARQMQAVARNSYQLPQALQVPVNLILQQSLQQIAALKRQMQRTENAIAEALQPWPHTLDTVPGLGPVFSAGVIAEIGHLARFDYDEAKVAKFAGLRWHQSQSADFQAEETPLTHSGNRYLRYYFCEGANSVRMCDAEYRAYYERKFHEVRLHQHKRAIVLTARKLVRLVVRLLTTNQPYRPRRA

SEQ ID NO: 407827 - protein, 351 aa, unidentified
MNNATARKRTQITIGLDLGDRRHTYYVLDGAGKMAREGSLGHTREQLATMARSYPGATVVMEAGTHSPWVSRFLQELGLRVIVANPRKTRAIYQNERKSDRRDAMMLARLARMDPTLLHPVEHGSQEAQQDMLQLKLRDSLVRARVALINAVRFTLKSLGYPVSNPSSERFHKLVLSEVPESIGEMIAHNVAAIAELTQRIKALDVSISRLAAERYPETIYLQQVSGVGPITSLYFVLKVGTPGRFQRTRDIGAFLGLCPRRDQSGETDKELRISKCGDQYLRGLLVNAAQYILGPFGTDSALREHGLRLAQEGTARAKKRAVVAVARKLAVLLLTLWKSREPYESFPTMA

SEQ ID NO: 407828 - protein, 404 aa, unidentified
MKGPIVSIDVSKGKSDYQAFKDLNVKYTGSRSIKHNKEGFDEIVNLVREMEKKLETEVCVVYEATGVYHRVLKKVLEDNNIKQFIINPLLSAKTRKNDSLRSPKTDKLDPKSIAKTYYSHSLHNSHKQETIYHELRELSRYYEDILVHIRKDKVAFRAQLDIVFPGYDTLYDDLYGPVALAIIEKYPHPEMLQKKKINTVSKVIQNKTCHRQAVSDTMADKAIEYSKAIYSGCDKDDIEVLILQRFIKKLNEDMAEAERTIGEMIKLAQELPDFNIIKYIPGIGDNLAARIIAELGDMTRFKKKNELVAFAGLDPRISESGQNDGDHMHITKKGNKRLRCLLYLAVTCSIRLKRDDNSIKDFYIKKKQQSNPMCSKAAKTACASKLVRIIYSMCKTGELYQYNK

SEQ ID NO: 407829 - protein, 358 aa, unidentified
MRIIGVDLHTRQQTVAMLDTETGELIKKTLKHDGDEVRKFYSALPDQVLVGIEATGSMHWFLELLEELGIEGKVGHPAKIRAAEPRKQKYDGRDAALLLKLQVENRFPSIWMPSTELRDLRTLLLHRHQWVRMRTRVQNTLQAIALGHGLRRGKTLWSQLGQHTMESLPLPPHAAHRRTELLALYGELQAQIDELDERVMNHAQQRPGARLLMTHPGVGPVTALATDVFLGDPARFEDGKAVVSYVGMIPSEYSSGGQQRLGGLSKQGSPFLRFLWCEAAVHAARRDPDLQRFYRRKLTQKGLGKARVAVARKLGIRLYIMLRDQIDYQEFCRRGQMRQKSGDACAGMPDVGHSPAIQ

SEQ ID NO: 407830 - protein, 352 aa, unidentified
MNEITTVGVDLAKDLIVACAADAAGRTQFYKRCGFHGFAAWAANLPPCTIAMEACSSAHYWARTLSALGHQVKLLAPDLVKPFRKSQAAKNDRNDAQAILITALQPEMRFVSVKSLEQQSILAVHRMREGWKRERTALINRVRGLLAEFGLWLGRSPQTLTRRLPQLMQEDQLPARVRALLAQAHGQLLQLQALMQQCELDIQAHARHSEAAQRLCALNGIGPITASAIVATVGNAADFRNGRQMAAWSGLVPKQSSSGGKERLGKITKRGDTYLRGLLTQGARSTLNAALARPLDKRSPLEHWIVALRQRVGYHKCLVAIANKHARICWALLARGERYQPDAASRHVRAAA

SEQ ID NO: 407831 - protein, 307 aa, unidentified
MDKNTQVPAVRVGVDLSKRVIQVHAVDTGGRALCNRALARDKFLAWCATLPAGCMVVMEVSSSAHHWARQLLLMGLDARIVSAHLAAPYRSEGHVGKNDANDAAAICEAASRPHMRFVPLKSVEQQSLLCVHRLREGIKADRTACINRIRGLLLEFGVAVPAGVRALRLVLDDVLEDAANEMNGLARMTLRRAQQQWRELDEHLAWCDDRLAAHERDNADVRRASALMGIGPVGASAAIATVGDFKQFKSGAQFGAWIGLTPKQHSSGGKSNLGTITKRGDAYLRTLLIQGCCGRPKTEPHLRVVPT

SEQ ID NO: 407832 - protein, 362 aa, unidentified
MAIVNSIVKNYTKIIAIDTAKNSFQVCVGRTDGEGKVKQYKFSRSKFHDGIVKLGVDGSAIVMEACATSHNWGRLFQKDGFTVLLVAPQHAKKYLKNTRMKNDANDAEAIYVCSLQHNTRFIKVKTLEDSAIASLHTNRHACVKNMVEAGNRMRGCAAELGIVVAKGHSHIKDLLAIIDSPEKMATLNIPDIAQWNLTKLAETYRHAQKMLDEVTEMIVGYGETSALIQCAMSCPGIGPITASALVAKISDGSAFDNGRQLAAFLGLVPSQNSTGGKSTLGKISKTGDRYLRALLCQCAHSIIRFSEHRTKEYKDTQLDRFVMRLKANHKAGCNIAIALANKMARIVWALLKRGVKFETKVA

SEQ ID NO: 407833 - protein, 388 aa, unidentified
MQFAADRLEAPTAIRTDLGAIFISLELSRSSWVVTSLLPGGGEKMSKHTVRGGDVAGLLKRFAQLREKAKGRTGKVFPLIVIQEAGLDGFWIDRVLQNEGIESHVVDPASIATSRRRRRAKTDGIDGEALVRALLAYKRGEPRVCSMVRLPTPEDEDRRRLCRERKVLIMERVQHVNRIKGLLFSQGVSGYEPVRCDRRERLDALQTGDGRALPLHLKAQVRRELDRLELLLAQIKAVEAERDALLAAEQTKAPVAPAMLLGVKGIGPEFAAVLWSEGLSRPFENRRQIAAYAGLAPTPWQSGSVDREQGISQSGNPRLRTTMIQFAWLWLRHQPDSALALWFHDRVKRNGGRLRKTTIVTLARKLLVALWKYVTAGVVIEGAAMKTA

SEQ ID NO: 407834 - protein, 428 aa, unidentified
MAKSKAQSVIITDDDGLYYERCAGIDVHKKLLVVCLRIGRRTESREFGTTTAEIREIVAWLTSNGCQMVAMESTGSFWKPLYNIFEQEYLPAMVCNAYHIKNVPGRKTDWNDAFWIAKCLAQGLLKPSFVPDRRQRELRDMTRFRKSQIEERSRNINRLQKFLEGANIKLGSWLSDVEGKSATQLLELIIGKPDFTIDDVKSCMHRNLKSSPEELFAALDGYIAPTQREFFSHVMDVIRTQTSQIEKTDALIKSALNEDEIKAVTALDTIVGIGTVSAEQIIAETGTDMRHFRDQHAFSNWIGVAPGNNESAGKRKSGKTIHGNKALKTTLTQCAKSAVKVKNSFFHAQYNRLVSHRGKNRATMAVAHSMAIAIFFVLQGMEFKDLGADYYTQFNREKKINSHLKQLSKLGVNFPDKILADAIERPPD

SEQ ID NO: 407835 - protein, 342 aa, unidentified
MRLYVGLDVSLKTTQICVVDEERRIVWRGSSDTQPGMIAERLERLGRSVTLVGLETGSLTPWLYHCLKAAGLPVVCIDARRAGDAVRSRPEKTDKADARSLAEMLACGWYAPVFVKNLDSHRHKALLGARDQLVRVKRQLCGQVRGLLRPFGVRISQRAGAKRFDEEARAACRTDDILYASVAALLDVLASVTAQIAALDKAVRQIVTKTKACWHMMSVPGVGPITALAFAATIEDPHRFGRARSVGAYLGLTPRRYQSDERDVTFSISRQGDDMARHYLYEAANCLLTTVGSKSALKSWGLKLARKIGPKKARTAVARKLAVLLLGLWKKESHFEPTLVEA

SEQ ID NO: 407836 - protein, 402 aa, unidentified
MNAVGIDVSKSKSVVAIMRPFGEIVSTPFEIKHTASDIHSLIELINSVEGESRIVMEHTGRYYEVLAHQLLEANLFVSAINPKLIKDFDNDSLRKVKSDKADAVKIARYTIDKWQNLKQYSVMDELRNQLKTMNRQFGFYMKHKTAMKNNLIGILDQTYPGVNTYFDSPARSDGSQKWVDFASTYWHVDCVRKMSLNAFIDHYQNWCKRKKYNFSQSKAEEIYGKAKELVPVLPKDAITKLIIKQAVDQLNSASTTVESLRTLMNETASKLPEYPVVMAMKGVGTSLGPQLMAEIGNVSRFTHKSAITAFAGVDPGVNESGTYEQKSVPTSKRGSADLRKTLFQVMDVLIKTHPQDDPVYQFLDKKRAQGKPYYVYMTAGANKFLRIYYGRVKEYLASLPES

SEQ ID NO: 407837 - protein, 389 aa, unidentified
MHVTADDCEAPAAIRVDLGAIFVSMELSKSTWLVTSLSPGGGEKMSRHSVAGGDMAALLACFEELRRKTQARTGQLYRLVVVYEAGLDGFSLHRVLDREDWIESHIVDAASIAAPRRGRRAKTDRIDGETLVRVLLAHKRGEPRVCSMVVVPSREEEDRRRLGRERKALVGERTRHTNRIKGLLFSQGIRGYEPTRRDRRRRLCELTTGDGQQLGSQLRAELDRELDRLELVLEQIKAVEAERDAFAGEAQTDRPEPVTMLLAIKGIGPEFATVLYTEGLFRHFDNRRQLASYAGLAPTPWQSGAINHEQGVSRAGNPRLRETLIQLAWLWRRHQPHSALTQWFEQRVQRNRGRSQKTAIVALARKLLVALWKYVVHGVAIDDVVMKQA

SEQ ID NO: 407838 - protein, 343 aa, unidentified
MQAVTTIGLDIAKSVFQVHGVDCNGQVVIRRQLKRRYVLAFFEKLAPCLIGIEACASSHHWSRQLLALGHDVRLMPPSYVKPYVKRQKNDATDAEAICEAVSRANMRFVPTKTPEQQSGLVLHRTRHLFIRQQTSVINAIRAHCAEFGIVAPVGRQGVEELLNVIVNANDKQIPEIARACLLALGIQLRRIKEQILEFDRMIGAWHRSCEASRRLDEIPGVGPALATALVASIADPRTFRSGRDFAAWIGLVPKQSSSGGKPRLGSISKQGDRYLRGLFTAGALAVIRYAKIHRIGHRPWLTALLARRPTKVAAIALANKIARMAWAMMARGERYREPAALAA

SEQ ID NO: 407839 - protein, 324 aa, unidentified
MNMKTVIGIDIAKKSFDVCISDNSNTFHFENSAKGFDELLNLDSVRKQQISLFVIEATGNYHRALVDVLELNGFAVAVVNPRLIKNFCRAMGIRSKTDIQDARVIREYGVRMEPPVRQKCDSELLRLKAMVSRRRQLVASRTMETNRLEAQTDQEIKSDIRRHIHWLTSEIKRIDAVLAERIGKMPMLKEKVKLLREVKGVGPVVIAGLLTQVPELGTLDRRKISALIGLCPYSRDSGNFRGKRTIWGGRSDIRSMLYMAVLSAIRYNPEIKAFYENLIARGKVFKVAITACMRKLITIINAIVRDGEKKTVGQAISIHKSCGH

SEQ ID NO: 407840 - protein, 322 aa, unidentified
MVLGIDVSKLKLAVALLLANEKYRTKTVTNNQAGFEALWSWLEQFGSLPEHVCLEATGPYGEDVATFLHDRGLVVSIVNPTRVKGYAKSEGLRTKTDKVDARLIASFCESKKEKLQHWAPAPVEHRALRDLTRRLEALKNMRIQEENRLEGKLSDLVVANLTEHIQYLDKQIRQLEKAIKDHIDRNPGLRQQCDLLVTIPGIAETTSANLISELCFDQFSTARQAAAYAGLTPSDWESGTSVKGRPRLSKIGSRRLRKALYMPAIAAIRYNPILNEFAERLERKGKKGKVIISAVMRKMIHIAFGVLKSGRPFDPKYQPSFS

SEQ ID NO: 407841 - protein, 419 aa, unidentified
MSFKILKNNCCGLDVHKTWIFACIGITDSHRRTEYKQARFSSFTKGLQELCDWLAKYNCTDVCMESTGKYWIPVFNVLEKNNIWVTLSHPKYTKPQKGNKTDRKDAKWICDLYMCGMVKPSFIPPADIRQLRDLVRYRFKLTCMITSEKNRAHNCLTISNFKLDEVFSDIFGKSSRSITEQILQHPGETFDVAQFVDGRCKTPIEEIQAAVDGAISTEQAVKLRQCLNHIDELEKHQAEIEREIFRLSDKYEEVLNLIRTVPGFDKNPMTAIQVLSEIGGDMSVFPTAKNLVSWAGCCPRNDQSNQKIKSTRISRAGSYFKPVLVQVANALIKSKKHSEFTSRYKRIKARRGHKKAIIAICRMILTAIWHILSDLKPYTPEGFLESRPVKEGKVLSTSQALNLLKQRGYIIKGEPLAVS

SEQ ID NO: 407842 - protein, 314 aa, unidentified
MKTPLFVGIDVSQSQLDVAVRPGARFAAPNDETGLATVVAQVRRLAPVLIVLEATGGLEVPLTGALAADGLPVVVVNPRQVRDFARATGQLAKTDALDAQILAHFAEVIRPAVRPLPDEQTHALAALATRRRQLVEMLTAEKHRLRTASPSIRKSLRTHIAWLQRELTHTDTDLAQAIQDSPVWREKDDLLRSVPGVGPVLTTTLLANLPELGTLTNKQIAALVGVAPLNRDSGTLHGKRMVWGGRAQVRTALYMAAVVATRHNPAIKTFYQRLCGLGKAKKVALIACMRKLLTMLNAMLKHRTPWRTEQPQHA

SEQ ID NO: 407843 - protein, 456 aa, unidentified
MERKMKMEVEIMNPNAAGIDIGSRSHYVAVGQSKENVREFGVYAQDHQELIQWLFENRIETIAMESTGTYWQNLFAALQEAGFEVILANGKFTKNIKGKKTDVLDCQWIQRLHSLGLLSGSFLPDDQTEQLRTYCRHRTGLLKRASNCSLKMQKYLRLMNLRLDIVVKDVCGLTGLRIIDSICNGESDPEVLASFRHGNCQKSEEEIAKALQSNGREDYLFTLNQEYQMYLEVQQKIQTCDDHIKLFLDDFIKRNSVVKDKTATGKIYKRINKNTPKNIDLNQVSFQYFGGVDLMQIEGVSHGTILALMSEIGPQGLHKFQTAKQFAAWLRLAPNNKISGGRILSNRIPKGSNRLKIALRQAANAIGNLKEANLYNFFIRISIRKGRTAAITATARKLAVIIWNMIVKKEQYNPPSVYEFLDQKRKRKVKELQKLIHKFEISTNELGFANNSFSAT

SEQ ID NO: 407844 - protein, 433 aa, unidentified
MQDVQDEPLFCERVAGLDIAKAEVEVTIRVPSDTTAGRRQQETRTFGTTRRELESLGDWLACWGVTRIGMEATGDYWKPVFFLLESRGFDCHLYNAAQVKALPGRPKTDRADSIWLARITERGSVCSSFVPPEPIRTLRTHTRYRRHLTQARTAEKQRVEKLLEDGHLKLSSIISDIHGVSGREMLNAIAAGQRDPRVLAQLARGTMRAKIKRLEEALDCAFFTGEHAAVLAMMLATIDHYTTQIDNLTAKIEVLAEPYLHQIRQLDEIDGVGPVCAQDIIAEIGTDMTVFPTAPHLVSWAKWSPQVKQSAGKRKGSNATGRGNPYLSAALGEVSISAGRTQSFLGAKYRRLARRMPKKKALVATGNSALTIIHALLSDPAARYTDLGPDYYEQRMHARRQARNHVRSLERLGYKVTIQAINPDTGELLAAAG

SEQ ID NO: 407845 - protein, 407 aa, unidentified
MASQQSTPKRFIGLDVHKHYLIALGVDAEHNVVLPAQRVELSRLEEWMKKTLNPQDEVALEMTTNTWQLYDEFLPYVHSVTVVHPPHLALITRAQVMTDKKAASILARLLAKGMLVGIWVPPVEVRELRSLVAQRSKLTKLSTQAKNRLHAIMQRHHILPPGGNAFHPDQTAWWETLPLSRFEKVNLQSDLETLHFAEKQLARLTTLMDELAAQDERVMRLTHLPGFGMVTSLTVLAAIGDITRFPDAKHLVGYAGLGARVHDSGLTTRTGRITKSGRKDLRAALVEAAHVAANSHPHWQAELQRLEPRLGHNKAIVAIARKLLVTVWFVWYKQVTDRFAEPEIVARKLMQTAYRIGKRNRAQGQSSAQFVRQRLDALQLGVELREIPWGTKKKPIRLPPSTLQQRK

SEQ ID NO: 407846 - protein, 446 aa, unidentified
MKKSSRMSVIHPHAAGVDIGAEFHVVAVPPDADAAPVRTFQRFTGDLHRMSDWLKTCHITTIAMESTGVYWLPAFEIPEAAGFNVILVNARDAKNVPGRKTDVNDAQWLQKLHSFGLLRASFRPEHDISVLRSYLRQRERLTEYRAAHIQHMQKALMQMNVQLHHAVSDITGVTGLSIVRAIVSGERDPSVLIQYRDVRCKKTPEVLQQALTGNWQPEHLFAPEQSVAFFDFYQEKIRECDDQIETSLLQLSIGTEEPEGVLPSARHRTKQPNQLSFDVRPLLWKITGADLTQIHGFGPYLALKFVAECGTDMNRWPDASHFTSWLCLSPGNKISGGKVLSSKTRRSSSRIAAALRLAATTIGRSDTALGAFYRRLSSRIGKAKAVTATARKLAILFYNALKYGQKYVDPGADYYEERYRNRVLDGLKRRAKSLGYSLQQDPELCV

SEQ ID NO: 407847 - protein, 350 aa, unidentified
MEYIAFDAHKHYTVASVERPTGEVLRETRLAHHRGVIRDFLQQWTPGSPVAVETVGNWYWLVDEIEEAGMVPRLVHARKAKLMSGMINKTDKLDVRGLNRLQRTGTLPTVWIPHAEIRDQRDLPRTRMVLVRARTRLKNRIHATLAKYALTVTDVSDLFGKQGRIILSDKLTQLPPHSRFSTEHLLEQLKALDAHIAEFEVRIRKVFKKTPALEWVISLPGVGLILGIVILLEVGDIHRFSDAEHLAAYAGTTPRVSGTGGKIRFGRLRTDVNHYLKWAYTEAAEVICQHRADWSHRHVSQLYTRVRHRKNHQKAIGAVARHLAEATYWILTKRESYQELKPRSDASTKA

SEQ ID NO: 407848 - protein, 310 aa, unidentified
MIIHPGFIGIDVSKAHLDVFDSRRGSCERIANTSTAIVDLLERWRDENVFVLFEATGHYDVRLRQALADHGIRFTRVNPARARDFARSAGFLAKTDAIDARMLAAMAQCLAPEPQAAGDPAREQLALAHKRRDQLVHTRQKERTRRSECVEPSIAADIDAHLAWLDVRIAAWDREIGQLIRQSEELHQAARRLRSIPGIGPVAATTLIALMPELGGLSPKAIAAMAGLAPFNVDSGKLRGSRKIKGGRKRVRDALYMAALAAARCSSRFRAFYRRLRTAGKPAKLALIAVARKLLTTANAIMRDKTAYQG

SEQ ID NO: 407849 - protein, 347 aa, unidentified
MEKLFIGIDHHKKYCQVCIMNPQGQIIWENSIPNSQEAFTSLKAQFPNVEFSSVIETSRNWGMLYDVLDDLGLHPVLAHSTKVRWIAESRIKTDKIDARVLASLLRVDLIPAIHVPPREVRRQKTLLRQRLWLVSEQTRIKNRIHDLIDRNHLAAPDRSDLFGTAGRTWMNHLALPDVDQKLLVSQLSMLDHIRLQIKQTTLWIQEIVKAYPFAKILETLPGLGPLLTPVVALEIYTIDRFPSVTRFVSFCGLAISTYSSGGKTYHGHLIPQANRYLRYAFVEAAWSAVRHSPYFSAYFKRLAFRLGRPKAIVAVARKLCQIAYQCLKEQRPYEERPYKLFRPVAIT

SEQ ID NO: 407850 - protein, 404 aa, unidentified
MWYAGLDWADDHHDLVVIDEASTKLAAKRFAHTKAGLEELTRFLESFTGPEHKDQLACIIETSRGLLISTLLEAGFTVYPVNPKVADRRRSASGAKTDQIDAYLLAKLGRAELADLRKLHPDSPSIAELKELTRDQDALVQMQTRLVNQLTACLKAYYPVALELFTKLHQRSTLRFLQTFPTPQAAMAASAAQIAQVLKEAGHPTASKVASQIYDTLHRPHLTADAITTRTKSRLALALIAQLLPLLEQIAVYEKEIETLFLTHADSQIFESLPGAGKRLAPRLLAELGDDRTRYTGCSQLAALAGTAPVLYQSGNYRKAHRRHACLKPLRNALYQLARTSRQQEPWADDYYQRKRAEGKSHSVALRALSNVWLRILYRMWHTHTCYDPAIFAASRQAHARRAA

SEQ ID NO: 407851 - protein, 353 aa, unidentified
MSNYITIGMDLGNRKHTVCAIDGAGEVLWRKEVTNTPEALKPFFEENAGATVAMETGLCCRWISALAKRCGCEVLVGNARKLAPIWQSMQKSDENDAFMIAKLARFDRGLFHPVSLRDDERHEMVQILELREVAVSQRTQAVNSVRGLCKAMGVFIPDCDASRFHRVAKDAIPRDLSWKFMPMLRQLKGTEETIRRYDEMLKRYASGHFGEEVALVSTIPGIGPVTSCAFVALVGDAKRFGKARDAGAYFGLTPARDQSGDRDAPKRVTKAGSKMMRRLLVTAANYVMRTSSPDTAIKRHGMRICARGGKIAKRKAKVAIARKLAVVMLAMLKSGKPYEDRVAANIPAKADAA

SEQ ID NO: 407852 - protein, 451 aa, unidentified
MEILYTTCAGLDVHKKTVKVCLLTRTSHGQPHKEFRTYFTTTEELLKLGDWLKEQGCTHVAFEATGVYWKPVFNLLEGSFELLVVNAQHIKAVPGRKTDVKDAAWIADLLQHGLLKASFIPSGPQRELRDLTRYRVRLTEEKAREVNRVQKTLEDTNLKLGDVVSDIMGKASRMILQAIADGESDPGRLAALAVGRVRANEEQLEAALRGHVTDHHRFLLQEHLTPIRHLEQAIERVTAEITRRFTPPSPPEETTISQKEEGATQEISSDSAPQQEASSSSQAALSWAAAVVLLCSIPGIGERAAIGILAEIGINMQQFPTAAHLASWAGVCPGNHESAGKRLSGKTRKGNPWLRCLLVQAAHWASHQKQSYLAEQYRRIAKRRGSKRAAIAVAHSILVIIYHLLSQQTTYQEKGETFFEEQERQGAEKRLVRQLSRLGYHVELQPLAQVG

SEQ ID NO: 407853 - protein, 401 aa, unidentified
MGKIRRFSGIEHSRALKFKNRKGGFEIILARIQEICKKENFAKVVVGMEPTGHYWKAFANWLEKQDGITVVLVNPYATKQAKELDDNSQTKSDKKDALTIAKLVKDGRYFELYLPHDIYAELRGLSTTRTGLNKRKNALKNTITAILDEFFPEYEEVFKHPLTGKASRHILKTCPFPKSILELGEEGVTAEIKKAVKKTVGRKKAGQLVEAAKGSVGVDYGEEAARLKLRLMLEELELLEKQTEELESQMESALEKTGYAEFLLSIKGIGVVTLAACLGELGDPTRFESPRQMSRMAGYNLVEDSSGKNKSGTKISKRGRKNLRSVLYQMSLTMVATNDEMKQLYHYLKTREKSPLRKMQALIVVSKKILTLIHTLAKKKESYDPEKVFGTVRREQFKAAA

SEQ ID NO: 407854 - protein, 387 aa, unidentified
MTARTVSNPPATSHDEAVRCLFAIELSKDSWIVAYSTPLSDKISRYTLKPCDWKGLLELIERVRSRVVHELQRPVEVISCYEAGYDGFWLHRLLQAHGVHSHVIDPASLQVNRRARRAKTDRIDAEQLLRSLMAYLRGEPKVWSVVRVPSVAEEDARRLHRERDRLITERVSHVNRIKGLCAIHGIYDYNPLRSDRLQQLDHLRTVQGQPLPQALKAELWRELLRLELLLKMIAGVEKERDAIVTDNGSAHHNASKIKELCRLRAIGPEFASVLVGEVFYRSFNNRRQVGSYIGMPPSPFSSGNTVREQGISKAGNPKARKTMIELAWLWLRYQPDSALSIWFCQRVGTTKGRIRRIMIVAMARKLAVALWRYLETGTIPQGAVLKG

SEQ ID NO: 407855 - protein, 417 aa, unidentified
MSNKVIFNLDELFIYVGIDIGADFSWMSIALPNQQFVGKPYKILHNSIDSLTTAVSKIKEAEELYSLESRIFLESTEIYHYPFFCYFRDKGFNCSVINPIITKNSTNINIRKVHNDRFDSKKAALVGLKPDLKVSLMPSDLALNCRNLCREYYDLMDNRSAYVNKLKGELRMAFPQYLGIFSKVTINTSLTLLETYTSPSAFLEADKQEIIDIIRSTARFGLTYAQNKYNAIIQAATDANQFGYIINSNIKRIRLYISFIRKYDEEINSILESLHELVDANEDADFVKQIHLIETFKGAGFLSAVSIMGEIGYFSAFSKPKQLFAYLGLDPAVKQSGKFEGTKVQMSKRGYAIARRVIHTLTLQSISISRNGEAKNPVLATLLYLHSNQCSKSIFLFYYILLINFSFKAGKFLFTEK

SEQ ID NO: 407856 - protein, 457 aa, unidentified
MSRARKAPKTIKSVAEVDTLTILNRNAAGIDIGLDEMWVSVRADRDAEPVRRFGMNTPDLIAVAEWLKACGVETVAMESTGVYWIPLYEVLEERGFQVYLVNARHAKNLPGRKKDETDAQWLRRLHTFGLLNNSFRPAGEMCAVRAYWRHRADLIEHRAAHIQHMQKALHQMNVRLSPTVKDITGVTGMAIIRAILAGERDPLTLARLRDPRCAQPEAEFVKALTGNYRDEHVFALKQAMALYDAYTQQILECDQELERKFSALKPVHDDDLPPLDTTDKRNTHSKNAPAYDGRALLYQLLGVDLVAVDGLNEVTAQIIISEIGTDMSRWQDEKHFCSWLGLAPHNDISGGKVLRSRTLKTHNRAGQAFRLAAQAVSKTNTAYGAFFRRMRAMHGPMKAIVATAHKIARAVYFMLKNRTPFHDINAEEYTQREREREIARLQKKATKLGFTLAPASV

SEQ ID NO: 407857 - protein, 410 aa, unidentified
MQVLYPRCCALDVHKLTVVACLRIADDSKVTSEVRTFETTTASLIGLRDWLTANKCTHVAMEATGVYWKPVWHILSDGEFELVLANAAHVKNVPGRKTDVSDAEWVVDLLAHGLIRPSFVPNSQTQQLRALMRTRKQLVREAASHIQRVQKTLEDANIKLDSVISDIMGKSARAMIEAMIAGETNPAKLARLAHRSLKASPAQLREALRGRVTKQHRFLLRLHLKQIDGLEAAIAEIDQQVEADIEPFRAAVKQLSSAPGVKALSAQVIVSEIGIDMSRFPSDGHLVSWAGICPRNDESAGKRRSNRLRKGAPWLKTTLVQCAWSAVRQKDSYLRAQFYHVKARRGPKKAIIAVAASILTAVYHMLKTGKTYQDLGPNHFQRRNKDQQKHLLIKRLADLGYAAALTPLPG

SEQ ID NO: 407858 - protein, 368 aa, unidentified
MSVTSMPRGEVKWVGLDVAKDAIAVGVLDGMSEATPRLDKIVHDEVSIRRLVSRLGGPARLRACYEAGPTGYELHRLLGSMGVDCEVIAPSLVPVAPGDKVKTDRRDARRLVRLYRAGELVTVRVPTREEEGARDLSRLRAAAMVDRRRARQRLGSFLLRRHLVYRDGTVWTGKHRQWLRSLGFDDTASRATFGHLLASVEERELRVGAIDVDLGGFFDAGLFADGVARLGAYRGIGPLSALGLCCEVCDWRRFPAPAKFMGFVGLVPAEYSTGASIARYGITKSGNAHVRNILVEAAWAYRYPARVSPELARRHVGLAPEVIARAWNAQVRLCGRFRHLATRKDRQTVVATAIARELAGFVWAEMTA

SEQ ID NO: 407859 - protein, 312 aa, unidentified
MPCCVGIDGAKAPWDIALRPAGERWAVPNDAGGVVMRVERWQALPPTLMVLAATGGLERAATAALATAALPVVVVHPRQARDCARATGPLAKTDAVEARALAHCAAVIRPTPRPLPDAQTQELRALLGRRQHLIGMRTAEQHRLAGTTARLTTDSAAHMTWRNAAIATLDGDLETLRRASPRWRDKDDLWQRATGIGPVWARTLRRALPALGTRTRQQSAAVVGVAPLHCDRGTLRGRRMIWGGRAPVRPVFYMGTLVATRFNPQSKVFAERLLAAGQVNKVALTACMQKLLPILNAMLKPRTPWQPQEVQS

SEQ ID NO: 407860 - protein, 337 aa, unidentified
MTIIRIGLDTAKHVFQVHGVDENEQTVVRRQLRRGEMEKFFGKLAPTRIGLEACGASHYWARLLRGLGHEVVLLPPQYIKPYVKRGKNDAIDAAAICEAMSRPGMRFVPIKSAESQAELMLLGVRNLLIKQRTTVINAIRGHAAEFGVIAAKGPVKVAELLQQAHTAEASVPELALDMLRLLAAQLDALDVKLKLIETRLMASHRENPLSQCLASQPGIGPIGAVSFALRVTDPKSFHSGRHFAAWLGLTPKDHSSGGRHRQGRISRQGNEALRKLVVLGATAVIRFARPGHASPWLLNLLARKPKKLAAIALANKMARTLWAMMVSGEVYRRPLPA

SEQ ID NO: 407861 - protein, 354 aa, unidentified
MIIIGADYHPGFQQIAFVDTDTGELQERRLEHREDAEKFYRDLAAQELKVRVGMEASGHARWFERLLGELQFELWIGDAAEIRTKRVRKQKTDRQDAQLILRLLLENRFPQVWVPSWENRDLRQLLWHRHRMVQARTRIMNQLQAVALNEGVRCKKRLWRDGGRAQLQSFKLAPWASRRRHDLLELLDRLTPTIAELTQAIEQEAEKCPAAQCLQTHPGVGTLTALAFVLIIGRADRFECGKQIASYLGLVPREDSSGQRRRLGHITKQGNSLLRFLLVEAAQVTVRSDQEWRNRYFHLVLRRGRKIAKVAMARRLAVRLYWMWRKGWDYEQLKKFGSHAGEPGHPDGVQSNTE

SEQ ID NO: 407862 - protein, 353 aa, unidentified
MFHKPGEATTMKITTIGLDLAKNVFQVHGVDEQGKAVVRKQLRRNQVAAFFANLPPCLVGMEACGSAHHWARKIEQLGHTVKLMAPQFVKPYVKTNKNDAADAEAICEAVSRPQMRFVPIKNAEQQAVLALHRARQAFVKARTAQANQIRGLLGEYGIIFPQGICHITKRLPAILEDGENELPGSFRALLARLGEHLKELDRQVGELEVQIHHWHRENEASRKLEQVPGIGPITASALVATIGDANSFKNGRQLAAWLGLVPRQHSSGGKSVLLGISKRGDSYLRTLLIHGARAVIRVAERKPGYAQSWLWQLLGRRQKNVAAVALANKNARIVWALLAHGRNYQADYAPSAP

SEQ ID NO: 407863 - protein, 525 aa, unidentified
MAKALRALFGNSVYPVWKSASERFKGRPELNINLPISLVQTMKTKKAKASRSHPARSGAKGPIRPAANMPIINGHAAGVDVGSVEHYVCVPADAVPAGQSNVRGFGGFTEDLNQLVEWLQGCAVTTVAMESTGVYWIALAQKLEAAGIEVVLVNARHLKYVPGRKSDVQDCQWLQQLHSYGLLNGSFRPAQDICAVRSLMRHRENLVASCGREVQHMQKALQEMNVHLHHAVSNLVGATGLRILDAILGGERDPKKLVELRDDLCSKTTAEELEKALRGDWRQEHLFVLEQALGTYRHLLGQLEKCEEQVQKALAEVVIPAAEEPESPAPPNPKAKESGQSKKKRFHPHKTGTGLKRDLTEELKRLCGVDLTKIVGLNVLSVLIIISEIGLDMSRWRSAKAFCSWLGLCSGNKISGGKVLDSRTAHVVNRVALLLRTVAPAVGKTDTWLGIFHRRMRARLGPAGANTATARKLACLVYHLLRYKEEFIDVDHLLMMAKLREQRVHRLRKQAEELGLEVIAKQPAA

SEQ ID NO: 407864 - protein, 334 aa, unidentified
MQNVTLIGIDLGKHSFHVHCQDKSGKALLRKKLTRTKLIEFLAGCTSATVVMEACAGAHFMARRIADLGHEAKLISPQFVRPFVKSNKNDFADAEAICEAASRPSMRFVQPRTEAQQAMRALHRVRESLVRDKVKTTNQMHAFLLEFGISMPTGAAVIKRLSTVLAENELPPYLAQLLMRLHAHYLYLVEQITELETALEQELLRDETGQRLQTIPGIGSITASVLSSQLGDGKQYGCSRDFAASTGLVSRQYSTGGKNTLLGISKRGDKNLRRLLVQCARVFIQRIEHQSGSLAEWVKAQLERKHSNVVTCALANKMARIAWAITTRQTVFGR

SEQ ID NO: 407865 - protein, 355 aa, unidentified
MTSTKYIGMDVHKESISIAVRNAVGKVVMECVIETKASMILQFIDGLRGELQVTFEEGTSAAWLYDLLKPHVTKLVVCDPRKNKSMREGNQNDKIDARRLAELLRLDHLTPVYHGEHGLRTLKEFARSYLTISKDLARVMTRVKAIYRSWAIPCTGKQVYARCHRAEWLAKIHEPGVYRRAELYYQQLDALRVLRQEVRRDLLTESKKHKVWKRLCEIPSIGPIRAAVLLGILQTPHRFRTKRQLWNYGGLAIEMHSSADHRSVDGHLQRSRKNVLVRGLNRNCNHDLKNLFKGAAVIASSKPGPLQEFYAALVAKGMRPEMARLTLARKIATIVLMVWKKGVCFDAQHLKPQTA

SEQ ID NO: 407866 - protein, 368 aa, unidentified
MIIAVGMDVHAKRSSAYAVYAGIGEIPGRHEKFLRDFNREFEDFPSTCKWMEKMSAFVSKHECHVLIENSTVTHDVYWILRGLGIDVTVAQAQDLYRITKSVKKTDRNDSIELAGYIRRRLNGENEFAECFVPSPEWMTKREMCRGISNEKEYLADTKRRIRAHLLLHGIHLSVDYGDITCDKALRELASIKDPYLMLQIKFAADAKKRVDIGEKTLLYMFSEDPMYKLINSIPGFGVLSSAYFTSLIVDIDRFPTREQFAASFGIVPRMRSSADSNPRCSTTHRGDELARYLLMFCVLSHVKHVDDSVVTMMYRRLVDKGKPKREALVAAGRKLMTVVWSVLKNKRPYTSDTELLRTAMETEESEKE

SEQ ID NO: 407867 - protein, 465 aa, unidentified
MDCIERATETLDQKKPSVRRLSGLDVIHPGAAGLDLHKEVIVACAPMAAGETRHPVRTFGTYTSALLELAAWLKQHAVTTVAMEATGVFWLPVLSLLRTAGLEVLLVNAREVRSVKGRPKTDKLDCEWIRRLHACGLLRGSFIPDAETQMLKSLWRHRLNMEEEDARAIQRMQKAFQIMNIRLDMAVTDIVGETGLRIIEAILAGQRDPRQLAKLRDHRVAKSEQEIADALTGNFQEEQLFIIQENLAHHRFLQERIRETDKRMAAQMDTMPKKRCATELPAATKPARSRQGAALTRERLYELLGVDLTQIDGVGVLTVSSFLVHAGRDMSPWQTENHFASWLGLSPNIKQSAGKTRAGPTRKTASALAHAFRLAALTIGRLDSWLGAYYRRLKGRIGAPKAITATARKLAIIFYRAVKHGGVVKRLTAEDYEQANQLRILSALRRRAARLGFELTMKNTVPVEV

SEQ ID NO: 407868 - protein, 400 aa, unidentified
MISVGIDVSKEESTVCILKPYGEIVSRPFEVCHVEKELSELATMLQRLDDEVRVIMEATGISHLPVLSYLKEKGFFVAVINPFEMKEYRCQGLRRVKTDKQDAITISNYGIEHWYRLKDYEAEESVYAELKLLGRQYRHYMRMRVESVLELTHLLDYTMPGIKKLLKGWNETSGKDKLSDFAEEYWHYDNITRQSEEEFVDSYLEWAERKGYHRRQDKAIKIYALAKEGIPTVSSSTPSTKMLVQEAVRVLREVDNTLMTILTQMQTLAKSLPEYSVVRAMGGVGNVLAPKLIAEIGDVRRFHSGKALIAHAGIDAPPYQSGQFTGTERKIYKRGSSSLRKIGYEVMRCLKTHKAPEDASVYEFILKKEKEGKSKRAAKIAGLNKFLRIYYARVMEVYEQ

SEQ ID NO: 407869 - protein, 334 aa, unidentified
MENIALIGIDLGKNSFHIHCQDRRGKAVYRKKFTRPKLIEFLATCPATTIAMEACGGSHFMARKLEELGHSPKLISPQFVRPFVKSNKNDFVDAEAICEAASRPSMRFVQPRTESQQAMRALHRVRESLVQDKVKTTNQMHAFLLEFGISVPRGAAVISRLSTILEDNSLPLYLSQLLLTLQQHYHYLVEQIKDLESQLKRKLDEDEVGQRLLSIPCVGTLTASTISTEIGDGKQYASSRDFAAATGLVPRQYSTGGRTTLLGISKRGNKKIRTLLVQCARVFIQKLEHQSGKLADWVRDLLCRKSNFVVTCALANKLARIAWALTARQQTYVA

SEQ ID NO: 407870 - protein, 424 aa, unidentified
MKFKMQNKQNQLIERISVKHLIVGIDIAQQFHVARAVNFRGIVVGDPLTFENNEEGFASLLIWIKNLQRLNNLDEAIVGMEPTGHYWINLSKWLFKQNIVVVTVNPYLVKRNKENRDNTQSKSDKKDALVIADMVKNGYYSEVRYTSESFEKLRVLMSNRDVVVKRLVSSINQLNRWVDIVFPELRQVFKDIKAKGAIATLRLFPSPVELETLQPDDVIAGWKSIMKRQPGLKKAKLLLQVARKSVGTRQALDAYKFHLEQLLEEYDLAVTQLERVEIQVTEVLNKIPFAKKLLTIKGISEISLAGILGEAGDLSNFSHGNSLLRHAGLHLAEASSGKWKGQIVISKRGRSRLRRFLFLATMSLVANNPEFKALHTHNVKVKKMKKMKSIMKLVGKLARIFVGISRRNESYCPDKLQLLSPIAA

SEQ ID NO: 407871 - protein, 420 aa, unidentified
MSFKIFRFNCCGLDVHKTWIYACIGITDSNGRTDYKQARFSSFSKGLKELCDWLAKYNCSEVCMESTGKYWIPVFNVLEKANNSVILAHPKYTKPQKGNKTDRKDAKWICDLFMCEMIKPSFIPPADIRHLRDLVRYRFKLTCMITGEKNRAQNCLTVSNLKLDDVFSDVFGKSSRSITEYMLAHPGEIFDVAPFVDSRCKTPMEEIQAAVDGAISPEQAIKLRQCLNHIDELEKHLEEIEREILRLSDKYQAALDLIRTVPGFDKNPMTSIQILSEIGGDMSVFPSAKHLVSWAGCCPRNDQSNKRIKSTRISRAGYYIKPILVQVANGLLRSEKHPEITGRYKRIKSHRGHKKAIIAICRMLLTAIWHILSDLKPYTAEGFLESRPVNKAKVLTTSQALNLLKQRGYTIKDDIVPAMN

SEQ ID NO: 407872 - protein, 426 aa, unidentified
MEAIVESCCGLDVHQATVVACLLVGKPDRKPRKEVRTFGTVTAELVRMREWLQAEGCTHVGMESTGVYWMPVYTILEGAFELIIGNATHIKQVPGRKTDVKDSEWIADLLRHGLIRRSFVPPKPLRELRELLRYRRKLVESSTCERNRMLKLLETANIKLSTVVTDVFGVSGRRMLRALLDGQQTPSQMAELAKGRMRKKLLALTEALDGRVEEHHRFLLGMQFERLEQVETTLERLDLRIDEKLGPYGEQHTRLMQIPGIDRIGAAVLIAELGVDMSVFPSAHHCAAWAGVCPGNNESGGKHRGHSTRRGNVHLTTALVQAAHGASHAKGTYLKDKYWRIKARKGPARAAMAIAHKILIAAYHMLAGAVDYKELGAAFLDQASASITKRGLVKRLERLGYQVSLQPTDPAPAPAPAPAPAPGGAQ

SEQ ID NO: 407873 - protein, 345 aa, unidentified
MKKGITIGMDLGDKKHQVCILDKTGKIITEEEVTGNRVAVTKFFKKHPGAVVAMETGTHSRWISQIAETEGLEVLVGNARKLRMIWQSRQKSDTRDAVMLARIARFDPALLCPIRHRGEQVQMDLEIIRARDLLVGERTKMVNHVRGVVKNMGERLPASSAKSFGRKAKIPEALNEALKPMLEMIRELTNKISGYDLMIKEKVASIYPETERLRQVGGVGPLTALAYVLTLEEPKRFAKSRMAGAYLGLVPRLDQSGQIDKQLRITKHGDGYLRRLLVGSAHYILGPFGSDCDLRTFGLKLMQRGGKNAKKRAVVAVARKLAVLLHALWRSGQQYEPKRIKPLAA

SEQ ID NO: 407874 - protein, 337 aa, unidentified
MNIVFLGIELAKNVFQLCGLSQASKPVYTKRTGRKELLQTLANIPACLIGIEAPTGAFYWQREFEKLGHKVKVISPQYVNPFVRGQKNDGNDAQAIAVALMQPTMQFVPPKSPEQQNIQALHRARQRIVNHRTATVCQIRGLLLERGIPIGSAVSRARRAIPLILEDAENGLSSRMRRTIAELYDLFNDLGRRIHFFDKEIETVFRQSEACQRIAKIKGIGPKTATAVVAIGKGTEFKNGRHFAAWLGLVPRQHSSGDRQVLMNMTKKGDKHLRTLFIHGARAVVRVATNNSDGHMNQWVNQLKERRGFNKTTVAVANKNARIIWSMLTNETGYQVV

SEQ ID NO: 407875 - protein, 377 aa, unidentified
MSEITRVLKLIARVGVDLAKRVIQVHAVDAAGQRVVSRALKREQFMEWCVQLPAGCVVAMEACSSAHHWGRKLRALGIDARLIAANFVSPYRMEGKSGKNDATDAAAICEAASRPSMRFVPIKSCEQQGVMSLHRVREGIKEERTACINQIRGVLAEFGLVFNKSPKALRAELADVIEDASNEISAMGRKVLQRAFDHWRELDEHMRWCDQQVGQHVRSSPEAKQAAKINGIGPLGASAMTASVGDFKQFKGGHQLGAWVGLVPSQNSSGGKTSLGRITKRGDDYLRTLLIQGAKSAVMSAGKRDDPTSRWLVQLVERVGWQKACVAMANKNARILWAVMTRDKGYDPKHVSEKPQAKKPAHERVAAAPPAQVQRQA

SEQ ID NO: 407876 - protein, 430 aa, unidentified
MKSNTQNAKIEAITEKTLVLGIDVGSETHYARAFDYRGIEYSKKPFKFSNTEAGFATFKEWILELKERHEKDKVVPGMEPTGHYWFNLGKFLQDNEMKPVLVNPHHVKKTKELDDNNPTKNDRKDPKVIAGLVREGRYMIPYLPEGVYADLRTATNIRFQLQAELTRIQNRISRWFNIYFPEYKTVYGKPDAKSGMLILKAAPLPEDILTLGIDGVNQIWRDAKLRAVGKARAKTLIEAAEHSVGSKEGAVSARMEIRMLLEDYESRNTRLQEVMVLIEELVRKIPMAEKLLEIKGVGIRTVSGFLAEVGDISRFNNPKELQKLAGLALVENSSGKHKGETTISRRGRKRLRYLLFEVAMSLVSKNQEFRELHNYYTTRRLNPLKKMQSLMAIAAKLIRVFYAMLTKGVDYDPKKMVSDIKRPAVYLQAA

SEQ ID NO: 407877 - protein, 440 aa, unidentified
MRAAPSTGVSCSNGISRADRSPRIHKQEHRHRDRGFRRAARKADGRMRYAGIDIGSQEHVVAVVDGEGGVLVKPTTVGELRAGYERLEETLGQPEDLLVVMEATGHYWQNLFGHLTEKGYPVAVINPLRTRRYAEEELARTKTDSIDARALARFGAEKKPAATVLPDAATRELRELVRMRDRLVQEHADKTRQLHRLVDLCFPELKRHLKELDGEVGLTLLAEYPTAAAYKGTTPGRIAKLEAGKRKLGRELAQAVFEAAQQSVARHEGPSYELQVRYLCDDLRLLNKRIGEIEKKINGLLEKHEVGQLLQTIPGVGPQTSARIVSEVGDPREFESAAALAAFIGLVPALRQSGRNRTMRAHLAPTGHARLRKGLWMPTLVGVRFNPWLRAAYQRLRDRGKPAKVALVACMRKLVTAIYSVAKNRRPFVPFLAEAKEVET

SEQ ID NO: 407878 - protein, 348 aa, unidentified
MDHYAGIDVSLECSSVCVVDASGKIVREGKVASEPAALIDWFGLLGYSLVRIGLEAGPLSQWLYAAMQEAGLAVELLETRHVRTALETMPVKTDRNDARGIAQLMRLGWFRPVHCKSLAAQETRALLTARKLIQSKLHDVENSLRGILRGFGQKVGKTTERSFAGRIRELVAGHPTLETLAEALLAVHAVLLREFNAFEKRVRSMARSNAKTRLLMTTPAVGPIVALTYASAVDDPGRFKSSKAAGSHFGLTPKKYQSGQTDITGRISKIGDAAVREALYQSAHVMLTKPVKGCSELKSWAMRIARRAGMRKAKVALARKLAVILHRMLADNAPFNPTAKAGTVTAAV

SEQ ID NO: 407879 - protein, 288 aa, unidentified
MEITTIGLDIAKSVFHLYAVNQMGRLVKKKQLKRKQVLWYMAKLEPCLIALEACGGANYWAREFIALGHEVRLIAPQYVKPYVKGNKNDYNDAQAIAEAVQRPTMRFVPIKSVERQDIQNFHRQRELIKKERGALANQIRGLLAEYGVVMNKGVGAVRKKLPEILEDAENGLTVLARALFAEQLEALRTLDQRFDQCERRIQSINQGHDLCRRLDEILGIGPITASATYAAAGEGKDFVNGRHFSAWLGLVPGQHSSGGKTVLFGISKRGNAYLRTLFIHGARAVLRH

SEQ ID NO: 407880 - protein, 318 aa, unidentified
MNGFYQAFVGVDISKESADFYLHPAGSQGSIQNQPEGHAQLIARLPAPGSCLIVLESTGGYETDLLYALQDAGHAVALVNPRRTRAFAVAQNQWAKTDRIDAKIIALFAESTKPEISPKPSENQRKLRGLVVRRRQLVEMQTAELNRHAMTTEAAARRSLQKHLTYLKKEILSLEQMIEKLVQEDPEKRESAQRMVSVPGVGKTTAMALVSQLPELGKLNPKEIAALVGVAPFNNDSGKKQGKRTTKGGRAELRATLYMAALTAARINPKIKPFADRLKAKGKPVKVVLVACIRKLLTILNSIEKNKANWCDCIAPAA

SEQ ID NO: 407881 - protein, 455 aa, unidentified
MKVKKVSALRSKRGLHRVNGAEPPVVGLTPQTTDLRKTDTMKTYILRDAKPVEPEKASRTPRPKPVPPAAAAGHLGRTETTTKGPVLFIGLDVHNDSIAVSLAPSDTTEVRRYGIIGGEHEDVLKLAKKLAEAHPGTTLKFCYEAGPRGFALCRCLRSHGWDCILVCPSKIPRKPGERVKTDRRDADDLARLYRAGELTGLYVPEPVDEAMRDLIRARFQVGRQQHRSRQQLKMYLLRHNLRYGGQTSWTPAHLRYLAKIKMPFPTQQIVFQEMLDVISEATARLERYDQEIERAVPGWRWEPVVRALMSLRGMALLHAATLVAELGDFNRFEHPGQLMGYLGLVPSEHTTGKDRQQGGITKMGNAPARRALVEAAWQYRVPARLSPHLKKRQEGLPKAITDIAWEAQRRLHHRYTHLTRVGRKKSQVAVTAVARELTGFVWAIARQVKPLATIG

SEQ ID NO: 407882 - protein, 362 aa, unidentified
MEKIIHQSVGIDISKDSFTCCICKKAEHMSLSFTQVCEFKNDKTGHNQLVRWVRKQTEKKVEIVYVMEATGVYYEPLAHHLHKLKQHLHVALPSKMKHYFKSLNVKTKTDLNDARVIAQFGAERKLYSWQPPSPVPLSLRDLTRMYEQLQVQKTACTNMLHSKMHSYEVNAFVLKSNKSIISSIERQLVKCEQQIRKLVASESWLTEKVKKLSTIKGVGFMTVVIVVSETLGFDQFNNVKQVTSYAGYDVVERQSGSSIKGKSRISKKGNSHLRRALHFPALVAARYNSQLKNTYNRIHNKNPHKMVGFVALQRKLLTLMFTLWKNDTEYIENYEQLKKVAPCNQEATQDSNTITSLNSIEV

SEQ ID NO: 407883 - protein, 426 aa, unidentified
MKTEDIRLEEFRQLRKKIRGSREYLIVGIDVAKEKHNSFFGTATGKTLFKRLVFENSKEGFERLVRQTEAIKVQNNLKEVVFGMKPTSNYHKPLGEYLIKSEHNVVLVSGVGVKRNRELLDGRWDKHDMKDSANVADLISQGKCQYYEYPCTEIRDLRRLLSLKRHLKKQEQRLRVRIRNSLLAQYFPEMDQYYGSFEPENLAIVRHLLVPSTIAGLEYSKFFKTVATHNKGIRQHKHLYRIWQQAGQSIGCEAGWAATCEGAVLVEQLKQMREEILYLEEEIKGVCFIFSEYEYLLSIPGFGPDVSSKVLAYIGNPFRFDNSRQVLRTSGYDLSANRSGKRSHLAIPVISKRGKADLRYALYQAALIASTRNRHFIEYYTETIRGREREKGIKTKMRVKLAAKMLVIAWTLMKKKEPFNPDYLKS

SEQ ID NO: 407884 - protein, 375 aa, unidentified
MKDHSEAFVAFDSSKLRNAVAIAEGGRGGEVRFIGEIENNGAATAKLVRKLAGKYDKVTFCYEAGPTGYGLYRQIRGLGQECIVVAPSLIPRRPGDRVKTNRRDAVSLAKLLRAGELTAVWVPDPGHEAMRDLTRARDTAVMDLRSKRQQLSAFLLRQGLHYSEGKRTWTKAHMHWLASQKFERVEQRIVFEEMMLAMRQAQERLERLQQAIRAAVPDWSLAAVVVALMAMRGLDLISATTLLAEIGDLSRFQSPRELMAYLGLVPSEQSTGETIKRGPITKAGNRRARRMLVECAWSYQHPPRVGHDKQEKVAAAPRAVREIAWKAQCRLHRRYRALIRRGKLKTVAVTAIAREFAGFIWAVAREATMVPAAVK

SEQ ID NO: 407885 - protein, 428 aa, unidentified
MNCTQNEKLNQVTPHTLIVGVDIAKFKHVARAQDDRGKILGKALTFTNTKEGFEGFFAWLEEMQHKHEKSDVLVGMEPTGHYWLNLAYTLKERLVSLGVVNPLHVKRSKELDDNSPTKNDIKDARVIAQLIKDGRFSYPRLPMDQDAEVKAGITIRNQIVGDLQALQGRIHNWLDKYFPEFLTVFKDWSGKMALATLEHIPLPVQLNQTTPERVAEIWSTYGGVQRPSHKRIQRLQEAAGRSVGLTVGLQMAQREIATNIKRYKMLKEELHALEKQLEDLVLTLPGIAEMLTVPGVGMVTVIELYSELGDIKNFENPRQILKYAGLNLRESSSGKHKGQTRITKRGRAKLRALLFRTVMPLVRHNRAFKALHQYYTTRQENPLRKKQSLIVLCGKLVRVLHTVGQKQCPFDEERMIRDIPHLSLALGA

SEQ ID NO: 407886 - protein, 328 aa, unidentified
MSHFIGIDVAKATLQVYIPQGQVDLEFANTTSGLHKLYKTLKLSYKESLQELVLVYESTGCYSRPLEEFCQKKEINCFKVGAYQSASFSKTIKNRNKTDKVDARMLSAMQILVGKGDIKIPYRDDDAHQLRSYIKYYQSLNKEKTRQKNYLEAAEINQEDDYILKQVRKRIKQIDKEQENFMALSMKLIKANTEYLNAYENITSIKGLGQKSGIVLLYLFLRYPNASRQQITALTGLDPVQRESGTSLKHKTRMSKQGISLVRGLLYMPILSTVQHNDEMKRFYERLVESGKVKMSAQIAVMRKVVLLAHSLYKNNEKYDETKYLNFI

SEQ ID NO: 407887 - protein, 384 aa, unidentified
MQKPNDLNQSRIVLKQESTLIAVIEMSLRSWLVAGIVPGVERQPLKKLAVDESALLKLLNRWREEAEKAGRRIERITVAFEAGRDGFWLARWLRARGIEAHVIHASSVAVSREHRRAKTDRLDTELLKRALLGWLRSERDHCKMVAIPTTKDEDAKRPSRERQSLVGEQTRIVNRMKAALIRLGIRGFNPKLKKAAGRLEDLRTPEGEPIPPNTLAELYRDMQRRRLVSDQIRQIEEARLERMEQAPGDRPHAMVRLIARVIGVGIETADMLVHEVLSRKLRDRRAVARYAGLTGAPDESGSKRREKGLAKAGNARVRGGMIQLAWRFLLFQKNSALAQWYRTRTEGGRNRKTIIVALARKLLIALWRLVTTGEVPAGVVLRAA

SEQ ID NO: 407888 - protein, 343 aa, unidentified
MHLASIGIDLGKTTFHLVALDEHGKVVIRKKFSRKQLLAYTGNLQAALIGIEACSGAHFIGARLRDQGHDVRLIPAQFVKPFVKSNKNDFVDAEAIAEAVTRQNMRFVPIKTDEQLDLQALHRVRDRLVHRRTAVINQIRGFLLERGITFAKGPANLRNQMPAILEDADAQLTPRMRTLLDHVWKEWKQLECDIEIASEEIERISQEDAACRRLRQIPGVGPLVSTATVAAIGNGAAFRKGREFAAWLGLVPRQHSTGGKARLYGISKRGNIYLRRMFIHGARAVLMRVKYDTAGLGQWVHQLEARTARNKVIVAVANKLARIAWAVLFKGEAYRHSAVCARV

SEQ ID NO: 407889 - protein, 407 aa, unidentified
MIFVGDDWAEDHHDVHLMDETGARLASRRLPEGLAGIGEFHQLLARHAEEPEQIVIGIETDRGLWVTALVGAGYQVYAINPMAVARYRERHHVSGAKSDAADAKLLADLMRTDRHNHRLVAGDSADAEAVKVLARAHQNLIWVRNQHTNALRSTLREYYPAALEAFDDLHDRDALAILGRAPSPTQAAGLSLSKIRSALKAAGRQRNLDTRVRDIQTALRVEQLAAPAAVTAAFATSTRAMVGIIAELNRQITDLETELATHFETHPDADIYRSLPGLGVILGARVLGEFGDDPNRYTTAKCRKNYAGTSPLTIASGRKRAVLARHVRNRRLYDAIDRWAFCALNFSPGARAFYDARRAAGDLHHQALRALGNRLVGILHGCLRHRTHYNEHKAWAHRQHNPDTQAA

SEQ ID NO: 407890 - protein, 338 aa, unidentified
MTILFLGIDLAKNVFALHGVDERGKPALVRPVVRRDQLLEAIAKLPPCTIGMEACSGAHHWARRFQEFGHTVRLMAPKFVVPYRMSGRRGKNDAADAVAICEALQRPAMRFVPVKSTQAQSRLAVHTARQGWVSARTAVINRLRGVLSEFGTVLPLKAATVRSRAGEQLDTVPGWVQTVCRDLLAELQRLDERVAAYDEHIRLMAQADDRARALMAMPGIGPTTASALLASIGYGHDFANGRQLAAWMGLAPGQYSSGGKNRLGRITKAGDAYLRTLFIMGARAVLAAAANKHDRLSRWATALAERRGYWKAVVAIAAKNVRMAWAMLAKGEEFKPMA

SEQ ID NO: 407891 - protein, 331 aa, unidentified
MNEQHYQFFIGIDISKRYFDVAILIDQRTTSYVFENSRKGTNAFIRLLKNQKITLPNTLMCMEHTGVYGQLLITKLVEKQACFCVEMPIQIIRSIGVQRGKSDAVDAKRIAVYASKNSRELELYQPMEKVLEQVKILLKIRRKLVNTRADLNKYPNELELFSPDLGKLAKKNLKKINKNLNDEIDRLEMEIKKLILSDDKLNKTVGLVTSVSGIGKITALHLTIFTNFFTRYDNPKQLACYCGVVPFEYTSGDSIFRKSRVHPMANRTLKKHLHMCALAAINHDPDIREYFQRKVAEGKNKMLVVNNVRNKLVHRVCAVIKRQEPYVKNVA

SEQ ID NO: 407892 - protein, 355 aa, unidentified
MKYYCTTTEFNCGIDLHARQMYVCVMDRQGRKLVHCNVRNNDFQYFLKLIQPYRHSLTVCCECMFGWYWLADACAEAGLSFVLAHALYLRLIHGGKNKNDRIDSEKITHLLRSNLIPPAYVYPAELRPLRALLRQRLVYVWRRAELLARISSHQLAHNRTPAKQTRRIRDPWEEELLAAEDHPLRQFALKNDLAMIRHYDAQIKLLEGRLVSLAKKHSGREFALLQSVPGIGLSLGLTILHEIGPIERFPTVKDFLSYCRLVKGTVASAGKIKGLRGAKLGNPYLRWAFGEAAVIAKRDHAIIGPLAQRLEARFQGNKFKANTVVAIKLARAVYFMLKDKTVFDPERLIRTMTKT

SEQ ID NO: 407893 - protein, 467 aa, unidentified
MAARKQRQKRMSAQVVEDEDYQLRYEVVAGIDVAKESAVVCVRMPPAAGRKHRTSHLQAVPATVPAITELAAELQAAGVQMVSMEATSDYWRIWFAVLEEAGLAVQLVSSSQARNLPGRPKTDKEDARWIARLTEMGMLRSSFVPPPEIRALRVYTRHIWDLTADRTRYWQRLEKLLEDALCKLTSVVSRLAGHQTARAVIEAMIAGERDPRALAALGQGKMRNDKLPALAEALTGMRFGPQHAHAAASLLRAIDLLDSELRDLQERVTAHLAAIPASWGADADGVTGPQAGRAAGAAALPAADRLDEIPGLSREAAAALIAEIGLDMSRFPTPQALVSWAGLTPTARQSGPIKSRGKKGRGNTYAKRIAVLAAYAAANTDTFLGERFRRLASRPGGGGRTKAGCAVARSILIIVWHLLNDPAARYRDLGPDWHARHTDRSRKARNARRQLEALGYDVIITLREDAA

SEQ ID NO: 407894 - protein, 440 aa, unidentified
MIDQERWLAGVDWASREHQVCLLDPAGQIRGQRAFSHGGAGLAELCEWLLATSSRPPAEIAVSIEVSHGPVVDALLERGFEVYATNPKQLDRFRDRLSPAGLKDDRRDAYVAAHALRTDPQCFRRLSAADPLIVELRACSRLASELQAERTRLTNRMREELWRYYPQALKLTDDLASDWFLAFWLAAPTPQKARRLRPTTLQQLFQQHHVRRLTAEHALSLLRQPDLTVAPGVVKAACVHLRSLINRLRLLNRQLRATHAELDELCNQLAQPQDDSPGQLNEPRDATILRSLPGVGRINLATLLAEAHEPLSRRDYQALRALAGVAPVTRRSGRHILVLRRFACNPRLRDALYYWAQAAARHEPAWRNRYTHMRRRGHSHARALRAIGDRLLAIACAMLRTATLYDPNRHTNKNGEDALASSPSNSQAVIGSPACTAPAA

SEQ ID NO: 407895 - protein, 362 aa, unidentified
MSEATWWVGLDVHASRTAVAVLDTATGEVTKRTVLGRPHEVMEVLEALPGRVRAVYEAGPTGYGLARRSRRGLEISVCAPGEIAGGGGAKSRIKTDARDALKLARLHMAGELTLVVVPSVEQEQVRDLVRAREDVRADLMRARHRLGKFLLRRERYFPGRDRAWTAVHRDWLALLVFDDLPSEATFADYLHAHDTLLARRDRLDEHIEQTALTWSLADEVARLRCLRGIDTLSAMGLVAETRGLRRFDRPRHVSAFVGLVPGEHTTGDKRRIGSITKAGSPHARRLLVEAAWHYRKPPRLNGSLRRRQDAAAPATVDCAWRAQRRLHQRWRELHQQRGKRSTVTAIAVARELSHFCWEITHT

SEQ ID NO: 407896 - protein, 356 aa, unidentified
MSHDVKYIGMDVHKEAIVIAVQNESGKLVMESVIETKASSILQFLHGLRGELHVTWEEGTWAAWLYDLLQPQVQHIVVCNPRRNALLKEGNKSDKVDAGKLADLLRTGMLRPVYHGENGLRTLRELGRSYQTISKDLTRVMNRLKALYRGWGIPCAGTQVYAARAREKWLSKIPHTGVRRRAELLYQQLDGLQALRRNVRPELLAESRKHKAAKLLRQIPCIGPIRAARLIGLMQTPHRFRSKRQLWTYSGLGIETHDSAQYCFVRGQVQRSKKPQQVRGLNRNHNHEMKEIFKSAATRASCGRGPFHDFYTGLLAKGMKPEMARLTLARKIAAITLTLWKKEERFDVEQLKTQAA

SEQ ID NO: 407897 - protein, 318 aa, unidentified
MTTVVGIDVSKTTLAVELITAEGKRRQKTCANTPAGHADLLRWLSRQVADAVAVGVEATGGYQEAVALALHDAGHHVSVLNPAAVEAYGRSQLRRAKTDPTDAALIADYVRTQAPPRWTPAPWEARQLQALVRRLDALLEMRTQETNRLELAAAIVRPSIEATVVHLEAAITAIHQQIAAHIDQFPTLRRQRDLIVSIPGIGDTTAAIVLGELLQITRFTSARQVAAFAGLVPQIRQSGTSVRGRGARSKLGTGRLRKALYFPALTALRHNPPLRAFAARLRTAGKPKMVIVAAVMRKLVHQIFGILKSGRAFDPARA

SEQ ID NO: 407898 - protein, 317 aa, unidentified
MKRSEISTKSAGIDVAKATLEVASAEPGDRREIANSAEGFAVLVEWLERRDVRRVGLEASGGYERAVAEHLRGLGFEVVVHQPAEVRAFARFKRIKAKNDRIDAKVIALATAQVEGVKAANDPRLVELAEWMTAYEQAADRVAQMKTCLEHVTLTELKAGELAQIKQAQLWKAQLLRGILKRIKACPDLARRYGLLQSLPGCGPVVAASLVVRMPELGALQHGRAASLIGVAPFDRDTGQSSGKRYISGGRGRPRRMLYIAALAASRFDPGLRAFVQRLRAAGKEPKVALTAVMRKLIEAANLVLARGTPWVPNPAN

SEQ ID NO: 407899 - protein, 367 aa, unidentified
MSTAKFIGLDVHKETIAVAVANDGRSGEIRFHGTIPNTPDAIRRLVARLAAPDVTLHFCYEAGGCGYGIYRQLTDLGVECSVIAPSVIPRKPADRVKTDRRDAQMLARLLRSGELTAIWVPDEAHEAIRDLIRGRRQAKQDLVASRQTVLSFLLRHGRKFTGRSNWTKAHWHWLSEQAFDAPHQQFVFGEGIRRIEEAQHRCDRLDSMLVEALPQWSLAPLVQALQALRGVGLVVAATLVAEIGDLSRFDTPKQLMSWLGLVPSEASSGARTRRGAITKTGNREARAMLVEAAWSYRLPAREERRYQMRVEGLPEDIRAIAWKAQVRLCQRYRLLASTGKALPKVITAIARELVGFIWDIGRRIQPI

SEQ ID NO: 407900 - protein, 312 aa, unidentified
MDQTTQFIGLDIGKAQIEVFIPGTGDTLTIANTRTGLARQLRNVPHAHVIMEATGGYERLAHETLTRAAFPTSVVNPVEVRQFIRAMGKRAKTDAIDAAMLAEFGRVRQPAPTPVPPAEESRLSELLLYRRQLIDERTRLTNQMPHFRDALVRRSAASRLKAITADLEKIEASMMATVNASGRLKGLFALICSVPGVGPISAITLLANLPERGCLTRRQIAALVGVAPFNRDSGGIKGHRAIAGGRPQVRMVLYMAALVAMTHNKILRTFKDTLVAKGKPKKVAIIACVRKLVTILNAIVRDGKPWPAEQTA

SEQ ID NO: 407901 - protein, 369 aa, unidentified
MKNGSTLRVGLDVHKESIAVAYAGEDGTEAVYVGEIGTRQCDIDAVIRKLQSKGAELVFVYEAGPCGYWLYRYLTRKGLTCFVVAPSLIPRKAGDRVKTDRRDAVMLARLARSGDLTPVYVPAVGDEAIRDLSRAREDALHDLNAARFRLKAFLLRNDIRYSGRANWSAEHVRWLARLVLPTPAQQIVFQEYVRTVSERTELLRRLESELLEQAKTWRLAPVVEALQALRGVQFTVAITTVAELGDLTRFDSPRQVMNYLGLTPSEYSSGERRRQGGITKMGNGHARRVLVEAAKAYRHRAKVSEQIQARQQQLPKEICDIAWRAQVRLCGRYKKLALRGKHANTIAAAIARELAGFMWAIAKAQATAA

SEQ ID NO: 407902 - protein, 377 aa, unidentified
MHGPLDLRSHSTAFTRILALDLGKFNSVLCVYDPLTHDHHFVATQTTPQRIHDLLVTHQADDPAGAGATLLVIETCDVAGWVHDLAVALGMSVAVANPAHEAWRWTRVKRKTDKDDALKLAKLAVLGQLPTAHMPSPQQRQRRRLVHYRRVLVDRRTQIKNQVRSIHSQQGLSLPKRGKAWTAAGIAQIAEEARPLGECDSIDDLWRGRLHTELQLLEALNQQIDQLDAKLDALGAGDDRVQLLQSVPGVGPRLAETVVAHLDDPHRFKTAGQVASYAGLVPKQFESGTIKRSCRITRRGPGLLRSMLVEVAWMVYMRNDWAKHFVQRISRGVASRKNIAIVALARKLLVTLWAMLRDNTRWRGPKATIPSPALAIA

SEQ ID NO: 407903 - protein, 361 aa, unidentified
MTTRMTTQLETWKVIVGVDTHKHVHVAVAIDTRGLRLGGHSFGADSGGYRALIAWARTHGRIEAFGIEGTGSYGAGLARAVRRAGHRVAEVNRGDRRLRRAAGKSDPIDAEAAARSVLADQSTAIPKTADGAVEMLRQLKVARDTAVKARTAAMITLKQILVTAPPALRETLQPLTDHALVTRCAGLRPGPLDTPTASAKHTLRALARRWGALADEIATHDPHLARLTTDTSPTLCAGFGVGAGTAAEMLILFGDNPDRIRSEAAFAKLCGACPIPASSGRTTGRHRLYRGGHRQANAALHRAVLVRMRFHQPTVNYVARRSADGRTKRDIIRCLKRFLAREIYQRVMTDFRMRQHVTLAA

SEQ ID NO: 407904 - protein, 344 aa, unidentified
MKVTTVGLDLAKNVFQVHGIDSAGKVIVRRTLRRRQMMPFFGKLEPCLIGIEACGTSHFWAREIAALGHEVKLMPPAYVKPYVKRGKTDAADAEAICEAVMRPTMRFVAIKSAEQQSVLSLHRTRDLLVGQRTQLVNMIRAQLAELGIVLAKGIHHALRLVDQLVDGVVPDIPPLACKIVIALAEQIRELQARLAMLEGEIKTWFLGNDLAKRLETIPGIGVITASALAASITDPHRFTSARQFAASLGLTPKADSSAGKNRMGRISKMGDRYLRRLLVIGMTSQLQSARRKPEAHPWIANLLVSKPNKLVAVAMANKAARIAWVIMTRGEVYRARKPATEGTA

SEQ ID NO: 407905 - protein, 355 aa, unidentified
MNQEKYIGMDVHAATISAAVKNAEGKLLMECVLETKAATILEFIQGLRGTLALTLEEGTMAAWLHDLLKPHVSRLVVCDPRKNALMRDGNQNDRVDARNLAELLRTNQVKAVYHGKHGTRALKELGRSYLTLTKDMTRVMNRIKSVYRSWAIPCAGTSVYSRRHRAEWLAKLVEPGVRIRAEHLYEQLDSLEPVRQAARRELLLESRKHAAVKLLRQIPTIDPIRSALLVAILQTPYRFRTKRQLWAYCGFAVRTYDSGEYRVVRGKLQRNRERITVRGLNRNHNHDLKNLLKGAAISAIERPGPLQDFYAARVGKGMRPSLARLTLARKIAAVTLIIWKKGVNFDPKHLQRQIA

SEQ ID NO: 407906 - protein, 376 aa, unidentified
MKKVRFIGLDVHADTIAVAVAEPTGEVRSVGVIPNRPASIRKLVKKFGPTEQLRVCYEAGPTGYVVYWQLAALGVRCEVVAPTLVPVKPGDRVKTDRRDALKLARSYRAGDLTPVWVPDAAHEALRDLVRAREAAKKDQLRARHRLGKFLLRQGRRPPTPLKAWTQAHLTWVKSAVHFEHAAQEATLLDYLHEVDHVAGRLERLERAIDAAVQTAPARIRTVIEALQALRGIALVSAVTIVAEVGRLSRFVTPRQLMGYSGAVASEDSTGERTRRGAITKTGNAHLRRIIIEAAWAYRHRPAVGATLRKRQARLDDEVTAIAWKAQHRLHARYRTLTAKGKLKQQAVTAVGRELLGFIWAIGLTVEAKHRAQLAPA

SEQ ID NO: 407907 - protein, 413 aa, unidentified
MEQVLERCAALDVHKAQVTVWVRVPDARGERADLKARFATMTADLLALRDWLKELAVTHVAMEGTGVYWKPVYYVLEDDFQLVLANAQHVKNLPGRKTDMGDAQWLCMLLEHGLLRGSFVPPREIRELRDLTRYRRSLVGERQRQANRLHKTLEDAGIKLACVASDVLGVSGRQMLQALISGTRDPQVLAELAKGKLRNKLPALRAALEGRFSSHHALLAGHILAHIDYLEETIGALTQEIEARIAPFAHKARRLETIHGVGARTAQAILAELGPDMSRFPTHRHAASWASVCPGNHESAGKRRTGRTRKANQHLRAVLVEAAQAASRTKGSYLRAQYEQLKRRHGHNKAIVAVAHSILIAAYYILRDDVPYQDLGGDWFARRADPQRQTRRLIAQLERLGHKVTIQPLPQPA

SEQ ID NO: 407908 - protein, 374 aa, unidentified
MADYSEVFVGMDTSKLRNAVAIAEGGRNGEVRYLGVIDNTEVATSKLVKKLAAQHRRLTFCYEAGPTGYGLHRLIKTLGHQCVVVAPSLIPKKPGDRVKTNRRDALNLAKLLRAGELTAVWVPDARHEAMRDLVRAREAAVDDLKSKRQQVLSLLLRLGRHFTGKRTWTRAHMNWLVSQKLAHREQRIAFEEMLLAVRQANERVIRLERAIAAAVPDWSLAEVVTALMAVRGLDLISATIFLAEIGDLSRFASPRQLMAYLGLVPGEASTGDRVWRGGITKAGNHRARRILVECSWSYRHPPRVGKKKLAKVEAAPPAVQEIAWKAQARLTARYRALARRGKRPTLVVTAIARELSGFIWAVSRAVGQPATPAK

SEQ ID NO: 407909 - protein, 401 aa, unidentified
MERPIVSIDVSNGNSHYMCFIKNNKRFGKVKKIDHDIEGFKRLLEDIQKLEAETNEKVCAVFEATGVYTKPLERFLSKNSIKAYIINPLESARKRKEEIHNKKTDKLDPISISKVYYDKEKMMELEKKDETYNWLRKKNRLYEDQLNHLRKYKVTFQNQLSICFPGYLDLFKDGYSDIPMTILKKYPHPDLLKNKKAETVARYLEKNTCHTHKVSLEYALKIIEFAKKTYPGCEKDDVEVEIFKILLDKVIETQRECEKTLNEMITVVSTLEEYRYISSIDGIGPNLAARIIAEIGDIEEFKSREALVAYAGLDPHIYQSGDQDGKHLKISKKGNKYLRCLLFLAVGCSIRGAKDNPVNRFYQKKKQQSNPLNSKAAKTACTAKLLKIIYGICKNKTTYER

SEQ ID NO: 407910 - protein, 401 aa, unidentified
MKYVLAIDVAKNKSMVSLISDCGEVLIEPYEINHKLIDFNKLKERIENFNIYYEDLTIFMESTSTYHLPIKRFFKENTLYKVCVINPLHSAMYKRNLRKTKTDKQDCYNLADLYFTGKVKNYDDHEQYYLNLNTLSREYNYLLEEGIKFKNKVNKLINLTFPEYEEIFIGQKLYSETALNFIKKYPHADIIASTRVDALANVMTKLNSRHKQFYLKKATLIKVKASSSYPAVSKDDEIVNELIRNIDMLISIINKQNEVKNKLIEKAKRCYLFYAINKIEGLGELTTSLVIAELKDINRFNNIKELTAYCGLDPSIKQSGSSINGKGHISKTGNSYIRRILFNSIQNIIIVCSKINPNNDILLYYRKKRNEGKHHYVAIIACTTKLLRRILAECKNIENNM

SEQ ID NO: 407911 - protein, 350 aa, unidentified
MNILAMDLGKSNTVICNYDSESGKHQFCKVKSTPQEIHDMLVENSPDRVVFEIGASAGWVHDIAVSLAIEVQVANTNHQAWRWKNVKKKNDRNDALKLAQISAMNQLPLVHIPRHNVRQKRALIQYRQSLVRRRTQIKNNIRSILERKGYQGILPAGKKGWSKGSIEMLNKIAISFNSCDMDNLWKGELDLELRQLEIIERCICETEKKLDKLARADGNIKVLQSIDGVGPRLAEAIAAFLDEPGRFKSGKQVGSYVGLTPRQYQSGQMDHQGKISGAGNKVLRMLLVEVSWLGLRHNKWMNETYHRILRGSPSRKKIAITAVARKLLVRCWAMMRDRKNWREEAEKKAA

SEQ ID NO: 407912 - protein, 384 aa, unidentified
MNNDSIIFIGLDTHKSFIQVAVLQEQHGATPEHLGRIKSNKSALIKLTQQLQSKYPKATLHFVYEAGPCGYWTYRLLTSLGHSCCVIAPSLIPKKSGDRVKTDKRDAAKLAKLFKAEELTPIYVPESEDEAIRDLSRARETAMKDLKDAKFQLKGFLLRNNVQATVNDNWSKKHLRWLTDLILPHHSQQIVLQEMIITISERMQRLQRLDNELLHQVKNWRYYPVVKAIQAMRGVRLLVALGTIAELGDLRRFDHPRKLMAYVGLVPTESSSGGKTKRGSLTKCGNSRARRLLIEGAHTYKHKANISVELQLRQEGLPKEIVDIAWHAQQRLCRRYQRLLQKGKHRNVVVAAIAREMIAYIWAIAREVVVSAVEPKTRIARLPV

SEQ ID NO: 407913 - protein, 293 aa, unidentified
MMVIGIDAHKRTHTAVGVDQTGRQLSTKTIGTTSKDHLTLLRWATEQCGDRLWAIEDCRHLSRRLERDLIAAGERMVRVPPKLMANVRDGARTYGKSDPIDALAVARAALREPDLPEARLDGTERELRLLVDHREDLVAERTRIIARLRWHLHELDPGWKAPTKMDRTSAFDKVQAHLSNCSGLVAELAARLVEHLRRLTVEIDELKGEITSRTAVLAPSLLAIPGCGPLIAAKLVGETARVDRFHSKDAFARHNGTAPLPVWSSNRARHRLSRTGNRQLNAAIHRIALTQAR

SEQ ID NO: 407914 - protein, 330 aa, unidentified
MKKVIKQVVGIDVAQKELVVTLGKLYEDLSTDLLAYKVFKNTSNGFEALVLWAKKLTQEDVEVRYVMEATGVYHEKFAYFLSDKKKAISIILPNKIRNYIRTLEIKTITDKSCSQAIAQFGLERKLDNWNRPNPVLKNLKQLTRERDQIVDERSAIKNQLHAENAESEPNKSSIKRMNQRIKLLSKQEQEIKVEINHLIASDKELNKHVKQATTIPGIGILTASVIYAETNGFELIRNKKQLTSFAGLDVIEKQSGTSIKGKTHISKKGNRHLRKAMHLPALSAIKHDARYKDLFVRLVHMLPIIPLPPWSFLKTELNQICYIAHCTRDY

SEQ ID NO: 407915 - protein, 342 aa, unidentified
MQVTTIGLDIAKNVFQVHGIDANEKVVVRKQLRRSQVLAFFAALAPCLIGMEACATAHYWARELTKLGHKVRLMPAKDVKAYLKRNKNDAADAAAICEAVRRPTMRFVRIKTAEQQGQLMQHRTRDLMMRQRTQVINALRAHLAEFGIVAAQGDKGVKELLAVVADQQDARLPVDARASVMVLAAQLEALQTLIGSIEKRIKTQHRANEESQRVETIPGIGVIGATAIAATIVDPRAFRSGRDFAAWIGLVPRQDSTGGKQKLGPISKQGDPYLRRILVVGAISVLRRAMQSPEKYPWLTQLLARRPFKVVAVALANKMARMAWALLAHGGTYRAPQLAAVA

SEQ ID NO: 407916 - protein, 306 aa, unidentified
MIVQGTSVGLDVHALSVVAHAIDEETGKIARARLCPDHREVLGWLHQLRGPVRVTYEAGPTGFGLARAINNSAGMECLVAAPSKLQRPAGDRIKTDAKDAAHLARLLRLGEITAVTVPAPEIEAVRDLVRARDDARADLMRVRHRLSKLLLRQGIVYSGGTPWTCVHESWLRKQRFADRHLKAAFDHSFDAVLAATAARNRLDEQILDVAASARFADPVNRLGCLRGISALTGLALTVEIGDWSRFTGSSIGAYVGLVPSEFSSGTSRVQGSITKAGADHGIENRLVICGLICEPTPSRNRPPEYS

SEQ ID NO: 407917 - protein, 339 aa, unidentified
MFYVGLDVSVARTSVCIMDALGQIVREQSVASTPEAIAGAIRAAGTKVERVGLEAGINSAWIARGLLDAKLPVIVIDATHAAAALKTGFRNKTDKNDARGIADLMRVNKFRAVWVKSPGAQRDRAMLTVREQLRRQSLDTRNTIWSILQIEGLKPPKLANPAFDALVARSLEDEVLAPLLRPLVAVVEHVDRQVAELDKLIAARAKASAVCKLLMKVPGVGPLVAMTYTAGVDDPARFGNSRSVGAHFGLTPRRFQSGEMDWSGGISRAGDASVRRALYQAANVLIHHSGGWCALKSWAVRLAKRRGLGKAKVALARKLAVVLHRIWLTGEDYRLTAAV

SEQ ID NO: 407918 - protein, 351 aa, unidentified
MMIIGVDYHPSFQTIAFFVEETGECGEQELNHSDGQAEKFYRDLKQRGICVRVGMEATGYSRWFERLLAELGFELWIGHPAEIKAKRVKKQKYDREDARLLLRLMRENNFPQVWVPSPENRDLRQLLWHRHRKVQMRTRIMNQLQALAMNEGYRWKKKLFSEQGRAQLEKLALAPWASRRRRELVELLDRMNPTIEELTAAVEREARKRPEVLRLMTHPGVGPLTALAYVLIIGTPARFQRGKQIGTYVGMIPSEDSSGGKQRLGHISKQGNSLLRFLLVEAAQAAARINPDWRRRYMHLAMRRHKSIAKVAMGRRLAIRLYWMWRNGCEYSQSLEFGSYAGQLGTGHGVK

SEQ ID NO: 407919 - protein, 434 aa, unidentified
MEEVRDEPLYRERVCGIDIGKAGMAATIRVPSDANPARRAAGTREFATTRRGVLALADWLRCWQVPAVVMEATGDCWKPVSCRLEAEGLECVLADARQVRHLPGRPKRDTSDSAWLAACFERGAVRSCFVATPEFRVIRLHTRYRRDLTGERTREKNRAEKLLESAAVKLSSVVTDLHGVTGRDIMEHLIAGQRDPRTLAQLARARARRKITELEHALEGAEFFTAEHAALLQAMLRRIDQLNEQITRLTEVIEQLLAPYEEQLQQAESMPGWGRRSAQDALAGTGPDMSRFPTGAHLASWAGRTPLDAQSGKRAGRARHKKGNRYLGAVTGETAVAAGKTATREGARYRKLARRRGKAKAQVALGNTQLKVYYKLLSSPGTRYQDLSPDYYEHQAAIRRKLAYHVREIEAPGLDVTLTRPEPEPGGPEGTQAA

SEQ ID NO: 407920 - protein, 351 aa, unidentified
MPYKLNSGIAMIGIDIGKNSFHVVGHDKRGAIVLRQKWSRGQVEARLANLSSCLIGMEACVGAHHLSRKLQKLGHDARLMPAKYVRPYSKGQKNDFRDAEAIAEAVQRPTMKFVATKTAEQLDLQALHRVRERLVSQRTGIINQTRAFLLERGVAVRQGLRFLRAELPRILATPCDALSPRMVRVIEDLAVDWRRLDDRIEGLSSEIEALARQDEGCERLMTVPGVGPIISSAMVAAIGTGDAFSKGRDFGAWLGLVPKQISTGDRTILGSISKRGNRYLRALFVQAAWVVLVKVGPKHWERYGLKSWIEAAKKRLHHNVLAIALANKLARIAWSVLAHGRTFEVSKIQAA

SEQ ID NO: 407921 - protein, 389 aa, unidentified
MLLDHLSDGLTAIRTQFGAIFVSLELSRSNWLITSLSPGKGEKMSKHSVTAGDVAGLTKLFADLRRKAEARTGESYPIITLQEAGLDGFWLHRVLQQNGIESHVVDPASIATPRRLRRVKTDRLDGETLLRALLAYKRGEPRVCAMVVAPSPEEEDRRRICRERRSLIAERITHVNRIKGLLFAQGISGYEPLRRDRRVRLEALRTGDGRELPAHLKAQIGRELDRTELLLEQIGAVETERDAMLAAVRKPASEEAAPDAVTMLLALKGMGANFAAVLWSEAFYRQFSNRRQVAAYAGLAATPWQSGGIRHEQGVSKAGNPRLRTTMIQIAWLWIRHQPQSALTRWFKERSPQGRKRAIVALARKLLVALWKYVTQGVVIEGAVMKPAA

SEQ ID NO: 407922 - protein, 364 aa, unidentified
MVEVLATPVTWVGMDVHMSSIAAAATVGETGELRQARLAGDVGQALQFVKSLPGQVRVTYEAGPAGFGLARAMREAGIDVLVCAPGMVPRAPRNRIKTDKRDAELLMRCLMAGQLSEVRVPTIAEEGLRELVRAREDLRRDLMSTRHRVTKMLLRHGLRHPGKVGRWGRDHRLWLGKVTLADAAAQSAFFDLLGVLDFLAARRSQLEHELFARVDASAWADTAARLRCFRGIDRLTASGLVAEIGDFGRFERAPQIMSWVGLVPSERSSGEQRRQGAITKAGSSHARRLLVEAAWKYRNPPRRDTNLLARQKGQPAEVIARTWQTQLRLHKVWANHEARGKRRTVTATAVARELVGACWAVALM

SEQ ID NO: 407923 - protein, 370 aa, unidentified
MEQYTEAFVGIDTAKNKHALAIADPGRDGEIRYLGEIDSAPAAVQRMIRKLAGRYEKLYFCYEAGPTGYGLYRQVRALGHDCIVVAPSLVPKRPGERVKTNRRDAVTLARLLRAGDLTPVWVPEAVHEAVRDLVRARTAASEDLRRKRQQLLSFLLRHGRIYSGRKHWTKMHLHWLAQQKFDHPAQQIVFQDAVDAIEDAATRLRRLDQQVAEIVPSWSMAPVVEAYQAMRGVSFGVAVTFVAEIGDLRRFDNPRQLMAFLGLVPSERSTGERVRRAGLTLAGNKRARRVLIEGAWSYRYPARVSQTLQARLEGLPKTVRAIAWKAQIRLCARYRRLTAAGKKRPLVIAAIAREMAAFLWALAQHVAPAA

SEQ ID NO: 407924 - protein, 345 aa, unidentified
MKKIIIGIDFSKETFDATLLDCRNSELSEALQSAVHEKFTNKKEGFQAFLTWIKSFVKKINSAELLLCGEKTGKYSLALSNFLYAKGYSIWLDSGLRIKRSLGISRGKSDKADSLKIALYAYRYQDMAVCYVPLSKNVSRLKELFLYRQHLVSQIKAMAVRKNVTDDFKKELGDVRFIVDSATEIIQQIKATIKKCEEKMQELIEEDEELKTTHDSITSVKGISLINATAFIAYTNNFKDFGGNAKKIATYWGVAAFAQESGTSVHKGARVSKIASKMLKSLLTQAARIAVRWEPKFRQYFEHLISRGKHQGVALNNVKNKLIHVITALAVSKEKYNPEYECINR

SEQ ID NO: 407925 - protein, 415 aa, unidentified
MTDQLNIVCGADIHQRFLIATILCRDGRMWTNRFLMNINGLLTFKDWLMSYGCQKVAVESTGRFWVPIHMVLEGTVDVIVANAYKIKHTTKKKTDLKDSEWLAELCLNDMIEPSRIFPKEDRELRNLTRAREAYVRDLSKEKSRVHHILESCSIKLASVISDIFGKSGMYILNGLLSGTSIEVVLKGIPDKRVREKKAEELREALMGKLEVSDIFLIRQSLQIITQLKIRIEELDVEIRSRIASRPMDLKIAMSIPGIGIVSAYTILAEIGNYMDFKKPEQLAMWAGIVPSVYQSADKLITGGITKQGSKHLRWILVQVAHAITHKKGGKLKKFFLKIRAKKGYLVAIVALARKVLCILHHLLVNQELYEEEGGAVQKDTLILKNDQKVPPIEDMIRYIVQAGYEVKKIKSEVGG

SEQ ID NO: 407926 - protein, 342 aa, unidentified
MQIAILGIDLGKNSCSVVGLDVAGRVVLRRRLRRDGVIKLAAGMSGCVVAMEACCGAHHLGRLLRDHGHQVRLMSPEYVRPYVKAQKNDDRDAEAIAEAATRPTMRFVELKSEAQLDMQSLHRARDRLVGERTALINQLRAVLLERGIVVPQGRRKLERYVNALLAEGEIRLSPRTGLLVEDMRAEWRELDRRISAFDDEFVAQARTDETARLLTSIPGIGPLNATALTAAVGNAQTFRRGRDLAAWLGLVPKQVTTGGKPKLLGISKRGNGYLRKMLIHGARAALPTLSKGETPLGAWLRGLLARAHVNTVVVALAAKLARIAWAVIRSGERFNMKAATAS

SEQ ID NO: 407927 - protein, 405 aa, unidentified
MGMVFVGHDWAEEHHDVHVEDEQGRRLATARLAEGIAGVARFHELVAPFAEDPAEVVVGTETDRGLFIGALVAAGYTVIAVNPMSTSRYRERHSSSGAKSDPGDARVLAEMVRTDRHNHRPVAGDSELAQAVKVLARAHQSLIWTRQRHVNQLRSTLREFYPAALEAFEDLDSGDALAVLAVAPTPTVGRMLSQSKITAALRRGGRQRRIQERAAEIQQILRSDQLAAPHLVAEAMGASARALVAVLVELNTQVTRLEDELADRFKQHPDAEIIRSLPGLGMILGARVLGEFGDDPNRYADAKSRKNYAGTSPITKASGKSRVVLARYARNRHLADGCYLWAFSAITKSPGARAFYDERRAAKDTHHQALRALGNRLVGILHGCLRHGTPYDEHTAWGHRHQEAA

SEQ ID NO: 407928 - protein, 425 aa, unidentified
MKNSAARKLKQVPAGYLVIGVDPHKNKHAAVAITEDLMVRAKFKFANSRAGFGQALENARAGMVKFDCRGVIFAIETGGHFWRNFAYFLEEKGIPFRLISQLTLKRMRDGRDLNRRKNDFRDAEMAANVFRTGDFTETKLPGGVYADLRSTHGAYFRLVKERTRIINLLKGLLDGLFPEFTQVFKHPCGSTALTVLSICPSPATIASMSKDVFVEVIRSGRQGRLMTAKLRALHEVAQSSIGVRPGAEGVAMEVSLLVDRYHLIEQQVNRLVKLLMQQVDRTEEGKYLLSIPGINYLSSAALLAELGPLKAYHNPKQLIKMAGTNPIESESGGKRRGLTPMSKKGRPRLRCSAWNAVIPLFRHNPDFQAWAKRLRERPAYSNPLNGKEVVGAALNRLLRLIYVLAKKQEFYRSPHTVLPTALAVN

SEQ ID NO: 407929 - protein, 395 aa, unidentified
MENLFVGVDVSKDYFCASGLDVQGNVMFSLTATADKSGFIAMMSALSSHAANLEKVMVAMESSGCYHLNLFSFLTSKNIKTIVVNPLLIANYSKLSLRKTKTDKKDALVIAHYLLSHRDTISRCTVSQSYQDLRDVAREREFTGKMIAAVKNDIKRMLQSTFPELEKLVNVFSDTMLHFLKTFPSARLITATDEKDLRQAFIHPDKRMRLVVKPEEIREAALNSVASISPAKEMMLPGKIETLIYLQQRLDELTTLMIRLCKATMEEDLKIVTSIDGISTKTAAPFLAELGDLSNYQSYKKVIAFAGVDPSIHQSGKFQGSSKISKRGNRHLRKVIYTMTFCAVRMEGQFKQYFLKRKNEGLPFRKALFATAHKLIRVIFAMLKKRTYFTANQTA

SEQ ID NO: 407930 - protein, 415 aa, unidentified
MTDERRWYAGVDWASESHHVLLTDGDGRKIGEKIFKHSGEGLAEMVAWLMATSGVAEPSQIHIAIEVPHGPVVETLIERGFKVHVINPKQMDRFRDRFTLAGAKDDSRDAEVMASALRTDPRCFRLLAVADPVVIELREWSRIAEDLGVDRNRLTNRLREQLWRYFPAILDLESDLGAEWLLDLWEAVPTPDKAVRIREATIAKVLKRNRIRRLNAAHVLDVLRKPPVRVAAGTTEAASAHITTLIARIRLLNQQLKEAHRQLDALTARLIPSEEAGPGQTKQHDVEILASLPGVGRIVLATLLAEAFDALQRRDYAALRSLTGVAPVTKRSGKSCVVVRRQACHDRLANAMYHWARVAVQHDPRSRSKYAALRSRGHSHGRALRSVADRLLNVACAMLKTGTTFNPSLATGKSP

SEQ ID NO: 407931 - protein, 411 aa, unidentified
MEHQNYVFVGVDTHKNQHTACVLSCFHQKLGLTQTPNNPTNFDSFIQDINSFKSPDKKLVFGLEDTQGLGHSLAQWLLDQGYTVKEINPALTKRERHHSANPDKSDEIDAEAIANVLLTDFNELPDAIYDANFKAIRQLNNQRQTFIKEQTKLKNRFHNLIHQQYPEYKKFFSDPFGKTAIAFYEKFPHPADLNYYGEDRLQKFLNNQAKSIGNDKAATILSLVDKDKKKTADAEARNTIIIGIIEQLRVLSKSLEKINDQLEKTVKESQYQLTTMPGIGFKLAALFISNIKNIDRFESASKLARFAGLAPVEHSSGTSKNLSYKKYGCRDLNHAFHLLAVQQIGSSINGKIKNPVSYKYYQKKLQEGKSQKVALTCLERRLVDIIYAMMRDRSAYKLPKNINYEVLDKAG

SEQ ID NO: 407932 - protein, 347 aa, unidentified
MKFYSKQHQFYCGIDLHARSMYLCIIDSSSQVKFHKNVKTSPDALMKSIKPFLDNLVIAVECMFSWYWVADFCEDNNIKFILGHALYMKAIHGGKAKNDKVDSYKIANLAKGGNFPVAYVYPRRLRSTRDLLRRRMHLMRKRSELLSHIKNTNTQYNFDPLGKNLRYKSNRKLLDGRFEDSSVQKSVDLDVQLINFYDEQLRDVECYIQKHAKVNDYQSYMLLNSVPGIGKIISLVLLYEINDIRRFPKVHNFASYSRLIKCKAESAGKTYGTSGAKIGNAHLKWAFSEAAVLFLRGNDRAKAYHNKLLKKHNPGKALSILAHKIGRAVYFILKRKEPFNMEQFLPV

SEQ ID NO: 407933 - protein, 411 aa, unidentified
MDILHPCCAGLDVHKEKVVACVRKLQGGSARQEVRTFRTETNALLEMADWLSDEGVTHVAMESTGVYWKPIWNLLEGIFDLLLANAEHIKNVPGRKTDVKDSEWIAQLLQYGLLKPSFVPEKPIRQLRDLTRQRVQLIRQKVQVANRIQKTLEDANIKLASVASDVLGASGRDMLKAIIKGENDPITLANLARQRLRKKIPQLQEALSGEIEDHHRFLLGTLMEQVEFLEGQIDKMSKRIEEVMPAPFAEAIERLDTIPGIDRRAAENIIVEVGADMDRFASAANLASWVGICPGNNESAGKRKSGKTTKGNKWLRVVLVQCAWAASRSKGTHLRQLYGRLVGRRGKKRALVAVAHRLLMIIYNVLKKGQVYEEPAPASPRPQDTERLKQRLLKRLERLGVRVVEQLEAVG

SEQ ID NO: 407934 - protein, 351 aa, unidentified
MYTLGIDLHKKSSVWVLIDEERTELWKENVLCHPEYISIAIEKIPVSPKEIQVAIEPVAGWRWVSRQLEEAGMKVHIAHPRKIYLIAESTKKNDVEDSRMLANLLHAGYFPEAHRSSEAMYQLRLLLRERNFIVRQRTSVKNQLHGVATTQGLHLLKSGNPLHKRGKEGIMAGNNFVLKELHHLEEDLGKRITPFDRKLEEELKQYPVAHLLMSIPGVGMITALTVIAEVDDFSRFSNGKKLASFAGLIPRQRSSGEVIRYGAITHAGSAPLRTALVETAMRIRESNAPELFAFVKRLTPLCGAKKARVALARKLLVIMWKMVTTNTLYNPKILSSSRTTNVSDLDTASGV

SEQ ID NO: 407935 - protein, 355 aa, unidentified
MNNCTIIGIDLGDKKHAVVGLDDKANVVLKRWIPNTKADLEALFRRNRRAVFGMETGTHCRWISALCGQCGCEVYVGNAHHLRSIFGNSHKNDMRDAEEIARLLHGDKRHFHPVQLRDAEHQNLVQLVKMREIVVSQRTKSANAIRGMAKANGVRLPDSDADSLHKKLAAVVDTLPESLQTLLGPQVGLLEKLCAAIEEYDRAIRDYRNAHFRKECDLLETIPGVGPVNAAAFVAFTGDVTRFRHARDVGPYYGLTAGRDQSSSKDEPKKITKEGNGFVRHLLVNAANLIMQGRGRNTELRQFGLRVWGNRGKVAKRKAKVALARKLAVTMAAMLRSGAPYNGIMEENENGQSNA

SEQ ID NO: 407936 - protein, 341 aa, unidentified
MGEVNTIGLDIAKSVFQVHGVDAAGAVVIRKRISRAKVLEYFGELPPCLIGIEACPSAHHWGRELQGLGHTVRLIPPSYVKAYLKRGKNDANDAAAICEAVTRPSMRFVPIKTKEQQTALMLHRARQLLVRQRTMLSNALRGHLAELGIVSAKGRNGTAELLRIIADGRVSPAVCGILKVLARQYGAIGTEIASIDKSIMALHRGSEASRRLAEIPGIGPIGATALVAEIGDWKTFSSGRSVAAWIGLVPKQHTTGGKDRLGSITKQGNRYLRWLLVVGAMAVIRYARKHGTQKRPWLGRLMERRPTKVAAVALANKIARMAWAIMVRGERYKEPKLLLAA

SEQ ID NO: 407937 - protein, 400 aa, unidentified
MLSIGIDVSKGKSTVCGMKPGGEIVYTPFEVQHTREGMSELVSLLRSSGEEVRAVLESTGSYHCPVVAALLENGIFVSVVNSLRMKRFCSQSIRKVKTDRIDAMQIALYGLAYWQELQPTKLPEDTYRELQLLARQYYQMTSLLIKAKVDFNAICDQVLPGMQELMSDHAGRHKLSDFVLRYRHTTRILEMGETRFRKDYCKWAEKKGYRNCERMAALIFATAQNGIPVLPNAPSTQIVITEAIRVLHTVEASRDAILTQMQAPAKTLPEYSLVREMPCIGDTLAPRLIAEIGDVRRFHSKRALIAYAGIDAPPYQSGKFCANNRHISKRGNRYLRKTGYEVMQSYVMHKPANDPIFTFIEKKRGEGKSGKLAMVAGLNKFLRVYYGKVTELYRSLPAIE

SEQ ID NO: 407938 - protein, 311 aa, unidentified
MTEYSVIGIDIAKETFDVYIDTSCTYLHLDNSPDGHQQLLSVLSALRVKLVAMEATSRYHSLLAATLTLQGFAVAVVNPRLVKNFARATGTLHKTDPNDARLICEFGRRMEPEVRATPDEQTQRLAGMVTRRRQLVENRAMEINRYKSCDDVAISASLKRHIDWLKAEIKDADDDIDRQIRTMPLWKEKVKLLEEVKGIGPTTMAVLLSMLPELGALSRHKISALVGVCPYAHDSGKMKGKRCIWGGRSAVRSVLYMATLTAVRYNPTIKAFFERLTGRGKVFKVAITACVRKLITILNAMLRDNKEWRPA

SEQ ID NO: 407939 - protein, 295 aa, unidentified
MQVTTVGLDLAKNIFQVHGITNGGEVVFNRAIRRAQLLKFFERLDPCLVGIEACGTSDHWARELVRLGHDVKLIPPIYVKPYVKRGKSDAADAEAICEAVTRPTMRFVEIKTPDQQAILALHRARDLVVRQRTQTINMLRAQLAEFGIVFPQGVGHATQFAKRLFEGEVPELPDTAGNAIAELCEQLLFVHGKIANYTHEMTQVARREDRVALLQTIPGIWPITASAIVATIGTGKQFSTGRDFAAWLGLTPLNRSSGGKEKLGRISIPLGALHSNVLSGSGWGTGTFDDYSSSA

SEQ ID NO: 407940 - protein, 416 aa, unidentified
MRFRCIAGIDVHKRMLAVVIRREPNGKVEYLKRKFGTMRSEIEHLAAWLRSEQVEEVVMESTAQYWRPVWNGLEAHFRLHLCHPLKVRAPRGRKQDFKDAQRLADRWWSGDLEDSFIPGAEQRQWRWLTRTRVQLRRLIGVVRNRVEGLLEQGGIKLTAVATDPFGVSGWAMLKLIAQGEGDINVLAGQARGRLRKKDAELREALGGKLDPVYRLLLQQNLEQVELLRRQIEETNQALSIAMQAHVATLVRLCKMPGVDMIAAQELLAEIGPGATAFPSPEQFASWVAVCPGSQESAGVCYSRRSAKGNRYLRRLLCQIAWAAIHTKDSFFAGLFGRLLPRIEAKGAAWAVAHRIAKVVWLLLHEGVEYEEKGSPPNPKVLVRKFRHLMKDLARAGLDVNSLLAQSSQAQSPQVTA

SEQ ID NO: 407941 - protein, 343 aa, unidentified
MQATIAVDLAKNVFEIAISRFPGKVSERHRLSRTKFLRFFAQREASRVLLEACGSAHFWARELQKLGHEVVLLPPHLVRPYRGRHKKTDRTDAKALLEADRNEEIQPVPIKTVEQRSVTALHRLRSAWMETRTARLNCVRGLLREHGHFIPLGAKKVVPKVLELIADAENDLPDPMRLALGEACEEIRDLERRCAGVCKQLEALASTTPAVAHLLSVPGIGPLTATAMVAYVGDISRFPSARHFGSYLGLTPRVHATGQRRRLGHVSKQGDEYLRWLLIHGARSCLLAAKRAPNSKPLYTWALEVEKRRGHNRAAVALANKIARIAWTVWKEDRDFTLVRQAA

SEQ ID NO: 407942 - protein, 320 aa, unidentified
MMAQNDLVVAGIDVAKDKVDVCIRSLSLRRTFASTAEGRRELATWLRRKKVGKTVMEASGGYEREWAKALRNASIEVRIVDPKRVRSFAQSAGRLAKNDTIDAEMIAWFAETFGEARGQAYDATREQLHQMVNARQAMKDMQSKLASQGEHAVPAAVQRIHARISKTIAVELVKIEAEITALIQATPNFAELAEIIESVPGLGRTTSAALIAAMPELGQANNKIVASLLGVAPYDDDSGRRRGERHIKGGRRRTRNIFYMACLGAATQHNPVLKAFYDRLVAKGKLKKVALTACMRKLISILNIMIERRQKWDAKRYAVS

SEQ ID NO: 407943 - protein, 320 aa, unidentified
MSQNTSAIMNDKQTAVYAGLDIAKVSLQLHLQGKSYDLPNTIDGHAQLIKRLAAIPGVHVVCEATGGYERAVVGSLHAAILPVSVLNPARVRQFARASGELAKTDPIDAAMLTAFGQAFAPTPTPPRSATELKLTALVTRRMQLLELRVAEAQRADTCIDLALRKLFTLWLAQMEKQIAKLEALIEALLQEQAPLANQVQRLDNIMGVGRLTAVMVLATMPELGTLNRRQAAALAGLCPYNRDSGQWAGKRCISGGRAEVRRALYMAALSASRTNHLLKPFYNRLVAAGKPAKVALTAVMRKLIVLMNHLLKNPNFSLAH

SEQ ID NO: 407944 - protein, 524 aa, unidentified
MVPVLVIATLVTLARSMGHDPVEEITRHTVWPDSQPTGGDMELKMGKSAGLSLECIELNAAGIDVGATEIYVAVPPDRDPQPVRRFATFTADLRAMAAWLVQCRITTVAMESTGVYWIPPYEILEQAGIRVCLVNSKHVKHVPGRKSDVQDCQWLQYLHAVGLLHASFRPDEKICAIRSLSRHRASLIENAAGHVQHMQKALTQMNLQIHHVLSDITGLSGMAILEAIVAGERDAAKLAALCHTRVRSDQQTVIKSLVGNYRSEHLFTLKQSLTAYKHYRELMAECDREIERLTRQLNSRIDPPQKEPMPPADLRFRKRSKNQFHCDMSSELTRVLGVDLTTIPGISALTAHTLLSEIGSDLSPFPNAAAFASWLALCPANKKSGGKVLSSRTRQTNSRASRALRLAAQTLARNRSHLGNFYRSMRARLGAPPAITATAHKLARIIYHLLTTGQPYDESVFLQEGKKQAQRNEKRLRKQAKALGFQLVPIADLPSKPHLPYSGMWPLRTPRKTPHPSPHFLPHP

SEQ ID NO: 407945 - protein, 405 aa, unidentified
MALIFLGDDWAEEHHDVYVMDEGGKRLAARRFPEGLSGIRGLHALIAEHAEEPGQVVVGIETDRGLWVDALVAAGYQVFAINPLAAARYRDRHHVSGAKSDPADAKLLADLVRTDRHNHRPVAGDSDAAAAVKVLARAHQSLIWARTRHTNMLRSALREYYPGALEVFVDLDDRDALAVLGRAPTPAEGTRLSLAKIRSALKAGGRQRSIDSRALEIQAGLRKDQLAANDAVTAAFAASTRAAVGIIAELNRQISDLEAELTTHFEMHPDADIYRSLPGLGVILGARVLGEFGDDPNRYTTAKCRKNYAGTSPVTIASGRKRAVLARHVRNRRLYDAIDQWAFCALTTSPGARAFYDQRRAADDLHHQALRSLGNRLVGILHGCLRHHTLYNESTAWAHRQPTAA

SEQ ID NO: 407946 - protein, 374 aa, unidentified
MQVTTIGLDIAKRVFQIHGIDGAGTVVVRRRLRRSELLQFFAQLAPCLIGIEACATAHHWARELMALGHQVRLVPPSYVKAYLKRGKNDAADAEAICEAVTRPNMRFVPVKSTEQQGVLVLHRARELVVRQRTMLVNGLRAHMAEFGIVVPQGIQRLPELVALLEDERTDIPQIAREALAAMVVQINNLTTSIRQMERRIVAWCRANASARRLATIPGVGPITASALAATITDPTLFRSGRHLAAWLGLVPRQHSTGGKAKLGRITKMGDQYLRKLLIVGMTAVIRSARRTKAPAFAWVNALLERRPARLVSVALANKAARIAWAILIRGETLPGADDHEGSRMTNNDRSRLLTASRSLATALFGSALARGLLH

SEQ ID NO: 407947 - protein, 368 aa, unidentified
MIKVRTWVGLDVHAAKTVACVVDGESGEMLVRRVPGQACEVVAFCVALPGPVRVAYEAGPTGFTLARALRAAGIECVIAAPGKIERPARDRVKTDQRDAERLVRLLMIDGLHPVRVPTPEEEALRDLVRAREDLRGDLMRARHRLCKLLLRHGVRYEDSTSRWGERHRRWLARVELPEPGAQLSFSDYLGAIDQLAIRRDTLERAIEGLIPSSPWAQTIARLRCLRGIDTLTAVGLCAEIGDFHRFERPGQLMSYLGLVPSEHSSGQTRRQGQLTRTGSRHARRLLTEAAWHYRRPPRLGTGLERRQQDQEAPVIAIAWKAQQRLHHLWRRLEQKRGKRGTIVAAAAARQLTGFVWAIATHPPEHPTP

SEQ ID NO: 407948 - protein, 371 aa, unidentified
MKQQTKSSNITVGLDLGDRRHRFCALDERGEVVEQDSICNDRVSLRKLAGRYHGALGVMEAGAHSPWISRFLEALGWRVVVSNPRKVRAIYQHERKSDQRDALMLARIGRMDLALLYPVRHGTAEAQQDLLRIKLRDSLVRARVAVINSVRFTLKSLVYTVRNPSSARFHKVVMEEVPESVREMITPSVQALAELTARIKMLELEINTLAQMKYPQSAQLQQIPGVGPITALYFVLKIEDPNRFAHVRDVGAYAGLCPRRDQSGESDPQLRISKRGDAYLRRLLVSAAHYILGPFGPQSALRAYGLMLAADGTARAKKRATVAVARKLAVLLLSLWKSQQPYQPFPGACLNGEQEDRRSGTIALHRMEATD

SEQ ID NO: 407949 - protein, 423 aa, unidentified
MMKLKYPICCGLDVHKNVIVATIVITNRDGVSEYRQKSFSTINSDIQKFHNWLIENNCYHVCMESTGKYWIPIFNYLEKDIEVCLTHPKYVKAIKGKKTDKKDSKWIADLYKFDLVRCSFIPPKDFRQLRELARYRFKLVCMKSSEKNRIQNCMTISNVGIASVLSDPFGKTATEIMSYLLEHTADSIDEKAVRKLIKKGAKAKSDEIIEAIRGCNIETDQAKKLELALGHLEYLDGMITQTEVELYVRIKPYYEFVEFVSTMPGMTELSSTIVLAETGVDMNIFDDAKHLCSWCGLSPSNNESAGKKKSVRIAKAGAYLKPMMVQCALAAIKNKKQPYFAIKYGRIKKRRGHKKAIIAIARMMMVCIYHMVSEKKPFTPADYEELMKPQNHVERVVLNENNVFAYLESLGYDSSKLVKRNDN

SEQ ID NO: 407950 - protein, 343 aa, unidentified
MDHFAGLDVAVKETSVCVVDDTGKIVLEVKVASEPAALLAVLKDGTYRFKRIGLEAGPLSQWLYSALAEADLPVICVETRHMRAVLKAQINKTDRNDARGMAQMMRVGLYRPVHVKTLRSQELRMLLTHRKLLQSKAIAIENDLRGTLRNFGLKVGIAGKVKFEARIKELVESFPDLVVLVEPLLAVRRVLREQIGVLHRRLLAVVQDDDVCRRLMTVPGVGPVVALTYRATVDVPARFRKSKSVGAVFGLTCAKYQSGEMDRSGAISRCGDEMMRTMLYEAAQSMLFHSTKWSWLKAWAMKIARHRGMKKAVVALARRLAVILHRIWVDGTEFRWTREAVTA

SEQ ID NO: 407951 - protein, 427 aa, unidentified
MNYNQNEKILQLTDKTLIIGVDIAKHTHVARAQDFRGVQFGKPLYIENSFEGFQMFTRWMNDLTAQNEKTDVIIGMEPTGHYWLPLAYWLMEKQLKVVVVNPAHVKKSKELDDNSPTKNDVKDARVISRLIQDGRYSEPHLPEGTYAELREGMNMYEQLMKDLQAVQGRVHQWIDRYFPEYTTVFANWEGQSSIQVLKMGLFPEEILETDEMTILTEIRKEVKRGVGLKKIRQLKEVARHSIGIQEGKTMARMKINTLMDQYTLLHKKINEIWEMIEGLTSTIPGVKEMTDIKGIGDITIAAFLAEVGNLNNYEHPEQIIKLAGLNLRLATSGKWKGQTVITKRGRPKLRALLFKVILPLVNHNPAFKAMHEYFTTRKENPLKKKQSLIALCCKLIRVLFAVGKKQVAFSPEKMLNDIPHFNLQNAA

SEQ ID NO: 407952 - protein, 343 aa, unidentified
MNISTVGLDLAKSVFHVVCFNEHSKEVKKRMLRRNQVLQFFTQLPACQVGMEACAGSHYWGRELRALGHDVKLIPPQYVKPYLRGNKNDYNDARAIAEAVTRPSMPFVAIKTVAEQDMQAIHRMRAQCIRDRTALSNSTRGLLGEYGIVLSTGLATLRNSIHGLLEDADNGLSDRFRNLLARRYEQLVELDKHIAFYTNELELLSQQDDACQRLQTIPGFGPIVSSAFRSAIGDGRAYAHGRDASASLGLVPRQHSSGGKNVLLGISKRGDRYLRSQLVHGARAVVVQAARKDDPLSRWINRIREERGWNKAVVAMANKMARIGWAILRYNTDYQPALTPSTR

SEQ ID NO: 407953 - protein, 427 aa, unidentified
MKKADLLSTLFVGIDISSRENVVAVMDFESAKPISSFAVPNNEPGAEEMAKKISTFITPESGLKKIVIGLESTSFYGVHIANYLSTCRELMPFHTEVYCLNPKSIANYKKSYIGLSKNDYIDAFIIADFARVGRITTKPWRGCQYLALQRLTRHRLHLVKALTREKTYMLSNIFLKFSEFTMLDTEEQPFSNEFGATASAVLTEFLSTEEIVDMSMEKLVEFICEKGRNRFPDPHKTAKLLQVAARNSYRLDKCLYEPLTVAIASSFTMISTYNAEIKKVNQSIEKTIKGLNTNAFLSLQSIPGIGPIMAAGIMAEIGDITVFKSQESLAKYAGLVWRENQSGQFKADDTSMSKAGNSYLRYYFLEATSHIKLHCPEYREYYSKKYAEVKTHQHKRALALTARKAIKLIFGLLAKNQLYSRNRVGQA

SEQ ID NO: 407954 - protein, 341 aa, unidentified
MNGSKTVVGIDIAKRVFQLHWIDMETGEIVSLQLKREQFLEHFANRQKCLIGMEACGGAQHWARKLTAMGHQVKLLPGKAVKGFVIGNKNDRQDARAIWTAVQQPHVKAVAIKTEAQQAILALHRMRSQLVKFRTAQINGLRGLLTEYGEVMPQGKAGVRKGISDALGKLADRLPAMVIDTLREQWARIEKMDEEIATIEQRIKHWLKQDDACKRIAEIPGVGPLTATAAVAMMGDPKAFKSGREFAAFAGLVPRQVGTGGRVKLLGISKRGDTYLRTLLIHGARSVLTHAKDPGPWVTELRRRRPLNIAVVALANKMARTIWAVLAHERTYQKGFVSRPV

SEQ ID NO: 407955 - protein, 355 aa, unidentified
MTSAKYIGMDVHKESISIAVRNSVGKVVMECVIETKASMILQFIDGLRGDLQVTFEEGTSAAWLYDLLKPHVTKLVVCDPRKNKSMREGNQNDKIDARRLAELLRLDHLTPVYHGEHGLRTLKELVRSYLTITKDLSRVMTRVKAIYRSWAIPCTGKQVYARCHRAEWLAKISEPGVRRRAEFYYQQLDALRVLRQEARRDLLTESKKRKAWKRLCEIPAIGPIRAAVLLGILQTPHRFRTKRPLWNYGGLAIEMHSSADHHSVHGQLQRSRKNVLVRGLNRNCNHDLKNLFKGAAAVASSKPGPFQEFYTALVAKGMRPEMARLTLARKIATIVLIVWKRGVHFDAQYLKPQTA

SEQ ID NO: 407956 - protein, 405 aa, unidentified
MIEATPTYAGIDWSWQHHALCIVDDDGQRIEEATVPHTRPGLAKITLLLRRHGVERVGIERGDGPVVEHLIRDGFEVVVISARQVKSLRARYRAAGNKDDRFDAFVLADALRTDAGRWAIVQPDSDETIALRMLVRARHDLIDHRIAVHNQLLAVLQHNFPGAIGLFSQLDIGISLAFLRRFPSEAKAAWLSELRMAHWLKANAYCGRHTPAQLVGHLREAATGRIAGAAAEASEVIVLTLVDLLTTLRQDQEQLEARIKEALLAHPDGPIFQSLPRAGVVRAATLLAEIGDCRARFPDPAALAAAAGVAPSTRQSGKHLNVAYRRGCNKQLRAALVDWAQDTPRANPWARDTYDRARARGCRHPHAARILAQGWTRILWRCWHDQVPYNPDLHGRLNSLLPEAA

SEQ ID NO: 407957 - protein, 365 aa, unidentified
MWEAPVKIQRTSVGLDVHARSVLGCALDGDTGEVFQRRLCPDHGGIVAWLGDLPGPVAVTYEAGPTGFGLARALRAAGILCEVAAPSKLIRPAGDRVKTDARDAAHLARLLHLGQITAVTVPPASQEAARDVVRAREDCREDLMTARHRVSKLLLRQGIIYSGGKPWTGRHEVWLRAQRFDNPALQLSYEAAFDAMLACVDRRARLDDAITKLAADSEFTPVVHRLGCIRGIATLTAFGLAVEIGDWHRLTGRTIGAYVGLVPSEYSSGETRAQGGVTKTGNGHARRLLVEAAWHHRSPYRPGAELRRRWDLAAPAARARGQSANRRLHTRWVGFDARQKRPVIANVAIARELAGWCWSLAVMPD

SEQ ID NO: 407958 - protein, 418 aa, unidentified
MSRSKSSAILSVVHHKCCGLDIHKDKISAALVVTEDDGGVTEEIREFGAFTDDLYQLKQWLVDAGCLVVAMESTGVYWRPVHNILEDMVQVILVNARHVKNLPGRKTDVSDSRWLAGLLRHGLLRGSFIPEKHVREWRDLSRLRRVYVDSLSDFKRRVHKLFESANIKIDSIASDLFGVTGRNLINLLVSGKEVTFEDVCNCTRGKLKGKEDELFKSIRGFFTEHHRFQLVSILTLIKTVETQIALVHDRLRNLLSDRNEKLKMLMEVPGISDVSVYSVLSEIGDNLDKFETSSAITSWCGLCPGNNESAGKRHSGRSPVRSNHLKTIMVEVAWGAVKSKGSYYREKYYSLKARIGSRKAIIAIARRILKAIFHILKYGVPYRELGEQYLVNLNHDARLKNLHKQAAKLGYAVVPLTA

SEQ ID NO: 407959 - protein, 484 aa, unidentified
MAKRKMSTFERLSTGQMNRAQRRELGRRVAASDPGLTTVHCNAAGIDVGNESHFVAVPADRDANPVREFGCWTAALNEMAEWLKSCRIDTVAMQATGVYWIALYDILEQHGIRVVLVNAQHTKNVPGRKTDVQECQWLMKLHTYGLMRDSFRLQQDMEYVRTIWRVRDRHVKDAGREVQHMQKALTKMNIQLANVISDISGASGQAIITAVLKGERDPHKLADLADYRVKASREEVARSLEGNWRADVLFELQQAVDSYHFAHRQMQQCDEKLTLYLASLPARMLDIPARPEDAPESAAQKRKKARKPRDNEPRMDMKLELERICGVDLTSIDGVSVMTAFTVISEIGTDMSRFQNEDHFTSWMGLAPSKDISSGKIIGPGKKKVKNRVAVVLRTAATSLLASDTHLGARYRHLRRQLPTFKAAVKAMARYLAVLIYRLLTKGEAWVDRGAVQFERRRLQRELASLQSKAKAKGFTLVPIAKPC

SEQ ID NO: 407960 - protein, 314 aa, unidentified
MDNTICWVGIDVCKQHLDVAIRPHDQMLQFPNTDGGIAALVAQLRPLQPERTVLEATGGMERAAAVALQSAGLAVAVINPRQGRDFARAIGRLAKTDRIDATVLAHLGEALRPPVRPLPSTEARHLKELVTRRRQIVEMIGAEKSRLSGTTGAAKADIQAHIDWMQERLGRLDREIEAVKRQHVEWSEKADLLESVPGVGPVIAMTPIVELPELGRLNHKQIASLVGVAPHNRDSGKVRGKRTIWGGRAAVRAALYMGALVGKRFNPALKDFYERLKQGGKATKVALTACMHKLLTVLNVMVKKGERWRAPSAA

SEQ ID NO: 407961 - protein, 346 aa, unidentified
MKQIIRIGMDTSKYIFQLHGVDAAEQPVLRRQLRRKQMVEFFAKLPPTVIGMEACGASHYWARELGKLGHEVKLIAPQHVKPYVTRNKNDGRDAEGLCEAMSRPRTRFVPVKTAEQQAALMLAGLREQMVARRTQISNTIRGYAAEFGITAAKGLDKIETLLGQIDQEESVPALARELFAIQGSAYARLQVELKAIEIKLRVWHRANADSRRLAQIPGVGPVGATGLVMKTPDPGAYASGRHFAAWIGLTPKDHSTAGTTRLGKITRAGDERLRSVLVAGATAVIQQAKHGRGHPSPWLLALLKCKPPKLAAVALANKNARIAWKLMVTGQSYDGARMLGASASAA

SEQ ID NO: 407962 - protein, 341 aa, unidentified
MQAVTTIGLDIAKSVFQIHGVDAAGNVIVRRQLKRRYVLPFFQKLPPCLVGIEACASSHHWSRELQALGHTVRLMPPAYVKPYVKRHKNDAADAEAICEAVTRANMRFVAIKTPAQQSCLMLHRTRHLFIRQQTAVINAIRAHLAEFGIVAPVGRNGVEQLLDVVADASDRPEVARACLLALGAQLRTLKAQILNFDQQIMAWHRSNEASKRLDDIPGVGPALATALVASVADPKAFRSGRDFSAWIGLVPKQHSSGGKDKLGSISKQGDRYLRSLFTAGALAVIRYAKIHGTRHRPWLTALLARRPTKVAAIALANKIARMAWAMMARGDRYKEPVALAA

SEQ ID NO: 407963 - protein, 343 aa, unidentified
MKNPPVRIGMDTSKSVFQLHGVDADEVVVVRRSFRRSEMIHYFEKLSPALVAIESCGSSHHWARLLTSLGHDVKLIPPQYVKPYVKRGKNDAADAEALCEAVTRPSMRFVPIKSAEQQAACMLMTVRERLVSVKSQLSNAFRSYAAEFGIVGAVGRQNVNALIQRVLEDETLPELARELFRFQAKEYAVVEARLEEIEARLMKWHRENEASRRIATIPGIGPIGATMLSMKAPPAESFRSGRDFAAWIGLTPRDHSTGGRMRHGGITKAGDAALRSVLVVGATALLRHIRAGRHKPTAWLAALLDRKPPKLVAVALANKFARIAWRLMVSGGIYSRPSDSVAA

SEQ ID NO: 407964 - protein, 375 aa, unidentified
MEHHSEAFVALDTAKLRNAVAIADAGRNGEIRYLGEIDNTEAETRKLVTKLASKHARLTFCYEAGPTGYGLYRLIKSIGHDCIVVAPSLIPSKPGDRVKTNRRDAVNLVKLLRAGELTAVWVPDERHEAMRDLVRARDAAVKDYRIKRQNVSSLLLRLGRRYPGKKTWGRAHINWLTSLTLEHREQRIAFEEMLVAVRQVRERIERLEQAMREAVAEWTLAPVIEAVQALRGIDMVGAVVFLAELGDLSRFENPRQLMAYLGLTPSERSTGESVKRGGITKAGNTRARRLLIEAAWSYRFPPRVSKDMQTRIGAAPRTAREIAWKAQMRLCGRFRTLTRKGKRPTIVVAAIARELSAFIWAINREVVGSHATANQ

SEQ ID NO: 407965 - protein, 337 aa, unidentified
MDHFGIDLHQKHSEICGLDAEGRVKHQERVATTEAGLRRVFGKRKSCRVVIESCCQTPWAARLLREMGHEVVVVNPRRVRLIAESTLKSDRIDAEILAWLGQQKDAMLRPVYQRSEAAMELRTRLRVRTSLVRARTALINSVRGTLRSQGYRMGSCMAARFAARFTDLKIQVELRQALDPLVETIAELSGRIERLEKDLVEESSSDELMLRLQEVPGVGPLVCLAFIGWVDRPERFARSRDVGACLGLRPRVRDSGEQQWRGPITREGDGEMRRLLVQAAQASLHCRRESALKRWALQLAARVGKRKAVVALARKLGVLLHRLWVTGNSYQALPQAA

SEQ ID NO: 407966 - protein, 377 aa, unidentified
MKAPSTRPAAVLGLDVGKSSHWACLIDRDGEVLDSAPVRNREAELDALFASAPADTLVVVDQFRNIGSLAVRRARAAGLGVAYLPGLAASRAAGLFAGEAKTDERDAAVIARTALGVPDSLSGVPGRGEALEAARALSSQRDHVVACATRDKNRLRAVLLESCPALEAAVDLSDRRWLELLAGFGGAWGIARSGAEGPRAEAAGEAAAASTAPPPALVEAENRQVRFLAARISEALDEAGALEAETAALLEGDETYACLLTVPGIGPRTAAQLAVSVDIGRFPDHDHLASYCGIAPRVRSSGTSVRSVRASRRGDARLKSLLIFSCNSLVRSSGRYGEYYRACRARGMGHGRALKAVARKRLRAIYAVMRDRVPYRE

SEQ ID NO: 407967 - protein, 334 aa, unidentified
MENIALIGIDLGKNSFHIHCQDHRGKAVYRKKFTRPKLIEFLATCPATTIAMEACGGSHFMARKLEELGHFPKLISPQFVRPFVKSNKNDFVDAEAICEAASRPSMRFVQPRTESQQAMRALHRVRESLVQDKVKTTNQMHAFLLEFGISVPRGAAVISRLSTLLEDSSLPLYLSQLLLKLQQHYHYLVEQIKDLESQLKRKLDEDEVGQRLLSIPCVGTLTASTISTEIGDGKQSASSRDFAAATGLEPRQYSTGGRTTLLGISKRGNKKIRTLLVQCARVFIQKLEHQSGKLADWVRELLCRKSNFVVTCALANKLARIAWALPARQQTYEA

SEQ ID NO: 407968 - protein, 408 aa, unidentified
MVYIGIDIAKRSHVLSAVDDDGKAVIESFKFANTDRGFEKLLERLKKAGVEPGGSLSGMEATGHYWIALFDFMTSHGYDVAVINPIQSDAFRDVWTVRKVKTDAIDAAMIADLVRYKRYEPSALGEEATDELRSLARYRMSLVERSTMLKNRATAILDRVFPELDGLFSGSFGPTQRALLEHCSTPSQVLSTNVRTLERILREASGGKCGREKAEKLKAAARSSVGVGFGSRTLAFEIRLLMEELDFVRGQIDEVDGELARLLDETDGRWLLTVPGIGLVLAATIAGEIGDANRFDDAHQLMAYAGMDPTKSESGETVASDGNMSKRGPAALRWAFMQAADSARKYDPYFGDYYAKKKGEDKKHHYVALSGVARKLMGVSLALMKEQRPYEPTPPKHHLPGHLQEAAK

SEQ ID NO: 407969 - protein, 345 aa, unidentified
MNKISVIGLDLAKNVFQVHGIDLDGEVVVRKQLKRSQVRQYFAKLEPCLIGMEACGGAHYWSRELTERGHTVRMMAPIFVKPYLKTNKNDRNDAEAICEAVQRPSMRFVQPKMPEQQAVLHLHHGRRLLVRQRVALSNHMRGVLSEYGIVLPQGAKAILQRLPELLEDADNDLPILARHLLAELKEEHDLLIERIERLEGRIKAWHANNSVSQRLASIPGIGVLTATALAATVGEGQDFSNGRQLAAYLGLVPRQVSSGGKARLLGISKRGDGYLRGLLIHGARAVIYHIQRRLKAGQPGGNPWVEQLLQRCHPNEVAVALANKMARIAWVLLVRNETWCPARSV

SEQ ID NO: 407970 - protein, 457 aa, unidentified
MPQAKRSRSPRDLSPVHPAAAAIDIGATIHVAAVGVDRDEEPVRTFQTFTDDLHRLADWFARCGIKTVVMESTGVYWIPVYDILEQRGFEVMLVNARDAKHVPGRKTDVSDAQWLQRLHEYGLLRASFRPQAEMAGLRAYLRQRERLLDYAAAHIQHMQKALMQMNLQLHHVVSDITGATGMGIIRAIVAGERDPTILASYRDVRCHSSVETVRRALVGNDREEHIFALTQGLELYDVYQTKVAACDKQIEAILRRLKKNATPPVNELPPPRRRSRQPNAPAFEVREALHAILGVDLTQIHGLGPYLALKLVGECGTNLSAWPSAKHFTSWLALAPHNKISGGKVLSSKTQRTSNRAASLLRLAAVTVGRTDTALGAFYRRLSGRTGKAKAVTATARKIAVLFYNTLRHGMSYDDPGASYYEDRYRQRVLRNLQRRAKSLGFVLHQADLAVTQVGVS

SEQ ID NO: 407971 - protein, 367 aa, unidentified
MEKSSTTFVGMDVHKESIDVGIAAAGEARHYGRIAGDAASVDKLTRKLHSVRLDLVFVYEAGPCGFWLYRRLKAQGLECMVVSPSMTPRNAADRVKTDRRDSLKLARLARAGELEPIYVPDACDEAMRDLVRTREDAVCMQRQARQRLQALLLRNEIRYVGKSAWTQAHRRWISGLKLPNAAQQIAFEEYVQAVHEASERLERLAKAIAAELEHWRWRPVVQALQALRGVSAIHAVRIIAELGDLARFESPRKLMGYLGLIPSEDSSGPRRRQGSITKAGNSSARRALVEAAHGYAYPARVSWVIARRQTGLSKSICDTAWEAQLRLCARFRRLAARRVPRNKIVVAIARELSGFVWAIARQVKPVL

SEQ ID NO: 407972 - protein, 388 aa, unidentified
MIYVGIDIAKLNHFASALSSDGEILIQPFKFTNDGDGFQLLLSKLESFEKDSIIIGLESTAHYGDNLVRYLVACNYHVCVINPIQTSMMRKNNIRKTKTDKVDTYIIAKTLMMQTSHRFFSFEDLDMMDLKTLGRFRQKTVKQRTRLKIQLTSYVDQVFPELQYFFKSGLHQKSVYALLKEAPTPEAIASMHLTHLSHLLEIASHGHFKKDTAKALRVLAQKSVGANDSALSIQITHSIAQIELLDSQLDQIEAEMTEIMKFTDSVIMTIPGIGYINGGMILGEIGVIHRFSTPGKLLAFAGLDPSVYQSGNFNARHTKMSKRGSRVLRFALMNAAHNVVKNNSTFKAYYDAKMAEGRTHYNALGHCAGKLVRVIHKMLSDEVKFNLV

SEQ ID NO: 407973 - protein, 399 aa, unidentified
MLNDTSTPVTASLSNDLSGATEIKNHILDLNHTYHFERIVIGMEATSIYSFHPAMFFHEDSQWKELHVEIMVEQPNKIKKYREAFEENKNDTIDAFYIADYFRIERFSPSFLKEEKYMAIQHLTRTRLQIIEQLTRTKQHFIENIYYKCNTLTYQFKKEELSTNLWSSTMMTLMTDEMTLDELANMPLQELADWLQQMGKGHFKDSDKLAQTIQAAIRGSYRLSKLQQDSVNVILGLLAREIRNLEKMIKEIDKAIEDMVETIPEYQCLTSIPGVGKVYAAGIIAEIGQIKRFKDHPQVAKFAGLNWREKQSGNSNSQHTSLVNRGNHYLRYYLVEAANSVRRYDDEYKDFYKKKYHEVPKHQHKRAIVLTARKFVRLVDVLLRNHQLYTPPRRLMEDK

SEQ ID NO: 407974 - protein, 371 aa, unidentified
MEESSKSLYVGLDVHKESIAVAYAPEERGTEVVSLGAIGTRQCDIDKLIRKLQAKGAPLVFVYEAGPCGYWLYRYLTRQGLSCHVVAPSLIPRKPGDRVKTDRRDAVLLARLMRSGDLTAIYVPTVEDEAIRDLSRGREDALRDLKATKYRLKAFLLRQDIRYEGRANWNAAHLRWLSAVVCPTPVQQIVFQEYVRAVTEQHERVQRLETELHEHVKTWRLYPVVEAIQALRGVELTGAVILVAELGDLTRFDTPRQLMSYLGLTPSEYSSGERRRQGGITKAGNTHARRALVEGAWAYRYPAKVSRHLQLRLEKLPAEVQAIGWKAQVRLCKRYRRLIARGKHANQVVVAIAREMAAFAWAIARLVPLAP

SEQ ID NO: 407975 - protein, 413 aa, unidentified
MVRSGGGWLEIFCGIDWSEAAHDVAVVDETGRLLARRRIADDAAGFTALTELLAGYAGRPERVDVAIETGRGLLVAALRAAGHRVFAINPKAVDRYRDRHGMAGAKSDPGDARVLADILRTDRDRHRPLPADSDLAAAVGVLARAHQDAVWARVQDANRLRSLLREFFPAALTAFADLTTNTALAVLTAAPTPTAAARLSRANLTDLLRVAGRGTRPTEAARLAEIFTVDQLRQPPVVEAAMGQAVRAIVRTLTAANQSISDLEAALAAAFDQHPDGEILRSLPGLGPILAARVLSEFGDDPTRFPDPASRRAYAGTAPITRASGRSRVVLARHVRNKRLADACYLWAFAALNRSPGARAYYDTRRAAGDRHNAALRRLASKLLGQLHHCLTTSRPYDEALAWPQPDTTPAAA

SEQ ID NO: 407976 - protein, 388 aa, unidentified
MSGSTHNHQKVNSVLILECLDRSDPGSEGRFLSHMLDLMRIKSQYIEVWTKEQLLALLKTVPERVKIVHITTHGVCRQSGKNFRGHWPQLLDRLRTVAGPWTICFEATCGYGYLYRELSRMAARVVVAHPGQLRLIFRAKRKNDRIDARKLAKLLYLDEVPPAHVPSQEVQSWRELLEHRRRMVDRQTTCKNAIRSLLRSHGKIAAPGLWTKKGLAWLRQEEMPTAAARLKRDLLLDELAEAKRRVRTVTKALDEIGERHPAVLLLRTIPGVGIRTAETVAAYMDNAKRFVRSAQVGAYFGLVPCQDASAGVNRLGHITRQGPSTARKYLVEAAWQGVYRSPTIRAYFERVRHGRPERRKIALVATAHYLLRCMHAMLVRNQPWHEAA

SEQ ID NO: 407977 - protein, 439 aa, unidentified
MPTPSLPVLDPTAAAIDVGSEQLHVSIAGGPPKIFGTTTGELHALRDYFLAQGVRSVAMEATGIYWLCPYEVLEKAGLTVVVVNGKYVKNLPGRKTDMKDCQWQATLHAHGLLKPGFVPPEHIRRLQDYLRVRTDHIVMAGSHEQHMQKALERMNLKIHDVISDLTGVSGLKMVEAIVAGERNPVALLALCDPQIQKNKAGRLRAALEGNWKDEHLFALRQAYELWQFYQKKIAECDGAIEVVLKELAGPEDPKAPAPPPTKRGGVNTPQIAGLHALLWRLCGQKDPTTLPGVADYVLLQLIGEVGTELGKNWKSEKHFTAWLGVAPGSRQSGKRRGSQKRGRNRAGRLFCLIARSVGRSVDKALGGFYRRIKGRQGGLVANQALARKLAEMFWRLMVHGRAYVEEGLKKYEEKVLQTEHRLLQKLAAKYNLVLQPKTT

SEQ ID NO: 407978 - protein, 312 aa, unidentified
MDASIVGIDVSKDRLDVAVRPSGESFVIARTGAGIEDLAERLQKIAPRIVAIEATGGFETVVAAGLASAELPVIVVNPAQVRAFAQALGKRAKTDPIDAAVIAHFAEATKAVPRPLPDEMTRLLADLIARRRQIVEMMAAEGQRARRVTDQRLKKSIVRLRKALEKELAELDGEIDDHVRGSPVWVEKEDLLASVPGVGPVVARTLIAELPELGSLDRRKVAALVGLAPWTRQSGKWRGKSFIGGGRKTVRNALFMAAMVAARHNPVLKRFRDKMVAAGKPKRLALIAVARKLLTILNAIVRDRRRWQPETA

SEQ ID NO: 407979 - protein, 551 aa, unidentified
MLSQLAETVQHNTPPADAGGAPINIGVGIDTSRYGHYVAFLNDQLQAAAPELEVIESAVGYAKLRQRLSDLVAKHGSVRFLVRVDAAGLYADNLIAWLTDLRIEHANFAISCGDTQRNKNYRVAIYGRQKSDPIEARACARYAITERPKANPILTAELRQLRQIAGRLQAVVRQRTRLVNQLHQLLARTFPELAMLVKDITVGWVLELLARFPTAQVLARATEAELQTVPYLPHDRIDDLLIRARDSVASLHGELVEELVRDQVRQVRDIRARQIRLETLLKSAYQQLPEPNHLDTIKGIGEVTAAILTAFILDIANFETPGKLVAYFGVMPIEASSGVDREGTPRGPKRYVMSRRGNDLVRRYLWMAALTASRHNPACRALYARVRAKRPDKPSIAIGHVMRKLLHLSFAIWKSGKPFDPKHYPWDNPADGEGNNTCKDVDASMEEQAAGLKPDEPAKSEVAATCEGTVAEPNPAVESSPWIDFAHVKKQLPMSRLLDHLGLSSRLRGSGPQRRCACPIHRGDGRGERSAYTWSRTCSSASRHAVRRRGT

SEQ ID NO: 407980 - protein, 327 aa, unidentified
MRQHKSLTDKVKTTVAFDVCKAALDVHIRVDNKAFQVPNTHDGFDQIALTLADYDVSLILMESTGGYEDLAACNFQSLGYDVAVINPRHARNFAKAMGKLAKTDRLDAAILADFAAVIDSRPDRARYIKPPTDEERKFLSQMVARRRQVVDLIATEKQRLAHADDYAKASINIIINLIESQLKEINSDISFYVKKNFSGLSNMLSEIPGIGEQSVGLLIGDVPELGQIGNRQLSAVIGVAPFNHDSGKMRGKRCISGGRQNVRSVLFMCVMSATRFNPVIKEFFDRLVAKGKPKKLAYIACIHKLLRIINAMVRDGTIFNPDLHAVS

SEQ ID NO: 407981 - protein, 444 aa, unidentified
MKLNISNSLKKSELFQINPNCAGIDIGAKEIFVSIGDKKVRQFSTYTPDLKKIIKWLKSESIEIAAMESTGVYWIPLYEMLADQGIIPVLANTKNIKNVSGRKTDVSDAEWLCTLLRYGLIAGAFRPKAEILELRGYVRQRSLLIEHRAPHILHIDKALIQMNLRLSNVISDIMGMSGMKIIRAIINGQRDPKVLAMLCHERCKNPTEIIMESLEGHYKEDQVFALKQAVEAYDFYTRQIEDCENRIEQMLKKIAPPVDNLPTKKEKRNASKNAYQFDAWGLAYSLAGADLTKIDGINEQTAVLILSEIGTDMSCWPSEKNFTSWIGLCPDNKVSGGKVLKNRTKRSRSRIKQAFKLAAFALHSSKSALGAYFRKMRAKHGVEKAITATAHKLARLVYRMLKYGEAYVDIGSEEYEKRQKERILKGLRKKAAEHGFDLIKKIAA

SEQ ID NO: 407982 - protein, 351 aa, unidentified
METRVTALPKLFIGIDIHKRSWKIHCSTDLFVGKSFTMPPEPEKLYEYVQKHFSDHQVTTAYEAGCCGYSAHRSFESFGWKSLVVNPADIHRKGKERYTKTDRIDAQLISRELKDGRLDGITVPDIEREELRSLFRRRNELVKDFRRIKSRIKMHLLYFGIKVPAEFDNDHWSHAFRQWVDSQEFHYPTAQETMASKMRTFRFIDKELREVSSQLRAYCRKHFKKDYYLLRSVPGIGGIVAVGILAELGDLRRFNTLKHLAGYVGLAPGIYQSGATSKALGMNPRCHRLIRSYFVEASWQAIRTDPVIQTYYRKHVGKDVKKIIVKVAHKLLSRTLAVIKTEIPYEVGVIA

SEQ ID NO: 407983 - protein, 468 aa, unidentified
MTPRQPKKPRQPRRSDALRITHPHAAGIDVHSNVHWVAVPPGDAPPPPADHPANLPAHVRAFGACTADLQQLADWLAQCGVRTVAMESTGIYWVALFELLEARGFEVFLVDPRQTRHAPGRPKSDVLDCQWLQRLHGYGLLTASFRPAEQVVVLRSYLRQRQMLIRYAGRHVQHMQKALEQMNVKLTEVVSSVTGVTGMAIIRAILRGERDPLELAKLRNDKCRRTEAEIARALYGNWRAEHLFALKQAVTLYEFYRQQLQECDGQLQAHLGTWADRSQGRPRPARQRRHTKKGNEPAFDVTGALYRLAGVDLTVLEAVDPSTALVLLSEVGPDVSRFPTVKQFTSWLGLCPQHQSSAGKIRRRRVRRGAHRAGRALRLAVQACSRAQNVLGAFYRRIRARAGAPKAIVATARKLAERVYRLLKYGADYVCQEIAAYEAAYRQRLVKGLARRAAELGYRLQPAAVTAT

SEQ ID NO: 407984 - protein, 317 aa, unidentified
MSRTPIGVDIAKAKFDAAAYLNGKYKTKGFANTPAGFQAFQAWLAAFPEPHVCLEATSVYGEALSECLADAGVKVSVVNPARIAAFAKTELSRTKTDQGDAKLIGRFCALHTPELWQPQPRSIRELRALVRRLENLLEMYQMEANRLQTADVAVRDSLQAVMVALQAQIDHVRAQIVQHIDNDPDLRGRRDLLDTIPGLGKATIPVLLSVLADPSRFTSAKQCAAYAGLTPSERQSGKYRGQTRLSKTGDALLRKALYLPAMVAWRHNPVLRPFCERLKARGMNGKAIVCAAMRKLLHIAFGVLKSNRPFDPNIHLA

SEQ ID NO: 407985 - protein, 363 aa, unidentified
MQEQISPINFEGQNIYVGMDVHKKSWTVSVLMDNVLLKTFSQPADAAALHRYLTTRYPGAIYHSAYEAGFCGFWPHYKLIELGINNIVVNAADVPTNQKDKTQKDDKRDSRKIVRSLCCGALTAIHVPSTSDMSDRSLVRTRSTIVKDMVRNKLRIKSFLYFYGIHYPPEFDSNTTHWSKRFVKWLRSVSLPHWTAKQSLDALIDQLENQRAHLLKITREVRALSQTEKYLKNMNLLKTVPGIGLITAITLLTELGSIDRFKDSDHLAAYVGVVPTCHSSGEKEHTGEMTFRHNGHLLMMLIESSWTAVREDPAMTLCYSKLVKRMSKNNAIIRIARKLLNKIYVILKKQEEYKCGINNVQKK

SEQ ID NO: 407986 - protein, 386 aa, unidentified
MDRTVNNLPAATHGEPVRCLFAIELSTKSWVIAFNTPLSEKISRRTLTGCKWKGLLELIEQVRARVSRETGRTVEVVSCYEAGYDGFWLHRQLEAHGVRNYVIDPASLQVDRRARRAKTDRIDTERLLRSLMAYLRGEPKVWSVVRVPSVAEEDARRLHRERDRLVSERVQHVNRIKGLCALHGIYDYNPLRPQARARLEQLRTTQGGALPPRLNSEIKRELQRLQLVVEMIATLEAERDAIVDDEASTHVNAKKIQNLHKLKAIGPEFAAVLVGEIFHRDFNNRRQLASYVGYAPSPFQSGNVAHDQGISKAGNRKGRTTGIELAWLWLRYQPDSDLSAWFRARVGTVKGRIRRIAIVALARKLLVALWRYLETGLVPRGAVFKA

SEQ ID NO: 407987 - protein, 387 aa, unidentified
MAQVNDLSRSLAVFDPISTLVVVVEMGKASWLVRSVVPGVERQPLKKLEPDATALLRLIERWRSEAVRAGRPISRVALTYEAGRDGFWLARWLIARGIEAHVIHSASVAVSRERKRAKTDRLDTAMLMRVFLGWLRGERGHCGMVAIPTIEEEDARRPSRERESLVNERSRIINRMKSALARLGIRGFKPHLRRAPERLACLLTAEGTSLPANIIEELRRDMARLALVREQISAIEKTRVERLERAPDTGPHAMVRLLSRVIGIGIDTADMLVREILSRKLRDRRAVARYAGLTGSPDESGLKSREKGLAKAGNARVRRGLIQLAWRFLMFQKDSALARWYRIRTEGPNGARKTTMIVALARKLLIALWRLVTTGEIPDGVELRPAA

SEQ ID NO: 407988 - protein, 382 aa, unidentified
MCLIDESGSVLLSMKVPNSESAILSMIAEAQGKASEVRWAVDIIGTSSALLLALLRQSDQHVRYASGRVAAAMSPAFPGEGKTDAKDSHVIAQTARLRADLPAIDAAADRVRELELLSSHRDDLVADRVRMINRMRDLLTSVAPSLEEAFDYSSSKGALTLLTGYSSPARIRKMGQARLGAWLRKRHVRSADDVAARAIEAASAQRIELPGADLAAAIISELASSILELDARLKQLEAQIAEVFRAHPRAASIESMPGFGPILGAMLLVAMGDQRSYPDAGHLAAAAGLAPVPNDSGRRVGNLHRPKRYSRPLRHAFYLSAQTAMMRPGPSRDYYLKKRDSGKTHTQAVIALARRRVDVLWALMRDNRTFTAEPPRTEPIAA

SEQ ID NO: 407989 - protein, 359 aa, unidentified
MSVYVGIDVHRKRSQVAVIDQGGEVLANRNVPNGVQPVLGVIGGLPPGTPAAFEAAFGWGWLVQLLEDYGFDPHLVHPLQCKAIASARLKNDKVDAAILAQLLRADLLPEAWIAPPAVRQLRALLRHRVQLVRLRTLLRNRIHAVLADHGHDRPGGCWSGPGRAWLASLDLPAVSRAVIEDDLALIDALQVPIDRLDWEVHQRARSEPAVKVLTRLPGVGPFTALVLLAEIGDISRFGSARKLASWAGLTPTVRGSDRTVRHGHISKQGSTWLRWILCEAAQTAKRHPDFAASYQAIAARRGKKIATTAIARKLLTRAYHLLTDAHITAPVAAAKTPATATAGRAHQPGGAAKPRASSR

SEQ ID NO: 407990 - protein, 401 aa, unidentified
MNTTTMFYVGIDVSKGKSDICIKDENGNDLIQRFKITNNKADLDMLYETIERIRSKTPGNSDVVFGMEATGIYSLPLYSALKRDGHKVKLYNPIQTNGFRKMNIRKTKTDPIDSAVIADMLRHSEPPQVSEIQDFHLFQLRELVRVRHRLIEKQALCKVQLVRNIDAIWPDYENVIKRVFGVASLAILKKYSVPSKLKAESFEQFHEFVQKKSRSKISRSKAEEIYSHAGNVLTVTELDSVIAIEIKTLITQLELYDEQIHSVEKKINRMMKQIDTKIKSVPGIADILGPTILGEIGNIDRFSNVKKLVAFAGLDPAVSQSGRFENKSGKISKRGSPLLRQALFLAANIAIQNDENLKRFYSKKRSEGKHHFSALNAVAAKLLRIVYWVLKNNKEYKTQLN

SEQ ID NO: 407991 - protein, 356 aa, unidentified
MSRDIKYIGMDVHKEATVIAVLNGSGKLVMESIVETKASSILEFIHGLRGELHVTWEEGTWASWLYDLLQPQAAQVLVCDPRRNAFLKEGNKSDKIDARKLADLLRTGMLRPVYHGEHGLRTLRELGRSYQTISQDLNRVMNRIKALYRGWSIPCAGTQVYAPRYREEWLQKIEHAGVRRRAELLYQQLDGLQALRRTLRPELLAESRKHKASKLLRQIPCIGPIRAARLLALMQTPHRFRSKRQLWTYCGLGIETRDSAQYRFVRGQLQRAKKPQQIRGLNRNHNHEMKEIFKGAATRASCGVGPLRDFYVALLAKGMRPEMARLTLARKIAAIALTLWKKEERFDAEQLKLQAA

SEQ ID NO: 407992 - protein, 362 aa, unidentified
MAKTSRTVIGGVDTHADTHTAAALDSAGRLLGHRQYATTAGGCQALLAWLRRHGQLKAVGVEGTGSYGAGLARLLTASGVHVVEVDRPNRKARRSTGKSDPVDAEAAARAVLAGVATGTPKSRSGVVEAIRVLRVVRTGAVKARTAGLNTLVNLARTAPEPLGAHVHGHSARQLVRLANTWRPAGTLHDPVTATKSAMRRLARRIIELDQEIRAADLELRTLLQLVAPKLLDCRGVGPEVAGQLLITAGDNPTRLADDRAFALLTGVAPLLASSGRTDRHRLNRGGDRAGNNALHTVVLSRMSTDPATRAYVDRRTKQGLNKREIIRCLKRYIVRELFPLIVDALTPEPDDDQADEPASHAA

SEQ ID NO: 407993 - protein, 370 aa, unidentified
MTISKMNVTVIGGVDTHKHTHYASVIDDQGRLLGHREVPANDTGYRLLLDWMHSHGTIRSIGVESTGSFGATLTRFLTGHGVEVVEVNRPNRLARRMDGKSDRLDSENVARSVLARTSTSTPKAKSGVVEVIRTLRVTRASAVKARTQAFNTLWGIMIGAPSPLRDELVVLTKRTLVNRCLRLRPETTDFLSLREHPERMLTAGIKTALRDLARRWKALDDEVKTLNVQIGALVRVAAPELLELKGVGIELAGQFLVTVGDNPERIHNEAAFAKLCGVAPQPASSGRTNGRHRLSRSGDRQANSALYIIAIVRMRHDERTRAYVERRTTEGRTKREIIRCLKRYIAREIYRNLPTTNKISTATHHLKPAA

SEQ ID NO: 407994 - protein, 343 aa, unidentified
MQNVTTIGIDLAKNVFQIHGADADGAPVFNRKLKRSEVLKFFESQPPCVVGMETCGSSHYWARCIGAFGHDVRLIHATYVKAFVKRGKTDANDAEAISEAVTRKTMRFVPVKSADQQAAMMTFTSRSLFVRQRAQATIALRAYLAEFGIIAETGPANFRTLTAIVRDLNDAHLPHAARAALEEVVQVIEALSERVEKLDRAILARAKQDDDARRLMTIPGVGPIVASAVKLIAPSASEFKSSRHFASWIGLTPKPHSSGGKRLLGSISKAGNRQLRSLLYIAAVAVLSTVKDDSPAVRWSKRLRERRPFRVAAVAVANKLARIIWALLVRGGVYTRTPLPREA

SEQ ID NO: 407995 - protein, 338 aa, unidentified
MEYGAIDLHTRKTLIRIVDAEGRVVLDRTITTTRDGLVGVFGAPLRMRVLLETGTESEWVAQTIEGCGHEVVVADPNYALMYGVHVRAVKTDRRDVAALAEACRLGIYRAAHRVSAAQRQVRRQLRVRDQLIRMRTQAINLLRAQLRQAGYRLPSGASPNAATRCRRLALSPELCVDLAPVLTLLDALAPLIKARDQEAETQAAADPVVRQLMTAPGVGPIVGLTYRAVLDDVARFRDASSSTAFLGLVPREDSSGTRHRKGAITKRGPTTRRVLLIQAAWTIWRQRQGRAALHAWVERLAARRGRRIAVVALARRLARILYAMWRDRCDYRPVPIAA

SEQ ID NO: 407996 - protein, 335 aa, unidentified
MKKNTIFGLDLAKHIFHLVCLDGKRKKLRRGQMLPYFAQLPQSVIAMEACASSNYWARELISLGHEVKLIPPQHVKGYLRGQKNDYNDALAIAEAAEHGRVRDVPVKTVEQQDKQTLLRSRRRVSVERTRLVNHVRGILTEYGIPIPKSVPAFRRQLCEIIDGENNLLSSTLIRLVDRYYQQLLALDEELVWHDKQINEHVKLDKDCQRLQELPGFGPIVSYAFKSWLGSGKQFKRGRDASAALGVVPKQHTSGDKQRLSGITKKGDAYLRSLIIHGARSALIRIEKKDDPLSQWINRLIVTRGKNKAIVALANKMIRIAWVIVARQEEYHPKAA

SEQ ID NO: 407997 - protein, 370 aa, unidentified
MKKYSEAFVGFDTAKKKHAVAIADGGRNGEVRYLGEIAGAPATVEKVIGKLAERYARLHVCYEAGPTGYGLYRQIKALKHDCTVVAPSLIPKRPGERVKTNRRDAVTLARLLRAGELTSVWVPDAVHEAVRDLARAREAAAADLRKKRQQVLSFLLRHGRIFSGRKHWSLAHTRWLAKQSFEHPAQQIVFQDAINTIEDAVTRLHELDQQLLTIVPTWSMASVVAAYQAMRGVSFVVAVTFAAEIGDVRRFDNPRQLMAFLGLVPSERSTGETVRRAGLTLAGNRRARRVLVEGAWTYRYPARVSETLRARLEGLPKTVRDIAWKAQVRLCARYRRLVAAGKKMPVIVAAIAREMAAFLWAIGRQVEPLT

SEQ ID NO: 407998 - protein, 352 aa, unidentified
MVVMIGADSHKATHTVVAVDELGRVLASKQVRATSEGHLLLTQWAAQFGEVMFALEDCRHLTRRLEADLLRAGHRVVRVPTRLMAQARRSAREPGKSDPIDAEAVAHAALRYPDLPRAELDGPAREVKLLSDYRRDLVNQRTRIAAQVRWHLHEIDPTLAVPSRGLRRKTVVTQLQARLATTTGVVARLARNLLDRCADLNQQIAALEVELRDLVRELAPSLLAIPGCGVLSAAAIVGETAGVHRFRSRAAFARFTGTAPVPVWSGASAGKVRLNRGGNRAMNCALHNIAITQSRRGVGAGSAYITKQTSRGKDTTAALRLLRRRLSDTVFTALRLDQITTPKAQPTLQRAA

SEQ ID NO: 407999 - protein, 364 aa, unidentified
MKKAKNKPVKTFSKEPVATIGIDLAKNSVHVFGADAQGEVVFSRKLARKAVSPFIAQQPTCRIAMEACSGAHHWARTFQGFGHEVVLIAPQHVKPFVKTNKNDAVDAEAICEAARRPRQLFVPIKNVEQQDIQGTHRMRSMVIDQRTALVNQIRGLLAEYGIIIAQGRAELMRRLPEILEDAENGLSERFRAELNDLLEELRHMDTRVKHYDTQIQAVANTNDSAQLLMSIPGIGPLVATALIATLGDNWGLFNNGRALAAWLGLVPRQHSTGGKPRLLGISKRGDVYMRKLIINGARAMMRWVEKKDDALSHWARDLKQRRHANVAVVAMANKLVRIAWAVMTTGKAFDAARGALAKPAAVTA

SEQ ID NO: 408000 - protein, 310 aa, unidentified
MDAVFVGIDVSKDWLDVHVVPSGVHFRVGNDGAGIDLLKGRLGDLKPERVALEATGGLETLAVAELSACGLPVVVLNPAQVRSFANALGKRAKTDPVDAAVIAVFAQALRPALRPLAEAQTRVLADLVARRRQIVAMIVAEENRARTATAKQTRRSIERLLAALRRELESVDGDMDSHIRQSPLWLVRQDILTSMPGVGPTVARTLLAELPELGSLDRRQIASLAGLAPFTRQSGKWRGKSFIGGGRGSVRAALFMAALVAIRHNPVLKAFRDRLVAAGKPKIVAVVATMRKMLTILNVMIRDQKPWQPA

SEQ ID NO: 408001 - protein, 339 aa, unidentified
MTVKTVGLDLAKDVFQVHCVSATGRKIINKKIKRAKLRAFFETLPRCVVGMEACGSAHHWARELRKLGHDVRLMPAAYVKPYVKRGKTDAADAEAICEAVRRPTMRFVEIKTEDQQAVLAIHRARDLVVRQRTQVVNMIRSILREFGHILPTGIEAVSKFAREHGIEEQLEMPEIADGILGVMCHQLNGLNARVDGLTKLIEQHAWLDADARRLMRMPGVGPITASAVVATIGDAKQFETGRDLAAWLGLTPLNKSSGGRERLGRITKKGDRYIRKLLIIGMTSRALMARNSPEKADTWTAKLLDEKPFRLATVAMANKSARIIWALLTKQEEYRQPIC

SEQ ID NO: 408002 - protein, 313 aa, unidentified
MNTTLTYLGLDIAKRSLDLSPHPLLTQRTYPNDADGHRALVAALRQVSGSIQIICEATGGYEHHLLDALHQAQVPVTLVNPRQARDFARAKGLLAKTDSLDAAVLAEYGRLFTPATTVARSPVQQRLAQLVTRRQELLGLITQEQHRAEHHHERFVLQQAAGLLATLRRHMKRLEEEIAQLEKTDATLAGQVQRLTGIQGVGQRTAWLLLAALPELGTLQRGQAAALAGLAPYNQDSGPQRGQRHIAHGRALARTALYMAALVAARCNPVLKPFYKRLRAAGKPGKVALVALMRKLAELANLLLKSSSFQLTP

SEQ ID NO: 408003 - protein, 341 aa, unidentified
MKRFIGVDLHKNSFTVCYMQESGEYGLKSFKVDPRGIEEFKGTLAKEDEVALESTGNAGYFTRQIEGSAARIRIINPIQFKVISESIKKTDEHDAITISRYLSKGLIPEVRMRSKEEAKLASLIGTRDKFVKLRTTLKNKIHNILNANGIVTAKEMFNADKSLDRVLEMELDDADLFELRVIINEIKNLNRSIDEINKELVDRGKKLSGHKNLTSIKGIGDISATILLSAIGDVDDFGDDKKLAAYLGIVPRVYVSNETSQYGRITKMGNKIARTALVQSTLIAIRYNPYLRGFYLKLKAKKGSGKAIIATSRKLLTIVYRTLKNNWVFEDFSSFKLAVSI

SEQ ID NO: 408004 - protein, 372 aa, unidentified
MEEISALYIGLDVSKLKISVALADDGRNGEVRFFGDIDARPATIAAVAAKLAKRGSRLHFCYEAGPTGYDLYRQIVALGHDCVVVAPSLIPQRPGDRVKTNRRDALSLAKLHRAGELTPVWVPDAGHEAVRDLVRARECAMESLRRARQQLLSFLLRHGRVYTGRTPWSKAHSSWLCRQTFEHPAHQIVLAEYRHAIEEAEVRLKRLTEQVTETAASWSMAPVVKAYQAMRGVAFMIAVTFVAEIGDVRRFDNPRQLMAYLGLVPSESSTGERVRRSEITKAGNGRVRRVLIEGAWTYRFPARMSRRIEERQDDLPKAVREIAWKGQVRLCGRYRKLIAAGKLKAVTVTAIAREMAAFLWAIGQEVVPVLQA

SEQ ID NO: 408005 - protein, 380 aa, unidentified
MDHAIAGTPTTKTVLYGALELSKNTWLLALQFPDRVQPSLYPIRGGDTEGLMAKLMAARDRWAKKSGKAPSIVLCYEAGYDAFWLARFLKARGIECLVVDAASLQVNRRARRAKTDRIDVGMLLRAVIKWSQGDHHVWSVVRVPGVDEEDLRRSHRERDRLVSERTAHINRIKGLLFGQGIRDIKVKSKYKTLQIDKLVTGDGRPLPPRLASEITREIARLALIQEQLAVLDRERDQAPTPCKATEKKRVQLMSLTGIGPAIAAVMTREVFYRQFDNRRQVAGFLGLATSPHDSGDVERSQGISRAGRGQVRGTIIQAAWLWLKHQPKSAITRWFVQRTAGQSGRIRRIMIVAVARKLAIALWRFLEHGLVPQGATLASR

SEQ ID NO: 408006 - protein, 335 aa, unidentified
MKHYAGLDLSMESTQLCIVDENGRKLVSEKVESSPEPIAAMLGRYGPVERAVIETGRMSPAICLGLRELGVPVVCIDARQAHQSLKAMKANKTDPHDAAGLAQLARTGFYKEVHVKSPAAHGVRSVITARGHLVEARVRLDNMIRGLCATFGYRPGPGQGRAFLERIMQAAHIPGLGEAIASLLGVRAELVEQIKEMDRRLRIIASQSQACEILMTIPGVGVQTSAAFAAAVDEAGRFRQSRNAGAYFGLVPRRHQSGELDWTGRITKQGDGTVRKLLYEAANSILTRSRETFALKTWAMKIAKRRGLKKARVALARRLAVIMHAMLRDGTLFQA

SEQ ID NO: 408007 - protein, 408 aa, unidentified
MNTLYVGIDVSSKSNVVYLMLPNGDKHSNFSVANSHEGSTLLVKKIYSALTSHSLDTVLIGLEATSVYGDNLVYFLREDATLAPFNRKIHVLNPKQVKKFHDTYNDLPKNDYVDSFVIADCLRFGRINKEVYMGDYRYKALQNLTRARFFAVQNLVKEKQRFMNVLFKKYSTMTQEKVFSDAFSTTALAVYDEFESAEALANMDLHELTDFIIEKGKNRFPDPDAVAKAIQKAARSSYRLPKTVNDSVNQVLSISITSMKALESQIKEFDKAIKALMELLPNVLISIPGIGPVYSAGIMAEIGDINRFDNQASLAKYAGLAWKQHQSGGFEAEVTRLIPSGNRFLKYYLCEAAFSLVRCDKKYSDFYHLKYKEINRCQHKRALALTARKFVRLVFRLLKDNRLYCPAK

SEQ ID NO: 408008 - protein, 298 aa, unidentified
MRAFAQRQTFPSTAEGQRALIRWLRKHKVGKAVMEASGGYEREWAKALRNAKIEVRIVDPKRVRSFAQSAGRLAKNDAIDAEMIAWFAETFDEARGQAYDAAREELVQIVNARQALLEQQTQMQNRCEHTVPIPVRKMHERLLKAIALEVTKLEAVIAALTKASPHFAETAEIIESVPGLGKITSAGLIAAMPELGQVSNEAISALLGVAPYDDDSGKRQGERQIKGGRRKVRNLFYMACMGAATQHNPVLKAFYRRLIAKGKKPKVALVACMRKLIVILNIMIARREKWDAGRYAVG

SEQ ID NO: 408009 - protein, 401 aa, unidentified
MNAVGIDVSKGKSMVCVMRPFGEVVLEPFEVLHTVQNLHDLAEKLKALDGETRVVLEATGNYHKPVAFVLHDAGLFVSVVNPVLIHDYDNNSLRRVKTDKKDAVKIANYTLDKWTRLRQYLPEDDTRLALKNCYRQYQQAVAIRTMLKNNLISSLDLTFPDANKLFSSPVKNNGCEKWVDFIGDFWHSECVSSLSANAFAKKYLKWCQKHGYVFTRSKSDEIYACAVNSASLPKSPTSKLLIQQQVAQLKAVSQSVAAFRQEMLRLSQQLPEFDTVMEMYGVGPSLGPQLMAEIGDVRRFSSKKSLIAFAGIEPQPNDSGKVVGNDKGISKVGSAVLRRTLFLIMTVILQTQPQDEPVFQFMNKKRSEGKPYKVYMMASANKFLRIYYARVKAVMDSERSQ

SEQ ID NO: 408010 - protein, 367 aa, unidentified
MKKISTVTTKKVEKNASQKLTIGLDLGDRFSWYCVLDEAGEVVLEQKVATTPKAMKEVFGGMPRSRMALETGTHSPWVSRLLSELGHEVIVAHARNVRLIGESRKKDDRLDARTLARLVRIDPQLLAPVKHRSAKAQGHLMVIRARAGLVRARTSLINTARGVTKSYGERLRGCNPRNMNLEKAQGLSPELQAALGPLLGEIESLSERIREYSERIEEIAKESYPEVGRLKQVKGVGTLIALAYVLTLEDAHRFGKSRDVGCYVGLQPGRRNSGQSEPQLHISKEGDRYLRTLLVQGAHHILGPFGADSDLRRWGLKLAERGGKNGKKRAVIAVARKLAVLLHRLWVSGEAYEPLRNQREVALPAAA

SEQ ID NO: 408011 - protein, 402 aa, unidentified
MNAVGIDVSKGKSMVAIMRPFGEIVSAPFEIKHTASDINSLVELINSVEGESRIVMEHTGRYYEVLAHQLSEANLFVSAINPKLIKDFDNDSLRKVKSDKADAVKIARYALDKWQNLKQYNVMDELRNQLKTMNRQFGFYMKHKTAMKNNLIGILDQTYPGVNTYFDSPARSDGSQKWVDFASTYWHVDCVRKMSLNSFIDHYQNWCKRKKYNFSQSKAEEIYGKAKELVPVLSKDAITKLIIKQAVDQLNSASTTVESLRTLMNETASKLPEYPVVMAMKGVGTSLGPQLIAEIGDVSRFTHKSAITAFAGVDPGVNESGSYEQKSVPTSKRGSSDLRKTLFQVMDVLIKTHPQDDPVYQFLDKKRAQGKPYYVYMTAGANKFLRIYYGRVKEYLSSLPES

SEQ ID NO: 408012 - protein, 332 aa, unidentified
MSAPLIPVGIDVSKAILHVAILFPERSKPLYQTFDNSEAGYAGLQGWLEEQGVTSAHVCLEATSIYGHGVATALHQQGHRVSIVNPVRIHGYAKSQLKRTKADRPDATLIAQFCRDLKPGAWQPVTADIEALQAYTRRLDALTHMLSQEKNRLDISPEALKPNIEAHITFLEDQVKALKKQFRTHIGSHESLQTQAALLDSIVGIGPDTAARLLAEIGDIKAFDSARQLAAYAGLTPQEHTSGTSVQGKTRLCKIGNARLRKALYFSAIAFLRCAPELQPWRERLVAAGKTKMAIIGAAMHKLIRIVYGVLSSGQLYDPEKLKPQKSAKVIP

SEQ ID NO: 408013 - protein, 375 aa, unidentified
MAKPIRYLGLDVHADTIAVAICEGRGEVRSLGTIPNRPEAIRRLVKRLEPVSTLRACYEAGPTGYALYWQLTGLGVKCDVVAPTLIPVKAGDRVKTDRRDAEKLARSYRNGDLTPVWVPDAAHEALRDVVRAREAAKKDELRAKHRLSKFLLRHGRRPAEGTKAWTGKYWSWLKSVRFEYAAQEATLLDYQTEVQRAADRIERLEKAIDEAVQEAPAQMKAVIEALQALRGVAKITATTLVTEVGSFSRFVRPKLLMGYGGLVPSEHSSGQSKRQGGITKTGNAHLRRVLLESAWAYRHRPRVCGTHKKRQQGVSEDIKAISWKAQQRLNSRYWRLTSKGKNKGTAITAVARELLGFIWAVGVQAERKAAAAVGR

SEQ ID NO: 408014 - protein, 343 aa, unidentified
MKVLTHPQKSFIGIDVSKLTLDVCIINTEGLNKHQQFSNNQNGFKKLYAWLNDTTAVFDFSSALFCMEHTGIYTRELLQYLLLKSANVWMESALHLKRSMGMTRGKNDKIDSFRIARYAMSNQDQAKLITLSNKTLLLLKDLMASRTRIHKAYQAIEISLKEMERIDKATGKELRQVNKAALAGLKKSKAATETRMLELINSDPEMKNIFSLVTSIKGVGTVLATELMVYTHLFQRLDTPKQLACYCGVAPFSHTSGTSIKGKMGTSNFANMNLKSTLHLAAMSATRYVPDLKQYYERKVAEGKSKMSVLNAIRNKILFRVLAVVKRGTPYVENYLEFNLENS

SEQ ID NO: 408015 - protein, 376 aa, unidentified
MQAAQVKGYEVNTVLYMAMELSNSKWKLGFGNGAKLRRKSIEARDRQRLLEEVALAKSKLKLPEDARVVCCFEAGRDGHWIHRWLESEGFEVLEIDSSSIETARGRKHVKTDRIDVEKLLDLLIRYHCFGLRQAFRVVRVPSVAAEAGQRLHREDEYLLRQRTRISNRIKGLLVAQGLVEVPLRGDFAAWLDQVQLWNGEGLSAELKRELKRLHTQYAVFDSQLRELAAVYAAEFMADTALSEKRRRLESLKSVGPKSSRVLSAEVFSWREFANGKQVGAFAGLTPTPSQSGDSETEQGISKAGNRRVRRVMIELAWLWLRWQPESALSQWFKRRFAHGGKRLRRIGIVALARKLLIALWRYVEQGVIPEGAVLKA

SEQ ID NO: 408016 - protein, 388 aa, unidentified
MSKRRGKAKRVQKASNQEPENLPVLNRDAAAIDIGSEEHLVAVPPGRDTESVRSFAAFTIDLHAMAGWLKQCGIKSVVMESTGVYWIAPFQVLEQYGLEVLLIDARLAKNLPGRKSDVLDCQWHQQLHTFGLLRGCFLPVAEIVPLRSYLRLRDELVKASTQSIQHMQKALFEMNLQLANVISDITGETGLAIIEAILAGERDGKKLAELKHRRIVASKETIAKSLEGNWRPELLFALQRALDRYKFYQQQLAQCDGQISQALAQLPTRELQVQTEPEKKTEPSARGQKLTPLEAELQRIAGVDLTSIDGIGQQIAQIILSELGPDLQKSFQSEKHFSSYLGLCPGTKISGGKVLKRKSRKVKHRVATALRLAARSLHSTKIPSPADS

SEQ ID NO: 408017 - protein, 410 aa, unidentified
MLFVGDDWAEAHHDIEIEDDQGRVLVRRRLPEGVAGLAALHALVGDHLPEGADPEQVLVGIETDRGPWVQALIAAGYTVYPINPLQAARYRERHGVSGAKSDPGDAHVLAEIVRLDRDHHRPAAGDSVLAEQVRLAARAHQSMIWMRQRAANTLRSLLRECYPAALEAFGDDLTGRDALAVLSAAPDPATGRRLTPYRVAVLLRKAGRQRNLDKQAEQIVAALRSEQLPVRVELASVHAASVSALVAVLATMVAQTGVLEEQVRLGFGQHPDATIYLSQPGLGTILGARVLAEMGDDPTRYADARARKNYAGMAPITRASGTKRIVLARYTRNRRLADALYQQAFSALNSSPGARAYYDRHRTAGDTHHQALRALANRLVGILHGCLRHHQPYNETIAWASQTAPTTLAA

SEQ ID NO: 408018 - protein, 345 aa, unidentified
MKITTIGLDIAKNVFHMVEISRSGRVLNRKMLRRAQLLAFFANHDDCVVVMETCSGANHWARQFTSMGHQVKLISPKYVKPFLRGNKNDFNDAEAIAEASQRDNMRFAPVKTVEQEDIQALHRQRERMKKSRLALINQIRGLLAEYGIVMNRGIATARRLLPEILEDAQNGLSAMSRDMFAELRDELLDLDQRMTRCERVIKAVNKSNPHCQRLDAIVGIGELTATATYAAIGDGREFKNGRHFSAWLGVVPAQHSSGGKTQLLGISKRGNTYLRTCFIHGARSVLLASAGKTDALSVWAQSVKARRGHNKACVALANKLARIAWVVASGKEYRAAVGVETKAAA

SEQ ID NO: 408019 - protein, 443 aa, unidentified
MIRKVMDAIYQLVGGLDVHEETVMACRRRLISDGQAESEVKVFKTTSAGLRALSDWLAEWKVTHVAMESTGVYWIPVWNVLEGRFKLTLENAQRLKKVPGRKDDISDAEWIAQCMQCGLLRGSFVPPLEVRQWRQLTRHRTKLVDQRTSVINRLHSVLEQGNIKLSNVASDIMGVSGRAMIKAMSKGESDPARLAALAKGRLQAKCEQLVEALDGQLNENQRWMLGRLLEQVGGLDKEIETYSERIKELMAPYQTQLEGLDTIGGVGMRSAENILAEIGPNMDQFPSADDLVSWGALCPGRNQSGGKQGSRKTPKGNKWLKRALVEAGWAATHEKDSYLAALYKRLAPRRGKKRAIIAVARTILQSAWHILKEGVEYKELGGDHFDRLNEEKSTKYFVKRLEKFGYEVVLKPKQAEKARVEPKPKRVKKSVERKPKKAPEATA

SEQ ID NO: 408020 - protein, 397 aa, unidentified
MIAVGIDISKAKSTVAVIDSDGTVLASPFTMAHTQPEMEAFVTYLKGLGEPTTILMEYTGHYHYPVLKKLQDEGFPVCIVNPYQMKKYGDVEIHKAKTDKKDALRIAAYALEKSYKLVPYSSMEQKYEDLKFLSRQYSQRITYVAKLKVQLIALLDQTMPGITRILPLNSRNPEKCALLLFIKRFKSFDEIHRIGKARFLASYDVLAKKASERSASSKGLSIYELAVDSITTRGEDPYIWLSQNQCVDLLSATQNAADEIISQMRNIAETIPEYKVLRAMHGVGDRLGPIILAEIGDVHRFHSGKALNSYAGNDAPPYQSGQFESRNRHISKRGSSTLRKACYEVMQALKLTKPQDDPVYLFMLKKEQEGKPFNVAKMAGVNKFLRIYYARAMELYK

SEQ ID NO: 408021 - protein, 411 aa, unidentified
MSESDNPAAPTYAVFCGVDVGKAEHHACALDPSGAKLHNKALPNDEAALTAVLSGLTAHGRVLVVIDQPASIGALTIAVARNLSIDVAYLPGLAMRRIADLHPGEGKTDARDAYIIADAARTMPHALRRVGTDDETLAGLGVLVGYDDDLAAQSTRLSNRLRDALLHVHPALERLLGKHIERGGVIDLLVDAPTPAALRALGEDGIRTVMATRSPRLAKTLPATILAALDAQTVVVPGTTEFGRVIAGVATQLRQVRTERTALAADVEVRLATHPLAEVLTSMPGLGVRTALKILTIVGDGAAFPTAGHLAAYAGLAPVTRRSGSSIRGETRSQRGNHALKSALFLSAFASLADPTSRAYYDRKRAQGKRHNAALICLARRRVDVLFAMLRDAKPYQPPITTSPAPDTLAA

SEQ ID NO: 408022 - protein, 321 aa, unidentified
MRIIGCDLHAAQPTIAMLDRETGEIVEHTLPHDATTVRDFSARLPPPVVVGIEATGSMRWFLRLMADLGVTCVVGAPANVRQTETRRQKHDRRDAALLLALLTEDRFPAIWMPSAELCEMRELLRHRDQWVRMRTRVKNALQGLALAHGLRRGAGRWTQRGQATLAALPLAPYASGRRSARQALHDHLTTQIDELDQRVGEPARERPQARRLMTHPGVGPVTAWATEVFLGVPSRVADATALARYVGLIPSEYSSGDRQRLGKLTKQGHPMLRCLWCAAAIHAVRHDAALGRFYRRTLHQKGLGNARVAVARKLGIRLWIL

SEQ ID NO: 408023 - protein, 338 aa, unidentified
MQFKHFFGIDVSKNTLDLTVLDIQGNQIAYEHLANDLKSIKKCFLGVLKRHQILMEDCLFCLEYTGIYNLPLVQWLTSLEAHIWLESGSQILKSQGIVRGKSDKVDSLRIAKYAFLNRNEVRLWKAPREIIQHLALLMSLRSRFIKNKKQLEVSVKELNGFLNKETIRSINKHNKAPLNALKLQIDKIEKEILEVIKSDERIHQLYKIITSVDGVGLVTATQVIITTNEFINITEGRKYACYSGVVPFEHRSGTSIRGKNRVSHMANKKIKTLLHLAAISAIRVKGDIQDYYLRKVAEGKHKMSVLNAVRNKIILRIFACVTQERMFEKKINFCLEKP

SEQ ID NO: 408024 - protein, 311 aa, unidentified
MAFLHHLPRRCLGFDIAKQTIAVSDGRTVQVIDNRRAAIRRFLRTCHADFAVCEPTGGHETILLEECLRLELPAHRADTRKLKAFIRSRGRLGKSDAIDARELAAYGLERWASLPLWQAPDPCQERLKALVRRRDDLVATKVAEQNRAKAPGARELAASFKAVLTVIERQIKLVDQAILALMRSGPLKQKCDVMTAMPGIARTTAAALIAAMPELGAMHRKQAAALAGLAPHPNESGKKIGYRRMRGGRPAVRTILFMPAMQAACGRGEFAAFYKRLVVAGKKPILALAAVMRKIVVTLNARLRDAQIQQS

SEQ ID NO: 408025 - protein, 348 aa, unidentified
MMIIGCDFHPSWQQVSWLDSETGECGERKLVHAAGDAKVFYQQLAAPALIGMEATGNSQWFIELAQDLGHEIWIGDAAQIRASYVRKQKTDKRDAAHILKLVVEGRFPRLWTPDREQRDLRQLILHRHKLVEIRSRVKNELQHLSLNKGMQKKRTLWSEAGQKLLRELPLKPWAACRREDLLGLLGMLNEQIGKLDRAVQIAAEEHPQAKLLMTQPGVGPNTALAYVLTMGDVTRFPRGKQVASYLGLIPREESSGGRQKLGAITKQGNRLVRSLLVEAAQIAVRCDPGFRKQYLHRCHQKPKGVAKVAAARKLAVRLYWMLRTQKPYPEIVRIESSPRVPLVARPGE

SEQ ID NO: 408026 - protein, 447 aa, unidentified
MSGPQVIDDQGHERVYERVAAVDVAKASGMVCVRLPHPSRPGLRQSHVQEVPATAGAVSALAGRLAAQGIEKVTLESTSDYWRIWFYLLEAAGLDVQLVSASAARQLSGRPKTDLDAMWLARLTENGLLRPSFVPPADIRALRHYCRARTHLTQDRTRCWQRLEKLLEDALIKVSSVASKMTTRSVQDMIRAMIAGERDLVVLAGLARTRMRAKHAALAEALDGQFAGHHAEIAQILLDQIDFLGKRIARLTLLIEEAIDAIPAAWGADPDGVTGAGAGTMPDAPALPAIMRLEEIPGVSAELACSIIAETGLDMTRFPTPAHLVAWAGLCPRAIQSGPRSRQAKGQGNTYLRGYLGQAATGAARTATFLGERYHRIARRRGAARAQVAVARSILVVIWHLLSNRSARFRDLGPGHYETTTDKTRQARGHIRQLEALGYTVTISQAA

SEQ ID NO: 408027 - protein, 341 aa, unidentified
MDGKHGFIEGVEAVFHLGIDVSKAKLDCSLLLDKDSLRSRSKSVPNTKEGFAALLEWVPRQTQVGPAELLAAMEPTGVYHQALALALYEAGVTVVVVNPAQLREFASGLAVRGKTDAKDSMVLARYATQPQRTPWEPPPLEVRQLQALMSRLEAVQAELQRELNRQDSAQLAGDPEAVQASIADSIAFWRAEQDKLQRAIDEHIDRHPGLKQEREYLLSIPAVGEKTANRMLCMLHSRRFVRASQAAAFVGLTPIEHQSGSSVRGRPRLSKAGNPRLRAALYMAAVVAIRHNPDVRALYERLLKRGKTKMSALCAAMRKLVHICFGVLKNRQHYTPQVEIA

SEQ ID NO: 408028 - protein, 358 aa, unidentified
MSKLTQNNVVVGLDLGDRFSWLCVLGEDGDVVEEGRIRSTEVGLRGWFGARDAVCVALEVGTHSPWVSRLLKELGHEVIVANARHVRMIYAGDRKSDRLDAEALARLARLDPGLLHGVEHRTVQAHEDLAVIRAREALVRTRTRLINHVRGAVKSAGHRVPRCSSASFHKTAADSIPSGMRPALDPLLGMLEQLTQEIRAYDRQIGKLVSEAYPETGALLQITGVGDITALAFVLTLENPDRFARSRAVGAYLGLCPGERQSGDRDAQCRMTKAGNEMLRRLLIQAAHYKLGPHGVDSDLRRWGLERAARGGRISKKKAVGGVARKLAVLLHQLWTSGEVYEPLRNSGGPDEPTAQAA

SEQ ID NO: 408029 - protein, 453 aa, unidentified
MKASRVCSARKTKNNPTLKMNQTKLNRIASGQGDFAALIGLDWASQKHALCLYDCATGKRENSILEHTPEAIAHWARGLEQRFGGKKIALCLEQAKGPLIYALLEYSFFVLYPVNPATVARYRQAFKTSRAKDDPADAQVCLELLLHHREKLTPWLGNDGATRELSRLLEARRSLIDLRTLLTNMLRDALKSYYPQALELAGQDLFAALGCQFLLKWPSLEQLQKARTESVRKFYYAHNCRRMDVIEKRLQAIAQMKPLCRDRALIEPALIQVKMLVRQLLQLRTALKEYDSSIEHLFAQHQDATIWQSFPGAGPTLAPRLCCAFGSERSRYQSVLAIQQYSGIAPVQERSGKNQHWVHRRWARPHFVHQSFFEYASQSALHCPWAKLFLKEQIAHGKTYPTAVRALAFKWQRIMFVCWRDRVPYNETTYLQTLKHRGSHLARKLDQELPKAA

SEQ ID NO: 408030 - protein, 424 aa, unidentified
MYRIAGIDVHKRLLVVVIAELRADGVVILERRKFLATPEQMRKLAECLLGWEVEEVVMESTAQYWQPIWGMLEEVWQPARRQRTGAGPKAGKLYLAQAQSNKGRRGRKNDYEDAERLVKRLEANELVLSYVPEPEQRLWRAVSRRKIQLNRDRSRVQNQLECVLEQAHIKLSSVISDLLGVSAQRILRAIAEGGSDPVVLAGMVEKNVKATPEELADALSAVRRCRTEYRKLIQMMLDHVKLLDEQMEQLILQAAKLMKPYEDAVQRLAETPGLGVDSGLQIVAEVGPRAEVFPRPGNLCSWVGSIPGEQISAERNASSKSPKGNRQMRRILTEAVQAAVKQKGNIFEVKFRKFITHMDYQEAIWCVVHFMCKIVWKILHDGVRYQERGPAVDAKNAHRRNQKMARHLKAVGYNVLPPVAPMPS

SEQ ID NO: 408031 - protein, 410 aa, unidentified
MSMLDVALDPTTVVVAVDPGKVTNRVWVSDGTGLLDQPVTLPVARVGIEGLEVMLAAHAGHEPVITIEATGSLHRAWAAELERLHPGSIRLFAPSETKAARTQLGSSRFKTDDRDCAALTYLARQGAGRRHGDESAVDTLRAAVRHRRGLVTDRKKAQQRLHDQLNALCPGLSAPAGHGRSLAIEQSTGQAVLACAVAFAGRAPTRRSLIARAPGRLTRTNADYWIQRWRGCLPPPPGAEQRAGRLGRDLDRYRRLQGDIALLEEEITGLLAGTDGQVLTSLPGVAVNRAAAFAVHSLPITNFPDADHLYSATGLAPAMYESATLRRRGRISRQGLAEHRDALMGIAWGLSLFSPSFAQRDAELRARGMAPIQARVALARNACRLAYRLLMTQQPFDEEAYRRGRLSRGR

SEQ ID NO: 408032 - protein, 342 aa, unidentified
MKQQYVGLDVSLEQTSICIVDDTGATVWRGKCRSTPESIHTVIAKHAPEAVRIGLETGQLSTWLFHELRARQLPIICIDARHAKAALSLQINKTDANDAYGIAQIVRVGWYREIAVKSMDTHAIRAMLVARAQLVTQKVKLTNCIRGLLKTFGMVLGGGKGRRFEAMVRERIAENPMLTSIIEPMLVLLRTTREQLAVFERLVRRRARADHDVRRLMTIPGVGALIALAYTTTIEDPARFKRSSSVAAYLGLTPRRYQSGEMDRAGHISHCGDAMLRTYLYEAANVMLRRSTRRSQLSVWGRALSERIGARKALVALARKLAVVLHSMWRHRTEFRFEQATA

SEQ ID NO: 408033 - protein, 358 aa, unidentified
MISVSIDVAKRTHEACFMDAGGEEVGRPLRFPNTVGGVATLSDRLRRLGQPVSIALEATGHYWLALHERLTGEGFSVQVVNPIQTNAYRRTTVRKVKTDRRDSWVIADFHRIGRVRPGYVPDTTTVQLRELTRFRFKLVDQVGDAKRKALTVLDRVFPEYEKLFSGVFIATSRQLLGRAATPEEFTGFDLEELAALLRRGSRGRFGREKAQVIQMAARNSLGLSSLGPVASLELRWLLDQIEFLEKQIAQVQEAIQELMAATEQHLTTIKGIGTVLAATILAEIGDIHRFNRLESLVAYAGIDPAVYSSGEFTGTQAKLSKRGSPYLRRALWLAATSARRFNPDLQEYYERKIKAGKP

SEQ ID NO: 408034 - protein, 346 aa, unidentified
MTNVTIGMDLGDKNHEVCVLDQEGNVIDRFTVGNTRRQLPKAFQKYTGAVVAIEAGTHSPWISRDLEAMGCKVLVGNPRKLRVIWARSQKTDVKDAEMLARIARFDRQLLHPIRHRSEKAQIDLEEIKARDMLVRVRTDLINHVRGTVKSIGERLPSCGADAFHKRASLSLPDALRHALMPLVEQIASLTKQIRAYDRQIERLAQEVYPETNCLRQIKGVGLLTSLAFVLTLESPDHFDKSRAVGPYLGLTPRKDQSGESDKQLRISKEGDVYLRRLLVSCSQYILGRFGQDSDLRRFGERLMGRGGRVAKRKAVVAVARKLAVLLHRLWSTGEVYQPFYHSQQVA

SEQ ID NO: 408035 - protein, 311 aa, unidentified
MDAIYVGIDVSKDRLDVHVRPAMTLFNVPRTDKGIEALIARLLELQPKLVALEATGGFERVVTANLARVGLPVVVVNPAQVSAFANALGKRAKTDPIDAAVIAHFVEATKPQRRELPSKDTLKLANLISRRRQIVDMITADSQRAHRADADAKASIARTIAGLRLELARIDSNIDDLVKGSEIWCEDEKLLVSVPGVGETTARTLMSHLPELGKIDGRKLAALVGIAPFTQQSGAWRGKSAISGGRTAVRCALFVVAMTATRFNPVFKEAYKALLARGKPKKVALIAIARRLLVTLNAIMRDRKPWQLKEA

SEQ ID NO: 408036 - protein, 361 aa, unidentified
MKKPAHHLIAEVPRKRSKVELTIGIDLGDVWSHYCTLNQEGEVVDRGRFRTTPKAIQKWFTDVPHARVAMEAGVHSIWISEQLAQLGHEVIVANVRELRAISHSDRKSDDVDAEKLARYARLDPEILRPISHRTVQQQEALTLIRARELLVRLRTAAVNAVRGLTKTCGYRMPASSTKCFAQRGHAAMPPGLKLALGPILAQISEMTLKIKQYDRDIQRMTQTEYAETQAMMTIHGVGHITALTFVLTLGDKTRFSRSREVGCYLGLRPKRSQSGERDPQLGITKAGNAYLRSLLIECANHILRPHGRDSALRQWGLQLAARGGKQAKNKSVVAVARKLAVLLHHLWTTQEPYIPFYQQAA

SEQ ID NO: 408037 - protein, 417 aa, unidentified
MEERRASGENQSPNVRRLALDLVLRFLQPRFWPVTCTSPSTPLYIHVEKDFQSHHMQIYSSTLMGGQYIGMDVHTATISAAVRDSSGNLVMEATLETKAETILEFVHGLRGSLHVSFEEGTCAAWLHDLLKPHVTEVLVCDSRKNALLRVGNKNDREDARKLSELLFLNKLHPVYHGETGIRTLKELARSYLTITRDLTRVMNRLKAIYRGWGIACAGRQVYAPRYRAEWLAKITEVGVRRRAEIYYQQFDALAALRQEVRRELLAESRKHPAMRLLRQIPSIGPIRAALLIALMQTPHRFRTKRQLWAYCGLALRTYDSGEYHFVGGQLKRSKKAVTIRGLNKNHNHDLKNIFKGAATRAAATAGPLQNFYEARIANGMKPPMARLTLARKIAAITLLVWKKGVRFDAEQLKQQAA

SEQ ID NO: 408038 - protein, 430 aa, unidentified
MKSNTQNAKIEAITEKTLVLGIDVGSETHYARAFDYRGIEYSKKPFKFSNTEAGFATFKEWILDLKERHEKDKVVPGMEPTGHYWFNLGKFLQDNEMKPVLVNPHHVKKSKELDDNNPTKNDRKDPKVIAGLVREGRYMIPYLPEGVYADLRTASNIRFQLQAELTRIQNRISRWFNIYFPEYKTVYGKPDAKSGMLILKEAPLPEDILTLGIDGVNQIWRDAKMRAVGKARAKTLIEAAGHSVGSKEGAVSARMEIRMLLEDYESRNIRLQEVMTLIEELVNQIPMAEKLLEIKGVGIKTVSGFLAEVGDISRFNTPKELQKLAGLALVEKSSGKHKGKTTISRRGRKRLRYLLFEAAMSLVAKNPEFRELHNYYTTRRLNPLKKMQSLMAVAAKLIRVFYAILTKGVDYDPKKMVGDIRRPVVYLPAA

SEQ ID NO: 408039 - protein, 360 aa, unidentified
MTTTMTWVGMDVHARSTEAAAIDVLTGELRRARFGCGLEPVVDWLSVLPQPVHACYEAGPTGYGLYRAAQAAGIRIDVVAPSKTPRAPGDRVKSDRKDALLLVRLLMAGGLTAVGVPAPEFEAARDLSRAREQLRRDLMRCRHRVSKLLLRYGRVYQSGSTWTQTHRRWLASQRFEHAASELAYLDALAAVDGLAARKAALEERLSRLALEPQWWATVARLRCFRGLDTLSALVLQLEVHDWERFRRAPQVAAWVGLTPSLSQSGESASQGPITKTGSGYARRILVEAAKHYARAPRIGATLANRQAGQPDHVLQIAWRAQHRLYRLSRRLRERGKPDNVVTVALARELSCFLWAAAVAP

SEQ ID NO: 408040 - protein, 321 aa, unidentified
MTAILGIDVAKNKFDVALFRNGKYKNKSFENKPLGFETLAVWLKQHDVLSIHACMEATGSYGDALARFLFEAGHKVSVVNPARIKAYGESELLRTKNDKTDAKLIARFCEAHKPAAWQPDPPEIEHLRMLGRRRDALINMRTQETNRLGGPDVSVNESVQKVISFLDEEIELISKAIREHINKHDGLRKKRDLLKSIPGVGDVTIEAVLSEANGFEGFNTVEQVVAFMGLSPKEHTSGTSVKGKSALCKIGSARLRKALYMPSLSAIQHNPFVTALYDRLKAKSKNGMIIACACMKKLVHIIYGVIKSGKPFNPAYNIKTV

SEQ ID NO: 408041 - protein, 377 aa, unidentified
MVPLQSCPIARPPGPHPPAERATVQQPERAAEVIIGVDTHKDTHTAVALNALGARIGAITIPVNQDGYRQIEAWACAFGSVRAFGIECTGSYGAGLSRALQASGHRVLDVNRADRSARRRHGKDDPLDAEAAARAVLSGQATALAKSGISSVEMIRHLKLARDSAVKARAQAMQMLKALIVSAPAELREQLEGIRGKVRFVRHLAALRPGPMTSTTASAKVGLRALARRWLSLSEEIEAHDRDLDGLTAAHTPELITAPGIATGTAAEMLILVGDNPERIRSEAAFAKMCGTCPLPASSGKTSRHRLNRGGNRQANAALHRVIVTRMRCHQPTIDYVRRRTVEGKTKAEIMRCLKRYVAREVFTHLCKPRQPASETA

SEQ ID NO: 408042 - protein, 310 aa, unidentified
MSYFIGVDISKKHLDVCFLKEEDKRFQRFINTAQGIKLLLQELSCKEVSLVVCEPTGGYEEEVCQALREQHYGIHLVNTLAFRDFAPSVHLGKTDRLDSYKLAFYGQKFMLAPKQNFMDKNLKALVQRREDLTRMTGDEKRRLEHAQGDIREDLRQHIDFLDILIQRLNDKIETLVDSQESLKRKAEILRSTPGIGKCLSAKLLGHLPEMGEQTLSLKQLASLVGIAPFSRDSGSKSRHRFIRGGRKIPRDALYMAVLTGRKSIPFLQNVYDRLIAKGKPKKVALVACMRKMLAILHAMLKENREFEILH

SEQ ID NO: 408043 - protein, 343 aa, unidentified
MQSVTTIGLDIAKSVFQVHGVDAVGQVIIRRQLKRRYMLAFFQKLPPCLVGIEACASSHHWSRELQALGHSVRLMPPAYVKPYVKRQKNDATDAEAICEAVTRANMRFVPTKTPEQQSGLVLHRTRHLFIRQQTSVINAIRAHLAEFGIVAPVGRRGVEELLNVVANPDDKRVPEIVRACLSALGAQLRRIKEQVLEFDRMITAWHRSSETSKRLDDCPGVGPALATAVVATVADPKAFRSGRNFSAWIGLVPKQHSSGGKNRLGSISKQGDRYLRGLFVAGALAVIRYAKIHGTKHRPWLTALLARRPTKVAAIALANKIARMVWAMMARGERYKEPAALAA

SEQ ID NO: 408044 - protein, 381 aa, unidentified
MKTNSDTPQKLYIGLDVHKEQTVIAIVESDRDAEPRQYGSIATTQHALERAMRRIAKQQKRELSDLHVCYEASGCGFWIARRLLQMGVRCDVIAPSLIPTRSGDRVKTDKRDAAKLAKSLRANDLVAVHVPDSVDEAIRDLCRARTDAVDDLRRAKTRLLAMLRRLGYRYNGKTHWTQSHRNYLRDLRLPDAAHNRVLEDNIATIDFHEERIAKLENEMLQLLDDWQRKPLVKALMAFKGFKLVAAMVAVSEIGTFSRFEHPKKLMAFLGLVPSENSSGTSRRQGAISKCGNPHARWLLVEQATHYRVPPKVSAQLSERQRDTPRWIRELSWKTQTRLSHRFATLRKRQMHHNKIKVTIARELVGFLWELGTRIEAKQAAS

SEQ ID NO: 408045 - protein, 363 aa, unidentified
MANLQVNVIGGVDTHKHTHYAAAIDGHGRLLGHEEFPANAAGYRSLLEWMRQLGHIETIGVESSGSFGAALTRFLRAAGEDVAEVNKPNRQARHMQGKSDRLDAEQIARAVLAGEGVGTPKTKSGPIEAIRMLRIARASAIRARTQAFNNLFGTMIGAPSEVRDELVGLTKRTFVNHCLVLEPETDDLLELIDDPERLVLASARLTLRDLARRWKALDREAKDLGRRIEALVRHVAPKLVEMFGVSTELAGQFLVTAGDNPERIRNEAAFARLCGVCPKPASSGLKNNRHRLNRGGDRGANSALWIVAVVRLRHHEPTREYVERRTAEGLSKREIIRCLKRYIAREVFAALPRSGPEAARAAA

SEQ ID NO: 408046 - protein, 344 aa, unidentified
MTVSIIGIDLAKNVFQVAGVNRAGKVVFNRRLRRTQFVRFMAQQPETVVAMEATGCAHYWGRTLRDMGHTVRLLPPQHVKPFCRNHKSDSHDAIAITEAASRPNIHPVPIKSLTQQDLQLVNRQRRRLVRRRTQAINQMRGCAREYGVFFARSRAVVMNRIPEALEDGENGLTDVARQYLFDLYVEARELDERIQAVEAKILALSERHSEYHALLKVPGLGPIIVAALVAAGIGRGQFKNGRHCAAWLGLVPRQKGSGDRHELYSITKSGDRELRTLLIHGARTVCAWAVRKKRDDALGRWVRSLVDRRGMNRAVVALANKLARVAWAVVNHGEGYDMKKAFGG

SEQ ID NO: 408047 - protein, 321 aa, unidentified
MNKYNTIYGIDISKDVFDVVDSNEVHYQFENTPKGFKSFLRTISEDSLVVMEATGYYHYRLAQYLFKQGVSVSVVNPLSVKRFIQMKLAKVKTDKSDAKAICSYGKSNEVPLYNALTDVQSECLQLFRLLDSYLKKRTATKNKLHGEETLGFPSKFVHQSLKRDLKHLNKEIGALEDRLLELVKQDQQQQLTLLKGIPGLGTKTALFLIVITDGFQKFETAGQLCSYVGITPTIRQSGSSVRGRSRISKVGNKKLRNLLFLCAFSACKHNKACREVYERIIAKGKSKKLALIAVANKLLKQAFAIAKSGLPYEENFVSKLN

SEQ ID NO: 408048 - protein, 402 aa, unidentified
MNAVGIDVSKGKSMVAIMRPFGEIVSAPFEIKHTASDIHSLVELINSVEGESRIVMEHTGRYYEVLAHQLSKANLFVSAINPKLIKDFDNDSLRKVKSDKADSVKIARYALDKWQNLKQYNVMDELRNQLKTMNRQFGFYMKHKTAMKNNLIGILDQTYPGVNTYFDSPARSDGSQKWVDFASTYWHVDCVRKMSLNAFIDHYQNWCKRKKYNFSQSKAEEIYGKAKELVPVLPKDDITKLIIKQAVDQLNSASITVESLRTLMNETASKLPEYPVVMAMKGVGTSLGPQLMAEIGDVSRFTHKGAITAFAGVDPGVNESGSYEQKSVPTSKRGSSDLRKTLFQVMDVLIKTHPQDDPVYQFLDKKRAQKKPYYVYMTAGANKFLRIYYGRVKEYLASLPES

SEQ ID NO: 408049 - protein, 347 aa, unidentified
MLADELDFVVGVDPHRDSHAIAVVEVRSGVVVVESSVAADSGGYAEALRVAEEQAPGRRAFAIEGSGSFGAGLTRFLAEQGEQVFEVGRLRRERRSGGKTDALDAVRAARAVLEQKRPATPRCNGEREALRALMAARDGAVNAKRAGLCQLRDLLITTPEPLRSELRPLSRARLLSRLSTTRPHRRHDPELRGTLLALRALARRVQQLTAEERELAQEIEKLISTLAPQLLSQPGIGPLLAAQIVLSWSHRGRLVSEAAFARLAGAAPIPASSGQTIRYRLDRSGDRQLNRALHQIVLTRRRMHRPTIDYIERRVREGKSRREATRCLKRYLARNLYRLLEHPPATA

SEQ ID NO: 408050 - protein, 380 aa, unidentified
MKKGNTKKEKISNMPVQYLGLDVHRDTISIAVASAEHSPAQAVGVIANDSKDIRKFFRRRMKQAELRVVYEAGGCGYVIQRLLSDMGIDCMVVAPSLIPRHSGMRVKTDKRDAQALATLHRSGMLTAVWVPDQWQEGLRDLTRARGRAKRREKQQKQELVAFCLRNGQKWPGKSRWTKDHWAWLRKLRFDSPSQTLVLEEYLDAITASAQRVARLDRLIRDQSRESRGAHMIASLMALRGISHNHAASLVAELGDIRRFSRAEQLMGYVGLVPSEHSSGQRSHRGRITKTGNRQVRSLLIQAAQSYNVQARRTAVIAGRQKDLSQEVCDLSWEAQTRLTGRYRRLLAEGKHANKVKTAVARELCGFIWAIAQVSMTEIQV

SEQ ID NO: 408051 - protein, 356 aa, unidentified
MHHVSLTPPYHLFVGVDIAAATAAVAWQAPQQKPSKPITIEQTPEGFSLLHQRLTKTGILPTETLIGMEATGIYWLALATFLTRYGYAVSVVNPAQAHHFAKALLKRAKTDAIDAQTLTQLAACLEPNLWTPPPAIYEELEQRLTQRDSLLVMRGQLRNQLHALQHNPVVVASVRQRMKGWEQTITAQIGEIEAELAILLSSGEEVASLGNQITPERAWAENITRLQTLPGIGLITSCWIVVATMNFTLCATASQAAAYAGLAPMPRESGTSVHQRPCIGHSGNGRLRTALYLATLSAARFNPSIKPFYERLRATGKPTKVVRCAAARKLLHLAFAVVKHKEDFDPLHMHKHLQPA

SEQ ID NO: 408052 - protein, 377 aa, unidentified
MHKDSRFVGLDVHAETIAVGVAEPGGEVRSLGTIPNTPEAVRRLVKKLGPPETLRVCYEAGPTGYVLYRQLSALGVPCAVIAPTLVPVKAGDRVKTDRRDAEKLARSYRSGDLTPVWVPDPGHEALRDLVRAREAAKKDQLRARHRLGKFLLRQGRRAPTGSKAWGVKHRAWLQTIRFAHAAQDATLLDYRTEIDHAADRIARLERAIATAADLTPAPVRAVIAGLQALRGIAKLSAVSVVTEVGALSRFAKPRQLMGYSGAVASEHSSGPHRRRGGITKTGNAHLRRIVIEAAWAYRHRPAIGGTLRTRQAGLSEEVKALAWKAQHRLHGRYARLLAKGKAPTQVVTAIARELLGFIWAIGVHIEQHTAGGAPAAA

SEQ ID NO: 408053 - protein, 336 aa, unidentified
MSHDVKYIGMDVHKEAIVIAVQNESGKRVMESVIETKASSILQFLHGLRGELHVTWEEGTWAAWLYDLLQPHVQHIVVCNPRRNALLKEGNKSDKVDAGKLADLLRTGMLRPVYHGENGLRTLRELGRSYQTISKDLTRVMNRLKALYRGWGIPCAGTQVYAARAREKWLSKIPHTGVRRRAELLYQQLDGLLALRRNVRPELLAESRKHKAAKLLHQIPCIGPIRAARLIGLMQTPHRFRSKRQLWTYSGLGIETHDSSQYCFVRGQVQRSKKPQQVRGLNRNHNHEMKEIFKSASTRASCGRGPFHDFYTGLLAKGMKPEMARLTLARKIAAIT

SEQ ID NO: 408054 - protein, 386 aa, unidentified
MIYVGIDVAKDKHDCFITNSDGEVLFKAFTITNNLDGFNDLYQKIETVMKDITKVKVGLEATGHYSYNLLGYLIDKGLPTYVINPLHTNLYRKSLSLRQTKTDKVDARTIASILMSDVNLKSYSDISYHNEELKSLTRYRFDKVKERAKLKSSVSRLICILFPELEKLVPTLHMASVYALLSEFPGAKQVANAHLTRLTNLLSEASKGRYSKDTAITFRDAARTSIGSNMPAKSLELKHTIKLIKELDSEIDEIENEIKIIMDEINSPILSIPGINYRMGAMIIAEIGDFSRFDSPDKILAYAGFSPSTYQSGHLYGAYAHMEKRGSRYLRYALYNAAKYVCHWDPTFTAYLAKKRAEGKHYNVAISHAVKKLVRVIYHLEKNNQK

SEQ ID NO: 408055 - protein, 367 aa, unidentified
MEEGTTTFVGLDAHKESISVAMLMPGDVRPIEWQCTNDRASVRRMVRKVRRQAKGEVRFCYEAGPCGYALQRWIGEENARCAVVAPSLIPRKRGERIKTDRRDARKLAELDRASLLTEVHPPTPEDEAVRDLCRAREDAHEDLTRSRHRVSKLLLRRGWQWCGGKGAWSQGHRLWLRSLRFEHRADQWMFDDYLLAIEQVEMRLKALEAQILEMSHDARYTEAVGALRCFRGIDTVTAMSIVAELHDVLRFGSARGLMAYLGLVPSEHSSGGKEHRGEITKAGNGHVRRLLIEAAWHYRHRPGVRTLAKRREGQPTRVIAIADRAMHRLHRRFNRMLERGKARPKVVVAVARELTGFVWAALRKDLN

SEQ ID NO: 408056 - protein, 345 aa, unidentified
MQITTIGLDLAKNVFQVHGVDAEGRVVVRRKLRRAKVREFFAGLAPCLVGMEACGTAHFWARELIAMGHQVKIMPPSYVKAYVRRGKTDAADAAAICEAVMRPHMRFVPIKTEDQQAALMLHKARELLVRQQTMLINAIRGHMAELGMIAPQGSGKIKDLIAVIQDGEDQSIPALARAALQPLVRQMQTLDGQVEVLDRKIMAWHKTNETSRRLATIPGVGVITASAIAATVPDPSFFSSGREFAAWLGLTPKQNSSGGKERLGRISKKGNTYIRRLLVTGATSMLRYARAKTAAGADWVNGLLQRRPARLVTVAMANKTARIAWAVMTREENFRVLRVPVIEAA

SEQ ID NO: 408057 - protein, 361 aa, unidentified
MSHTSAWNNATEMPAVTIGLDLGDRTSRIFEVSAAGERLAEAVVPTTPSALAKYFGKGASCRVVLEVGTHSPWVARTLTELGHEVVVANPSAVYGKGRRRKRNDRMDAEFLARQGRADVKLLHPIRHRSAAAQADLALLRARDQLVQTRTGLINHVRGAVKAIGARLTRCAAEAFPRRVRAEVPEALRPALTPLLEVIGELSQRIAGYDRQLVAAIRDRYPVAMRLQQPAGVGPLTALAYVLLVEDPRRFGRSRDVGAYFGLVPRLDESSDSRPQLRISKAGDVLGRRLLVSAAHYILGPFGPPCDLRRYGEGLAARGGKNAKKRAVVAVARKLAVLLHRVWVSETAYDPDYLATRQTRAA

SEQ ID NO: 408058 - protein, 413 aa, unidentified
MDENTTSAGIDWAKDEHALCVIDEAGRVVFERRFAHDEDGLAQLCLELVDNGVWRVAIERPDGVLVERLLDAGLVVLAIHPNQLKAARPRFRASGARAKSDAFDAFCLAELARTDHHRFRALTPDSDQTKALRVLTRSREEMLTTRVALANRLRAELEAFWPGAAILFSEIDSAISLAFLRRYPSPKDALRLGEKRLESFLSHNHYCGRKDASELLQRLREAPKGRAGEAEIQARREAVLGLVATLKALLEQIKLLEDRIAKAVRAHPDGEVFLSLFLGHNTTLTAACLVAQIGDRRDRYPTNEAMAAAAGMSPVAVESGKRKVAGFRRACDKRLRKAVATLAESTRHHNRWAKDIYRRARARGCDHAHAIRVLGRAWVRVIFRMWREGEPYDPARHGGLRRLQSAEGLSQGV

SEQ ID NO: 408059 - protein, 397 aa, unidentified
MYIVGIDIAKRKHEAAVIDGEGTVIIKPFSFTNNCSGYNRLLAMLAKAKLPLDEVSFAMEATGHYWLALFTRLQKEGFRVQVINPVQTNSIRSFYIRQAKTDPRDALLIAEVIRFGHFSESTLHPENIYELRELCRGRHAIVSMQADVKRKVVALLDQVFPEYETAFTNLFGDTSMAILQACPTPKELSEMPLEELCHLIEVSSRKRFRMAKAQELQELARNSFGFAMAGDVFSTMIRLYAKHLDFLKQQVREMDRKIAEIMETLDTPITTITGIGPTLGAYILSEIGDISRFSSAAKLAAYAGIDPTMRQSGEYNGVRNRMSKRGSPYLRHAIWLAASSAVLHDPALKLYFQKKRDEGKPYMASVGHACRKMVSIIYAVMRDNKAYTPCIPNEISA

SEQ ID NO: 408060 - protein, 289 aa, unidentified
MQVTTIGLDLAKNVFQVHGITEDGTVAFNRSLRRGQMLTFFERLEPCLIGMEACGTSHYWARELSNMGHDVKLIAPIYVKPYVKRGKSDAADAEAICEAVTRPTMRFVETKSPEQQAILSLHRARDLIVRQRTQTINMLRSLLAEFGIVFAQGVGHAIQFAKRVIEGHTPELPQVALDVIIDLSEQLVSLHTRINWYGRRMTAAAKLEPRIALLQTIPGIGPITASAVVATVGNAKQFRSGRDLSAWLGLTPINTRKGKTKNSKTNVVMAKMHITSKKSCFAGAIHTRP

SEQ ID NO: 408061 - protein, 343 aa, unidentified
MQAVTTIGLDIAKSVFQIHGVDAAGNVIVRRQLKRRYVLPFFQKLPPCLVGIEACASSHHWSRELQALGHTVRLMPPAYVKPYVKRHKNDAADAEAICEAVTRANMRFVAIKTPEQQSCLMLHRTRHLFIRQQTSVINAIRAHLAEFGIVAPVGRNGVEQLLDVVADASDRRLPEVARACLLALGAQLRTLKAQILNFDQQIMAWHRSNEASKRLDDIPGVGPTLATALVASVADPKAFRSGRNFSAWIGLVPKQHSSGGKDKLGSTSKQGDRYLRSLFTAGALAVIRYAKIHGTRHRPWLTALLARRPTKVAAIALANKIARMAWAMMARGDRYKEPVALAA

SEQ ID NO: 408062 - protein, 316 aa, unidentified
MKNYIGIDISKSSIDVYDGKKSYKFENNEDGFKKIIFLVEDLKETIFIFEPTGIYSYALTEFCDKKNINCVIVSPKVSRDFARSLKVRSKTDKIDAKVLYKYQSHVEPSMIKVPKVNHHAIKIQEMLNSYELLKSTTQQFKNQLESISDNNKNLIRLTNKMIKLHEIEADKLFSKIEKLLISDESIKRKYEAMLTIPAIKNKSALYLISFFLKYPLANAKEMTALVGLDPVMRDSGTYRGKQRISKHGGQQLRNLLFLPTLCSLRFNDRIKVFYIRLTSNAKSKKLAVIAAMRKLILMAFSIFKSEQNYQPLYVEN

SEQ ID NO: 408063 - protein, 345 aa, unidentified
MSEVYADRQFVGMDLHRRRSVLVRMSETGEHLETVRILNDRDVLAEVMSRAGASPEVVLEATYGWYWAVDALAELGATVHLAHPLGVRAFSYRRVKDDQRDAFDLADLLRMGRLPHAWIAPPATRELRELVRHRAKLVAMRSQCKAHVHAVLAKGGIWVPMTDLFGVEGNLLLDKVTMPAPYRERIASLRRFIEAFDAEIDLFTALAQRRLTHDAGYTAIQQIPGIGPVLAAVFVAEIGDVHRFAGPAQLTCWAGLTPSHYESDTTVRRGRITKQGSRLVRWAAIESVKILPETSRIGAIREQVAHRRGNRNIGAVAAARRQLELVFYALRDHHVRALHRSPHAA

SEQ ID NO: 408064 - protein, 418 aa, unidentified
MNEEGNTRGSKRYVALDIHKHYCVMAGVDREGRVLLQPVRVEHADLEGWLKKNLRASDHVVLESTTNAWHVYDLLSPVVARVVVANPFKVKQIAHARVKTDIRDTLILARLLAANLVPEVWVPPAHVRELRQLLSQRRQLVETHTQMVNRMHSVAHRHHLSHARGKRFNEKNTVWQKDKRLSKVEQFQLELEMENRVYLEKQISRIGKEVAKMSHQKPWAENMTYLMQLPGFGVITGMTVLAAIGDIQRFDSAQHLASYSGLTPGLEQSGTRNRGKGVTKEGRKELRWAMVEVAQRAVKSDPLWKHRFQELQKRMHRNQAIVAVARRLLELVWYVLTRRQPYRHFSQERIAYKYLTWAWQMDDEARDGLTRQQFTRYYLMRLGIGQDLTRIALDPKHPRRIASEAELLALRPELNHIE

SEQ ID NO: 408065 - protein, 391 aa, unidentified
MIYVGIDVAKDKHDCYVCDSDGVELYAPFIIQNTREGFEDLFGKVRAVAPDLSKVKVGLEATGHYSYNILGYLLEKEFRIFLINPLHTNLFRKSLSLRQTKTDKVDARTICMMLHSGVALTPYSKTSYHMEELKSLTRYRFDKVRERSKLKQSLSRLVTILFPELEKLVPTLHMKSVYALLYEFPGAEQVASCHMTHLKKLLYDASKGRYGKDVAEVIRNAARSSIGSHMPAKSLELRHTIDLIRKLDDEIGETEKAIKVIMDDIGSPILTIPGINYRMGAMILAEIGDISRFASPDKVLAYAGMSPSTYQSGQLTSSYAHMEKRGSRYLRYALFNATKFVCIWDDSFAGYLAKKRSEGKHYNVAVSHAAKKLVRLLFHLMTTGEIYVPVA

SEQ ID NO: 408066 - protein, 367 aa, unidentified
MIVNEVAKNVEKIISIDTAKNSFQVLVVNHKTGKKKNTKVQRSKFVEYILKQGPCLIFMESCSASQHWARLFESFGFTVKLIAAQHVKAFLRNRRVKNDERDAEAIYTCGIQPDTKFVRIKTVEEQTVALLHTLRKAAVSQRVELSNRIRGILAEFGIVVARGRGSFNSEIEAMFNECEKIHDVNLRVAISSLFEDYHRLKQREKELSEKIESLNKDNELVKIALTCPGVGSLTASAIVAEVGDASQFRNGREMAAWNGVVPSQHSTGGRSTLGGITKTGNRYLRTLLAQCACAVIQNASRHLEQGKDTHLDRFALRLKLNGKPVKKIMIAIANKIIRILWAMLTQRKTFENKANEISDTSAELQLA

SEQ ID NO: 408067 - protein, 460 aa, unidentified
MDIGKFKHVAGFVSKTLLERHKHFENCPAFTFEQSREGFRALVERIRAYGPLEHCFLLLEQTGHYHRPLQQYLLECDLSVYVIHVQRRQAGIIKTDKRDALGLANQLYNQLELGVQVADTLQVVRRAIPPSEAAAQLKGHVRHRYELVNEATQRKNKLTSLCDELFPELTQIFRNPNLPTALDLRETFPTPSAIATASLTALREVRKRNYPSEAQLIQLQHLAIQSIGTKDPARLRGLILEQSLLIQELRLIQDHLEQLESEIGQIVEQSREGQILTSIPPIGPIFAATIIATVGTIANFSRPSQLKSYFGWAPKREQTGVSFDRTRLDKGGSREMKKAMFLIVLTAIRMKETEWAKLYERLVPRLCVYDERTQSYSGKGKVIGHVAGRLIVLVYALLKQDEEVLSHLAPGAEPPAPTLYDPELHRQHRTGNYQPLKRRAVGNRIVQISSYVSHGDSQLS

SEQ ID NO: 408068 - protein, 430 aa, unidentified
MERREILLDEKHCNPVGLQTAEQINAKMVDGVKRHVGVDLSKQKCWICFIDGNGDVRYETASLSSGKRESFDNLFQQGDLVLLEASTGTFQIARELNKREGIVACVVNPKSTHLDESNKKTDKQDSFGLSKFILRNPVEELPLVSIPSDREIEYRAILSQYNSIDNQNTMYVNRLHAIFHDAGFPEAGKTYDLHTRQGRQAAIASCFGDRKYSEPKALAKDIDRLLAMQEEVLEREMRKIASIVAGNPKMATILGSIPGIGMLNIAAIIAFIGDISRFSSAGQLCAYCGLVPRVSQSGQRDAKRKITKEGQAILRKFLIQAVYAMSRTTCDFKLKEKLKEMEKRMPRRKAVVAIARQLVRIMYSMLKNGTLFSGSTEQEKEEIVKYQKRKIVAEIGTYNKICKSCNEFLAMKERSNLLDWNKLGICSSGA

SEQ ID NO: 408069 - protein, 338 aa, unidentified
MALYCGIDLHSRDCWMAILDDGLKVVREAKVGNNLEAILEILEPYREDLAGIAVESTFNWYWLVDGLDECGYQMHLVNTWAVKQWEGLKYSDDRHDARWLAHLLALQILPEGYIYPKQERSARDLLRRRAFLVRKRTSFLLAMRGAFECRTGLRTTSREVKQWTVEEVEAYLEDPAEALGITCLLEPMKTLDGQITIIEKEALTRARLRDEFAPLQTVWGIGKILALTMMYEVGEISRFKKVGNFASYCRLVKTARLSAGKRKGSGNARNGNPYLSWAFSEAAHFAVRYHPEAKKYFQRKRSKTNGIIAIRALAHKLARASYYVMKDRVDFDSERVFG

SEQ ID NO: 408070 - protein, 310 aa, unidentified
MGGVNAAIDVGKHQLEIVLGSAGEHWVEPNEPRAIKRLSQRLAAAGCERVLLEGGSYQNLLVAALRAAELPVVMVNPRRVREFAKSIGRLAKTDRLDARVLALYGERIAPPVRELPDEQSQTLRALWVRREQLIEMLVMEQNRLEHAPQALHHRLRAHIDYLRKELKQADDDLDRTVRNSPLWEQYEVLRSVPGVGPILSVALLADLPELGRLNRREVAALAGVAPFNQDSGSVRGQRKIEGGRGRLRRVLYIATLAAVRCNPLLKPFFQRLRAAGKPHKVALVATMRRLLLILNAMLKSNTAWRPPCPA

SEQ ID NO: 408071 - protein, 356 aa, unidentified
MICIGIDISKDKHDCLISNSDGDILFDNFTFSNSLEGFELLFSRIQSCSDNFSQMKIGLEATGHYSNNITEFLVNKNLPIFIINPLHTSLYRKSLSFRKTKTDKADVHSIVSMLMTQKLTPYVPVSYHRKELKSLTRYRFNLVQDCSVLKVSFSRLMNIIFPELEKIVHQLQVNSVYQLMSAYPDAAAVSNANLTHLTNLLRKYSKGHYGREKAIEIRNAAMQSIGTSDGILKLEMQQTIARIRLLREQISIVEVRIKDIIKESDSPFITIPGISYITAAMIHAEVGDFSNFSSAEKILAFAGMEPSIYQSGQYTSTHAKMVKRGSKYLRYALFTAAKNVGKWDNTFKEFLQKKTL

SEQ ID NO: 408072 - protein, 378 aa, unidentified
MIDTGDIDVFLGLDVGKSEHHATAVTPASKKAFNKRLPNTEPKLRELFAKLQAKHGTVLVVVDQPASIGALPLTVARDMGCPVAYLPGLTMRRIADLYPGEAKTDAKDAFIIADAARAMPHTLRAIDGQDETIAELEMIVGFDDDLAGEATRVANRLHGLLTQIHPSLERVLGPWLQHPAVLALLERFGSPAQIRKAGRRRLVTLLRPKAPRMAERLVEDIFAALDEQTVTVPGTDAATLIVPSLAGSRTAVLDQRKLLAGRIEELLEAHPLSKVLTSMPGIGVRTGAWILIEVGDGSTFPTAGHLAAYAGLAPATRNSGSSIRGEQPSRRGNKQLKRAFFLSAFAAFYSPGQGCSAEAVSQSILERADRTGVYQAPA

SEQ ID NO: 408073 - protein, 338 aa, unidentified
MKLYGAIDLHSTNNMTVVINEQDQVVYQKRLPNDLSQIAQQLASYRRSLQGIVVESTYNWYWLVDGLMEKGYRLHLANTAAIQQYNGLKYTDDQSDARWLAHLLRLGVLPEGYIYPKQERAVRDLLRKRGQLVHQRTANLLSIQSLISRTTGNSISAKYIKALNIERVDGVLPNPDHVLALKANLAVMNSADAQIEILEKAVQDRVKLRPQFRFLKTVPGIGPILALTIMLETGEIERFASVGNYASYCRCVGSQKISNGKRKGSGNTKNGNKYLAWAFVEAANFAIRFNSTIKSFYQKKKSKSNAIVAIKAVAHKLCRACYYIIKDQVAFDITKAFA

SEQ ID NO: 408074 - protein, 353 aa, unidentified
MKKIAIGIDFSKKTFDATIVHRDNDTYTELAYSKFNNDAKGFNTFEKWVKTSLKGMPESRNKSEWIFCGEHTGMCSIPLCDYLAKKQYFMWLESALVIHRKSGIVREKNDKADSKRIAEYALRNFSTDVKPYELDSNDLKKLRSLYAAHDMLTKDKVSKINQLKSGTLDASSSAKHEIDKQLTHIRKSLETVDEEIKYLLSESEEFTSNFKLLNTFKGVGVITIGYLIIKTRNFKDMRDSRELGCYMGVVPCKQQSGTSIDKPSRTSRYRDKSGNSLLTNCVMSSLSHNNPIIRPYYDRLINRGVHPKKATNNCKFKIINVLLAMLRNNTPFNMAVHGRSKENWQAEKEAAAS

SEQ ID NO: 408075 - protein, 456 aa, unidentified
MKAKAVSALRSKRVLRPIVRDAEPQVVGLAPQDNHERRANTMKTYILRDPKAVEPQNRQLNPPPASRMPAPPTAPPGPVLFLGLDVHNDSIAVSLAPSDSTEVRRYGIIGGQHDDVLKLSKQLAAAHPGAALKFCYEAGPRGYPLCRFLRQHGTACMIVAPSKVPRQPGDRVKTDRRDADQLARLLRAGELTGIYVPEPQDEAVRDLIRARYQVQKQQHRARQQLKMFLLRQNIRYAGTKPWSAAHLRFLATVKLPFGEQQFVFQEMVNVITEAGQRLARYEKEIANVVESWRWQPVVAALMSLRGVALLTAATLVAELGDLERFASAPQLMSYLGLCPGEHTSGADRQQGGITKMGNGIARKALIEAAWNNRTPARISRTVLARQEGLPKSVTEAAWKAQTRLHQRYQHLTGVGRKKSPVAAAALGRELAGFVWAIGRMVPPRALPAAEVKPRAA

SEQ ID NO: 408076 - protein, 389 aa, unidentified
MIYVGIDVAKDKHDCCILGPEAEMLFPVFTIQNNRDGFNELFIKMYEVAEDASEIKVGLEATGHYSYNLLGSLIDEGLTTYVINPLHTNLFRKGQSLRKTKTDKVDARTIAMMLFSDRTLKPYSDISYHNEELKSLTRYRFDMVHKRAKLKSSVSRLVNILFPELEKLVPTLHMASVYALLSELPGASYIAECHMTHLKSLLYKASKGRYGDDMAETIRATARNSIGSIMPAKSLELQHTIRQIQAISIDIDEIEYSIDIIMDSMASPITTIPGIANRMGAMILAEIGDFTRFDNADRILAYAGISPTTYQSGQLNSSYAHMEKRGSRYLRYALINAAKYVSQWDPKFAAYLAKKRAEGKHYNVAITHVAKKLVRTIYRMELAGEAYRV

SEQ ID NO: 408077 - protein, 450 aa, unidentified
MSIAEAPGGHRCPSASQPEFAAFVGLDWADEKHCWKLAVAGSADWEQGEVKNTPEDLLAWATRLYARFGGRPVAVCLEQSRGAVVFQLSQFPHLVLFPVHPTTVAKYREAFFPSGSKNDPLDTSLLLELVMHHRDRLRRLDPDTPETRLLQMLVEHRRKLVDEKTRLSNRLTAWLKMYFPQVLDWIDDIDSPLGCALLERWPTLEKLQHAHPGTLRQFFQQHNCRSGERIQQRIQAIYQAQPAVTDTALLRAGALMTSDLVALLKTLQGSITKLDGEIDSLSSQHAEAELFAGVPGVGAVLRPRLIAAFGTQRDRYATAGELQSYSGIAPVTKQSGKSRQVHFRRACPQFLRQTFHEMAAHSIAKSEWARAFYQTQRDNHKKHHAAVRALAYKWMRILFRCWKDGTPYDERIYMEALAKRNSPLAKLLPGATGLKWKTVAGFQKITLENA

SEQ ID NO: 408078 - protein, 425 aa, unidentified
MLGVGIDWSEEFHLVALGRPGEGVIDISRVEHSPTAVDTLVGRIAGLEPDPAEVRVVIETRHGLLVERLVDAGYVVVPVNPDLVARRRGPAKKKDDSEDARIACLIALDRHERLRPLIPHGEIAGELRSIARDDERAARDERRLGNRLRQDLIATFPAALQIGGDDLGAPTFLRLLERWPTANALAGASREELVAFARSCRHGWPERFADRVATSLAADHFRPKEYLVRAKADTIRLAATQLLAIARQRRAWERRMGELLLGAPRRGRDHQPRGDGLGNGFPDGEIYLSFPGLGDRLAARIAGEIGDHPEQFDSPSSLQCYAGKAPVTRRSGKSELVVACRLAHNRFLGAAVQQWAFCSLKRSGWAREFYDAQRARGKGHHAALRALGNRWLEILWHCVRRGVLYDETVHVANRNRALGRTAEAA

SEQ ID NO: 408079 - protein, 416 aa, unidentified
MKKHNNSAKKGEWTPVQVKPRGPERRETKEVLAELVEKLKERLGPSAVQAIAGREHSRGGLRPNLDRLTVGVDLGDQWSHYCILDLEGETLAEGQLRTTPQDVAEFFQALNAARVVLEVGTHSAWVQEVICSCGHEVLVANPRLMDGSKRRKRKNDRIDANKLARLGRVDPQSLHPMRHRSKEVRQDLVMLRARDALVSARTELINAMRGLVKSMGARLPKCSSPSFAQKAEGAVPLEIREALMPLVRLTAALSNSIQEYDEKIEKLGSEKYGHTALLRQVKGVGPITALAYVLTLERPDRFVRSRDVGPYLGLVPKQEDSGDSQPQLGISKAGDTMVRKLLVGSAHYIMGPFGPDTDLRRYGLRLCERGGKNAKKRAAVAVARKLAVLLHRLWVSGEVYEPLRQSMSTMITATAA

SEQ ID NO: 408080 - protein, 356 aa, unidentified
MRRNIWAGLDVGVETTSVCVIDDAGEILQQDSCGSDVSSVHQQLRWLRRRRMATVGVEAGALTLARGLRSRGYCVEMYETRQLSKFLRVRRNKTDAGDALGIAEAGRIGASLVSKVHLKSLECQSLQSRLTMRRHLIRQRVAAVNLLCRQIELYGGRIRRSNRQKPLRDQVEVQLKRLFGKHPNGLTLELRHLLAYCEQLFGYQKAIDGEFKRLASDNEVCRRLMTIPGVGPICALTFYAIVSDPHRFRRSQSIGSYLGLTPRVHQSGLSNRAGRISRMGNAAMRTLLVQAALAFMRSKHADPALRSWALSIEQRSGRGQSRIALARKLAVIMVAMWKRGEAYRPSSQLPAGLPAG

SEQ ID NO: 408081 - protein, 326 aa, unidentified
MFFIGIDVSKAKLDCCLSLDVEGTKRRAKSVPNSKPGILGLLAWCAKHQLAAQDLHAIMEGTGVYHEQAALALTDAGVTVSIVNPAQAKDFGRSLGIRTMTDGVDSLVLARFGALLKPRPWTPPAKEARVLQALLSRREAIAQDLRRERNRLEKADATDTPASIRQSIVDAIIFLEKQLAKLQQDIDNHIRKCPKLKADRDLLVSIPAVGPQVGNHLLAVVHNHHFQSAGQLAAYLGLVPIERQSGSSILGRPRLSKAGPARIRAVLYMAAVVATKHNPHIKALYQRLQERGKSKMSALGAAMRKLVHLCFGVLKTRQPYQANYAF

SEQ ID NO: 408082 - protein, 347 aa, unidentified
MLHAGLDLSRKKLDVCVLSDQGEHLDQLAVPPDVDSLRRLARRVVEVHRQPVCAVIESMTGARIVHDTLEQQGWSVEIADAQKVKGLAPLACKTDKIDSKVLAVLSHRDLVPAIWLPDPSVREERELARFRLHLVKHKSALKCRIHSTLINFGKPCPVTDLFGVEGRRLLKRLQVPEPWRGNITASIELIDDLERQIAEINHRLKKGHAEHPYVPLLLTVPGIGWVLAFTIAAEIGEIERFPSPEKLAGYTGLCPRVNQSGEKDRRGPLTKHGPTYLRGALLEATMHALRHPAYAERYQRTKRRLGKQRGAKVAQVDIARRLAHAIWHMLSRKEKFAPRGAAFRLAA

SEQ ID NO: 408083 - protein, 456 aa, unidentified
MSGKNATPMPTGLPIIHERAAGIDIGSRFHVAAVSPDLSDEPVRTFQAFTSELHRRADWLIDVGIKTVAMESTGVYWVAAYEVLESRGLEVILANAHDAQAVPGRKSDVNDAQWLQRLHACGLLRASFRPGRDSAALRVYVRSRERHLDYAAAHIQHMQKALTFMNVQRHHVLSDLTGATGMKMIRAIVAGERDPDSLAAMRDTRCKASVETVRAALVGNYQPEHVFTLTQALALYDFYQRCVEECDRQIEQAIAALNAARPQPEAPLPKPRHRTKQPNEVHFDVRSALYQLTGTDLTQIHGIGPFLALRLVAECGTDLSRWRTAKHFTSWLTLSPGCHISGGKVLSAYTRKTRNRVTAALRLAAVTVGRTPTALGAFYRRLAARIGNAKAVTATARKIAVLFYNAMRFGMDYKDPGAAQYEQHYRDRVLKQLHRRAAQFGFTLQPGSVSVAEHVS

SEQ ID NO: 408084 - protein, 345 aa, unidentified
MTSVATIGLDIAKSVFQVHGVDAAGQVVVRQRLARRRVLAFFEKLAPCLVGMEACSSSHYWARELMARGHQVRLMPAQYVKPYVKRGKNDAADAEAICEAVTRPTMRFVPVKTPEQQSVMMLHRVRLMLNRQRTQLSNSIRAHLSEFGIVAPIGRRGLDQLLGVVADEKDTRVAADARVCLQMLAAQLAVVKDQILENDRRVLASARSTELGRRLMDIPGVGPLLASALPATISDPAAFKTGRDLAAWIGLVPKQNSSGGKERLGSISKAGNRYLRQMLVVGAMAVIRYAERHGTRRPWLVQLMQRRTTKVAAVALANKTARIIWALMTSGERYREPAATDAMAA

SEQ ID NO: 408085 - protein, 408 aa, unidentified
MEAPSSAYPRGTAGAGQTTSRRGGDLRRFYTRPHHFYGGIDLHARSMYVCILNRDGEIVVHRNMKASPDALRQVIAPYRDDLVVAVECLFTWYWLADLCAQEGIPFVLGHALYMKAIHGGKAKHDTIEAHTIAVLLRGGMRPHAYVYPAERRATRDLLRRRMSLMRQRAALLTHVQHTNSQDKRPEIGKKLAYKANREGGAARFPEPAVQHSIEVDLALLNAYDRLLTELERSLVNTATTHKAQIFYRLRSIPGGGKILALVLLYAIHHIHRFPRVQEFVSSGRLVKGAKESAGKRYGTSGTQIGNAYLTWAFSEAAVRCLRANPAGQTSLARLEKQHGQGKALTILAHQLARAVYDMWRRDTVFDLDKFLQCIMERSGRARRLTGHPGDQPGNRVLAWRIRCVVERV

SEQ ID NO: 408086 - protein, 443 aa, unidentified
MSHVRALTRGDRRRNERLTRLRSIVRREFAVVAVDLALAKQAAVVADHDSRVLGRRMFSGDAWVIDDILDWAGPVAAKAGFAGVVLGCEPTGHRWKPLLDRARARGVELVCVNPMLVHRGREEEDFTRDRSDFKDATIIAKRVAELRCYVPYVLEGHWCRLRHLGARRADQLVAAGSARQRLRDLLECAWPAVLSTASKPLDTLTWRVAMAVSTDPARIMAMGFDAFAAAVRDELPRWGGSRRNLRILRAIFDAARTPGGVATEQAAACERAAYALDDWHHALGQLADVEARMIEVLDTLELSTLVTTITGLSVVGAAAILAETGDPARFDCARTWVKHAGLCPRANESGNFHGITTVSRRGRPGLRTAAWRAIWGALTHNPVYTARYTHLTTRETNPLRPGQARTALAAALLRQLFVVVTRRVAWDPAVAAGTTKEVAPQAA

SEQ ID NO: 408087 - protein, 331 aa, unidentified
MKKKEIIGIDISKSTIDFVIHSNQMHFVVKNNNSGFNAMIKKVGKFSPYASDERLYVLEHTGMYSHLLTLFFTQNNIDFVLVPGLAIKRSLGIIRGKNDKLDAKNIALYGYRLREELKPSVIPKQVLIKMKNLMGLRDRMVKQRAGYRASLKESKSIYKKKDNKVFFEAQQKIIDQLSKSIKKIEQEINSLMQSDEEIYHLFKLITSVKGVGRQTAIYLIIYTNGFTKFENFRKLASYSGIAPFQYKSGTSIRGRTKISNLANKKLKTLLDLCAKSAIQHNTEMRIYYERRIAEGKNKRSTINIIRNKLLSRIFAVVKRGTPYVDVLKFAA

SEQ ID NO: 408088 - protein, 337 aa, unidentified
MTLYCGIDLHANNSVISVIDDHDAVVYEKRHANNLGQIRDVLESFRNDLLACVVESTYNWYWLVDGLMDEGFDVRLAHTGAIPQYAGIKHSNDQTDARHLAHLLRLGILPEGHIQPREQRAIRDLLRRRLLLVQQKTLHHLSLQSLIVRQTGERLSANQIKALNNDTIAEKLDDPIRLGGQITHLARCWHEQAIKMLEDEVLIHLKPRQEYQLLNSIPGVGKILASTIVLETGAIERFPDPGHYASYARCVNTERVSNGKLKGRGNKRNGNKYLAWAFMEAAHYAAIWSPEIRRFYHKRQAKRHILVAKKTVANKLAKACYHMLKRQEPFDVKRAFI

SEQ ID NO: 408089 - protein, 338 aa, unidentified
MKITRIGLDLAKDVFQVHGVDRDGRTVVRRRLRRAEVLKFFAGVEPCVVGMEACGGAHHWGRELGKQGHQVRMVSAQFVKPYVKSNKSDANDAEAICEAISRPGMRFVEVKTVQQQELQGLHRVRSGLVAQRTGLANRIRGLLTEFGVVMPRQLAQVRRALPWILEDGENGLSGALRGLLEDLRADLERLDERIGELDQMIRKAVREDPACERLAQIEGIGPLTASALVAAVGTGAAFANGRGMAAFLGLVPRQHGSGGKAGLGAISKRGDPYLRTLLIHGARSVLQRAARKTDTRSRWLQGLMARRHRNVVAVALANKNARIAWALLAHRQSYRPAA

SEQ ID NO: 408090 - protein, 408 aa, unidentified
MRVIGMDIHRTFAEAVMIDGDRLIRLGRVKMSRDHLAAFAAKLRSEDHLVIEATGNAHAVVEAVAPFVGRVIIANPRQVHLIAKARIKTDVIDATVLARLYASGFLPEVWVPDQSTLRLRRQVTRRNQIVRQRVRLKTMIQAILHAHLVPQCPHADILGPKGRAWLLTQLLPDDESAAIERHIREYDRLTDDLRVVERELARDALGSAETKRLMTIPGIDMVVAVGLLAAIGPIERFTSPGRLVAFLGLNPSVHQSGNNPARHGRITKQGPCHARTMLVEAAWQAVRGPGPLRAFYERVRGRRGTHVAAVAVARKIAVLVWHLLTRGEDYAWVRPALHARKLRDLELRSGFPARRGQRGAGYAYNLARSRREERQRGERAEAAYKRFTQGWTKRGRRVSADASKEERL

SEQ ID NO: 408091 - protein, 380 aa, unidentified
MKTNSDTTTKLYIGFDVHKEKTAIALAEPGAGGEIRSYGEVATTQIALERTIRKIAKTRAVALPEVHICYEAGGCGMWIARMLVRMKVQCTVVAPSLIPSKAGDQVKTDKRDAIKLVRLLRAGELTAVHIPDETDEAIRDLCRARVDTLDDLRRARTRLLAMLRRLGFCYTGKTHWTEAHKRYLRGLQLPFACHGIILEELIGQIDQLEARKKRIEEHMELMCADWIRKPVVDAIMTLRGFRLIAAMMVVSEIGDFVRFTHPKQLMSYLGLTPGEYSSGGKRKQGAITKCGNSHLRWLLVECATHYKAVPKISSALSHRQEGQPRWLKEISWKAQNRLYQRFTTLRKRLMHHNKIKVSVARELAGVLWEIGVKMQTQKGK

SEQ ID NO: 408092 - protein, 428 aa, unidentified
MAKSKAQSVIITDDDGLYYERCAGIDVHKKLLVVCLRIGRRTESREFGTTTAEIRKIVAWLTSNGCQMVAMESTGSFWKPLYNIFEQESLPAMVCNAYHIKNVPGRKTDWNDAFWIAKCLAQGLLKPSFVPDRRQRELRDMTRFRKSQIEERSRNINRLQKFLEGANIKLGSWLSDVEGKSATQLLELIIGKPDFTIDDVKSCMHRNLKSSPEELVAALDGYIAPTQREFFSHVMDVIRTQTSQIEKTDALIKSALNEDEIRAVTALDTIVGIGTVSAKQIIAETGTDMRHFRDQHAFSNWIGVAPGNNESAGKRKSGKTIHGNKALKTTLTQCAKSAVKVKNSFFHAQYNRLVSHRGKNRATMAVAHSMAIAIFFVLQGMEFKDLGADYYTQFNREKKINSHLKQLSKLGVNFPDKILADAIERPPD

SEQ ID NO: 408093 - protein, 404 aa, unidentified
MKGPIVSIDVSKGKSDYQAFKNLNVKYTGSRSIKHTKEGFDEIVNLVREMEKKLETEVCVVYEATGVYHRVLKKVLEDNNIKQFIINPLLSAKTRKNDSLRSPKTDKLDPKSIAKTYYSHSLHNSHKQETIYHELRELSRYYEDILVHIRKDKVAFRAQLDIVFPGYDTLFDDLYGPVALAVIEKYPHPEMLQKKKINTVSKVIQSKTCHRQAVSDTMADKAIEYSKTIYSGCDKDDIEVLILQRFIKKLKEDMAEAERTIGEMIKLAQELPDFSIIKSIPGIGDNLAARIIAELGDMTRFKKKNELVAFAGLDPRISESGKNDGDHMHITKKGNKRLRCLLYLAVTCSIRLKRDDNSIKDFYIKKKQQSNPMCSKAAKTACASKLVRIIYSMCKTGELYQYNK

SEQ ID NO: 408094 - protein, 427 aa, unidentified
MAYRIAAIDVHKKMLAVVVADVEGEGEYQFERRKFGASPEQLQVLAQWLVEQEVEEVVMESTAQYWKPVWGTLELSWKPARQQRDGATKMSGKLHLCQAKSNRGPRGRKNDFADGERMIKRLVAQELVLSFVPDPEQRLWRTVTRRKQQLTRAKVRFKNQLESLLEQAHIKLSSFVSDLLGVSARRMLHAIAEGETSPAALAAMGDCRLRATPAQLRDALGACTQLNGVYRRLLKMALEELKLLEEQMEQLDREASHLMQDHQDAVQRVAEVPGFGVESATQMIAEVGAKAAAFESQKDLASWVGVCPGDEETAGKSKSTRSPKGNSTMRRLLNQSAQSAVKVKGSIFEITFHKLLPRLGYKQAIWAIAHRLCRLLWMILHKGIRYQERGPAVSAKSLRTRTARMIKALQKLGYHVEGGPLPAGSPA

SEQ ID NO: 408095 - protein, 416 aa, unidentified
MEVIYPRCGALDVHKKTVVAGVRLAEESKVTTDIKTFATTTKGLLALSDWLSGYGVTHIVMEATGVYWKPVWQVLSGDEEFTLALANAAHVKNVPGRKSDVSDTHWLMELHAHGLIRPSFVPDTATQELRTLMRSRKQFVREQTRQTQRIQKTLEEANIKLDSLLSDLLGKSGRAMLDAMAAGETDPVKLAALAHKGVKASQEQLREALCGRVTEHHRFLIDLHLQQIDRLDGAIAKIDERVEANLKPFRDAVELVRTAPGIGDVSAETIVAEIGIDMSRFPTAGHLVSWTGICSRQDESAGKRRSTRLRRGNPWLKTALIQAAWAAKNKKGSYLQAQYLRLKSRRGPQKAICAVAASLLTSVYHMLKNGVPSADLGAEHFKKRSSKSHANRLVRQLERLGYAVNLNPTQAEFAPA

SEQ ID NO: 408096 - protein, 340 aa, unidentified
MAEQYVGIDLHRRRSVIVRLTAAGEVLEVVRIDNDPVALSLELAKAGPDPEVVLEATYGWYWAADVLQACGARVHLAHPLGVKMFGYQRVKTDARDSRNLAELLRMDRLPEAWLAPPAVRELRELVRYRAKLVALRSGLKAQVHAVLAKEGVRVPMSDLFGVAGSKLLDQLQLGLAYGLRIASLRSLIGAYDQEITTLQREVAAALAGDVGYLAIQAIPGVGSVLAAVFVAEIGDVGRFAGAPQLCSWAGLTPRHRESDTTVRRGPITKQGPRLVRWAAVEATQRLPKASKQAADFHRIAERRGTGIGRVAAARKLLTLVYYGLRDGQVRCLTRSAAEAA

SEQ ID NO: 408097 - protein, 418 aa, unidentified
MKSMEITAVGIDVSKRKSTVAIRRPGGVIVACPFDISHSGHDLEKLVSILKTTGGDIRVVMEHTSNYWKPIALTLKNAGFYVSVVNAMLIHDFSDNSIRKLKTDRADSLKIANYALTFWNQLPPFNDEDETRLVLKEQSRMYERLASTATSLRNGLIALADQTFPSIDQAFGHAIKNADGHEKWVDFFSIYWHRDCVLRLSIEKFTESYRKWCLRRNYKFRTNTAHKLYALAQDAVPTLPKNNGTKALVLQACKSLNAVCEAKQSTQEEMNRLASLLPEYEVVMQMEGTGPITGPALMAEIGDVRRFKNKKALVAFAGIDAPPFQSGNFESKSRHVSKRGSPHLRRTVFLVANIILTLSHKDNSVFCFMDKKRAEGKHYYVYTIAGSAKFLRIYYARVSEYLRTQEPPAAAICLDCKD

SEQ ID NO: 408098 - protein, 406 aa, unidentified
MELMALYKRVIGLDVHQAQITACAILQEDDGTTRIEQRQFGAFKRDRRALAEWAAALRPDQVVMESTGIYWKSPYAALETVGIRALVVNARHVKNVPGRKTDVGDAQWLATLARAGLLRGSFIPPALLRELRLISRQRQKLVGQLASEKNRLHKVLTDGGIRLGVVVSDVHGQSARAMVKALIAGRPSHEVLELASCRLKASREELFDALQGELTASHCFVLDELMRHIEEIESRIARFDARLLDGLAGEGNMLALLQTLPGVDLIGAAMLLVEIGTDMDSFGSADRLASWVGICPGNNESAGKRKSGRVRKGNLYVRRLLCEFAHAASRTASVFKSKFQALIVRRGHKRSIVALAHKILRTIFFMLKRNEHYRDSATDYEALSVQRNAPRWIKALTKFGFIPSVA

SEQ ID NO: 408099 - protein, 343 aa, unidentified
MEHFAGLDVSVKETSVCIVDDTGKIVREVKLASEPDALLAELRNPAYRFKRIGLEAGPLSQWLLSALAEAELPVICVETRHMRAVLKAQINKTDRNDARGIAQMMRVGLYRPVHVKTLRSQKLRMLLTHRKLLQSKAIAIENDLRATLRNFGLKVGIAGKVKFEARIKELVENQPDLAVLVEPLLIVRRVLREQIGILHRRLLAVVRDDEVCRRLMTVPGVGPVVALTYRATVDVPARFRKSKAVGAVFGLTCSKYQSGEIDRSGRISRCGDEMMRVMLYEAAQSMLFHSTKWSWLKAWAMKIARHRGMKKAIVALARRLAVIMHRIWVDGTEFRWTKEVVTA

SEQ ID NO: 408100 - protein, 412 aa, unidentified
MSIALPNQQFVGKPYKILHNSIDSLTTAVSKIKEAEELYSLESRIFLESTGIYHYPLFCYLRDKGFNCSVINPIITKNSTNINIRKVHNDRFDSKKAALVGLKPDLKVSLMPSDLALNCRNLCREYYDLMDNRSAYVNKLQGELRMAFPQYLGIFSKVTINTSLTLLETYTSPSAFLKADKQEIIDIIKSTARFGLTYAQNKYNAIIQAATDANQFGYIIDSNIKRIRLYISFIRKYDEEINSILESLHELVDANEDSDFVKQIHLIETFKGAGFLSAVSIMGEIGDFSAFSKPKQLFAYFGLDPAVKQSGKFEGTKVQMSKRGSAIARRVIHTLTLQSISISRNGEAKNPVLREYYLKKCDSKPKLVAMGAVSHKVCNMIFAILRDNKPFKIIAPQEHIKQYNASKCDMAA

SEQ ID NO: 408101 - protein, 312 aa, unidentified
MNRIICGVDVSKDWLDAFIRPSGTFERFSNDATGIGALADLCRAENVELVVMEASGGYERTAFLLLWELGIACALANPRHVRRFAESMGCLEKTDRIDAAMIAHYAETRRLAALPPPKAAQMRLSALMARLSQVTSDLTIQMQRRSAARDQQCEASLNEVIALLVRQSRTLEGEIASMIDDDPLWACLNQAFRSIKGVANRTVARLMAELPEIGQISNKAIAKLAGLAPIANDSGKRSGHRPVRGGRSGPRAILFLVGAIAARHDPHLAAFQQRLQSAGKPKMVIRIALARKLLVILNAKARDARREFEYAT

SEQ ID NO: 408102 - protein, 339 aa, unidentified
MNKFNTVGIDLAKNVFQVHINDPHGKKLSSKQIKRNQLLNYLVQQPESLVAMEACCGAHYWAREIRKLGHQVKVIHPSYVKPFVQLHKNDQRDAAAICEAAVRPNIPAVAVKSAEQMDLQAIHRVRERVVKERTAIGNELRGILLEAGITIAQGVAALRSQVPLLLEDAENGISHRLRLLIQDLMDQWRIADDRAQRYKVELEQIATVTPLCKLLMKIPGIGPINATLLLSHAGDAKHFKSSRHFSAYLGLVPRQYASGGKEQLGGITKHGNGHVRKQLVHGARSAYRSLLKEPQSTRLGRWLAGLEGKHPNKIIIALANKLARIIWVVLSREVAYQAN

SEQ ID NO: 408103 - protein, 350 aa, unidentified
MMLIGVDYHPSFQTIAFFVEETGECGELELNHSDGQADKFYRDLKQRGIGVRVGMEATGYSRWFERLLAELGFELWIGDPAEIKAKRVKKQKFDREDARLLLRLLRENNFPQIWVPDAENRDLRQLLWHRHRLVQMRTRIMNQLHALAMNEGYRWKKKLFSEPGRAQLEKLALAPWASRRRRELLELLDRLNPTIEELSAAVGREVRKRPEAMRLMTHPGVGPLTALAYVLIIGTPTRFQCGKQIGTYVGMIPSEESSARKQRLGHISKQGNSLLRFLLVEAAQAAARVHPDWRRRYMHLAMRRHKSIAKVAMGRRLAVRLYWMWRNGCEYSQSLESSVRTRGSSVPEMA

SEQ ID NO: 408104 - protein, 346 aa, unidentified
MEHYAGIDVSLELSSVCVVDAQGKIVKEAKIASEPEAFIAFFQELGFAVKQIGLEAGPLSQWLHAGLKQAGFESVLLETRHVKAALSAMTVKTDRKDARGLAQLIRMGWFRPVHAKSMGSQEVRALLVARKQLLGRLIDVELSIRGILRGFGLKVGPVTRKGFEARIRELVTGQATLERIAGAMLPARAALKAEYEKLHKAVLAIVREDAVCRRLMTVPSVGPLVAITYKSAMDDPSRITKSKAAGALFGLTPRKYQSGEKDITGGITRAGDEMVRTALYEAANVLLSRITRFSKLKRWGMDVAKRRGSKRAKVALARKIAVILHRMWVDGTTYRWTAVQPIAAQA

SEQ ID NO: 408105 - protein, 386 aa, unidentified
MQASTVATPTAGHIGTIFVAIELSQRSWRVALHSPDKDKISHHKLEGGDHAELLALVGRVRERAARTLGGVPAVASCYEAGYDGFWLHRLLLAAGITNYVFDPASIAVDQRARRVKTDRIDGERMLRTLMAYLRGEPRVVRIVRVPAAEQEDARRGSRERDRLIKEQTAHTNRIKALLRLRGMAVGNPRRRDWLSWLATQRDWQGQAVPPRMLSEIRSEHARLMLVRDRLDALAQEAAAAEPMPAEAEMTRRSELLRRLKCLGPAFATTLTSEVFYKDFRNRREVGSYFGLTPSPWRSGGIDRDQGISKAGNPRARCAAIELAWLWLRHQPDSKLTLEYRKRTLDAGKRIKRVAIVALARKLMVALWRYLTTGLVPEGAVLKAVKI

SEQ ID NO: 408106 - protein, 370 aa, unidentified
MSVRRILAKTINTDLEYEAIGIDLAKNCVSVALLTTDGEVVCIDRLDYSELEKSAQVLYPTTFAMEPCTEMNYLVQKLEAWGHRCLVIGGKNVQNYVENHYSGQKTDLNDAQALAFLAQDTQLRPIKAKDMEQQKYASLTTLREQYIKQYRQTIVSLKGICQSWGLNISKGISGKARLKDLIENHAAFPEELKESLVDMVTHAQTTQKALNKITKTLEELAKNDKLCQLIQTIPGLGPVCSCRLRATIGDIQRFKNPKDFPAYYGLVPRSIATGHNEKKGRITHRGDKTMRSLMVQGAGSVVNMATKGKLKSKQLTKWILKKQKEKMSWGKLVCAVAAKLLRIVRAVLISSKPYNPKIAGVAKCSLPKGT

SEQ ID NO: 408107 - protein, 445 aa, unidentified
MEVTSPHCAGLDVHKKTVVACCLTIGSTGELRRELHTFGTMSADLLKLSDWLSSKGVTQVAMESTGEYWKPVYNLLEGSFEILVVNAQHVKNVPGRKTDVKDAEWIAQLLRHGLLRGSLIPPLPQRDLRDLTRSRTNLVRERVTVVTRLQKVLEWANIKLACVVSDINGVSARKILNAIARGTCDASSLANLAVGSLQHKHQELEQALSGRVREHHRFLIAAHLSHLDFLEAQIATFDARITQHLQSQPLPCAAQTTNSFSPDQPDSNSESSSTQTPLSWEAAVNLLDTIPGVARRTAELLLAEIGLDMSRFPTAAHLAKWARLCPGNNESAGKRLSASIGQGHQWLRSGLVQAAQAAVRCQGTYLASVFRRLAPRRGKNKAIMAVAHRLLRAAYYILLKREPYKDLGANYLDKQGKEQLLTRLCRNIKQLGYQVSLQLCSESAP

SEQ ID NO: 408108 - protein, 387 aa, unidentified
MPRLNDLSRSLTALSQDSTLIAVIEMGLKSWLVGAILPGIDRQPLKKLDPDEESLLELLHRWREEAARAGRPVARLCVAYEAGRDGFWLARWLRMRGVEAYVIHPTSIPVSREHRRAKTDRLDVGLLMRAFLGWLRGEAKHCSMAAVPTLAEEDAKRPSRERESLVGERTRIVNRMKSTLIRLGIRGFKPTLRKAAAKLEALRTPEGVALPPHTRTELCHDMARLQLLKEQIKAIEAARLERLEQAPDEGRHAMIRLLARVIGVGVETADMLVNEVLSRNLRDRRAVARYAGLTGSPDESGSKRREKGLARAGNARVRRAMIQLAWRWLMFQKDSGLAQWYRARTADARGDTRKTLIVALARKLLIELWRLATTGQFPAGLALHSAS

SEQ ID NO: 408109 - protein, 343 aa, unidentified
MSIVILGVDLGKNVCSLVGVDAVGAVIVRRSMRRQTLIDYVAKLPACVVAMEACCGAHHMGRLFAAHGHEIRLMSPEYVRPYVKAQKNDDRDAEGIAEAASRPTMRFVGLKTQEQLDIQTLHRVRSRLVAERTNLINQLRAILLERGTIFPVGRRKLELGIDGMLADGNTTLSPRLRQLVSELRGEWRELDARIETLNGEFVELARNDAAARRLTSIPGIGVLNATALIAAVGDASSFTKARDLGAWLGLVPRQHTTGGRPRLLGISKRGNTYLRTLLIHGARAALPSLSQSDTPLGRWLKAMIERGVHRNAVVVALANKLARIAWAALRKGATFERGYPVAA

SEQ ID NO: 408110 - protein, 343 aa, unidentified
MTDVVIIGVDLAKNVFQLHGAAADGTVVFRKKFTRPMFQRFMADHPRCLVAMEACGGAHHCARELVRLGHEVKLIAPRYVKPFVKRQKNDAADAEAIVEAAMRPTMRFVEPKTMEQQARAIVFRTREKFVNQRTEAINALRAHLYGFGYIAPQGIGYLSRLEAVVDDPNSDLPELARDLCRALLNHIAQLTASIEDLKRRIDKISKEQETSRRLQTMPGVGPVGALAIETFAPPMDQFKRSRDFAAWLGLVPRQNSSGGKQRLGKTSKMGQRDIRRLLVTGAMAVVNWASRKGAAEGTWLARMLSRKPRMLVAMALAGKMARGIWAMLTRQEDYRNPVLVGVA

SEQ ID NO: 408111 - protein, 438 aa, unidentified
MTGPHAGGAVMEEKTMDILYERVAGLDVHKDTVVGCVRLAGGTQTQRECRTFATTTEGLMALAAWLEESRCTHVAMEATGVYWMPVWKILGRGDFELIVANAAHIKNVPGRKTDMNDAMWIADLLACGLIKASFVPPEEMQELRSLTRTRKQLVREQTRHAQRIQKTLAEANIRLDSVISDIMGASGRRIIEAMIAGVRQPRKLAELASNRIKATPKELYDALHGRLTDHHVFLLELHLRQWDGLDATIRNVDREIGQRIAQMDAQVEAGTPPFRDLIDLLCTVPGVSTVSAPAILSEIGHDMSRFPTAGHLVAWTGLCPGHNESAGKRKSSRLRKGAPWLKTMLVQCAWAAKRKKGSYYRAQFFRLQSRRGPQKAICAVAASLLTAIYHILKHGIEHHDLGADHFDRRPTELKAKRLVAQLAKLGFTAQLQPIVQAA

SEQ ID NO: 408112 - protein, 361 aa, unidentified
MKEYIALDVHKHYTLAEREDAQSRHAQQTRIEHQRGNLLRYLDGVAPGTTVALEATGNGYWLVGEIEQAGCTPALMHPLKAKLMLGSINKTDKLDMHGLNRLQRVGTLPCVWIAPAAIRDLRELPCMRMFLTQQRTRLKNRIQATLAKYGLGVDGCSDAFGAQGRRQMEQLLPQMPAQARAVTGELLELLEAVEAQIQEHEKRIDELVKVTAAMQRLMSMPGVGRILAVVIALEIGEVSRFASADRLASYAGTTPRVHASGDKMRFGRLRADVNRYLKRAFVEAANCVHLHQRHYPHRHVTRLYQRIAARKGHAKAIGAVARHLAEASYHLLSRQQDYREPVVTTRDRSQGNVSAIAAWTR

SEQ ID NO: 408113 - protein, 389 aa, unidentified
MFYIGIDVAKYKHSCAVISEGGEKIFTHFDFANTTEGFSLLIKKLDAFGISSDCSRVCMESTGHYGYALWSHLSERGFEVCLANPFQTHNYVKAQTVRKVKNDALDALALAQWLLIENPTASALSPEETAELKSIARFRTFQSRIIGDCKRKVITLLDVSFPEYAPYFTDTFGKTSLAVLMRYPSAEALSHAHIDALTNLLVKSSRGKFSSDHASALRDLARNSFGIRYASEASAFQIRELIDQIEFTKKQMVSAERKMTELLVKAATPITTIPGIGTVCAAIILGEIGDIARFSKSSQLVAYAGYDPSVFQSGQFSGTNNHISKRGSRYLRWAIWLAADRARMFDPMLREYYEKKRGEGKCHKVAMCAVARKLCNIIFAVLSTNQPYF

SEQ ID NO: 408114 - protein, 383 aa, unidentified
MKKTKGTPRKKVSISEKVLHLAFELSQNKWKLAFSDGNKMRFKSIAARNLEQLHEEIEKAQVRFKLRGNVRILSCYEAGRDGFWLHRYLLSCGIENVVVDSSSIEVNRRKRRMKTDRIDARKLLGMLMRYHGGERKLWSVVRVPSVEAEDGRQLNRELEALNKERTMHRGRIRGLLIQQGLEVSNPSGKRFLQELEGLRTWEGKALSEDLKERVVREHERLRMVEEQMKLLRKQREIRVESGATDPYRMVAQLRTLYGIGKTSSWDFVMEMFAWRNFRNRKEVGAFLGLTPTPYDSGGSRREQGISKTGRGRMRGLSIQISWGWLRFQPQSKLSRWYMKRFAGGGSRMRKIGIVAVARKLLIDLWRYLEYGVIPEGARVRSGL

SEQ ID NO: 408115 - protein, 322 aa, unidentified
MRYIGIDVSKATFVVAYSSDKGGEIRTFNNTTAGIRQFIGTLPKDGSIHCVMEATGNYSALLLYMLNVAGITVSMENPLKVKNFAKALLSTVKTDKSDARLITLYGEKMNPRPFKVQGEAILRLRQKRTVIRQLTKQITAMSNLRGSLACLPVPDKGATHTVDETIKFLEKKRDRLQSELTDLVEVEFSRQLALLTTIKGIGITLATALIITTGGFTYFQNAKQVSRYLGICPTYEQSGTSVNIKGHINRNGDAYTRGLLYIAAWPASRFNAQCKETYTRLRQNGKSGKLAMIAVANKLIRQAFAVVAHDKEYIDGFVSNRP

SEQ ID NO: 408116 - protein, 317 aa, unidentified
MADLTKFTTLGIDTSKDELVCCNFADPDQIDRVPNHPDAIRTWLSTFQGPRRIAIEPTSTYHLEVVEAAIKMGFVVYMINPRQLVHYREAVNEVNKTDPVDAYLLARYLDREVDQLRPHLPQDRRAQQLWTLLKRRATVVDTRKRLQQSLAGIKLPHKPMLRAIDAILKCIDLRMQKLLRDLGWWADYLRCKSIPGVGPLNATALIATYHRAAFSSVDQFISFIGLDIRLRESGHFKGKSKLTKRGEAELRRLLYCAAAPSRSYLPFKQFHQRQLDKGMPKIAANVVLARKIARIAFALIRKQENFIKVTKGVAIQA

SEQ ID NO: 408117 - protein, 424 aa, unidentified
MSPQKSTACGIDIHKDFFVAAIVNRDGSTRIERFDHTQDGLLTLKSWVLAAQCPVIGMESTGNYWRPLYNTLEGHIELILANSYVIKRIPGRKTDIIDAQWIAELALNGLIKPSRVFPKDAREIRELTRARERLVDQRTGCKAIVHDVFDAACIKLSSVITDIFGKSGRYLIEGILKGKTIDELLSGIPSKRVQKKREDLERAIKSGLTESQVIIIEQNLQLIDRITEQISHLDDEILCRMKDREEDLQIAMSIPGIGTTAAVTILAELGDYRDFDSPESLASWAGIVPSVYQSADKLRTGSITKHGSKHLRRILTEAAQSAARTKNTRFSVYFRKLKNRVGYQKAIIALARKILCILWHLLMNREQYIDAQNVRPESKNLIKKPVSPHSIERSIEILMKAGYCIQKPDRSMNLQRFQGAADPP

SEQ ID NO: 408118 - protein, 338 aa, unidentified
MKKYAGIDVSLEASSICILDEAGLVIWEGRALSQPEVLSATLRRQGGALERVGLEAGPMSEWLFDGLTAAGFEVVLMETRHLQATLSAMPNKSDRLDARGIAQALRTGWYRPVHAKSAAARRIRALLSARRLVVSKRADIEAGVRGLLRGFGLKVGKTTPARFGTRALTLAADTPVEAIVRPLVEVHAALRAQELAFDRQVYALAKTDPVTRLLASAPGVGAIVALTFRAAVDDPHRFRRARQAGAQFGLIPRRYQSGEIDRMGGISRAGDASVRAALYETATAILGRLKRPDPLAVWAHRIAARRGLKRARVALARKLAVVLLAMWKTQTAYRVTCA

SEQ ID NO: 408119 - protein, 313 aa, unidentified
MIIPLRYVGIDVSKQYLDIFDEVLGVPERIANAPQAITQLVARWRCETLVVFEATGVYDLELREALRQAGIRFARINPARARDFARASGRLAKTDPIDARMLAAFARAMQPVTEQPADPARNTLAKLAKRRDQLVLMRAQEKTRRSEAEDHAMAGRISRLIKVLDSEIAEIEADISALIKAEPEISDDAQLMRSLPGVGPVACMQLIAQMPELGKVGPKQVAALAGLAPFNVDSGAFRGKRKIAGGRKRVRDALYMAALNAVRRANPFKTFYSRLRQAGKPAKLALIAVARKLLTVLNAMMRDRKSYLQTNPT

SEQ ID NO: 408120 - protein, 482 aa, unidentified
MKKRNIYQNQSQELLHLFEQAGSSEKVMCVPMDYAKNDHLVMFCNGHGDILRKPFSVKNTPEGIAYIDDQVTRSCRRRGIKKKHVFFGGEDANSFAKNFVSTLRCKGFLVANVNAHDAKKQRGNVQASTDRIDLMGIATMLLNCRANCGPAQSGIYRNLRTLVRHRRKLVQMLTEVKNRVHGIVDELFPGFLNEKNSGIIPFTQSSLYLMEDRFSPKQIRRRRRQKLIEILKRFGTSKAEYTAAKLQQYAAKVLHAPVEYVDTMQLSLAQHVKHIRCLKESVAQMDKEIALSLAQTQGAFLTSVRGIGLVLAAGVTAEIGDPNEQKPLNNLASYSGIIPRVKQTGGSDGKTYTGPVAKRCNRILKDYVVKSAYHLGLHGPQDLMADYKRRDASGQHADFGIGRRYLRMALNLMRTSQVYLPPNLRKDDYAIEQRAGYYLMSWPYLREKWKKVGVLEAAFANNRPLGLWRQIVQELYDIKLKL

SEQ ID NO: 408121 - protein, 348 aa, unidentified
MALTIVETRAVTGGVDTHADTHVAAALDPIGGLLGVKEFPVTPAGYARLLGWLGGFGTVCLVGIEGTGSYGAGLARHMAAAGVRVVEVDRSDRQDRRRQGKSDPLDAVSAARAAQSGRARGAPKGRDGSVEAIRVLMVAKRTARAGRTQTINQARALVLTGPDDLRTRFTRHTPADLVAGLASLRPRPGAVVGYATRIALRELGRRAEFPGGQLERLDELIVPLVTARAPGLLALYGVGPDTAAILLITAGDHPGRLRSEAAWAHLCAAAPISASSGKVTRYRLNPGGDRQANHALWRIVITRMSSHPPTRAYVERRTTEGLSKKEIIRCLKRYAAREVYPHLRPGAG

SEQ ID NO: 408122 - protein, 340 aa, unidentified
MEQFDLFVGIDIAKKDFAVNLFLPGKDSVKAPCKYLNSPAGVAKCLEWLERKHPGKALFCMEDTGSYSETVAMALGELKHAVWVEHASRIKASFGTDLGKDDDLDAKRIAEYAWRYRDRFKSYEAPSAEAEEIRALLSVRQVLVRERVAHMNELKDMKLRAHQPLKAIEFLQDAIAGLERREKEIRKEIEAQLPSNNEEGQACACVRSIPGVGLILTASLAVYTNGYRKAPDGRKLAAYMGVCPRTHESGSSIKRKPRSMGYGPGTMRALFFLACCAIKRRPGFFRSYALRKEGEGKPKMVVINALRNKLAHLICAIIRTKQQFIENYVSIEPRLSLKIA

SEQ ID NO: 408123 - protein, 342 aa, unidentified
MTITVLGIDLGKNSCSLVGLDASGRVVLRRRMRRETVIAFGAKLPGCVVAMEACCGAHHMGRALVEQGHTVRLMSPEYVRPYVKAQKNDDRDAEAIAEAATRPTMRFVALKSEEQLDVQTLHRVRDQLVGERTALMNQVRAILLERGHVVAQGRAKLAASLTELLDTGAGPSLTPRMRTLVAEVRERWQELDRRITALDAEFTEQARTDENARRLTTIPGIGALNATALVAAIGDVATFARGRDLAAWLGLVPRQMTTGGKPRLVGITKRGSKYLRKTLIQGARAAMPTLRQGDTRLGQWLRGLLERAHANTAVVALAAKMARIVWALLRHGRVYEPAAVAA

SEQ ID NO: 408124 - protein, 377 aa, unidentified
MGDYSEAFVGLDTSKLRNAVAIADAGRGGEVRFFGEIENTPAATAKLVRKLSVKYQQLTFCYEAGPTGYGLHRQIKDLGFEGVVVAPSLIPKRPGDKVKTNRRDALSLAKLLRADQLTPVWVPDGRHEAMRDLTRARETAMLELRTKRQHVSAFLLRLGRPYPESRKTWTKAHASWIASQKLEHPQQRLVLEEMMLAIRQAQERLQRLEQAIAAAVPEWSLAPVVTALMAMRGIDLVSATTLLAEIGDLSRFQTPTELMAYLGLVPSENSTGDTVKRGPITKAGNRRARRMLVECSWSYQHPPRVGQAKQPKVDAAPPAVREIAWKAQCRLYRRYRMLIRKGKLKTVAIVAIARELAGFIWAVARAVSTMRIAAATT

SEQ ID NO: 408125 - protein, 408 aa, unidentified
MEIAPIYKRVIGLDVHQAKISACAVAEQADGTLAVEQREFGAFKRDRRALAQWAGEFGPEVVVMESTGIYWKSPYAALERVGIAAWVVNARHVKNVPGRKTDVADAQWLATLARAGLLRQSFIPPAGIRHLRLIARQRQKLGGILASEKNRLHKLLADAGIRLNVLVSDIHGQAGRAMIKALIEGKSVNEVLNLAGRLRASREQLFDALQPEELSGPHLFVLKEVMAHIEELEARMVRFDQALIQGLESWQPQLILLQTIPGIDLMGAAMLLVEIGTDMTSFGSAEKLASWVGICPGNNESAGKRKSGKTRKGNAWVRRLLCEFAQAAARSRCALKDKFAALGIRKGHKKSIVALAHKMLRTLFAILKNNTPYRDKVVDYEALSVQRNAPRWIKMLVKHGFMPAIAAA

SEQ ID NO: 408126 - protein, 329 aa, unidentified
MQHEPVTDAALPAPGLPVAGTDVAKGQLDVFIDIIGRRLQFANDDAGAARLVATLVEHKVRLVVIEATGRYHRRVAAALLQGGVGVAVVNPQQVRAFARAAGKLEKTDRIDAEVLARFGRAMNPRATAKTPESQAVLSDLVSRRRGLVQMRVAESNRAHGQLPKLAATQSRKLLRLIEQQVEDLDREIAKLIEADDDSSNKARIIDSVPGIGPGTANQLLVGLPELGKLNRQEIAKLAGLAPLNCDSGQYRGQRRIRGGRADVRTCLYMAAFNARQKCARFKQYFDGLVARGKLYQVAMTACMRKLLVVLNQMVKNKTRWNQNLTGALA

SEQ ID NO: 408127 - protein, 357 aa, unidentified
MKYIGCDFHPSFQQIAMLDKETGELVERRLLHTEEARAFYEGLQGPVVIGIEASGNMDWFESLLVGLGQEMWIGDAAAIARQEGRKQKHDRRSAALILRLMVENRFPRIWVPTVAERDLRQLLIHRHHLVRMRARIKNQLQHIALNQGWQKKSKLWSRAGLELLGNLKLEPWAGQRRDTLLAMLKDLEEKIKPLDQAVAREAERNQMARLLATHPGVGPVTSLATVLTMGDVNRFADSRSWVSYVGLNPSEESSGQRRRLGSISKQGNPFLRQLLVEAALTAARGDKDLGRMNARLKARKHHGVAKVAVARKLAVRLYWMARTKRSYPDVVRMQGSQSHPVAEVKAEALNRPPASHQ

SEQ ID NO: 408128 - protein, 313 aa, unidentified
MAKIICGVDVSSFSLEACVGPAGPTHSFPNTAEGVVELIAFCRQHGVELAAMEATGGYEKQPFALLWAHGLPVALLNPRAVRRFAEGMGLLEKTDRIDAGVIAWFAAVKSSRPCAPVSAEQQRLKALVTRLRQLTELQTAQRNQRLLVSETMVLSSFREVLALVASQIRTLEAAIAALIAADPLWQKLDQVFRSIKGVADRTVARLMAEMPEIGTASNKAVSKLAGLAPLARDSGKHQGKRPVRGGRRDVRAILFVVAGVVRRYDPDFAAFHQRLTAAGKPKKVIRIALAHKLLVRLNAKARQVRNEFAALTA

SEQ ID NO: 408129 - protein, 319 aa, unidentified
MDQEGSIVHLHKYQNAREDVEELVSICQNPSFVIEATQNWMWITRMLQEKGLPVTLAHPLRTKAIASARIKTDNLDAETLAHLLRASLVPMAYIPTIKEQEDRELSRARCQLVKQQTWVKNQIHSLLTKENLTPPVTDLFGTRGVIWLKEQDLSQSKQLILKQMLALLEDIKEKITVLDRQIEIRSKGNKRVRILKSIPGFGTITAFVLAAEIGNPKRFPSGKKLAAYLGLVPSLYQSGNTKRLGSITKLGNPYSRWVLVQAAHRLVRSDTNTKLFYQTLSARRGKKKAIVAVARKLAELSYRLLVDNRNYEVRMPKRE

SEQ ID NO: 408130 - protein, 404 aa, unidentified
MKGPIVSIDVSKGKSDYQAFKNLNVKYTGSRSIKHTKEGFDEIVNLVREMEKKLETEVCVVYEATGVYHRVLKKVLEDNNIKQFIINPLLSAKTRKNDSLRSPKTDKLDPKSIAKTYYSHSLHNSHKPETIYHELRELSRYYEDILVHIRKDKVAFIAQLDIVFPGYDALYDDLYGPVALAVIEKYPHPEMLQKKKINTVSKVIQSKTCHRQAASDTMADKAIEYSKTIYSGCDKDDIEVLILQRLIKKLKEDMAEAERTIGEMIKLAQELPDFSIIKSIPGIGDNLAARIIAELGDMTRFKKKNELVAFAGLDPRISESGKNDGDHMHITKKGNKRLRCLLYLAVTCSIRLKRDDNSIKDFYIKKKQQSNPMCSKAAKTACASKLVRIIYSMCKTGELYQYNK

SEQ ID NO: 408131 - protein, 464 aa, unidentified
MTPQKGKKFRTSDKVDLTITHRHAAGIDVHSAVHFVAVPVEDVPAGFVNPYAKLPAGVRKFGANTSDLEALAAWLKHCGVKTVAMESTGVYWIPLYDLLASQGFAVILVDPRQTKHAPGRPKSDVLDCQWIRRLHSYGLLTASFRPADEIVQWRGFQRQREMLIRYAAQHVQHMQKALEEMNVKLTEVVSDIAGQTGMKIIKDIVRGERDPLKLAKHRHERCKAAETEIASALYGNWRKEHLFALKQALKMYEFYQRQLRECDQEIETCLRGFADKSGAGPLPARPKKQAPRRHEPKFGARALLFRMAGVDLTVIEGISETTALVILSEIGTDLSQFPSEKNFVSWLGLCPQHRGSAGKIFNRRVRRGANRAARAMRMAAQGCHHAKNALGAFYRRIQARCCGAKAVVATARKIAERVYRLLKYGQDYVAQAEQAYEEAYRLRTLKAMASKAESLGYKLVPATP

SEQ ID NO: 408132 - protein, 360 aa, unidentified
MASITLPKTMTDVPPDVITGGVDTHLDVHVAAALSSIGGLLGTASFPTTPAGYQRLLAWLRAFGPIGQVGVEGTSSYGAGLTRALQAADVTVVEVDRPKRQVRRRVGKSDALDAIAAARAVLAGEALGAPKAKSGNVEGIRVLTVARTSCIKSRTQTLNQIRGLVSTAPSELREKLRDLSIGETVRSCAAFRPGEGSDVHTTTKLALRVLARRVQYLDTEISELDARRTTLVEQVAPQLLNAFGVGPETAALLLVCVGDNPDRLQSEASFARMCGVAPIPAGSGLTDGYHRLHRGGDRQANSALWRIVLVRMSTDPTTKAYVARRTKEGKQKKFIMRCLKRYVARELYSLLPHPELGLTT

SEQ ID NO: 408133 - protein, 353 aa, unidentified
MVSHLLKKEQNESMEKEVKSYLGMDVSKLWVDVSVLRVVNQQKQPLTTERFDNDAAGMKALDKWLKKQQVSFDENSLLVIENTGVYHRLVWEYCSNHGLPLYIGNATHIKYSFGIARGKNDKIDSQRLCTYALKNREELKATPVLNAVFLRLKDMMTSRSRLLAQKNSIKVYLGELKGSNSKETQELIEQAHKAALEGIAQSIKIVEKQIHQIIQQDASMKNNYELLLSVPGIGHLTAVYIICCTHNFICRITGKQLASYAGVAPFENTSGTSIKGRAKVHKMANKDLKKLLHMGAVSAITHCLEFKAYYQRKVKEGKHELSVINAVRSKIALRAVAVINNQKKYVDKYKVAA

SEQ ID NO: 408134 - protein, 371 aa, unidentified
MEHTRFVDLDIHKERISIAVAESGRSGAVEYLGEVANDPGAISKLCDRLGRPGRPLAFCYEAGPCGYGVYRQLTSLGHRCDVVAPSLIPMKPGDRVKTDRRDATMLARLHRAGELTPVWVPDADHEAMRDLIRLRSVVRQIVTRTRQHLQGFLLRHGRKHGQGTAWRMAYRRWLSTLAFQHPAQQIAFQDYVDAVMDAERRLQRVEEQISCLLPEWNLCPVVDAVQAMRGIALINAVVLVAEVGDFTRFSNPRQLMAYFGLVPGEHSSGETIRHTGITKTGNSHARRALVEGAWAYRMKPRIGRHKVDRIEALPKIIRDIGWKAQVRLCARYRRLSARGKNANVVNIAIAREMVGFIWSIACTIQSAPRTA

SEQ ID NO: 408135 - protein, 445 aa, unidentified
MKILALDLGKFNTMCCFFDTKTRKHSFLLAATERNYLQTVFQQHQIDLVVMEACGPSGWINDLAVQCGLKTLVCSTNEDAWRWSNVKRKTDKDDALKLARMAVMQELKAVHMPSPAHREFRSLVKYRKTLDYRVNKMKNTIRAWFVNHGISIDAGAKAWNTGRARIDSFRKPLAECRPDELWRGELDLELTQLDAVSEQLDLVIKKLEEIGKRDPRIQRIMTIPGVGPRTAEILVACLDDPHRFENGRQVSAYFGLVPRQYQSGETDRNGRITKRGNPLARTILVECAWVSLRYNPWAKAVYERISGKQKTRRKKAAVALARKIAVIAWALLRDDKDWDPKTMIEVTQSFGRMNPSLQETLQTMKPKENSDQRKKRLRKEAREAKEARETKEAREAKAPAEPHASAATTKAPQAKPTKQAVTKLNTKSSKPKPKSRRARKPVSRG

SEQ ID NO: 408136 - protein, 471 aa, unidentified
MGSSYAGVDWASDKHDVFVADTAGEKLLAATFAHDEKGLRSLCRQLLHLNVALVALERPDGLLVERLLDAGLRVLALHPNQVAATRDRFRVSGGKSDRFDAFVLCELARTDHHRFRVLEPDSDQTKALRALTRGREDLVGMRTALSNQLRAELERFWPGPLGLFSDLHSQISLAFLERYPSPADTRGLGEARLAGFLARERYSGRQSAGHLLTKLRRAPASRVGEQELATRRQLVLTLVSMIKLVGEQIKELERQIAAAIREHPDGAIFLSLFKGTVITAAELLAEIGDCRARYPTRDALAGDAGQAAVAKESGKRKTATFRWGCDKRLRQAFHTLADSTRHWHPWAQDLYAQARARGHDHPRALRTVGRAWSRVVWKCWQDRTPYDPARHRALQRHITVLIPTPSGPVPDLAATQRMAGAAVTPNGRPAGPSAKRLTASRHPLSRRGVDTGRPRTRSWHRARRRAQRLRC

SEQ ID NO: 408137 - protein, 352 aa, unidentified
MNIDYVGVDYHTKFAVATRMNRDGDIISTDKIDNTKEDIRGYLSTLPSGTKVALESTGNWYAFVEWAHGLPLDIVLSHPQKTRVIAESRIKTDTIDSKILADLLRTNYLPQSYLAPANVRDIRELIRFRTTIVRMKALFETKIYNAVYKNGEKILATRSDGRKARVEIAKMNLRPVYQDEINSCLAICDYFKTQIKQYDEEVERKATMDDDCKLLMTIPGISFFGALLITSELGNWRRFASSRKLASYAGLVPSTYSSGGRTRHGAITKQGSKNLRFILLQAITHLARRDARFGKMYTRIKIKHGAKTARIAVSRKLLCVIFAMLRSRQPFQITKDRQHRSAAQSVLTKRRE

SEQ ID NO: 408138 - protein, 344 aa, unidentified
MKPQQQYVGLDVSLEQTSVCVVDAAGATIWRGKCSSTPESIHSVVAKHAPEAVRIGLETGQLSTWLFHELKARQLPVICIDARHAKAALSLQINKTDANDAHGIAQIVRVGWYREIAVKGMDSHATRAMLVARAQLVTQKVKLMNCIRGLLKTFGIVLPAAKGRRFDAMVRERIVNNPMLTAIIEPMLVLLLTTREQLAVFDRLVRRRARADHDVRRLMTVPGVGAVIALAYATTIENPSRFKRSSSVAAYLGLTPRRYQSGEMDRAGHISRCGDAMLRTYLYEAANVMLRRSTRPSQISLWGRALSERIGGRKALVAVARKLATVLHSMWRNRMEFRFEQAAA

SEQ ID NO: 408139 - protein, 317 aa, unidentified
MDVLGIDISKADFHACLIQGTKRTKKSFPNRPAGYRQVRSWLKNRRCANVHACMEATGAYWEGLAKALHDAGDTVSVVNPSQTVFFARSQLRRTKTDSVDAEMIAQFCQERHPAAWVPPPPEISELRGLLSYREHVVGERMRLEQMATQIHVSKELRKAHAQQLRALEVTIAAVEKQLQALATKQPRIAQQVGALTTVSGLGFLTALSLVAKLPTERLRSAKAAAAYVGLAPSERQSGTSVHGKPRICKTGNAGLRCDLYMPALSAMRFNPILKAFAERLRERGKPGKVIVVAVMRKLVALAFTILKNLSSTAPVAV

SEQ ID NO: 408140 - protein, 384 aa, unidentified
MPMRQVCGLDVHKDSVFVCILNENGIVFQEKYGVLTTELEQMLEVMMQHDVTEVCMESTSVYWMPIWRVLENYIPKLMLVNPYFIKQLPGKKSDVKDAEWIATCLLKDLIKGSYVPEDRIQQLRQYDRRIFDLNKEITYKLTKLDMALQRCNIRISNYVATTDGKSYQEVVRLISEGKTSPEELAKVIHGRTVNKHGLKTIIGALTGVISGTDMDIIRQLREEILLDQKHKDECQSKMDELCQKWFPTQLKNLQTIPGVKTRSATAIIAELGTDMSSFEDAAHLVSWCGLKPRNEESAGKIKSRSITHGNKYLRKTLIECSWASSKTQGCFYNKFSYIQTVVRRKNKMKVQVAIARKMLSAIWFILHDNVAYRDYTPDIASADE

SEQ ID NO: 408141 - protein, 342 aa, unidentified
MESAVTMGLDLGKSVFQVHGVDAGGSVVVQRRLTRSKLLAFFAKQPACLVGMEACAAAHHWGREIRKLGHTVRLMPPHYVKPYVKRQKNDASDAEAICEAVTRPSMRFVEIKSCEQQGTLVLHRVRLMLMRQRVQLSNAIRGHMAEYGLVAPAGRNGLQRLITILGNPDDERVPAVARASLAPLVCQYDLVNGQVLENDRRVRASARSTEVGCRLMEIPGVGPVLASAIVATVPDPAAFKSGRNLAAWIGLVPRQNSSGGKEKLGGITKQGDRYLRQLLVAGALAVIRYAQRHGTKRPWLVQLLSRRTPKIAAVALANKMARMIWAMMITGERYREPKVATA

SEQ ID NO: 408142 - protein, 345 aa, unidentified
MKKVTLLGIDIAKEIFQLHGVDALGTAVLKKKLKRLDLIKFIAQLEPCTIIMEVCGGSHYWAREFQKFGHEVKLISPQYVKPFVHGNKNDRNDAEAIVEAASRPRTRFVPINDEAEQDIRCVHRIRSRLVSERTTLINEIRGLLYEYGVFHPQGVRNIKKFLAEVSGDTENKFNLTSMMRELCIEIYEELTEINKRIEKCDRKLEAIANTNPICQKLQTIPGIGVLSATILVTVLSNPKLFKNGRHFAAYLGLVPRQHSSGGKDKLLGISKRGDVYIRSLLIHGGRSVVKYAPKKNDKRSQWICKLQDRAGYNCTTVAVANRNARVAFSLIKNEMEYQTDYKNAA

SEQ ID NO: 408143 - protein, 523 aa, unidentified
MATVTKTRLAKITRNRFIGKPHGQIQDRVRKVGPEHFGVISVDCAKRRSKWMLCDFYGRVIIEPTIVEHNAGSLKAMTDLARKTCQEQTLTDSIVAVEMTGIYHRPVQRAFRKAGFDTRTVHPFASKHYRRPLHPDCKTDDNDLEAIFHAAINGYGLATLPVDENYQSLQLLSRHRRNLVKQRARLQVQIRRFIHQTMPGYADLFDEDHFYSKSIAIHVALKFPSPALIRKAASDGIAAALKKSKIRFQPRTIDRIVAWAATADEPAALASLLTQQWQQLNSMRVTLSEQIEEIEREMAHFLVRTPYVLLLSVTGINVVSAAGLAGEAGPIEHYATARALNGRAGLYPSRYQSDEVDHADGGLVRQCNRKLRAAAMLIAENLIKCHPHYRGLSALWMTQRIDPRDRRCRIANRAMRMVYQLVGGRQLWHGKGVDREYLLHKLHEFHRVHGTPIMRSIADLQAAFQWLPKSAYEAESVPLVKLASKRTRGPQQIGDLMLPLLIRLGVRSASEVESSSSEARSSE

SEQ ID NO: 408144 - protein, 415 aa, unidentified
MEVMHPRCAGIDVSKRDAKVCIRIQGGGSRKTSSTVTTWGAMTNQILALRDHLAAQQVTVVVMEATGDYWRPFYYVLETDFEVLLVNAREVKNVPGRKSDVSDAAWLADLAAHGLVRASFVPPEPIRQLRDLTRTRTHITQGRTREIQRLEKLLESAGIKLSSVATDITGVSGRLMLQALIDSDGAADPAAMADLAKRRMRSKIPVLTEALNGRFTAHHAFMTQLFLDRIDGHTKDIAMLSERIDELMKPFLPARELLESIPGFSQIIAEIFIAETGGDMTQFRTPQQLASWAGVSPGSNESAGRAKSTKTRPGNRYLKGALGVAALNQAKSKKTYFSAKYRRLASTRGPMKAIVAVEHAMITAAWHMLTNAEFYRDPGADYYTRQDPAKTRARAVRQLEALGYQVSIHPIQQAG

SEQ ID NO: 408145 - protein, 378 aa, unidentified
MEVIYPRCAGLDVHTETIVACALWEEEGEIQKEIQTFSTFSKGLGDLLDWLEDHGVTHVAMESTGVYWKPVFAFLEGYVDLTLANPQRIKNVPGRKTDVSDAEWIAKLLRHGLIEKSFVPPAPIRELRDFTRLRKKWVGQLSSEKNRIQKVLESSNVKLGSVLSDLFGVSGRNILARLLEKGYVDKDELDECLRGRLKTKKQAVYDSLLGTLTEHELYLLRLLWKHVEELERLIEEVDQHIDRLLEPYREEVDLLMTMPGIKKQTAAVIIAEMGTDMSVFETPERAASWTGLSPGNHESAGKRKSTRTTKGNPHLRSALCEAAWSAARSKTHPLSRKFWSLAARCGKKKALIATARRMLVIIFCMISRKEPFRQPQLI

SEQ ID NO: 408146 - protein, 311 aa, unidentified
MYYIGIDVSKKDLSVFDGKDLNFINQEGLTSFKKYLKKKYSLSEIVIIFEPTGVYSLYLKEFCAENNIKAYIVNPKQSHNFTRALGRRSKTDKIDARILYQFHRLIDSKDIKVPKIDQQAKALSGYLVSYEFALKQRISLSHHLESLRDKRLIALMRKDLKRAKNLEDKIFDDIKEYLGKNQDLKEDYQRLSTIPGIGEKAAIALLALFKTYPGTNRAQITALAGLDPIRRESGTSVKGKVRISKNGKRVYRKILYLPTLCATVHNQKIRVFYQRLLANHKNKKLAVIASMRKILLIAHAMYRDKTEYVAV

SEQ ID NO: 408147 - protein, 316 aa, unidentified
MTNRKLTKSRVNVGVDVGKWSLDICIHEKELVWQVENTPEGIRSLMNRLSRYHVERIVMEATGRYEFALAEAAYDRGLPVCVAKPTSVRKYAGAIEQLAKTDRIDAQVIAEYAAVIKPRVTPEKSKNLIAIKDLLARRRQILSLRTQEINRRHIMDGGIKRSCRRLIKYFDVEIAWVEKRLEKLVEAESEWSEKREILESAPGVGKTLAFTLLADMPELGSLTNKQASALVGVAPINRDSGKMRGKRRIQGGRASVRTTLYMATLSATQCNPAIKAFYKNLVAQGKHKKVALTACMRKFITILNAMIREKQAWCAT

SEQ ID NO: 408148 - protein, 388 aa, unidentified
MTQLPVACPVPAALDYDCTLVLAIELSNKSWVLAAQVPGLPRVKAKRTIEPTAEALLAAIQGYRERAKTAGRHIERVVATYEAGWSGFWLARWLATHGIETHVVQPSSVPVDRRARRAKSDGIDAELLLRTLLAWLRGEPRVCSMVPVPAEADEDARRCVREREELVAERVALVNRIGAVLATLGVGEYNPLLRNRRERLDALRTALGTPLPPHAHAKISRMLDRLDLVRAQIANLEQERDAVLENEAPDRAGEMIQQLATLRGIGVQSATVLVREAFVREFANGKALGSYAGLCATPYSSGGTEREQGISKAGNRRLRTVMVELAWLWQRYQPGSAQVNWFRERVGGTGARMRKVMVVALARKLLIALWRFATQGVVPEGAVMKPAT

SEQ ID NO: 408149 - protein, 343 aa, unidentified
MWYVGLDIGLRWHYVVVMDAAGQIAQQQRLAHDPVVLQRFFETLEGPARVVLEATGHWVAVYERIEPYVQEVVLAHPLKVRAIASARIKTDRIDATTLAHLLRTDLIPRAYIPPRPVRAWRELVRHRAFLVRLQTRVKNRVHSLVAKQGLTPPAVSDLFGTAGRAWLAQVVLAEPYGAMRTRYLAVLAHLREQLRDVERTIDATATPLPAAALLETVPGLGQYLALLVLAEIGEIARFPGPKQLVSYAGLCPSTYASGQTLRHGRLTHQGSTWLRWALIEAATHVGRRPGSRLARRFQRLAARRDAKTARVAVARDLCHVIFHMLTKQEPYREPSSALMIPGR

SEQ ID NO: 408150 - protein, 340 aa, unidentified
MFTNFVGIDVSKCKFDLALIKDLDKDHVSQGVFENTPKGIKSMVKFLQKEHEIKLDDTIFCMEFTGIYCRPLTSYFVKQNCKVWIEMPVNIIRSLGLQRGKNDRVDAHRIALYAYKNRDDIKLWKPQRDLVLKLRDLLAVRERLITAQNSLKTPIKELIAVGDTKAAEVVSKSCQKTLSSIEKEIGQIDKNLDDLIKNDPHLEELFRLAKSVPGVGKLTALFMICFTDEFSMYNNPKQLACYCGVAPFEHSSGSSIRGKTRVSHMANKVLKRMLHLGAISAIQWDPELRDYYKRKTAQGKNKMLVINAVRNKIIHRLCAVIKRGYEYQSQNIFKERFVIS

SEQ ID NO: 408151 - protein, 394 aa, unidentified
MKLVGIDVGKNSHHFCVMDKETGEFNVTPSSFSNNKEGFDFLINSLKTYSKKSILIGMEDTGHYHVALLKFLLSNGYPVALINPKTTDLTRKMEGGITKNDKLDTITICDVLDTPERKKQYRITKVDRFDLYEQRQLTRHHHNLKEELNVYCNRLQKSIDLVFPEFNTLFSSKYSIVYMNLLKTFGSAEAIASTDIRTIRKCFEIKGRGNRISLTPEKLKECAKNSIGISSEVETIQIKHLVSQITLIKEQIAEIDKKIEESSITNNSPILSIPGISHFSGTSILAELGDIGNYSKPSQIIKFAGVAPYHYESSQYNAQHTGITKKGSKYLRKTLYQIILTVINNNPVFKKYYLLKISQGKGHRCAQGHCIRKLLRIIYHLLETGQSFDPALLR

SEQ ID NO: 408152 - protein, 339 aa, unidentified
MQVTTIGLDLAKNVFQVHGITKDDEVAFNRPLRRAQLLPFFSKLEPCLIGMEACSSAHHWARELTKFGHDVRLIPPIYVKPYVKRGKSDAIDAEAICEAVTRPTMRFVAIKTVEQQSLLSVHRARSLLVRQRTQLINGLRGMVAEFGVYIARGLARVIGFAEDILAGEVLDLPDIANEVIHNLCEHLMALHARVRWYEDRLKQVAKEDARVRLLRTIPGVGAVTASAIIASIGDGHQFRNGREFAAWLGLTPANKSSGGKEKLGRITKMGDQYIRSLLVVGMTSLVRQTKSHPERASKWLTSLLERKPARVATVAMANKTARIVWAVLTRNEPYTPHTA

SEQ ID NO: 408153 - protein, 401 aa, unidentified
MIGVGIDVAKAKSMVAILSDDGEIIKAPFEIANTESGLSSLCKIIKELPDKVYCVVESTGVYHFPVVSYLQENDIFVSVVNPLIIKKYASMDIRKVKTDKTDSLKLASYVLDNYRHLVNYSADNEIYSELRILSRQYLHYVKVLANAKVNLTDILDRTFPGIKPLLKGHIRTTGKNKLCDFVEKFWHCDVITSMSEAKFVSEYIKWAKKKGYHPNETKAKSLHANALECIPTLPSNSASTKMLVLEAAKAVSTVETTLATILAQMTELAKSLPEFSVIREMPGVGDVLAPRIIAEIGDVRRFHSASALIAYAGIDTPPYESGDFRASNRKITKRGSASLRKTGYEIMQALKIVQPQNDNSVYQYLIKKENEGKPLKVAKIAALNKFLRIYYSRVKEIYSNS

SEQ ID NO: 408154 - protein, 450 aa, unidentified
MSKGSGVSRGDRRRNARLAELRLLVCRENAIAGIDLAEDNQAVVVTDHDSKVLARRSPRCKAWQLGEVLDWAVGKAKARGFESVTVACEPTGSRWMHVQQACAERGLNFVCVQTLVTHNARVAEDYTRDKSDQKDAVLIARLTAELRCYRPEVIEEEWAVLRYLGQRRDALVTEALRCRQQITDRLALAWPAALGAAAAPLDSVTFLACLQVTADRCDGDPGKLRRYGLAEFTQLVRGVLPRWGGQRICHRIVACFHAALGDSRGAVPARRRGALKLAGHALADLRRARELQLRAEAEMIAQLDVLGITDVLASIEGLSLPVAACILAEIGDPARFGSSRALVKHAGVAPCDNSSGNSAGQARISRRGRPVLRKTAWRGTWAMIHGANPVLAAKYDHLTSRDTGKLAKGQAHIACVATLLRWIYSVITTRTAWDRRVAGGTISHTAALAA

SEQ ID NO: 408155 - protein, 367 aa, unidentified
MEKSTKVFVGMDVHKESIDITLAEQDGEVRRLGQIGGDRGSLLRMVRKQQSQGGERVFVYEAGPCGFWIYREITALGERCMVVSPALIPKRAGDHVKTDRRDSERLASLARAGELAAIHVPDIRDEAIRDLVRGRDDAVIAQRRVRQQLKALLLRNDIRYVGKTSWTGAHRRWLAELKLPEPAQQITFEEYVDAITVATGRIERLTRAIATEVITWRFAPVVAALQALRGIQFVHAVTLIAELGDLTRFASARALMGYLGLVPRENSSGEHRRQGAITKAGNSYARRALVEAAWAYRHPARVTRIIATRQTGLPKVACDIAWRAQLRLSAKYRRMNVRHLNHNKIVVALARELSGFVWAIGQSVRPL

SEQ ID NO: 408156 - protein, 366 aa, unidentified
MERYIGLDVHAASCTLAVISEKGRKLKDFPVETNGQALVEAIRMIPGHKHLVFEEGLQSAWLYETLNPHVDELVVAGITTSRGLKSDKRDAYGLAEKLRVGNLDKQVFKAPREFTRLREFSRSHMTLVADVVRAQARIKSLYRGRGVFVTGVDVYGSRHRKQWQTQLCSSVQTRATRLYDHFDFLLEQKKQAEGDLLQEAKKHSIVRILETAPGFGPIRAARLVPIALAACRLLPPHRFRTRRQFWSYCGLGIVTRSSSDWVQTADGNWIRAQVPQTRGLSRQYNRVLKSIFKGAATTVITQHNKDPIYGRYERLLDGGTKPTLAKLSLARMIAAAVLRMWKDEQEYDPGRNSPATHTRKGKVKPR

SEQ ID NO: 408157 - protein, 367 aa, unidentified
MKKVSTVAAKPSKKISRQKLTVGLDLGDRNSWYCVLDESGQIQLEQRVRTNAKALRDVFSKMPRCRIALEIGTHSPWISRLLSELGHEVIVANARKVRLIGESRKKDDRLDAQTLARLARIDPELLYPVKHRSAQAQADLMMIRGRAGLVRARTGLVNTARGLAKSYGERLRGCNARHLNPEKAEGLSPELQAALEPLLNAIESLSERIVEYNERIEKLAQQDYPQVALLKQGKGVGTLIALTYLLTLEDPHRFQKSRDVGCYLGLQPGRRNSGRSEPQLHISKEGDPYLRTLLVQGAQHILGPFGIDCDLRRWGLRLAERGGKSGKKRAIVATARKLAVLLHHLWVSGEAYEPLHNRNRGAVAAAA

SEQ ID NO: 408158 - protein, 383 aa, unidentified
MLYSPSADASFSHSTHTIYLALELSRRSWLVALHAPDAAKIELHRLPAGDGQAVLDLLARIRTRVERRTGVRPQVSCCYEAGRDGFWLHRLLEAHGVSSHVMDPSSLQVDRRARRVKTDRLDAQALLRALMAWSRGEPKVCSMVRPPSPDEEDARRPSRERATLLQERIRLVNRIQGLCATQGIDDYEPLRPDRRPRLTQLVTGDGRPVPPRLAAEIARQLDWLELVLRQLAEVETRRDAEAPVAKAAPSSKLGALLHVKSIGPELATVLAKEVFYRCFASRRHVAAYVGLTPSPFASGRRSREQGITKAGNARARKALIELAWLWVRNQPDSALAVWFRSRVGSATGRVRRIAIVALARKLLILLWRYVETGALPADVVVKP

SEQ ID NO: 408159 - protein, 419 aa, unidentified
MAKRIHANGKASVQARYNITGGCDTDKNIIVAAIYHAETGNLEAREFKQHKADALRAAEWFRSQEVELVIIESTANYHMLYYDTLREEGINIAVINPIVVKALLRVEGKSDKGDAMTLARLAANFDLKTSNMPDSQQRELRLLFKRIDSWKQQRTQVTNRANGILTGYGFTVFRLVTLNTPAGLNILQGIIDRRTPEEIAALHRNRNKRPEIVKCAEVPLPDYILPYLEEVLGDVTMLNDRIKQAEFEILDKISLSNLEKQVDLMTTVPGVTSMLALRIIAELGSNYHQRYCTAEAFSKAIGVVPANEVSGGKLLKRRSSHGNARVKFHLLSASKAFAIHGKGPLKAWFDQYRSRVHYYKATSALARRIAEGLWWVMVKNEPYRYKLDQIEEIESRSILVNNRLIDPATGEILKSFVEE

SEQ ID NO: 408160 - protein, 336 aa, unidentified
MKKNEFNNFVGIDVSKKTFDVWFISNKEVNQGIHQQLSNDAAGIRKMFSWLKKHGEVGAENTLFCMEHTGVYGRELMYTLFEKNWRLWVENPVAILRSMGLQRGKNDKVDAKRIAIYAMKNNERAKLWEAPRTELVQLRQLLNVRESLIKGLKILTQPIREYAATGNNDLADGMKKLTRCTVNAMEKDIEKIEKAMDELINADEKLSHLFGLLMSIPGIGKITSAELICFTNEFKTYTEARQLACYCGVVPFEHTSGISIKGKGRVSNMSNKRLKTKLHLCAMIAMQHDPQLKKYFERKVGEGKNKMSVINAIRNKLVHRITAVVKRQTPFVKFAA

SEQ ID NO: 408161 - protein, 400 aa, unidentified
MIDTGDIDVFLGLDVGKGEHHATAVTPAGKKVFDKRLPNTEPKLRELFAKLQAKHGTVLVVVDQPASIGALPLAVARDMGCPVAYLPGLTMRRIADLYPGEVKTDARDAFIIADAARAMPHTLRAIDGEDETIAELEMIVGFDDDLAGEATRVANRLHGLLTQIHPSLERVLGPRLQHPAVLALLERFGSPAQIRKAGRRRLVTLLRPKAPRMAERLVEEIFAALDEQTVTVPGTDAAALIVPSLAGSLTSVLDQRKLLAGRIEELLEAHPLSKVLTSMPGVGVRTGARILIEVGDGSTFPTAGHLAAYAGLAPATRSSGSSIRGEQPSRRGNKQLKRAFFLSAFAALGDPASRAYYDKKIAQGKHHTQALLCLARRRADVLFAMLRDGTFYEPQPVRSG

SEQ ID NO: 408162 - protein, 325 aa, unidentified
MTNNNTETAGIDTAKDKLDIAVHGREQRWQVPNVAAGWRQLAADLGKAGVTKVGIEATGGYERGVVTHLRTKGFVVLVLQPIQVKNFARLHLRRAKNDALDAVLVAACAAVLDPPSVDADPRLTELADHLTFVEQIEEDMVRLKTRLEHIDEPRRRRLVLNDIDRLKARRATELLRIAGQLRDHPDLARRLDLVLSVPGIGERTALALIIRMPELGQISREKAAALAGLAPFDDDSGKHRGQRHIAGGRSRLRRSLFAAALPASFRWNKALCALYERLKARGKATTRRSSPALASSSSTPTPSSSAARHGLKSRPRFNGCYACCR

SEQ ID NO: 408163 - protein, 417 aa, unidentified
MSNKAEKIKTINKKTLIVTLDIGKNVHYGYFRTPNNQDIKPFPVYNTAKSFNKFWEKLCSFKNKYMLDEVVIGFESTGPYAEPITNYLRKKPVKLVQVNPMHTKRIKELTGNSPNKTDKKDPRVIADVISLGHALTVVVPEGSAAQLRRLTHARERAIERVTAMNNQLQDLVFVIFPELGTIIKPSTKTGMYLIKNYPDPESIASAGIGTLCNIVRKISRGRFGTDRAEKLYNAAKQSTGITEGKESVILETSHLVSNIANENRYIESLKEQMIEHLEQIPYSHSILSIKGIGHVTAAGLIGEVGDFNKFNTISEITKLAGLDLFEISSGQFKGQRRISKRGRPVMRKLLFFAAINMVKSTGIMHEKYKQMLDRGMLKMKALIAIARKILGIIFAIVHNNTVYIENYTKQNHYKLAA

SEQ ID NO: 408164 - protein, 337 aa, unidentified
MKYSGIDLHSNNCVVTVTDEEDRVVTEKRLPNDLGKVLDLLLAWRDELAGVVVESTFNWYWLVDGLQAAGFKVHLANTTAIKKYDGLKHSGDEADARYLAHLLRLGILPTGTILPPEQRAVRDLARKRMQLVRSRSTHILAVENITARQRGARISCNQVKQLTADLVDKMSIPEDVALAIKSNVAVITTLSAQIDILEKRLQEKVKTRAEYELLTSVPGIGQVLATIILLETGPIDRFAAAGNFASYARCVDSVRTSNGKKKGEGNSRNGNKYLAWAFVEAANYALRYCAEAKRFYEHKKAKTNNVVAIKALSHKLARACFHILKERKPFDVRRCFA

SEQ ID NO: 408165 - protein, 369 aa, unidentified
MDRCATPPARRRGRLTLGAMVEAPDAVGERGPLRLLSKPARLRGHVSPHRKEGIEGMIRTAVHVGIDVAKDFVDVAIGDDGECFRVTTDTAGLDALACRVSGFGPGVVVGLEASGGYERPIIRRLHEAGIAVRLVDPARVRQFARAMGIKAKNDRLDAAVIAAFVATVDGALNVAEPARERLCEHVRYRRQLMEALTVIDNQARLTDDAGLEALAAERRELLRRQVDEIEHRIVRLIDADPAMSKTFALLRSVPGVGPVLAWTLIAEMPELGSLDRWKVAALAGVAPFDRDSGGHNGKRMIHGGRANVRKVLYMAAVAAARCNPPIQAFHQRLRDQGKPPKVAITACMRKLLITLNAIARDQVEWKPAI

SEQ ID NO: 408166 - protein, 351 aa, unidentified
MNYVGIDWAYGRAAWCAMTDAGTIAGEGMIPADESGLARLVLELGTEVSGCVEMMSGAVWVRDRLQSAGWEMKVAHARKVRDVAPLACKTDKVDARVLAELCRRDLVPELWVPSIGDRELRERLRRRMHLVKIRTSARNRIFGLLTQFGLRISHARLRKPDAMELLERRGVPEVWRASIAELLELSEEMDRRITPVDRELAPLARADDRARLLATMPGIGPLLSLTFAAEIGEVSRFASPGKLIGYAGLAPRVSQSGERSATGALSKAGSRTLRWAAVEAANQAWRPSNPWHAHYLRISARHGKNPAKSAVARKLLIAAWHMLSRDESFKPHRRSGGVEPAPANSSRFLTA

SEQ ID NO: 408167 - protein, 354 aa, unidentified
MKRTTKYVGLDVHQSATVASVRQEDGRVIARAILPTEEHAILEFLKGMRGSLQVTFEEGTQAQWLYDLLVPRVDRLVVCNRRKKDRLTNKGDQVDADELSELLRRGALRPVYHGSPQHATLRELTRTYQNVVEDATRVMQRLKALFRARAIKTPGKRVYNPTYRQEWLARLPDRGVRFRAETLYAELDVLRHMRPKVKDAMLAEARRDPAWSVLHTIPFFGPVRVSLLLATLRTPWRFRTKRNLWSYCGLAVRTHSSSDYAIVDGRPARRRRAPMTRGLNRHHNRVLKNIIKGAAAAATGRPGPLKDFYLDLIERGMREELARVTLARKLAALTLRIWKTGERYDPTKLTLQAH

SEQ ID NO: 408168 - protein, 344 aa, unidentified
MNIASIGIDLGKTTFHLVALGERNKILLRRKFSRTQLLAYTANLPASLIGLEACAGSHFIGAVLREQGHQVRLIPAQFVKPYRKSNKNDFIDAEAIAEAVTKQNMRFVQIKTQEQLDWQAMHRVRDRLMQRRTALINEIRGFLLERGLTFAARPIYLRKNLPTVIEDAEQNLTPRLRWLLDRLWQEWKQTEIDIKTITDEIERISNEDARCRQLRQIPGFGPLVSTATVAAIGNGAAFRRGRDFAAWVGVVPRQFSTGGKQKLYGISKRGNVYLRRMLIHGARAVLLRVKYDTGGFGQWVHRLAQRAPRNKVVVAIANKLARMAWAVLSSGKDYRHQPLQPAAA

SEQ ID NO: 408169 - protein, 356 aa, unidentified
MTNTIPMDVIIGVDTHKDVHAAAAISGAGVHLATTTIPASSKGYGALEAWAKSMGAIQAFGIEGTGSYGAGLSRFLRERGHTVVEVNRPNRQLRYQQGKSDAVDAESAARAVLAGQAAGQPKSGTGTVEMIRHLKIARDTAVKARTQAMQTLKAIIVCSPDALREQLDQVSGKMTLLRRLVALRPGPLTSTLASAKASLRAIARRWLLLDAEIKQHDAHLQTLTAARAPELLKAHGMASGTAAEMLLLVGDNPERIHSEAAFAKLCGACPIPASSGKTIRHRLNRGGNRQANAALYRVVIIRMRGHQPTLDYVHRRTAEGKSKSEIIRCLKRYVAREIFGYLCPRPALAGAAATRS

SEQ ID NO: 408170 - protein, 282 aa, unidentified
MTIVMGLDQHRAQVTAEWLDTCTGELSRSRVAPADRAGVRRFLEGFRGQELEVALEATTGWRFMVEELCAVGAIVHLAEPAETAALRGNKKRAKNDRADARHHRELLMAGRLPESWIPPDHLLDLRARVRLRHALSEQRGEWQQRIQSVLYHHGCPPRGDLINTTGLAWLAGQALAAGAREQVTIALNVIDGLDAQLGPLDKSLRAYARRQPGCKALIAAYYGIGPLVAVTILAELGDCRRFSSSRQAVRYGGLETVASNCTSCSGDFGLRDVTGVRDPLAA

SEQ ID NO: 408171 - protein, 346 aa, unidentified
MEHYAGIDVSLEFSSVCVVDAQGKIVKEAKVASEPEAVVAFFEALGFAVKRIGLEAGPLSQWLHAGLKEAGFETVLLETRHVKAALSAMTVKTDRKDARGIAQLLRMGWFQQVHAKSMASQEVRALLVGRKQLLGRLIDVELSIRGILRGFGLKVGAVTRKGFEARIRELVTGQATLERIAEAMLSARAALKAEYEKLHKAVLAIVREDAVCRRLMTVPSVGPLVAITYKSAMDDPSRIAKSKAAGALFGLTPKKYQSGEKDVTGGITRTGDEMVRTALYEAANVLLSRITRFSKLKRWGMDVAKRRGSKRAKVALARKIAVILHRMWIDGTTYRWAEAKPIAAQA

SEQ ID NO: 408172 - protein, 340 aa, unidentified
MGNDVKCYLGIDVSKLWFDLSFMKVVDHQRQTVTTERFDNTPDGIALMHKLLVKQEVPFNEHSLLVIENTGIYHRQLWRYCSEHSLPIYIGNAAHIKWSFGIARGKNDVIDSKRLCDYAYKQAEDLKATVALDPVYLKLKDLMTSRSMLQRQRNAIKVYLRELKDTHDKTVQDLMEKANEAALKGLDKSIAKIEGLIATTIKETEKAGKNHELLNTIPGIGNVIATYLICCTNNFAGKVSGKQLASYAGVVPFAETSGSSVKGRNKVHKMANKELKAMLHMAAISCIKNYPEFRQYYDRKVEEGKHSRSVLNAIKNKLLLRVVAVINKQQPYVDNTKVAA

SEQ ID NO: 408173 - protein, 410 aa, unidentified
MTEESGGWTPSPCLGLDVHKATTTATYLGPDGRPKRAWTFPTTRSALTALSTEVDGTVPVVLEASTAGKAVAHLLKEEGWELHMASPRDVGLIAKSSVKTDRRDSEKLAHLYQAGFLPECYIPPPEIDRMRSVVRERQDLGWKAALVKNQVHALVTRNLLDSEMRGITDWFGVKGLRTLTALPLSGEERAVLARSLRQLSYLATQEQELQRELAQLAVDREDVRLLMTIPGVDYYSAVAIVAEIGDIRRFPTKRELASYAGLVPRADNSGGQVSWHRRVKPGDMVLKRFLCGAVMGMQLARQETAVKRFYQKKAKQLGAAKAQVAAARKLSAVVWWILTNRRPYQEQDEGLSERKAQNLERVAETSPPTVSAQELSSLGEELVAQASTLERLGRESGFGNTEEKEENGIG

SEQ ID NO: 408174 - protein, 483 aa, unidentified
MVVKGGGDDVVTRAPEVILDEAHEQIVERVCAIDVAKDSGKVCVRVPAESGSGRRVSKVWDVPARTKAVIELGDHLACQGIQKVTVESTSDYWRIWFYLLEARGLDVQLVNARDVKNVPGRPKTDKLDSIWLAKLTEKGLLRPSFVPPRQIRVLRDYTRLRVDLTAERTRHWQRLEKLLEDALIKITAVASRIDLVSVREMIEALIAGQRNPRILAGMARGRMRLKHADLVEALTGQFDDHHAELARMLLDQIDALTVQIDTLTERIDVVLADIPVPAPQPEPDPDDHGPGTSDDAEVTAVIRPSHGGAPRPRTAARAVTALDLVDILDEIPGVGRHNAHEIIAEIGLEMTRFPTAGHLVSWAKLCPRTIQSGAKSSAGKTGKGNRYLRAVLGDAAAGAAKTQTFLGDRYRRLIKRRGKLKALVAVARSILVIIWNLLANPGMRYHDLGVDFHTKRMDTERRTRNHIRQLEALGYTVTLTTAA

SEQ ID NO: 408175 - protein, 425 aa, unidentified
MREGLLASTVDIVYPICCGMDIHKNFLVACIATTDEHSRTTHQIRRFSTYTGDLRKLAGWLTSNNCKDVCMESTGKYWIPVFNILEKTCAVFLTHPKYVKAIKGKKTDKRDAKWISELFKCDLIRASFIPPFDIRQLRDLCRYYVKLTYVNTSEKNRAQNCLTMCNFKLDAVFSDVFGKSATRIFNAFFEHNSLNFDIAPLLDYRCKASIEDIRAALEGELTLAQAEKLKFIRQHQECIGKLQGALETLILQLAAKYQPQIDLLLTVPGISTPLTAIRILAEIGADMSVFETAKKLCSWAGLSPQNNESAGKKKTTRVGRAGVYLKPLLVQCTLAASVSDKHPELKNKYQALKKRRGGKKAIIAIARKLLTAIWHILSKNEPYNAELYQKTDKPPVNRVLTKEQAFALLRSRGYMIRDEELPTSG

SEQ ID NO: 408176 - protein, 313 aa, unidentified
MYYIGIDVSKKALSVFDGKTSLEFENKEGLRPFYRYLKKHFKQFDNLVLIFEATGIYSDNLREFCNIHKIKAYILNPQQSHNFAKSLGVRSKTDKIDARIIWRYQSLIPQERIQIPLIDQEAKMLASYLTSYQFIQGQRVAVYNHLESVTNPPLRKLLKVELRRKQQLEDKLWGDIKAYISKHPGLAKDFKRLMSISGIGDKLAFSLLFLFRHYQGTNRAQITALVGLDPIYKESGSSVKGKIKISKNGNRYIRKMLYLPTLCAIKNNKKISLFYQRLIDNHKPKKVAVIAAMRKLLLVAHAVYNNKTEYVPG

SEQ ID NO: 408177 - protein, 360 aa, unidentified
MSFNGTSVGLDVHALSVVAHAFDEETGRVERARLCPDHGEILDWLHQLRGPVRVVYEAGPTGFGLARALADAAIDCVVAAPSKLIRPSGDRVKTDARDAAHLARLLRLGEITAVTVPEADVEAVRDLIRAREDARADLMRVRHRLSKLLLRQGRVYSGGKAWTGVHEIWLRRQRFEDSHTKAAFDHHVDAVLTATAARDRLDEQIIDVAASPRWADLVDRLGCLRGISALSGLALTVEIGDWTRFTGSSIGAYVGLVPTEYSSGATRVQGSITKAGNAHVRRLLIESAWHHRAAYRNPGPTMRARWAKVDPALKARGHAGNRRLHQQWCRFDERKKPHVVANVAVARQLAGWCWSLATLT

SEQ ID NO: 408178 - protein, 307 aa, unidentified
MFVGIDVSKDRLDVHLRPSGASFAVARDGQGIAELVERLGGRGPGLVVLEATGGFEITVAAGLAAAGLPLAVVNPAQIRAFARALGRLAKTDRLDAELIARFAEQVRPEPRPVLGAQAQILAELVARRRQIVEMIGMESNRRRQARSAKVLRGIERTLAALQAALAEVDQEIDGQVRASPAWRAAEDLLTSVPGIGKITARTLIAELPELGRLDRRRIAALVGVAPVNRDSGCSRGHRAIAGGRSAVRNALYMAALTATSWNPAIRTLYLRLRARGRPAKAALVAAMRKLLTILNAIIRDARPWQSA

SEQ ID NO: 408179 - protein, 358 aa, unidentified
MRIIGVDLHTRQQTIAMLDTETGEVTEKTLQHEGEIVRKFYEALPGPVQVGIEATGSMHWFLELMEELGIACRVGHPAEIRKAEARKQKHDRRDAALQLKLQVENRFPSIWMPSTELRELRTLLMHRHQWVRMRTRVQNALQAIALSRGLRRGKTLWSQAGQQAIESLPLPPQAAYRRTELQGLYRLLDEKIEELDKRVSDQAWQRPGATRLMTHPGVGPVTALATDVFLGDPARFADGKALVSYVGMIPSEYSSGGQQRFGRLSKQGNPLLRFLWCEAAVHAVRRDPDLQRFYRRKLQQKGLGKARVAAARKLGIRLWILLRDQIDYEEFCRRGQMRRNSGGARAGMPEVGHSPAVQ

SEQ ID NO: 408180 - protein, 337 aa, unidentified
METYVGLDVSQKATAVCVVDRDGSVVWRGTVASNPDAIADTIKQQAPETKRVGMETGPLAVWFYHGLRERNVPVDCIHARHVHAALATQLNKTDSNDAHGIAQLTRSGWYRAVEIKSIASHEVRLLLGARSQLISMRTSLYNQIRGVLKTFGVVLPPGTRSTFERLVEERTPSTSLIRGVIGILLDSWRHIDGQVRETDRALQRIARASDVCRRLMTVPGVGVTTAVAFAAAVDNPERFRRVGDIGPYLGLTPKKYQSGEVDHNGGISKTGCRLTRHMLFEAASALILRHKRDCALRRWAQSLIPRIGLRKALVATARKLATLLLSMWRSGKEFNPG

SEQ ID NO: 408181 - protein, 333 aa, unidentified
MPRANSNLLDWDFMKSATTNEKIFVGVDVSKAALDVYRPDTKEGFKIDNSDEAIALLCSQLKKMKRNVMVVMEGTGGYEYLLLKHLAAHKLEAAVINPRRVRDFAKGIGLDAKTDPIDARVISKYAEVVVPQPMVTKSDHELKHVALVARRNQLLELVNQENNRLKQSWDDDAKQSIRDVLEMLKKQLKSIDSQLAKMIQADTENQRAIEVLQSVMGVGPVMISTVLAELPELGKLNRGEIAKLVGVAPINRDSGKKSGKRFIGGGRGQVRRVLYMATIVAIRHNPAIKAFYAHLKSKGKESKVAIVACMRKFITILNLLIKTDQLWEDKMSV

SEQ ID NO: 408182 - protein, 402 aa, unidentified
MKASKQYLRFCGIDMAKQKHVACIVDQDGRYLLRPKSIRNDADGYQQILNCLKQSGRTKSILTGMEATGHYWYSLHDFLTRQGYVVAVLNPIQTAQQAKQAIRKCKTDKYDAFHIANLLRTGQYKAAVVPGEFAMTCRQITRLRYRIVKQAAMIKQLVNSRLHPAWPEYEGLFSNKFGTTSMKLLQTASTPKELMELDPDDLGELIRKASRGRFGPAHTQKILQSAKDSVGMQRGHYGISTGIKFLLEQIAALEPVRKKLDVEIEKLAAKLPEYLFTLPGATELTIVSLYGEVDPIETFKRPSQLTAFAGLDPKVFQSGQYDAPRRHVSKRGSPYLRRTLWQMAYRAVCNEGDLRDFWRRKHRQNKHHLVAVTAAANKLCHIVWRIMTDRRDYIKKGYNPKS

SEQ ID NO: 408183 - protein, 373 aa, unidentified
MKHASNSVCVPVLTMGLDVGDQRSQACIVDGTRTVLEEFSFETSAMSLCDKLRREPCQVILEVGPHSRWMQKSLESLGHRVRVVDARKIQLISRSNHKTDRRDARTLAQLGAGVPELLGDIKHRSDQAHADLTVLLTRDHFVQLRTATINRTRGVLKSVGVKVPKMATKAFHARVGALVPSALKRGLQPLLDEMQSLQLRIHSLDSEIQAMAARYPAVAKLSAISGVGNLTALAFVLALDDPGRFKKSRDVGPFVGLTPRKRASGASDPQLSITRTGNPFLRRILVQAAHYILGPFGPECLLRSHGKRIVERGGKHAKKRAAVAVARKLAVLLHRLWVSETPYEPWYRSTPPASLEVSRSRKRAKKKRRPARP

SEQ ID NO: 408184 - protein, 441 aa, unidentified
MEKVVKFEKIHANGAGIDVGSREIFVSIDGEQVVKFGTFTSDYHSCCTYLKANGIESAAMEATGVYWMSLYAILEQYGIKVCLVHPREVQQVKGRKTDVKDSQWIQKLYTAGLLRESIVAEGLLKELRILIRERLDLIEMGSAYVNKMQKYMELMNIKLRNVISQIHGASGLRIIRAIIDGERDPHKLIHLCHENIKNRKREEVIKSLEGNYHESYILLIKENLRLWDEHQDSIRSIEQQIAALLEKMNQNNKHMEVTSRSKPARHHNPQIKDLHKTMVQLYDGVNLTTITGINDCTMLRLAGEIGFDMSRFPSAKHFVSWLGLSPKNKQSGKMKKRLRSDANKAGLILRQSAQSLMNSKDSAIGVFIKRLKARKGSPVAIKAGARKLAIALYNALTKGIDYVEQVAARYAVQIKQREFRLLQKLAFKYKYYLIDCEGVIA

SEQ ID NO: 408185 - protein, 358 aa, unidentified
MAITSMAGTTAPRITVGVDTHLDVHVAHANDQLGCRVDTLSIPTTPTGYQDLLVWARGLGEPIAWGVEGTGSYGAALARFLAAHGQVVLEVNRPDRQARRGHGKSDPLDAEAAARAVQAGQATVTPKTGAGQVEMIRSLRVARQTAIRARTQAINAIKALLVTAPVELREQLRGLPATMLVPAAAALEPGAVTSPIAATMLALRTVAQRYQALDEEITFLTAELDRLVATAAPKLIALFGAGQDSAGALLVAAGDNPDRLHSEAAFSMLCGSSPIQASSGKTVRHRLNRGGNRQANAALYRVVLVRLRYHQPTKDYVARRLAEGKSKQEIIRCLKRYVAREVFAVLQELRQTNSTNAT

SEQ ID NO: 408186 - protein, 349 aa, unidentified
MEHFAGLDVSVNETSVCIVDETGRIVREAKVASEPEALLQVLINRRYSFKRIGLEAGPLSQWLYSALGEANLPVICVETRHMRAILQAQINKTDRNDARGIAQMMRAGLYRPVHVKTLRSQKLRTLLTHRKLLQSKAIAIENDLRGTLRNFGLKVGIVGKLKFEARIQELVERHPDLAVLVEPLLVVRRVLREQTAVLHRRVLAIVRDDEVCRRLMTIPSVGPVVALTYRATIDVPARFRSSKAVGAVLGLTPCKDQSGERDYTGAISKCGDEMMRVMLYEAAQILLMRSTKWSWLKAWALQIARRRGIKKAIVALARRLAVIMHRIWVDGTSFAGAGKRLQQRDNARS

SEQ ID NO: 408187 - protein, 466 aa, unidentified
MPHARSHRARRVRPARLPPELRHVHLNAAGIDVGAGGHYVAIPPGRDPEGRDVREFGAFTADLYTLAEWLRRCGIETIAMESTGVYWIPLFDLLAERGFEVRLVDPRQLKNVPGRKSDVLDCQWIQQLHTFGLLSAAFRPDDQICALRSYLRQRAMLVTYASHHIQHVQKALEQMNVKLTRVVSDVTGVTGMRIIRAILDGQRDPRALAGLRDRRCQHDEATIARSLEGSWRPEHLFALRQAVELLDFYQQQLAACDREIEAYLGRFDAKHGGETLPTRPRTTKPSRTAPTFDVRTHLYRLTGVDLTRIDGIDAHTALKVVAETGLDMSRWPTEKHFASWLSLAPGTKVSGGKQLSSRTTPSANRAAAALRLAARSLYQSKSALGAFFRRLKARLGTPKAITASAHKLARLIYRMLRFGTEYVDQGQDYYEQRYRARVVSTLTRRAAALGYTLVKTEGLSSAPSEI

SEQ ID NO: 408188 - protein, 356 aa, unidentified
MSQKLDTSPVVIGIDIGKNSFHIIGQNQRGAIVLRQKWSRGQVEARLANLSPCRIGMEACVGAHHLSRTLKAVGHDARLMPAKYVRPYSKGQKNDYRDAEAIAEAVQRPTMKFVTTKTADQLDLQALHRVRERFVGQRTGIINQIRAFMLERGIAVRQGLRFLRVELPGILATRTDALSPRMLRILEDLLADWRRLDARIEDLSNEIEALARQDKGCERLMTVPGIGPIISSAMVAAIGTGDAFSKGRDFGAWLGLVPKQLSTGDRTILGSISKRGNRYLRSLFVQAAWVVLVKIGPKHWDRYGLKSWIEAARKRLHHNVLAIALANKLARIAWAVLHNGRAFECVKTNETAYRPA

SEQ ID NO: 408189 - protein, 365 aa, unidentified
MWEAPVLRQRTSVGLDVHARSVIGCGFDCETGAVVERRLCPDPGEIGAWVATLAAPVKVVYEAGPTGYGLARHLLATGIDCVVAAPSKLIRPQGDRVKTDARDARHLARLLYLGEVVAVQIPSLEQEAARDLVRARDDCREDLMAARHRLTHILLRRGIVYSGGHPWTGNHDVWLHQQRFDHPAQQRTFDEALDAVLAATARRDRLDAAITAMAAHSEFSPVITRLGCLRGISTLTAFGMAVEIGDWHRLTGRSIGNYLGLVPTECSSGPSRHQGGITRTGNKHVRRLLIEAAWQHRKPYRPGVGLRRRWAAACPAARARGQEGNFRLHQRWINFDQRKKRPVIANAAVARELAGWCWSLAVIED

SEQ ID NO: 408190 - protein, 354 aa, unidentified
MSQTLKTAIAVIGIDIGKNSFHVVGQDERGAIVLRQKWSRGQVEARFANMPPCLIGMEACVGSHHLSRKLNSLGHDARLMPAKYVRPYSKGQKNDFRDAEAIAEAVQRPTMKFVATKTADQLDLQALHRVRERLVSQRTGIINQIRAFLLERGVVVRQGQRFLRAELPSILASPPDVLSPRMVRVIEGLAGDWRRLDERIEGLSSEIEAIARQDAGCERLMSVPGIGPIISSAMVAAIGAGDAFSKGRDFAAWLGLVPRQMSTGDRTILGKISKRGNRYLRVLFVQAAWVVLIKPKNWERHGLKPWIEAAKKRLHPNVLAIALANKLARIAWSVLARGRNFEARTITSATAQTA

SEQ ID NO: 408191 - protein, 343 aa, unidentified
MKLSRVGVDLAKNVYQLHGVDRHGKMVWKRRLRRGQWLQALLDKTDPGCEIGMEACTGAHHWARELQSRGYTVRLIAPQFVKPYVKSNKNDANDAEAICEAMSRPHMRFVTVKGVEQQDIQATHRVRTELKNHRNAKGNQIRGLVAEYGLVAPPSLLALRRAIPEWLEDAENGLTDNFRCLLHGLWDDLLTLEDRFKELDKEIEKLARSNEVTKRLQQLRGVGPIVATALVATVGNGEQFNNGRQMAASLGLTPRQSSSGDKRRLLGISKRGDVYMRTQLIHGARSVVSQAKHRDDPLSRWVTDIAKRRHSNVATVALANKTARMAWAMLRNETDYDPSLAVG

SEQ ID NO: 408192 - protein, 322 aa, unidentified
MQYIGIDVSKATFVVAYSSDKGGEIRTFNNTTAGIKQFIGTLPKDGSIHCVMEATGNYSALLLYMLNVAGITVSMENPLKVKNFARAMLSTVKTDKIDARLIALYGEKMNPQPFKIQGEAILRLRQKRTVIRQLTKQITAMSNLRGSLACLPVPDKGAAHTVDETIKFLEKRRDRLQSELTDLVEVEFSRQLALLTTIKGIGITLATALILTTGGFTYFQNAKQVSRYLGICPTYEQSGTSVNIRGHINRNGDAYTRGLLYIAAWPASRFNAQCKETYTRLRQNGKPGKLAMIAVANKLVRQAFAVVAHDKEYIDGFVSNRP

SEQ ID NO: 408193 - protein, 402 aa, unidentified
MDQNSCHILLKGCDLMIYTGIDIAKDKHFCAIADSDGEVLEKPFGFDNNRAGYSLLLSKLKPFSKESVLIGIESTAHYGSNLLCFLHDNGYRIAVINPIQTATLRKTGIRKTKTDAVDSLLIIKSLMVNNHKPFDKQDIAYLRLKNLCRFRSKQKKSIARLKIQLVSFVDISFPELQTFFKSGIHGKACYELLKNCPAKDDITALHLTRLGNLLSKSSHGRFGKEEAIALKSLAKSSVGTSDTSISYQIVTTIEQIELLEKQIASLDNLIISQVSDLDSVLLSVPGMSHIICAMILGEIGDIKRFSEPCKLLAFAGLDPTVNQSGKFKAKSTKMSKRGSYLLRYALVFAAWNVCRNNNTFNAYYELKRSQGHGHYSALGHVAHKLVRVIFKMLKDNVAFSLD

SEQ ID NO: 408194 - protein, 470 aa, unidentified
MFSWLGHPRVLPVSNARLFDVLHTVDALIHSVRKVVLVLSRFLDDFVVGIDVSSEFSIVAMLEPSGTLIRKPFRINHNPEGFLKLLEILKKEEERLKRKPIYFVESTGIFHLPLFFFLRSNDLKGFVLNPLSVHSIKNFDLRKVKNDAKDAEAIARLAKYQDVKFSIVPEPKVLALRMLAREYFVLSDTITEMKNRLSTDLYLLFPGYGDVFSNPFGKASMAILKDHPSPRDILAADRLVLAQQTSKHSRKSLAWANAKIDKLVELASVTSTMPNELSVLSIKIKLHIDSIQSLQNSLNEIVDKIKDMVYSDAFPARIRRQIELLDLMPGIGFITAVTLISEIGNFSLFNSPKAFVAYFGIDPSVNQSGKFKGDRNKISKRGTRFGRRALFTAAMASIRTKANGAEINPVLRDYYTQKCVNKKKKVALVAVMHKLLHYIFAVLRDDKPFEFRKPEDHQSWRTAKIHLVAA

SEQ ID NO: 408195 - protein, 338 aa, unidentified
MIHVGVDLHQRFCYMTALEARGKTIQAGPVNNERLALRRYFRQFRGQAVQVAVEACGFWPAFREVVEPEVERLVLVHPQRVKAIASAKLKNDRVDSATLAQLLRCDLLPESWKADRETQGRRQQVRLRATLVRQRTRLKNQVHAVLHQQGLRSPVSDLFGKRGRQWLAQVKLPAAARESVAVCVRLIDGYTQEIEEQNRQLSEKAQQDGRARWLRTIPGIGVYSAMLLLAEIGDIGRFPDKQALCSYAGLVPRVRESAGKRGRGGITRQGSPWLRWIMVEAAQVATRCSPAAQSYYQRLRRKKPAHVARVALARKLLVAVWALLHDGVVFDETVFAAA

SEQ ID NO: 408196 - protein, 350 aa, unidentified
MDTTTVAIDLAKSVFEIAVADGTWRITERRRFSRMQLERFLSTRSVSHVVMEACSSSHHWGRWLQRRGIRVSLLPAQYVRAYVRRDKTDRTDAAALLEAVRCGEIRPVYVKSVEQQALQGLHRVRALWMKTRTSRINSLRALCREFGMTAPVGSRRGFQELLGRFAEDSETIPALLRPSLCQLVEEIRELEARMRAIEAELRHLASQSEVCRRLQTIPGVGLLGSTALLGSVGDIHSFDNARRFASWVGLTPREFSSGNTRRLGRITRQGDCYVRMLLTHGARAVLHSGRVARRAGRPLDRLREWALRLEQRSCHNKAVIAIANKLARIVWATWHRERDYEFRSAPAQAA

SEQ ID NO: 408197 - protein, 418 aa, unidentified
MIDDVQWFVGIDWATQSHRVCLLDVEGRHVNERDFAHGGAGLTELRDWLLEKTTAAPGQIAVAIETPHGPVVEMLLDHAFLVFAINPKQLDRFRDRFTVAGAKDDSRDARVLGSALRTDCQAFRRLVVDDPVMIELREWSRMADELQQERTRLANRVRQQLWRYYPQAIELTDDVADDWFLALWQQVPTPATAARVSAKTITRILKDHRIRRLDAATVLQTLRKTPLFVAPGTTEAACAHIRNLAARLHLVNQQIKEAHRALDGLCARLEAATESPSGQIREQRDVTILRSWPGIGRIVLATLLTEAAGPLRARDYHALRALAGTAPVTRRSGKQCFVIRRLACNKRLQNAVHHWSCVAIQHDTAARRRYDALRRRGHGHARALRTVGDRLLCALCAALKRQTPYNPNGQTAQLTASL

SEQ ID NO: 408198 - protein, 347 aa, unidentified
MSCNTDTVVARTIGIDTGKNTLHLIGLDDKGAIVLREKVSRGRIAARLANVPRCLIGIEAGMATHYVARELIALGHDVKQVPPAYARPFRQGHKNDFRDAHATAEAVQRPSTRCVPVKTDDQLDLQALHRVRSRLISQRTAVINQIRGFLLEHGIVVRQGLRFLRQQLPDILARRIDVLSPRMSRIIEDLGGDWRRLDERIEHVTKEIEVLARGTENCRQLMTVPGIGPIIASAMVAAIGDGAAFTKGRDFAAWLGLVPKQMSTGDRTILGRISKRGNRYLRTMFMQGARVILLRPRNWAKHSFGPWLEAATKRLHHNVLATALANKLARIAWTVLAQARNYEARVY

SEQ ID NO: 408199 - protein, 406 aa, unidentified
MDGPIITVDVSKGNCHYQPWLTAGHSLRKPKVLNDTKDGFEALSETIEMVKEKSEADTVPVVFEATGVYHRCLQKYLDDIGNPYIVVPPLLSAAYRKTNLHGNKTDNADCAHIAKVYYQEEHLQCHQNESDTYARLRAKNRMYESELKILRQRKCTFRAMLDVIYPRMDKCFKGHASLYDSVPMEVLKKYPHPSLLLRHREETIVKAIQKPAGHKKGFTENIVHKMYQCAEECYSGVDADSVEVQQFPQIINELMEQMELCNTYLEELIEDASKLPSFAILLSIPGIGRNIAARIIAEIGDVTRFRNARGIVAYAGLNPKINQSGEKDGTHLAISKKGNRHLRCLLYLAATCNYRLKKGDSIYQFNQKKRQQAASPLKPKAANIAAADKLLVVIYSLMKNGSTFRS

SEQ ID NO: 408200 - protein, 352 aa, unidentified
MEKTVKSKLFIGIDVHKRQWSVSIFTDHLHHKTFSQSPRPEVLKSYLDKYFKSGYQVFCAYEACKFGYWIQRELVSYGYDCIVINPADIPTTNKESSEKTDPVDSRKIARSLKAGLLKGIYIPSAELEGHRQLFRYRKRLWADLVRIKNRIKDKLISRSIGIPSRFDNPYWTKAFLSWLASVALPTRTMRITLDLLLAQYQLVYRHFLDTSIAVRKLQRHNRYKSDAKLLRQIPGIGPLTTVQLLVELGDINRFANFRKFNSYIGLKPMTHSSGDNDRKGYMTYRSHQGLRSSIVECAWTAVQHDPALLTKYEQLLSNHTKKRAIVIIARKLLSRIYHVLKTKEPYEIGLIK

SEQ ID NO: 408201 - protein, 356 aa, unidentified
MSTITIGVDLAKSVFSVCEMDGAGHVLRRQDLKRDAFAVWLAQVPAGTVVAMEACSGAHHWARRCLDYGLQPRIMAAQLVTPFRKGRRTKNDRADAEAIATAARQGNMRFVPAKDINQQVRLAWHRVREGYKAESLAIGNRIRGLLAEFGVIVAQSDLALRRLLADLDAQIGLPAEFKALLRDLAEYWKQLRLRLDACDARIEAHAREDERCVRLRAVIGIGSITADAAVATVGNAHEFKQGRQMAAWLGLVPVQHSSGGQARLGEISCRGDAYLRTLLIQGARSSLQRAKAVAREKATPEQMWIGTLDGRLPFGKVIVAIANKHARQIWAMLARGVNYDPHACLKHPMHRQSHAA

SEQ ID NO: 408202 - protein, 312 aa, unidentified
MAMLSFCGVDVSKDRLDVVVLPEGWFFSVSNDTAGWAELVARLRPLTVSAIGLEPSGGYERGIIRALLAAGLSVRRINPNKLRQFARARGVLAKNDRLDARLIAEYVAIMPTRVVQRDAAVERLAEIVTMRRQLCDEHVAAENQAAHLEDAMLRRLSKRRQMRLEADIRLLDKRLAEMVAANVALAQRYELLTSMPGVGPVLAFTLIALLPELGKMSRKQIAALVGLAPYDFDSGKLKGHRSIYGGRMPVRNVLYMAALSASRYSPALKTFHNRLVAADKKSKVIIVAVMRKMITTLNAMLRDSAAWQPRSA

SEQ ID NO: 408203 - protein, 374 aa, unidentified
METIYIGVDFHARQQTICYLKTETGELVTCELKHLDKHAVRAFYAQFHGQVIVGLEASGYSPWFERLLEELGCEVWLGHATEIRRRARWRQKNDRRDAELILDLLLHDEFPRLHRPAVQSREVLRMLRYRQKLIKIRTMSKNSLQALALQSGLAKGSRLFTQAGQQELSAAVMSPVMHRQREHWLQLMAPLNQQLLETMVWFKAQSKDDVCIKRLRTHPGIGLLTSLCIVHSLQPVSRFRNTRKVAAYAGFDPVERSSAERKCFLGISKAGSRVLRFLLVEAAHTAIRKDEDLKRFYKRLAERRGRPKAKVAAARKLLIRAYIMLRDDIDYAEFRRRAVAARLARQGQGPNVPEVLIGQPASADHRDELTSESQ

SEQ ID NO: 408204 - protein, 482 aa, unidentified
MKKRNIYQNQSQQLLSLFEQAANNAKVMCVPIDYAKKDHVVMFCNGYGDILRKPFSVKNSPQGVDYLTDQVIRSCHQRSISQKHVFFGGEQVGSFADNFISSLRNQGWLVAGVNAHEAKTQRENLQASTDRLDLMGIAKSMLNRRANCSPAQSGIYLNMRTLVRHRRKLVGITTEVRNRIHAVVDRLFPGFLNESKSGITPFSNSSLWLMKERFSAPQIRRRRRSTLIESLRRLGTKKPEDTADTLQQYATQVLKPPQDYVHILQLSLAQHVKHFCCLQESIAQLETEIALNLAQTQGAFLTSVRGIGIVLAAGVSAEIGNPFEQKPLNNLVSYCGIIPRVKQTGGPQGETKTGKVAKRCNRILKDYAVQSASHLGLHGPADLMSDYKRRDAAGQHADFGMARRYLRMAMCLMRTSQIYLPSRLRKAQAQVKQRADYYLMSWPYLRDKWQKLGTLETAFKADHPLGQWRTIVQQFYGIKLTL

SEQ ID NO: 408205 - protein, 387 aa, unidentified
MPEQFDSHNATTAFDHDSTLVAALELSGKSWEIGAVVPGVARRPRRRLDPRDMAGLLRTLERWKSEAGAMGRAIDRVVVTYEAGRDGFWIARSLQAQGIEVHVMHPASVPVPRRRRRAKTDRIDLDMLLRSFLAWLRGEPRVCSMVRVPSAAEEELRRPCRERERLVAERLELENRIESLLCLHSVAGFKPRLKKAMAHLEALRDFVGAPLPEQTMAELRRLMARHRLASEHLREIEAVRDRVLTVARPDREERMIRLLVQIVGLGVETATVLVREMFCRPFRDRRAVASYAGLTGTPFRSGGMEREQGLDRSGNARVRRILVQLAWRWLRFQSESALSCWFAERTSGAKGRIRKIMIVALARKLLVALWRYVETGTVPAGVRFAAG

SEQ ID NO: 408206 - protein, 333 aa, unidentified
MLGVDIARLTFTAARWEAGHGASLGTFPNTPAGFAALAEAVGPPDPGGAPAVTLEPTGGYELSLALWAVEQGWTVHVPNPHHVRAWATGIGRRAKTDRQDALLLARYGAERALPPWQPLPTELRELESLVRRKDDLAQLLRPERNRQHALSARPGVARAVPASVERVIGLLEEELRQVEKAIAAHLQAHTTLQETLARLRTVPGIGERTAVPLLVTLGRWDTRTGGAGSAKALVAYVGLDPRPHESGTSVHQRPAISRQGDRVTRCRLYLSAVGGIRGQTPLQTFYQHLLGHHKPKKLALIAAARKILIWAWAVYRQQTAFDPARASATPCHA

SEQ ID NO: 408207 - protein, 403 aa, unidentified
MKSVLSIDVANGKSEVLLITEYGEVLIEPYEVKHCLSEFNLLKEKIDNFNLNDLTIFMESTSTYHLPIQRFFTKNNYNVQVINPILGKNNTRNLRKTKTDIEDCYNLADLFFKNTVKIHTKNMNDIYSSMIELSRQEKHLTESLVRSKNRFKQIVANAFPEYIKCFTANDIFGKTSLNFIKEFPHADIIKEKRIDALANNLYKSSKNGCSYNKCLSKAKKIKELANNSYPGIDVDSYEVNNLINIVDVISYNGSKLNDVKQDIVKLARQTPYFNIINSIYGIGETSTAQIIAELGDINRFENIKQLNAFCGLDPTIIQSGKSINYHGPISKRGNRNARKILFITCCSIIRASVLHNMDNEILLYYRKKQAENKHFKECIIACSTKLLRTIFAMCKNNSLYVQK

SEQ ID NO: 408208 - protein, 343 aa, unidentified
MEKITTIGVDLAKSVFQVHAVDAAGSVVVTKALRRRDMEPFFSRLAPCLIGLEACASSHHWGRLLSLMGHEVRLIPPAYVKPYVRRQKNDAADAAAICEAVTRPNMRFVPIKSEDQQAALMLHRARSLLTSQRTAMICALRGHMAELGLVAPRAVRNLRPLLEILADDEDDSLPALARAALRPLAQQLTSLEQQIAQLDQQLLEWHRITEVSQRLAGIPGVGPVTATALAASVTDPSMFASGREFAAFLGLAPRQNSSGGKTRLGRVSKMGDRYLRTLLVTGATAVLSHSKTRTGRLDMWARALLEKGKPTKLVALALANKMARIAWAIMRRGEPFRLGPAEA

SEQ ID NO: 408209 - protein, 418 aa, unidentified
MHHGQEVSDMEVVHERCCGLDVHKRTVVACLLTLGERGQPAREVRTFGTMAADLLELREWLVAARCTQAAMESTGVYWKPVYNALEGVVELLVVNAQHVKMVPGRKTDVSDAEWLADLLRHGLLRGSFVPPAPQRELRELTRYRAVLVRERATEVNRLQKTLEGANLKLGSVATDILGVSGRAILEAVAAGESEAAVLAGLARGRLREKRTELERALAGQVKPHHRLLIAEHLEHIGYLNEAIARVNREIEERLRPFEDTLARLQTVPGVGLRTAEVLMAEVGTDMSRFPSHGHLASWAGLCPGSNESAGKRKSGKTRKGSPWLRSALVEAAWAASHSKRTYLSAQYHRLAARRGGKRAVVAVAHTLLVIVYHLLNRGEAYTELGGNYFDERDRWQVERRLVRRLEALGYAVSLQPAA

SEQ ID NO: 408210 - protein, 340 aa, unidentified
MTEVTTIGLDLAKHVFQVHGADSEGRPVLRKRLGRAKLLPFFADLPPCLVGMEACASAHHWARELQALGFEVRLIPPQYVRPFVKTNKNDAADAEAICEAVTRPTMRFAAAKSAEQQSVLMLHRVRELLVRQRTMLINALRGHCAEFGIVVAQGAPKVEELIAIIEDADDMRLPSVAREALGALVAQLRSAQGRIKALEARLTAWHRSSAASRRLAAIPGVGVITATALVATIGDGSQFRSGRQLSAWLGLVPRQHSSGGKQRLGRISKHGDGYIRRLLVHGARTVLRWRRAKPGAGIGWTDRLLARRPTNVVLVAMANKTARVAWALLRHERIYQPVPA

SEQ ID NO: 408211 - protein, 482 aa, unidentified
MKKRNIYQNQSQELLHLFEEAGSSEKVMCVPMDYAKNDHLVMFCNGHGDILRKPFSVKNTPEGIGYIDEQVTRSCRQRGIKKKHVFFGGEDANSFAKNFVSTLRSKGFVVANVNAHDAKKQRSNIQASTDRIDLMGIATMLLNCRANCCPAQLGIYRNLRTLVRHRRRLVQMLTEVKNRVHGIVDELFPGFLNENNSGIVPFTQSSLYLMQDRFSPKQIRRRKRQKLVEILKRLGTSKAEHTAAKLQQYAAKVLHAPVEYVDTMQLSLAQHVKHIRCLKESVAQMDKEIALNLAQTQGAFLTSVRGIGLVLAAGVTAEIGDPNEQKPLNNLASYCGIVPRVKQSGGLDGKTYTGPVGKRCNRILKDYVVKSAYHLGLHGPQDLMADYKRRDASGQHADFGIGRRYLRMAINLMRTSQVYLPPNLRKDDSTLQKRASYYLMSWPYLREKWKKVGALEAVFANNRPLGLWRQIVQELYDIKLKL

SEQ ID NO: 408212 - protein, 338 aa, unidentified
MELSVIGMDIAKNVFQLHCVDRQTGEIERIKLRRNEVLPYFARRTPALVAMEACGGAHWWARQLQQLGHTVRLLPAKAVRPFVLRNKTDAADARAIWTAVQQPEMKTVAIKTEYQQSILALHRMRAQLLKFRHMQTNAIRGLLLEFGHPLPESYLALRKAFPTVMATLDKQWPGILIETLREQWARVQSLDNEIALIEGRLKRALAETPTCQMISDIPGVGLMTATAAVATMGDPASFKTGREFAAWLGLVPRQTGTGGRIRQLGISKRGDAYLRTLLMHGARAIIARRTYSDWVAGLIARRPYSVVIAAIANKLARTIWAVLATGKRYDGAAFAAAI

SEQ ID NO: 408213 - protein, 341 aa, unidentified
MQHVAIDLGGKESQLCARATDGSIVKEARVLTKTLPKLLETLEPSRVILETSAEAFLIADVALAHGHQVRVVPATLVKQLGVGARGIKTDRRDAQALSEVSCRIDLPSVHIPSQLARELKSVCGSREILVKTRTMVINNVRGWARTQLVRVRTGSTLTFQDRVREYAEANQLTLPEHIGRQLAVLDALKVQVKAADQQLVKLSGEHPVCRKLMTVPGVGPVTAVRFVAAIDDVTRFRNAHAVQSYLGLTPGESSSSERKQHTGITKAGAMEVRRALIQAAWAAFRKAPKEPMVGWATQIAARRGVFIAVVALARKMAGILFAMWRDGSTYRPSKSAEVAPA

SEQ ID NO: 408214 - protein, 390 aa, unidentified
MLRKNIVQTLDAATSWKVFGLDLAKHDLAVVAIPADGSEVQYVKRYSYADFLEFTAQIPSATMVFEPGNGANHFALRLQAQGHTPKTVSGASVKSWITLHMSGQKTDLNDAYALARLSEDPDLKTVRIKSVDQNRLQSLQAMRKQLVEQRTKTIVSIKGIFQCWGILFKKDSRSLKKFKEAADNNKELLGEEVVEAMILQIDRIADLDKDIKHVEELLKKVTMQDPRAQPMLDIPCVGLQTVSRLCAIMGDIKDFETPRSFVAFIGLVPKNMISGNKTTTPSGYEQVGQGKVNRRGDKMARSLIIQCASSMYMNFHKDNFPECTLKDWIQKQKDAHKPYGKIMVSLAAKLLRIIYAVLKHGEAFSYEKTGISRSALAALKAAQPAEVGNA

SEQ ID NO: 408215 - protein, 317 aa, unidentified
MNNPDSFLGIDIAKDWLDVAWLSGQTLRIDYTDEAVAGLTERLLADPPSLVVMEATGGLETAVASALAAAGLPVAVVNPRQVRDYAKARGRLAKTDRIDALILAAFAAAIRPQVRELPDEHTRALGDLLARRRQLVEMRVQEKLRIQRASALQKASLREHIAWLDERISRLDIDLTHALRTSDAWRDKDDLLKAIPGVGSLTRATLVALLPELGTLTRRQIAALVGVAPFNRDSGKHQGDRVIWGGRAQVRRTLYMAAVSAMRCNPVIRAFYKHLRSQGKPAKVALTACMRKLLVIMNAMLKHHSPWSPELDLQHSC

SEQ ID NO: 408216 - protein, 353 aa, unidentified
MKVRKRNKNSKPIDYVKTPFYNHYVAIDWSTTVMSIARMSSNSNYPQVVKDLPATVVSIKKYLKELKGKIILTIEETTGAQWLYVELKDFVEKFIICDPYRNSLLKEGPKNDHKDARDLCRLLRAGMLKEVYHSNDDNYGIRKLASSYIDLIKAGVRAKNQLSAIYRGFCLDYKKDSFNIDDPRAKFIIEEKQRYINLYSEEKKEYLKLFRKLKKNNQTIKILTEISGIDVIGAVKIFSVVIDANRFPTKYKYWSYSGLVKYKMESGGKLYGKKNSKYNRILKDVYKTATLAALRGNNDIREYYEILLKERLSEKEAKNTITRYIATSTLAMMKNQSKYKPYSWRAKKEKTKQ

SEQ ID NO: 408217 - protein, 355 aa, unidentified
MNYIGVDCHISTLDFAVVNEKGTVSRRAKVNTGVKEFMEFVKSIPKPRKIFIEEGELAGWLLETSLKFREKLVVTDPKTNKWIGKTGQKNDTIDAEKLAQLARGKYVKEVYHPVNDRRKFKDLVFAYHDTVKNQSRIKNKIKAKFRSNGIKCSGTTVYLETHRDKWREKLSSNSMTRLIVEELWVQMDQLRNSKEKLKKIIRIQSKRYSEIKKFMKIPGIGLIHGATISAIIETPHRFANKKKLWMYAGMGLMERSSGGTIYSRKLTREFNRPLKNAIKQSTEVAISAKDNQFRRQYLKLTMEKGIASHRAKLTVARSILAALYGMWKKGEEYDSEIDKKRENKKFVRNISPRLV

SEQ ID NO: 408218 - protein, 352 aa, unidentified
MRWVGLDFHKRYITACALDNDGQVVAEHRRLPADVVPLVGWLPALGDAVTVAMEATRYWAWLHDQLSAAGIAAVAAHPYQVKLIWQARCKTDPIDARKLADLLRTNLLPAIWVPDVEVRARRKLLRGRAYLVRLRTSVKNRIHGHLTAENCRAAVTDLYGRAGRAWLQTVALSPMGRVQVDLLLELVDALDARIGRLDDRVKRLVKHDPVAQRLQTWPGIGTFGAALLLAEIGTIHRFRSSHELAAYAGLTPSTQSSGDTTRHGSVGRAGSPWLRGILIEIVQSLKLAPGPVGQQYQKLLRSNGKAKATVAAARKLCCYLYWCLKEDWSYDAWLRQHERLEVRPVQPLGSAA

SEQ ID NO: 408219 - protein, 405 aa, unidentified
MEIFCGIDWSEAAHDVAVVDETGRLLARRRIADDAAGFTALTELLAGYAGRPERVDVAIETGRGLLVAALRAAGHRVFAINPKAVDRYRDRHGVAGAKSDPGDARVLADILRTDRDRHRPLPADSDLAAAVGVLARAHQDAVWARVQDANRLRSLLREFFPAALTAFADLTTNTALAVLAAAPTPTAAARLSRANLTDLLRVAGRGTRPTEAARLAEIFTVDQLRQPPVVEAAMGQAVRATVRTLTAANQSISDLEAALAAAFDQHPDGEILRSLPGLGPILAARVLSEFGDDPTRFPDPASRRAYAGTAPITRASGRSRVVLARHVRNKRLADACYLWAFAALNRSPGARAYYDTRRAAGDRHNAALRRLASKLLGQLHHCLTTSRPYDEALAWPQPDTTPAAA

SEQ ID NO: 408220 - protein, 359 aa, unidentified
MMVLGIDPHKKSHTAVAVEAASGEIVAELTVQAHRRGRERLLAWARALAPERRFAVEDCRHVSGRLQRLLIERGEACVRVPPKLMAQTRRSARTRGKSDAIDAAAVARAAIANPDLPEARLDGPERELRLLTDHRADLVGERTRIAGRLRWHLHELELGLEVPAKGLNRACWLARLEEELAGQTGVQARIAREQTQRCRELKAEIDALEREIAGLTAVLAPELLALPGCGPLTAACLLGETAGAERFATVARFAMHAGVAPLPASSGQTQRHRLNRRGNRQLNAALHRIAVTQMRTHEPAQAYMTRKRAEGKSKREALRCLKRHLARTVWRALRAAEARRQTMLETVEPSTQPALALAS

SEQ ID NO: 408221 - protein, 367 aa, unidentified
MKITTIGIDLAKSVFAVSCADRRGTVVRRVQLRRAQVLEFMRQLAPCVVGMEACGGANHWARAIGKLGHEVRLMSPALVRPYRTSPNKHDRNDADAICEAVRRPQMRYVAVKSVAQQDLLALHRVRNLLMKQRIALSNQIRALLHERGVVGRVGAAGLRQALAQALQTENSELSGAMGELLLELSGWLRESEQRIAAITRRLERVVKDDERCQRLMEVPGTGPLISSALVAMVGNAREFKSGRELSAYLGLTPRQHSSGGKTVLLGISKHGDRYLRTLLIHGARSLLYRHRRGGAHPRATWAARLCARRGPNVAAVALANHNARVLWALLSRGASYCPAPQRSFPSRPSTVVARAREGKLLIDIERN

SEQ ID NO: 408222 - protein, 345 aa, unidentified
MEEISVIGIDLAKNVFELCALSQAGEVVWTKRLKRLAFIKFMEGAAPRCLVGMEACGGAHHWGRWLLRHGFEVKLMAPRPVKAYRQGVHKNDARDVRAIVEAASRPHVAAVRVKSERSQLVQALVRIRTRRIRQRVQTTNQLRGLLNEFGIVLPKGDGRMLVAIAGLRTAGVVPEDVVPFVESLCQELSEQSRAVSQASEALAARVKEEESCIRLMTIPNIGPINAASLSVALEMPKEFANGRAFAAQLCLVPRQSKSAESQRLSGVPKQSANETRRHLVLAAQGLLTRLTRMKELPDDKFLRWAHSLLQRKNRNVAAVAVAARLARIAWAVQAKSRDYNPRLAA

SEQ ID NO: 408223 - protein, 340 aa, unidentified
MAILAGFDVHRAQITFDALDTDTGEVVRGRMRGDRDAVSEWMRQFAGEHVEVAVEACTGWLFVYEQLAAAGAVVHLAEPAETSALRGKKRHAKTDRADARWLRTLLAEGRLPEAWIPPAHVREWRTQTRLRKTLIDERTSWLQRIQATLFHHGIVNVPDQLLRANGRAFLHTLALPPASMQRIEIALAIIDELERQLIPLEREIARLARHQTGCQALMRQYGVGPITATTILCELGDVTRLSASRKAVRASGLDVGVYRSDRHTRTGRITRQGAPALRWALYEAAQCACKNASPDHADYLALKARGLSHTRASLTIARKLARRSFHILRELGPDALAPIN

SEQ ID NO: 408224 - protein, 407 aa, unidentified
MNAVGIDVSKGKSTVAVLRPFGEIVVSPFDVSHSPKELSKLVTLLKTLNGDTKVVMEYTGNYYLPIALFLRNNGFFVSVVNPILVKDYSTKSLTVRKVKTDKKDALKIAPFALDRWNELSPFSAQSEARLLLKSYNRQYNQYNKLKIILKNNLIALLDQTFPGANTLFSTPTRKSDGHEKWVDFVLKFSHSECISKKSFSFFLKSYLSWCKKFGYKFSKSKAQAVYDFACNCSPSLSFSDSSALLVSNAIIQLNSINETLASLASEMNKIAATLPEYDSVMSMFGVGSVLGSQLIAEIGDVSRFPNKKALVGFAGLDASPFQSGNFNPQSRSISKRGSAALRKTLFQVMSVVLQRAPTNNIIFQFMDKKRSEGKHFYVYMTAAANKFLRIYYARVTEHLNLFTTTTA

SEQ ID NO: 408225 - protein, 451 aa, unidentified
MKKEEVKKGITKFATGMPVFNHHAAGIDIGDTIQCVAVSDCKGGHEVKTTTGFTCDLHEIAKYLVEKEITTVAMESTGIYWLPLYLMLEEAGIDVFLVNAKHVKNVTGRKKDDTDAIWIQKLHTCGLLQKSFQPDNEMRTLRDYTRQRRNLISINSDTVRRMQKALELMNIKIHTVIADILGKTGMRMVKAILAGETDPKKLADLCDIRIKAPKEEIIKSLEGIWKEEYLFMLEQAVDEYEFHMKQINNCDEKIKKQLLKQVAIVQNGDISEIENQKKKSKVKPRKNELNFDVLPYLSILTTVDLSRIPGFGDTTILELISEIGTDMSKWKNCKHFAAWLNLAPNSKISGGKILSSKRMKKKNKAGQILKQAASTISNSKEPLGDYYRKMRSKLGGKGAVTATAHKLARIIYTMLLNKTEFNSEIIEGNQKKYIADKILRLEKQIAKLKAA

SEQ ID NO: 408226 - protein, 348 aa, unidentified
MRFYTKQHKYYCGIDLHARSMYICILDQEGKTALHRNRKASPEAFLKAIEPYREDIVVAVECMFVWYWLADLCAKEKIPFVLGHALYMKAIHGGKSKNDKIDSKKIATLLRGGNIPVAYVYPRKMRSTWDLLRRRNHLMRKRSELLSHIQNTNSQYNLPEFGRKLAYKANRDGVAEHFPDPSVRKSIEVDLKLLDFYDQLLSNLELYIVKKAKADDVYSWYRLRSIPGVGKILGLILLYEIHDINRFPTVQDFVSYCRLVKCPRESAGKKFGTKNSKIGNGHLKWAFSEAACLFLRGNEQAQHYHARLVSKYGKGKALSILAHKIGRAVYFMLKRKEPFSMNVFFQQT

SEQ ID NO: 408227 - protein, 413 aa, unidentified
MEPIVEKGCGLDVGQEAVVACLMTGPAGERPRKELRTFRTFTAELERMRDWLLAEGCTHVAMESTGPYWVPIYVVLEQAQRFELVVGNAQHIRNVPGRKTDVKDAEWLADLLRHGLIRKSFVPPRPFRDLRDLLRYRRALINAGSAERNRLLKLLESANIKLASVASDVFGASGMLMLKALLRGGSTPEQMAELAKGRLRQKLEPLSLALRGNLDPHHRSMLETQIRRIEAAERDLVGLDQLIDARLEPYRDKHDLLTQIPGVDWVTAAVLIAELGIDMSVFPTAKHVAAWAGVCPGNNKTGGKAKRAAARKGNVYLKTALVQAAHAAAHTKGSYFRNKYFRLRARLGAKRAALAIGHKILTAAYHMLATGRAYAELGETYLDRRDKRGVAKSLIRRLHHLGYTVLITEEATA

SEQ ID NO: 408228 - protein, 461 aa, unidentified
MPDGGGENSSTRRKKQIEGLPVVLHNVAGIDLGSEQHWVCAPVAGGISREVADFGATTAELIRMTKWLQACGVKSVAMESTGVYWIAPHEVLEAAGLEVLLVDTRQLARVPGRDKKTDPTDCEWIQRLHSCGLLRGSFRPREEVCMLRTLVRDKANLVAECGDWLRRMQKSLDQMNVRVHRAVSDIDGVTGMAILRAIAEGERDARKLAKLRDTRCHKSEEEIAEQLSGHWREDHLFSLRQALKMYDAIQQRLADYDREILQRLAAMQREELRQQPPPPVKNPQKAKNMKKRGEEPMREALFRMSGVDLTGIDAIGVETVQVVLSEYGPDLSRFPTEKQFASHVTLVPHKPMSGGKPVRKKRRNSASTRVAAALRMAAVTLRNSATALGAYYRKMARRLGGDVAVFATARKLATLIYRLLRWGQPYVDEGVEAFERRYQETRLKNLKAKVKELGYELVASN

SEQ ID NO: 408229 - protein, 343 aa, unidentified
MEIHTIGIDLGKTLFHLVAVDSSGNVVARKRCSRTQLLAYTANVRAQRIGMEACSGSHFLGRALREQGHDVRLMPAQYVKPYVKTNKSDYIDAEAVAEAVQRPTMRFVPIKTEEQLDLQAVHRVRERWVMRRTAVINQIRGLLLERGVTLPKGRSHVDQALPDILEDATLPLSDSFRVLLAQLKLELDQLTVRIAQMDAVIQHVATQNEACQRLTTIPGIGPVTATALIAAVGNGSGFRRGRDLAAWVGMAPREYSTGGKQKLLGISKRGNAYLRRLFVQGARVVMQYRTKQAPGLSCWLGQLMARTHQNVAVVALANKLVRMAWAVLCKNETYRPPALKTSS

SEQ ID NO: 408230 - protein, 355 aa, unidentified
MIQEKYIGMDVHQASISVTVMDAQGKLIMECLLETKAATILELIQGLHGTLSLTFEEGTSAAWLHDLLKPHVSRLVVCDPRKNALLKDGNKSDRIDARKLAELLRGNQLHPVYHGEHGVRTLKELGRSYLTITQDVTRVMNRIKALYRSWAIPCAGTTVYAPRHRAEWLAKIAEPGVRLRAERLYQQLDLLQPVRLEARRELLVESHKHPAVKLLRQIPSIGPIRSALLVALLQTPHRFRTKRQLWAYCGFAVETHDSGEYRSVRGKLQRNRERMTVRGLNDNHNRDLKNLFKSAAISASTRPGPLRDFYVARVEKGMRPTMARLTLARKMAAISLTIWKKGVEFDAQQLQRQTA

SEQ ID NO: 408231 - protein, 374 aa, unidentified
MRHARRWLDVEFKVDQNQIHPKEMPLMKYYIGLDAHSTTSTFAVVDSDGQCVLRETVNTSEQSLVHVINKVHGERHLTFEESTMSQWLYLQLHDKVDELLVCNPTYVAEKSGAKTDFRDALHLAQELRTNHLKPVYHDNSHWSELRVSVSGYLDIVEEIIRFKNRLKSVFRAEAVSTDENSFYKNRARVGELKNPSAKFVAEKLFDQIEFLEKEKLKYRDLFERNKKQYRPIRNLMTVPGISIIRANIICAIVCQPSRFANKHRFWGYCMLVRHIQQSGGRIYGNKRFHGRKELRDVFIGAAESAVRTETSLRDHYDALRAKGVTHKNAKLSLARRIASIALCLLKNNDKYNDNYDEYLKERKELRKKFFDQTL

SEQ ID NO: 408232 - protein, 368 aa, unidentified
MKKNTSKTKKRTTTAEAREKFASFVGIDLGDKHCEVCVFNGAGEVQERLRLPMKGKDLEGYFGKLGRSRVALEAGGQSRWVAEVIERCGHEVYVSNVRKVAYISASDDKDDPGDAYKLAELVHFKPQLLHPIQHRSREAQADLSWIRAREALVESRTQLVNTVRGMSKAFGERLGKCSVEAFPAKRAEQVPEEIRGAVAPLLEMIDQLNEKIAYYDQMEEHIARQRYEKHDLLRQVDGVGVHTALSFMLTIGEAERFEKSRMVGPFLGLRPRKKDSGESRPQLGITKAGDEYLRKTLTNCAHHILGPLGKDSDLRRAGQRICERGGKNAKKRAVIAVARKLAVLLHRLWITGEVYEPLRNSKKKAVAA

SEQ ID NO: 408233 - protein, 345 aa, unidentified
MPIVGGLDIHRKQITFDYLDTGTGQVHRGQISPADREHLRAWLARFAGCDDVAFAVEGCTGWRYVAGELAAAGVAAHLAEPADTAFARGRKRHAKTDKTDCRHLRTLLAEGRLPECWIPPGHILEARALLETYHDLRREHTAWVQRIHAVLFHQGAPALGEGALRGEQGLAALREVSAACLSPAGQLQVATALEVLEALEARLHELRHQLLEAARHLAGARVLAERLYGVGPVTALAMTCWLGGEGRFSSSRKAVRFAGLDVTVYSSDRKGPPGRLSRQGPPVLRWALYEAGKTHARTSAPDHRYYAQVKERCNGKRAALSEARKILRQASHILTELGDDALAAA

SEQ ID NO: 408234 - protein, 361 aa, unidentified
MFTERTSVGLDVHARSVVAAAIDGDTGEVFRKRLTSVSDDVIGWVRSLPGPVAVAYEAGPTGFGLSRAFTTAGIRCEVAAPSKLQRPAGDRVKTDARDAMHLAKLLRLDEIVSVTVPSVQREAARDLVRAREDVRGDLMRSRHRVSKLLLRQGIVYYGGQAWTGTHLRWLRQQHFDAPGLQLAFDAEHEAVLAAEARRDRLDAAIEAMAADSEYTPVVHRLGCLRGIATLTAFGLAVEVGDWDRLTGSSIGAYLGLVPTESSSGQSRSQGSITKTGNTHARRLLVEAGWQHLKPYRTPGATMRARWELAPAAARARGHAGNQRLHQRWLHFNERRKAPVIANVAIARELAGWCWSLAVMDD

SEQ ID NO: 408235 - protein, 353 aa, unidentified
MTDTTAIAWLGLDAHSRNCVLAQLDDQANEIHHWRFPTDPQQLLKHIQAIAAKVKHLMLEESNLARWISQLLKPHVQRLIVCDARRNRLISQDPHKHDRRDAFALARLLRLNEYRPVWQPTDDQRVLFKRAAQAYENAVLRQTRLKLQIKSLFQHWGLFPTGATVFSKAGRSAWLQQLPYDALRAQARLLYELLDQALAGQAQARRLLCQAGRPFPEVQHLRTAPGIGLVGAHLFVAYVQDPHRFAKFSRLSKYCRLSIRDRTSDNKPLGFKQLDRQGNGVLKAISYRAFLQAARRRSGPLWDFYQASLRHTGSTTHARLNTQRKILLVLWTLWLKDKDFDPNQFSRSQPFDV

SEQ ID NO: 408236 - protein, 347 aa, unidentified
MSYIGVDLHQNSITVCRRTGDGSEAFETLTLSPADMERFCLSLDADDEVAIEATGNSAWFRDQILPCVGRVVVVNPSQFKVIRKSVKKTDKNDAAALALFLEKDMLPETRVKTSAENELASLAHTRDLLVKQRTRLLNKIHALHVGKGLKLKKESLGSKRGLAAIDMALFSPCEQVEITVLRETALSLTASLKQLDTEIEKHASALTGYEGIVSIKGVGPRSAAVLLAAIGNVHDFESADKLAAYFGMVPRVAQSNETDHRGRITKRGNKLARTTLVQCSLVATRYSPYLKSFHERIRQRRGTGKAIIATARKLLSIIYDTLRNGWVFDDFTQFQRRENLRPAGQSS

SEQ ID NO: 408237 - protein, 341 aa, unidentified
MKKKLSVLGIDIAKQVFHLVGMDAHGTIQLRKRLARAQVMTFIAQLPPTLIAMEACGGAHYWARRLREHGHEVKLMAPQCVTPYRQANKNDMRDAEAIAEALTRPTMRFVPVKSVDQQDLQALHRVRERLMKARTALINETRGLLHEDGIIVPQGASAFRQHVLAKLATEDAKLTPLSRELFQQLLEELGALDARIAAYDVQLAQVAQTHPVCQRLLTIPGLGELTVTALVAAVSDATPCKNGRQFAAWLGLVPRQHSTGGKPRLLGISKHGDSSLRKLLVPGARSCLRWVGRKCDRRSQWVRSLLERRGWNRAAVALANKNARVAWVLLCTEEVYRTAAA

SEQ ID NO: 408238 - protein, 366 aa, unidentified
MKKTSTVRVNGNMIFKGHQLTIGLDLGDRWSFYCVLDEAGQIILEQKLPTTPEAMEQTFGKIPRSLIALETGTHSPWISRLLTELGHEVIVAHAQKVQWITKSSRKDDRHDARTLARLARVDPELLGPVRHRSVQAQLHLTVIRARAELVSARTALVNAARGLVKSYGQRLPKCGTYQVSRELAAALSTELRDVLEPLLKEIESLNEHIKEYDERVENIAKEVYPEVALLKQVKGVGTQIALTYVLTIEDPYRFPKSRQVGCFLGLRPGRRNSGESEPQKGISKEGDRYLRTMMVQGAHYILGPFGEDSDLRRWGLKLAERGGKNAKKRAVVAVARKLAVLLHRLWVGGEVYEPLRNSQKAMREVA

SEQ ID NO: 408239 - protein, 391 aa, unidentified
MSMYFIGIDISKYKHDCCIISAADQKVVSKVTIKNNKAGFDELLTIINSLSNPENIRIGFESTAHYALNLELFLESSLLTFMEVNPVLISEYKKSKTLRRTKTDSVDCESIARWLMTVEYKPHSKGFYHAYSLKSLTRLRDKLIRQRSFYLVKITNVLDHTFPEFKPFFHERFSKTALYLLENYGSAEKMARMNSASYEKLRSLSRGKFSPQQFLQLKELAANTVGVSNSIFDVELNSLLSLYKSLVKEIDAIEKEINKLIEEVHPHYMSIPGIGPLSAAVIYSEYGDISNFANPGQMLAFAGIEPGINESGTESHGGRMVKRGSSQLRYTLINCCLPLIRFDMTFATYYAKKRGEGKPHRVAITHVTKKLIRVIYALEMKDIDFNTQKLH

SEQ ID NO: 408240 - protein, 339 aa, unidentified
MTIGLDIAKSVFQVHVVEGAGQVVLRRQLKRRQVLAFFQKLPPCLVGIEACASSHHWSRELQALGHTVRLMPPAYVKPYVKRQKNDSTDAEAICEAVTRPNMRFVPTKTVEQQSCLMLHRARHLFIRQQTAVINSIRAYLAEFGIVAAVGRRGVEQLLEVVADPAERRLPEVARMCLAALGSQLRALKAQILEFDRRILAWHRSNATSKRLDAIPGVGPALATALVASIADPKAFRSGRDFSAWVGLVPKQNSSGGKDKLGSISKQGDRYLRSLFTAGALAVIRYAKIHGTKHRPWLTGLLARRPTKVAAIALANKLARMAWVMMARNERYKEPAALAA

SEQ ID NO: 408241 - protein, 334 aa, unidentified
MENIALIGIDLGKNSFHIHCQDHRGKAVYRKKFTRPKLIEFLATCPATTIAMEACGGSHFMARKLAELGHFPKLISPQFVRPFVKSNKNDFVDAEAICEAASRPSMRFVQPRTESQQAMRALHRVRESLVQDKVKTTNQMHAFLLEFGISVPRGAAVISRLSTLLEDSSLPLYLSQLLLKLQQHYHYLVEQIKDLESQLKRKLDEDEVGQRLLSIPCVGTLTASTISTEIGDGKQYASSRDFAAATGLVPRQYSTGGRTTLLGISKRGNKKIRTLLVQCARVFIQKLEHQSGKLADWVRDLLCRKSNFVVTCALANKLARIAWALTARQQTYEA

SEQ ID NO: 408242 - protein, 343 aa, unidentified
MPAVTTIGLDIAKSVFQAHGVDAYGNMVVRRQLKRRYVLPFFKKLPPCLVGIEACATSHHWSRELRVLGHTVRLMPPAYVKPYLKRQKNDAADAEAICEAVVRPNMRFVETKTPEQQSCLMLHRTRHLFIRQQTAVINAIRAHLAEFGVVAPVGRNGVEELLDVIADPNDDRVPEVARECLAALGRQLHMLKAQVLEFDRHIMAWHRSNETSKRLDAIPGVGPALATALVASIANPRAFRSGRDFSAWVGLVPKQNSSGGKEKLGSITKRGDRYLRSLFTAGALAVIRYAKIHGTKHRPWLTQLLARRPTKVAAIALANKIARMAWAMMAKGERYKEPAALAA

SEQ ID NO: 408243 - protein, 487 aa, unidentified
MAKRKKSTFERLSSGGMNRKQRRDLARRLAGQDPGLTIIHSNAGGIDVGNESHFVAVPPDRDANSVQEFGCWTADLKRMAAWLKACRIDTVAMQATGVYSIPLYDILTGYGIPVVLVNAQHTKNVPGRKSDVQECQWLMKLHTYGLLRDSFRLEDRMESVRTIWRLRDRHVKDASRAVQHMQKALTKMNIQLANVITDITGVSGQAIITAILKGERDPWKLADLKHEMVKASREEVARSLEGNWRDDLLFELRQAVESYHFAHLQMRECDRQLERFLASLPTRILERPPQLSDATAAPAPQTKKTRKPKKTRRNQPTVDLATELKRICGVDLTSIDGIDVITAQTILSEIGTDMSGFKTEDHFASWLGLTPNKDITGGKIIGSAKRKVQNRVAMALRMAATTLLRSQTYLGGRYRHLRKQLPSHASAIKAMARYLAVLVYRILTHGEAWVDRGAARFEQRRTELEMASLNSRALAKGFKLVPITEAS

SEQ ID NO: 408244 - protein, 420 aa, unidentified
MPNIEIGVDSMVKENFIYVGIDLHKETHTAVMIDCYNQKLGEITFPNRPADFPKLVTKVKKCNTDAKEVVYGLENAYGYGRPLAVWLIDKGYFVKDVNTAISHRQAKHRGAMYRKSDSDDAEAIALATLNMLDKLPDACPNDAYWSLGQLVHRRDNIMKQRTRLVNQLHEQLCIAYPSYKQFFNDISRPTALYFWEHYPSRKYLKGKSVEDLRAELVPVSHNKCSTKTCEKILDAVASDKVKNNAYQDARDMVTLSIVSDLQHYDSQLAEVDKMLEQMYKMLGCTLTTIPGVNVITAVKILAEIGDIKRFSNANKLAQFAGIAPLHLSSSGKGKDVATKQGNRRLQATIYFLAIQMVQVSSKGTPRNSVVRAYYEKRKAEGKTSQQALICISRRLISIIYGMLKHGTEYRMPVVESAGEK

SEQ ID NO: 408245 - protein, 463 aa, unidentified
MRFIGLDIGRDFAHVAVVEGSGAARRLPRLAMGDDFRAFAATLGPEDVVALEASTNTWALADLVGAHAGRVVVSNPLRTRAIASAKRKTDDIDAATLAELLAADYLPPVWQPDETTRRLRRLTSHRTGLVHDRTAVRNRVAAVLSRHLVRAPMTDVFGVRGRAWLAALELPPDERLTLAAALALDAVLCEQVAAAERAIAEAVVDDQRARRLLTIPGIGLVTAAAILAVVGDIDRFDRPAKLVSYLGLDPRVRQSGDRPAMRGHISRAGQAHARGLLCEAAHSAVRSPGPLAGFHARLKARRGAGVAIVATARKLAVLVWHLLTKDEDCRFAPVERTAFKHRSLDRMAGRAGTRSPQRGATGSSHDQGRARLRGGHDPHDPALRQGDGPRPHGHYTAVRGLTLSSVRSVLVGAAALATTTLIVGPRLWRTMLDWGATPDEACRPLPATTSSRRPTSWRRGRSR

SEQ ID NO: 408246 - protein, 412 aa, unidentified
MKKVLRRVGIDWGSEAHQVCRIDGEGKPTQRAFPHTSEGLRALVAFVVEGKIEPKQVAIAIEVNHGAVVEALLAEGLFVYSTNPKVLDRLRDRFSPAGAKDDRRDAFVLASCVESDAHAFRRIEPGNEANTRLQAATRLREELASDLRANANRPWNELREYRPALLTLCPGADEPWLWVLIEKAPSPSAGAKLARARIGAVLKQHRIRRVTPEEVRTVLRGDVLSLRSAYIESHMARVLILIERLKLAQAQITTIEKQIQTALAERVKSEEQTERRDLTVLLSLPGFGPLTTATALGESGDAFERRDYNALRSLSGAAPITKQSGGTRYVVMRRTCQPRLRVALHISALQAIRIDPKFRDLYLRARARGHTVGRAIRTIVDRLLFLAVHLLRKNELYNIDLRQLAPEVAAAS

SEQ ID NO: 408247 - protein, 343 aa, unidentified
MQTITTIGFDIAKSIFQVHGVDAGGQVIIRRQLKRRSVLAFFQKLPPCLVGIEACGSAHHWSRELQALGHTVRLMPPAYVKPYVKRQKNDATDAEAICEAVTRANMRFVPTKTAEQQSGLVLHRARHLFVRQQTSVINAIRAHLAEFGIVAPVGRHGVEELLSVVTDPNDKRVPDIARACLSALGDQLQSIKQHVLEFDRLIRAWHRSNEMSLRLEAAPGVGPVLATALVAAVADPKSFRSGRNFSAWIGMVPKQHSSGGKNRLGNISKQGDRYLRGLFVAGALSVIRYAKVHGTKHRPWLTALLARRPTKVAAIALANKIARMVWAMMATGERYKEPVALAR

SEQ ID NO: 408248 - protein, 424 aa, unidentified
MKVTYQTCCGVDVHKSFLVATIVKTTGGIEPSYQKERFSTFNNSILEFKQWLLDNDCHDVCMESTGKYWVPVFNLLEDDINVVIANPKWVKAVKGNKDDTKDSKWIGDLFRLGLVKGSYIPCKKIRILKEYTRYRYKLVSCRSSEKNRYQNALTVCNVALDSVVSDIFGKSSTSIIDYLLEQSGSSINHEEIASKLLRSLKSKEDAVIESVEGYQMTDAQKYRMRLVRAHMDYITAEINDVDKMIENMISSNTDFENAVQFLCTIPGVKRDSAITIISEIGTDMSQFSSSRRLCCWAGLTPGSNESAGKKKSVRFTRAGVYLKPALVQCAHAAVKSDKSPYYKKKYESLVKRRGKKRAIIAIARMILTAIYQMLSTGEQWNPSDLYKIDMPVALVEKQKAKAIKQARKLLQREGLLPPDEPFAS

SEQ ID NO: 408249 - protein, 338 aa, unidentified
MDHFVGIDLHSNNSYIAVIDTDNNRIFKKKVRNNLPEIIKLLAPFKQQIKGIVVESTYNWYWLVDGLMDNGFQLHLANPSAIKQYEGLKHCDDITDAFHLANLLRLDILPEGYIYPKQERPVRDLLRKRIHLVHQRTAQILSFQNLVARNLGSQMHVTTINKMNEEDLEDLFEDEYLILSAKVSISTIHFLRSRIIHLEKAIHKAAKLKNEYKLLKTAPGIWNILAVMIMLETGPIERFKKVGNYASYCRCVQSNRFSNSKSKGKGNRRNGNKYLSWAYVEAANHALWNYEYVKRYHQKKTAKTNNVVAIKAIAHKLARACYYIIRDQKEFDPLKAFA

SEQ ID NO: 408250 - protein, 307 aa, unidentified
MTAVGIDVGKAHLDLAVEGQAGVRRFANTRAGIIKLTRYLQGLETPQIVVEATGGYEEPLLEACCDGGMWIARVNPRQARNFARATGELAKTDAIDARLLALMARLFADRLRPHVAPPPWQRELRDWLRRRGQVVTLLQAQKQQAAMAPQEVRKLAAKTIAALARELAAVDRQVHALIKQHATPALRSSKGLGPVFQATMLALLPELGHLSRRQIAKLVGVAPMNRDSGHGQGKRRIHGGRAPVRVALYMATLSAVRWDAGMKAHYQQLRARGKLAKVALVACMRKLLGIVNARRREDLSVGVAVVA

SEQ ID NO: 408251 - protein, 341 aa, unidentified
MAVAGMDTHKDTLAVAVIDRQGRELDRIELENSAAGHHRLVGWLRRFQLERVGIEGSGSYGRGVALAGLGAGFEVVEVPPQLTAQARKRQRSNAKSDPIDALLIARITLREPDLPLTRPDGDVEDLRVLVRYRRELRAERNRQANRLHADLVQLRPGYQRRIGRLTTERNLDRARRLLAGDDGVRARTARQRVTRLRQLNRQMAEVTAEVRQRSATIRSGLTTIPGVAELSAAELLAEIGDVARYRTKAQFAMANGTAPLPASSGRTQRHRLNRGGNRQLNRIIHYIALTQISRHPEGRTYFDHKKAEGKTTQEAMRCLKRRISDRIFQTLRDTRTPASAG

SEQ ID NO: 408252 - protein, 426 aa, unidentified
MHDNRNERINQISEDTLVIGVDIAKCVHYACAVDERGREVKKSFSFRQSRQGFETFYATILKVMESHQKKNVVVGFEPTGHYWMNLSSYLTDRGIRFVLVNPLHVKQTKELDDNLQSKNDPKDARVIAKMIPQGYYSIPRDMTPIEAELRHGSAFRARLKKQGASTQNRIKRWIDLYFPEFISVYKSIGMNASTVLSSYPLPEDLVREDPEKLLENLRNLGGKHFSVKNLTKLLDVAATSIGYQESPEMARAEIQILLTQMKLLEEQLVSIEKQLVTLAKQMTDFDLFLSVPGIGENTVVEILSEIGAFSHYKSPRQILKLAGLTLVTNSSGKKEGNKRLSKRGRKRLRSLIYKAIFPILHAIPAFRSLYDYYSEHREHPVAKKEALLILCRKLIQVLHGLSKRGETFNEERMVADISFFGNQEAA

SEQ ID NO: 408253 - protein, 390 aa, unidentified
MLLTLTHSKCKKGFVTGMTHATTPATTPATSETAQDAVSAQVIFPATLGLDVGDKLIHYCFIGAGGDILDEGRVRTYDADVRNRLGTFGHCRAVIEAGQHSPWLYRLLRTLGDEVIVANPRKFQLIRQSRHKTDHSDAELLARVGRVDPVLLSPIEHRSEQYQVDLALLRSRGELVTVRTGLINHVRGSVKAMGEVLPRWDADSFHRHAPDHLPAALAPTLLGVIEVIAKTTEQIKAMEKTLDQVAAERYPQAAVLRQVNGAGPITALTFVLTLGDPARFARSRYVGPYLGLTPRQRQSGDRAPQLRITKAGDSALRSLLVQSAHYILGPFGKDCNLRRWGLERLERGGQNQKKRVLVAVARKLSVLLHHLLVTGEVYDPFFGKGADNLD

SEQ ID NO: 408254 - protein, 371 aa, unidentified
MNDFSKYVGLDVHKETIAVAIADAQGGEVRFYGEITNTPEEVLKLVQRLRKEGAKLLFCYEAGPCGYGLYRQLKDLHQDCLVVAPSLIPRKPGDRVKTDRRDSLSLARLLRAGELTAVWVPDEAQEALRDLTRAREDMKHLQRVGKQRLLAFLLRHGRTYSGKKNWTQAHFRWLETLKFDQPVQQIVFQEYIDTVQALTRRVAALDGQIKKAGPESAFSKQIEGYMALRGIDRLTATTIVAEIGDLRRFPDAPALMKYLGVVPSEHSSGGTKSRGGITKTGNGHVRRVLVEAAWTYRHPARKSPPLQRRAEKTTESVQEIAWSAQKRLCARYRQFEARGKKRVQTCTAIARELAGFIWAIGQALPSPVAKA

SEQ ID NO: 408255 - protein, 452 aa, unidentified
MNKSLSLKSLTLVHPNAAGLDIGSREIWAAVRPDLDGETVRCFATFTPDLEALADWLLAGGVDTVAMESTGVYWIPIFELLEARGIQCYLVNARHVKHVPGRKSDVQDCQWLQKLHSLGLLSASFRPDAEMRALRTLLRHRAQLVQHRAPHILHMQKALQQMNLQLHHVLSDVTGQTGLLILRAIVAGERDPLVLAHLRHPSCKSSEETIVKALTGSWQEEQLFVLRQSLELYDFYTAQIEVCNAEIEQQYAAIPPRWDAPDDLPTLPSVKPGSKSKNKPADATRQELFRITGVDLVAVEGISASLAQTIISEIGTDMSRFPTAKHFCSWLGLAPHNDISGGKVLRSRTLKTDNRAGQAFRQAAAAVTRSDSAFGAFYRRKRAQIGPMQALVATAHKIARTVYYMLKHRVAYHDIGAQGYETQQREQELTYLQRKAARLGFELTPKQAAVPS

SEQ ID NO: 408256 - protein, 439 aa, unidentified
MRLKIVNPDSAGIDIADKEIQVCVPEDRDGENNRRFGSFTCDLREICSWLHACRISTVAMEATGVYWLNLYLLLKDAGIDVVLANPLQVKNLMDKKTDEADAEWLMLMHSYGMVKPSFQPENITRKIRNLTRHRSSLLESAAVEIQHMQKAMEMMNIKLSTVISDITGKSGQAIIRAIVAGNHAPESLSQLADGRCRASKETIAKSLEGTWDEDILFMLGQSLQAYDFYQAQVEACNGMIEALLMEYAARIDTEGAEFVRTKKNTTPKNALTFDMEKYAFDIWGVNVRAIPGMNVGSMLQLVGELGHDFVDKFETCRKFCKWCNIVPNNKISGGKLLSSHLPKRKNPVGQVFRMCANAVKDEKTEMGNYFRRIKARSGSAQAIVATAHKIARVFYTMIKNRQEYNQRLIGCEEKELLLRKIERAKKALYKLDQRLAETA

SEQ ID NO: 408257 - protein, 339 aa, unidentified
MEKVSTIGLDVAKSVFQVHGVNEEGQVVVERQLRRPQLLGWFAQLPACLIGIEACGTAHYWARALRKLGHEVRLIPPAYAKAYVRRNKNDAADAAAICEAVSRPTMRFVAIKSAEQQALAGLHRVRDLLMKQRTMLRNQLRGLMAEFGVVAAQGRRGLNELLAVLCDDADQRIPDTLRAALLADAEVLRDLEHRIEAIERQMVAAGREHATYRHLITAEGYGPILSSAMAAMVVDPGAFRRACDFAAALGLVPRQDGTGGKVRLGPISKRGNGYLRRLLVNGAASLIISGRAKRDPWLAKLLATKPRKVAIVALANKLARIGWALMVRQQDYRFTPAAA

SEQ ID NO: 408258 - protein, 412 aa, unidentified
MKKVYDNCCGIDVHKKLMVACFIHGKEQEVREFGATTRELLELADWLSKGGCQMVAMESTASYWKPLYNILESSGLKAMVVNARHMKAVPGRKTDVKDSEWIADLLQHGLLQASYIPDKDQRELRELISYRKSLVQDRTRELNRLQKMLEGANIKLSGTITNINGKSARNIINAILSGTRIDSSKYDEMYDKRIIAHNLKASKEQIIDDLNGFMSPLQRKMMKELLMHVDELDAHIEHLNDDIDKHMKPEEKQASDAIKEVTGLGTTSAQAIISVIGTDMSRFPTDGHLSSWAGLCPGDNESAKKRRSGKTRKGNHLLRTTLIVCAHSAVKVKNSYFRAQFQRISAHRGSKKAYVAVAHSMLIAIYHILKEGVAFQDLGADYYNQFNKERKIKAYLKKLRALGWEMPVAMGA

SEQ ID NO: 408259 - protein, 423 aa, unidentified
MQNNAARKRKQVPEGYLIIGVDPHKKRHAAVAITQDFTIWDKFKFDNTREGLEIMIRRAKMQMMKSDCRGVMFAIETGGHYWRNIAYFLDEQGIPFRFINQFTLKRRREGKDLNRKKNDYRDSEVAAQLLCTGEFTESKIPQGVYAELRASYNGYRRLVKERTRITNLVKGLLDGLFPEFTHIFKDPCGLTALSVLSTCSIPSVIAGMTEDEFVATIEAKHQGRLMRKKLRELHCSARMSIGINAGALSVSSEISFLVEKLELIRRHIRIIERTLVSLVDETEEGKYLLSIRGLNYTAVAGLLAELGCFKLYRSAKQMIKMAGSNPTESESAGKKRSRTPMSKQGRPVLRYCAWTSVIPMLRFNSDFRAWAKQRRERPAHANPLTGREVVGAALNRLFRLAFAMVKNQTYYQVPKPESALVAV

SEQ ID NO: 408260 - protein, 364 aa, unidentified
MLYVGIDQHRKQLTVSVRDESGNVLIRRQVSTEWQKVRAFFSELCESAKSHGGYLAVVEICGFNHWLLKLLPEHGCQNTIVVQPGEQSSHKTDRRDASGLSETLWINRDRVAQGLPIRGLRRIQVASAAEQADRRLTSLRHDVGRELTRAINRVKAILRRHNLEQECPTKGIQTQRARKWLDRLPLSAVERDELNHQLARQDLLRQQHKQLQLEISVRYEANPAARLISTIPGAAAYSALGLACRVGDIRRFKHPRSLANYWGLTPGSRNSGEATQRLGSITKQGSALARFLLGQLVLHVLRDDVWMRTWFRAIKRRRGSKIARVAVMRRLATIIWHILSKNEAYVCGGPPRTRLPRQTLATQS

SEQ ID NO: 408261 - protein, 314 aa, unidentified
MRNCIGIDVAKQYFDLHILKTGQDRRMDNSTDGIRRCVALCNKIRPELIVMEATGGYELTLAATLQAEGFAVAVVNPRRIRDFARAAGQIAKTDRLDARIIAQFASTMEPMPTERINENTQKLKALVARRSQLVGLHTAESNRLEHADGKEIRRSITAVVKVIEAQLKTIDRQITEHIENTPQLRQRSEIIDSVPGIGPTTANMLVTELPELGRLNRRQIAALIGVAPMARDSGSFRGKRMTGGGRKKIRSRLFMPTLVAVRHNPILRAYYNKLLSRGKCKMVALVAVMRKLICIMNTMTKNNQKWNPNLIKIA

SEQ ID NO: 408262 - protein, 331 aa, unidentified
MDISVLGVDLGKNVCSVVGLDASGAVVMRRKVRRETLIALAEKLPPCVVGMEACCGAHHLGRVFAAHGHDVRLMSPEYVRPYIKAQKNDDRDAEGIAEAATRPTMRFVELKSQDQLDMQTLHRSRDRLVGERTALINQLRAILLERGMVAPQGKRKLEQFLAVLMDEQGGAGLSSRMIVLVADARAQWAELDRRISAFEAEFVRWVKENEEARRLTTIPGVGPIVASALVAAIGRAESFDRGRDLAAWLGLVPRQFTTGGKPKLLGISKRGNKYLRKQLIHGARAALPYIAERDTPLGRWVKGLMSRTHRNVVVVALANKLARIAAARETV

SEQ ID NO: 408263 - protein, 406 aa, unidentified
MAHTPEAIQEWALELRRRFPTGRLAVALEQSRGPLVFALSKYEYLVLYPIHSSSAANYRKIFRPSGAKSDAPDAAMLLDMLVKHRDQLRPLHPDTVETRTLQLLVEDRRQLVNERTRISNRLVADLKSYYPQVLQWFEKPYAPVTLDFLARWPALPELQKARPATLQQFFQQHQCRDQAKNQARIADMHKTIAITHDGAVMTAGRAAVCAAVRLLHGLSQSIQDYDQQIEELAQAHPDFQIFASLPAAGAAFAPRLIAAFGTQRDRYRDAAEIQQFSGIAPVTETSANQHWVHWRWSCPKFLRQTFQEWAAQTMQQCDWAAAYYKVQREDKKKSHHAAVRSLAYKWIRIVFRCWKDREPYDDSRYEEALQRQHHKATAKSLQPSPFELPVQWISCAGFQKIASKNA

SEQ ID NO: 408264 - protein, 310 aa, unidentified
MEEVKFEQVVSRGCGLDVHKKVVVATIDGEGIRKVTREFGTFTSSLTELRDWLLEHGITHVAMESTGVYWKPVYHILEPTGMKVWIVNARHIKYVPGHKTDKKDSAWLCKLLLAGLLKPSYIPAQEQRELRDLTRYRKKLIESVSANKNRINRILEDCNVKLSSILSSTSGVVGTKLIDKLIDGYQVTMEDIEEVYHRKLQASKEEIWEACNGFITEHHIFMLQMIRKDISSTETVIAEITVRIKELLSPYDNVLELLKQVPGLNAKTVEDLVAEIGLDMSVFPNEKHLCSWVGISPGNNESAGKKKADE

SEQ ID NO: 408265 - protein, 371 aa, unidentified
MLLRSPKEPENGGRSAQMDNIKYIGLDVHRDTISAAVLNGSGRLIQQSVLMTRAAAILDFIGGVRGTLHVTFEEGTHSAWLYDLLSRRVEKLVVCNPRRNALLKSGNKGDAIDARKLAELLRAGLLSAVYHGETSALEVQQLARSYAMLTEDTTRVMGRLKAVFRGQAIACTGRKLYGHHRNEYLAALGVCALRRRAERLYLQLDALQLLRRQARHDLVVECRKHTAAKWLQTVPFLGPLRAAVLIARVQTPHRFRTKRQFWNYCGLALETRDSAEYRVIDGQLERKKRPALIRGLNWNYNHELKNVFKGAANAASVGQGEFRKFYLGLLKKGMRPEMARLTLARKIAAIALKIWKKGESFNAEHLKSQAA

SEQ ID NO: 408266 - protein, 343 aa, unidentified
MYFIGVDHHKQASQLTVLAEDGRELRTGRVLNLRRELERFLEGFHPFTAVLEAGRSSYVMADLLRELGGAVKMANALQVKAIAHARIKTDKRDSRTLAQLLRADLIPEIYQRGEANRQAQRVMRARAYWVSKQTEIKNKIRALLAQQKEEIRIEVDKRTGGLFSGRGIEFVLRLPLGGTDKMVLDDLVQGYQETQAHIKASDGRVQALYGTIEEASRIDTIPGFAATLAVLVAVEIADIHRFSSPAHLHSYAGVIPSTYASGERTYHGRITKQGSAWLRWAALEAVYPAIKKDLGLRVLYTRLAKRKGPNAAKIAVARRLLTVIYRILTENRTYLPDMNRSAA

SEQ ID NO: 408267 - protein, 451 aa, unidentified
MAKKKMEMDIIHPHCAGIDIGSRSHYVAVGQALEDVKEFGVYADDLTDICLHLKEHEVTSVAMESTGNYWQNLYVELIKHGFEVTLANGKFTKNIKGKKTDVKDARWIQKLHSIGLLTSSFLPDETTEKLRTYCRQRQNMLTLAAEASHKMQKYLKILNFRLDVVVNDICGLTGMAIITDICKGNLDPEKLSDHRHGNCRKSKEEIAKALKGNNREDYLFGLKQELESYQFYQKKIAECDKQIGAFLKQQINTDPEKKKLKTTEKTHKRINKNAIKGIDLNQAAYQYFGGVDLMSIEGMSHATILSIISEIGPEGFHKFETAKHFTSWLRLAPNNKVSGGKLLSSKTPKGSNRLKIALRNAANAIGNLKDTHLSNFFNRVCYRKGRTVAVSATARKLAVILWNMVVKNMPYKPPTDYLFLDEKRKLGLVKRIRKQITKFELTNQDLGLATT

SEQ ID NO: 408268 - protein, 347 aa, unidentified
MRFYNRQHRHYCGIDLHVKTMYVCILDAAGHALVHRNVKSTPEAFLEIVAPYRDDLVVAAECMFTWYWLADVCAAEGITFVLGHALAMKAIHGGKSKNDKIDSHKIASLLRGGLVPQSYVYPAMMRSTRDLLRRRLHLVRKRGQLLAHIQNTRAQYNLPEFERRLAYPANRDGVSDHFPDASVRKSIEVDLALLERYDTLINDLELTLVRDAKRHDGDAFHRLRSVPGIGKVLALTILYEIHDISRFDRVQEFASYARLVKGRKQSGGKRLGTSGAKMGNVHLKWAFSEAAVLFLRHATGGKKFLATLEKKHGKGKALSILAHKIGRAVFYILSRDTVFSMEKFMAA

SEQ ID NO: 408269 - protein, 358 aa, unidentified
MSKLTVNNVVVGLDLGDRFSWLCVLDGDGEVVEEGRIQSTEAALRRWFGPRESACVAIEGGTHSPWISRLLKELGHEVIVANARHVRMIYDGDRKSDRLDAEALARLARLDPALLHGIAHRSEEAHHDLAVIRAREVLVRTRTRLINHVRGAVKSAGHRVPRSSSAAFHRTAAEAIPTGLKEALEPLLDMLEQITQEIRAYDRRIETLASERYPETGALTQVTGVGTLTALAYVLTLEDPGRFATSRAVGPYLGLCPGKDQSGDRDVQCRMTKAGNEMLRRLLIQAAHYQLGPHGPDSDLRRWGSERGARGGRIAHKKAVGGVARKLAVLLHHLWTSGEVYQPLRNSGGGDEPTAQAA

SEQ ID NO: 408270 - protein, 387 aa, unidentified
MTKIASSPSPAAVDFDATLILAVETSNKNWVLAAHVPGLGQVKAKQTIEPNVDALSKAIEGYRRRAKASGAAVVRVIVVYEAGYGGFWLARWLEAHSVEVHVVQPSSVPVERRKRRAKSDKIDADLLLRTLLAWLRGEPRVCSMVRVPDEADEDARRPTREREELVRERISLTNRIGATLATLGIDDYNPLRRDRRTKLETLRTPLGKSLPEHARAKILRILERLELILGQIAAIERRRDAALEDEAPGRERGMIQRLAGLRGIGAQSATVLVYEAFIRSFANGKALGSYAGLTGTPFNSGGSEREQGVSKSGNRRLRGTMGELAWLWLRYQPESALAKWFRERLAGANGRMKKILLVALARKLLIVLWRYVTLGVVPEGAVFLPAS

SEQ ID NO: 408271 - protein, 355 aa, unidentified
MIIIGADFHPEFQQIALLDTESGEFQERRLQHREEAERFYRELAAQGAQVRVGMEASGQAGWFERLIGELQFELWIGDAAEIQCRRPRKQKTDRQDAELILKLIVKDDFPRIWVPSWENRDLRQLLWHRHRMVQARTRIMNQLQAVALNEGLRCKKRLWRKHGREQLESIRLAPWACRRRRDLLELLDRLNPTIAELTQAIEREAEKRPAVQRLMTHPGVGALTALAFVLIIGTPERFGCGKQVTSYLGLVPLEKSSGNRRRLGHITKQGSSMLRFLLVEAAQVTVRSDPGWRSKYFHLMLRRGRKTAKVAMARTLAVRLYWMWRKQWDYEQSLSSVRTQDSPDIVMVRSRTPRN

SEQ ID NO: 408272 - protein, 452 aa, unidentified
MAKRSKKRCEQLPILHPHAAGIDVGASELFVAVSADRDPQPVRSFPTFTRDLNALADWLQQCGIRSVAMESTSVYWIPVYQILESRGLEVCLVNAQHVKNVPGRKTDVSDCQWLQYLHSVGLLRASFRPPGIICAIRSLWRHRSSLIQMAAEHVLHMQKALDQMNLQIHRVLSDLTGMSGLRILEAILAGERDPVTLARLCHGGVKSSEDTIAKSLEGDYRPEHLFALRQSLAAFHYYQQLVVEVDQEIQGQLGGLGTAATAEPTVPKRTKASAYQRPRYEPKTFDLRSELYRVFGVDLTNVPGISSITAHTLLCEIGTDVSRFRNASAFASWLGLCPENKISGGKVLYTKSRRVRSRVATALRMAANSLHHAKNYLGEFFRHITRKLGKPQAITATAHKLARIVYHLLSTKEAYNETVFHRCDEEVLRRAQFRLRRQAAQLGFQVIPLQNG

SEQ ID NO: 408273 - protein, 390 aa, unidentified
MYYCGIDVAKRKHAIALLDEHGQPMHRPFTIENTRAGFDQLLQALAELKGPVLIGLEATGHYWWALYEDLTQHDHPVVVLNALQIHAFRKSGVRKVKSDRTDAGWIAEFLRFSQPEPAQPTTAVFLQLKDVSRFRYHLSDQIGDCKRKLLSVLDRVFPEYETLFSSVFLNSSRQLLAKAASAQELAAFDLTELANLLQTASRGRFGRTKAEALHTAAKQSVGVRFLADAAQLEVRCLLAQIDLLEEQRDQVDVALAQLMEQVPQHLTSIPGVGPTTGAALLAEIGDVRRFDAPEKLVAYAGIDAAVYQTGQFEARQMHMSKRGSPYLRHALWQAASMAIQYDDELRVYYDRKRQEGKPHGTALGAVCRKLLTRVYIVLKENRPYEIRTQR

SEQ ID NO: 408274 - protein, 346 aa, unidentified
MLHAGLDLSRKRLDVCLLSDQGELVSELTAVPDSAGLKRLAQRVEAEGEPVRAVIESMTGARFVHDTLERYGWEVEIADAQKVKGLAPLAVKTDRIDARVLAVLSQRDLVPAIWLPDPTIREERELARFRLHLVKHRSALKNRIHSALISFGRPCPVTDLFGVAGRRLLARLDLPEPWRGNIDASLLLIDQLEAQIDEVDAKLRSSGADHPYVPLLLTVPGVGWVLAFTIAAEIGEISRFETPTKLTGYTGLCPKVVQSGDSDRRGPLSKHGPRYLRWALLEATMHALRHPAYAERYQRNKRRLGRQRGAKVAQIDIARRLTVAIWHMLTRNQSFAPRGAALRLAA

SEQ ID NO: 408275 - protein, 390 aa, unidentified
MKPDGDKHSSFSIPNNRPGAEILVDRIVEVLHRLFIPKVVIGMESTSVYGDNLMYFLRETGKFSGFEKKLHMLNPKQVKKFRDTYSDLPKNDFVDAFIIADHLRFGRINKEVYMGDYRYEALKALTRARHQTVQSLTREKQRFLNQLFMKFSGLSQEKIFSNNFGATATAVIENFESLDELAYIDSDELADFIKKHGRGKFEDVDGIVSDLRKAAQNSYRPPTVIADSVNQILAISMSTIRLLQGQVKEYDKAIEKQLSTIPNTLTSVKGIGLVYAAGIIAEIGDINRFPSQASLAKYAGLTWTQRQSSEFEAEDTRLIRSGNRHLRYYLCEAANSLRKCDPEFRRFYNLKFHEVSKHQHRRALALTARKLVRLVYALLKTNRLYIPPEE

SEQ ID NO: 408276 - protein, 353 aa, unidentified
MRTYYVGMDVHQASIVIVVLNGAGKVVMELVIETGADSVRNFLKQLRGKVYVTFEEGTQATWLYDVVRSLVTEVVVCDPRQNKLLKTGNKSDRVDARKLAELLRNGSLRAVYHGDKGGRQLKELVRNYDCLVADMTRVMNRLKAIFRGRAIACAGHDVYRPDRRSQWLEKLNEPGARQRAGVLYEQLAVLQRLRHEARKAMLTEARRHAAYPLLLSIPLLGPLSVAQIIAVVDTPFRFRSKRQFWTYVGLAVVTRTSAEYVLVNGLVRRSSRPVATRGLNRNHNHLLKKVFKNAASGACAHGPFKAAYETRVGQGMDPSLARLTIARKLAATTLAVWKRGQRFDLERMKQPAT

SEQ ID NO: 408277 - protein, 431 aa, unidentified
MKNQTSKRIEEITTGTLIVGVDIAKEVHWARFVDYRGVEHGKAVSFRNDRKGYESILSRIGEICNLKTLRYPIETVIVGMEPTGHYWKPYASYMMHKGYRIVGVNPYHTKKSKELDDNSPTANDKKDAITIARLVKDGRFFDPYLPREEYGELRGLTNARVSATKRNNAVKNTITAILDEYFPEIWTVFKNPLTGKASRQILRSCPFPLFILEKGESDVLAEIKKAVKRTVGLKKVRELISVAKDSIGVKYGLDAAKMRLGWLLDELELLEKQLVDVEHAMESALLKTGYADQLLEIKGIGIVTAASFLGEVGDPLRFHNARQISRYAGYNLVEDSSGKSKSGTIISKRGRKQLRSILYQMAFTMVGKNAEMKALYQHLITRERNPLKKKQALVVVSKKIITVIYSLLKKQETYKPELVLGVVRQELMKAA

SEQ ID NO: 408278 - protein, 338 aa, unidentified
MKFKRIAIDTSKHVFTLHGVDEQERVALRRELKRSQVEEFFRKQEATEIVLEACGGSHHWARLLQRLGHTVRLIPPQYVKPFVKRAKNDRNDAEAINEAASRPSMRSVAVKTVDQQADGIILKHREMLVGQRTQAINALRGHAAEFGVVAAKGTGKVSVLMAALAADTAIPAAAWAMFEQMAAHIEALDQRIAAADAKLAALHEANPLSQLLAEIPGVGPLGAITMALTVEPQNFASARHFAAWLGLTPKEHSTGGKQRLGKISKAGNERLRQLLVVGAMAVIRFAKPGSKSASAWLLKLLERKPRKLCAVALANKMARIIWAMMASGEAYRRKPVVA

SEQ ID NO: 408279 - protein, 388 aa, unidentified
MPRQRKPNDLSRSLIALDMDTTLIAVVELSLSSWLVAGIVPGVERQPLKKLKTDEHALLTLLNRWRDEAVRSGHKISRIAVAFEAGRDGFWLARWLKARGIEAHVIHASSVAVSREHRRAKTDRLDTELLKRAFVGWLRGERDHCKTAAIPSLREEDAKRPSRERESLVGEQSRLVNRMKATLIRLGIRGFNPKLRHAEQRLETLRTPEGEPIPPNTLAELKRDMQRRRFICDQIRSIEQDRLERLERTPDTEPHAMVRLLARITGIGIETADLLVHELLLRNMRDRRAVARYGGLTGSPDRSGGTNREKGMARSGNARVRRGMIQLAWRFLLFQKNSALAQWYRRRTEHAPKARKTMIVALARKLLIALWRLVREGVVPEGVAMRPA

SEQ ID NO: 408280 - protein, 355 aa, unidentified
MSQEKYIGMDVHQATISVAVMDAGGKLIMECLLETRASTIVEFIQGLQGTLSVTFEEGTSAAWLHDLLKPHVSQLVVCDPRKNALLKDGNKSDRIDARKLAELLRTNQLKPVYHGEHGVRTLKELGRSYLTLTKDVTRVMNRIKALYRSWAIPCAGATVYAPRHRAEWLAKIAEPGVRVRAERLYQQLDLLQPVRLEARRELLVESHKHSAVKLLCQIPSIGPIRAALLVALLQTPHRFRTKRQLWAYSGFAVETHDSGEYRYVRGKLQRNRERITVRGLNDNHNKDLKNLFKSAAISASTRPGPLRDFYLARVENGMRPTMARLTLARKIAAISLTIWKKGVEFDPQQLHRQAA

SEQ ID NO: 408281 - protein, 320 aa, unidentified
MTSKGAEKMQNDTIGVDVSKDHLDACRLADGASRRFANDKCGRKAFVKWCAEMPVVRVVFEPTGPYHRAFERVLGAAGVPFVKVNPRQARRFAEAIGKLAKTDRLDAATLARMGAMLELKARPPQSEALLKLKELRLAREALVKDRTAAKNRGKILTAPLLKRHNAQRLEQIKRHIAAIEAEILKQVQANPDLAQRFAILTSIPGLSAITAFALLIEMPELGALEAGQAASLAGLAPMARQSGRWTGRAFIRGGRAEIRQALYMPALVAARFNPDMRAKYKQLTCAGKPAKVALTAVMRKLIVLANALLKANRSWTPKYA

SEQ ID NO: 408282 - protein, 357 aa, unidentified
MRKSTSGKNGLVASIGIDLADMWSDWVSIDRTGEVIERGRVRTTAVKLRERFGSIPATVVAIEVGTHSAWVSRELRSYGHRVVVANARKVSLIHQNRRKNNRIDAEFLARLVRVDEKLLFPIEHRGESAQRDLSILRSRDILVRTRTTLINHVRGVCKAFGKPLPSCSAESFALKYQSAKPELLTEVLDVIAEQIQRLTDLIRTYDRQIEKMVSQYEAARRLRQITGVGPLTALAYVLTIEDPRRIARSRSAGAFFGLVPGSDDSGEDHAQKRITKEGDRFCRRLLVSAGQYILGPFGPDCDLRRHGLAISARGGKNAKKRAVVAVARKLAVLMHRLWISQADYVPLYNATTRSIAA

SEQ ID NO: 408283 - protein, 335 aa, unidentified
MKNYECHAGIDVSKLKLDVSLLISASSNRVEHFIVPNNKIGIQQILKRIEKLKISTNELLVSFEDTGVYSLPLACFFSEAGLDYWMIPAIEIKRSKGISRGKNDKTDSKDIAFYALTHQHKLILSKIPEKDLLELKVLIAERDKVIKAINQFKTTSENQGFMPKEVLQSVLKINKTVIGQLQKALEKLEEKMKDLIEANEQLSSQYKLITSIPGVGPQTAMYMIAVTKGFKSFENWRKMACYAGVAPFEYSSGSSIKGRTKVSHLADKKMKTLLNLCALNSKKFDKQMAAYYENKVAEGKSKMLVINNIRCKLLARIFSIVKRGTPFVDFYKFAA

SEQ ID NO: 408284 - protein, 344 aa, unidentified
MLYAGLDLCRKRLDVCLLDESGARVWVGAAPPDRDGLAGLARRVGELEVRAAIESMTGARFVHDELERHGWDVEIADAQKVKGLAPLACKTDRIDAWVLAELSRLAFVPAIWLPDPSVRAERERARFRLHLVRHRTMLKNRIHQTLISFGVPCAPSDLFGVRGRTILANLALPDAWDRNVRVALALIDDLDEQITGCERQLRELGADHQYVSLLQTVPGIAWILGYTIASEIGDINRFVSATKLCGYTGLCPRVYQSGQHDRRGALAKTGPRYLRWALIEAAVHAARDPRYKPGYEATKQRLGRQRGAKVARVVVARKLAEAIWHMLTRNEPFNPAGAPIRLAA

SEQ ID NO: 408285 - protein, 311 aa, unidentified
MLNQSRYLGVDVSKDTLVVAFERNRWQFSNSKEGHRKFIEQINKQSGTLHVVCEATGPYHLAMCLALQAAGIALTVSNPARIHYFGRSEGVLAKNDPIDAALIERFAQSKRPPADPPLCREQLTLNELVNHRRQLVDAIRIFRVNRQQVINSDVRKEIDRSIAALERRVQAVERELQDKVNANPAWKKKFDVLISAKGVGFITAIVLLVKMPELGSLNRGQCAALAGLAPYDDDSGQHDGRRSIRAGRAEVRSAIYMGALSATRANPILKAIYQRLKKAKKPSKVAITAVMRKMLIYLNALLKRSLEDAPA

SEQ ID NO: 408286 - protein, 331 aa, unidentified
MYSFFIGCDISKTYFDGSFNKNQIPVYAGRFSNDISGFKLFVKELKLYTDVPEPSWLVCFENTGVYSKPLLEWLFSQGISCREENALTISRSMGLRRGKDDKIDSKDICRYIFEKRDSIQPSKLSNPLIVKLKKLLSRRDFLVRHKQSLEVTLKDQQTVIDPSLYDLLESRNNTLIEEYSRQIKEIEELIQNLMKQDEEVKTNYDLAQSVVGIGKTTAAYLIAVTENFSCFTDGRKFACYGGIAPFPNRSGIRIGKTRVSHLANKKIKSLLSNCVNAAIMYDKEITLYYNRKLAEGKEKGVVFNAIKNKLIHRVFAVIKRQTPYVRIMTYA

SEQ ID NO: 408287 - protein, 426 aa, unidentified
MKFNTQNKKIAAITEKTLVVGIDIGSEVHFARAFDWRGYEYSSKPFQFSNSEEGFEAFRVWIEDMKAKGDKETVMPGMEPTGHYWFNLGRYLQDRGMKPLHVNPHHVKKSKEMDDNSQAKNDRKDPKVIAGLVNAGRYMYPYIPDGVYAEIRTLNGLRGFAQEEAIRLKNRIARWFSIYFPNYKDVYGNVNAISGLMVLKKAPLPEDIVRLGVEGVNRIWREAKVRSVGLKKAKELVTAASHSVGVQNSQDAARIELQFLLSDYEMQVKREAELMAMIEAKIKKIPYVENLLAIKGIGMKTAIGFVAEVGDIRRFKDPKEIQKLAGYAIVNDESCKHVGESHISYRGRKRLRYVLYEAAVSVLAHSPEFRLIHHYYTTREHNPLKKMQSLVAIACKLIRVFYRILTSGITYDPGKMMGDIQRPQAA

SEQ ID NO: 408288 - protein, 403 aa, unidentified
MEGPLISLDVSKGKSNYRFFENGTDRKGKKGVIRHDIRGFDSIRDEAEKMEKRLRIKPSVIFESTGVYSDVVEKYFTDKGFDVYVISPLLSASMRKEGVRPAKNDSLDTLSIAKVFYSRDDLRKCSENDKKAERLREMSYELDMMNRRIRPMKCQFLRLLDKVWPCLDEVSDYSSRFMLDFIIAFGHPENIKTVKGVLSVIGKSEMGTAGRKDKIAQDLFDYCHTHLSAVSKDSSYVELLKRMAIELKAMAKKKSELIDRMAEEARNKDEFVRLLTIPAVAKTTALKIMARVGDISRFRNAEALVAYCGLDPRVYQSGKMTGEHRTITKKGDCILRSTLFLAVKLMVMLYPDTKVARFVAAKAKNGLSYKQAVVAGSAKLARIIYSMLTHHENYVEFNADIVA

SEQ ID NO: 408289 - protein, 396 aa, unidentified
MISVGIDVSKGKSTVCIMKPCGEILESPFDIGHTADELDSLISLIKSFDEETRVVMEDTGHYHLPVATYLSSHNIFVCCVNALRMKKFCSQSIRRAKTDKIDSIKIASFGITYWNELVKAYPSNVIYDELKFLARQYYQVTGMLVKSKVNFSNLLDQVMPQINDVLSNQGENHKLTEFVSRYIHFQNILDMGEMKFTSDYCKWAKKKGYRLNERKAAEILALAQNGIPTLPNSQSVKIAVSEAVKLIHSIEESRNTILAQMQDLCNTLPEYSVVKEMDCIGDTLAPRIIAEIGDVRRFKNKHSLIAYAGIDAPPYQSGAFHASERHISKRGNSYLRKTGYEIMQSLIKHKPADNAVYDFIQKKRSEGKCGKEAMIAGLNKFLRVYYGKVMEFYSEH

SEQ ID NO: 408290 - protein, 402 aa, unidentified
MISVGIDVSKEKSMVCILKPYGEVVCKPFELQHSKKSLESLDELLRRLDGEVKIVMEATGIYNLPVLTFLDEKGYFVSVINPCVMKKYARNNNFRNVKTDKMDSITIANYGIEKWFKLKRYEASESTYAELKLLGRRYRHYMEMHIQALQELTHVLDYVMPGIKNLFNSWTESNNRDKLSDFVERFWHYDLITSMSCEEFVKAYNEWAKEKKYHQSNSKAVQVYELASNGISTLSSSLPSTKMLVLEAIKTLRAIDDSLYTILSRMKELAKSLPEYSTVRAMGGVGDVLAPKLIAEIGDVRRLRNAKALIAWAGIDPPPYESGQFVGTNRKISKKGSSTLRKTGYEVMRVLKSHQAPKDCTVYNYILKKEAEGKSKKQAKIAGLNKFLRIYYARVMEVYQAA

SEQ ID NO: 408291 - protein, 368 aa, unidentified
MQKLNDLSRSLTALEPNIVPGVERQPLKKLAVDESALLKLLHRWREEAEKAGRRIERIAVAFEAGRDGFWLARWLKARGIEAYVIHASSVAVSREHRRAKTDRLDTELLKRSFLGWLRGERDHCKMVEIPTMQDEDAKRPNREHDSLIGERSRIVNRMKAALVRLGIRGFNPKLKRATTRLDGLHTPEGEPIPPNALAELRRDMERRRLVNNQIRQIEEERLERIEQAPCDGAHVMVRLLARVMGVGIETADMLVHEVLSRNMRDRRAVARYAGLTGSPDESGRKRREKGLARSGNARVRRGMIQLAWRFLLHQKNSALTKWFRSRTENARGTRKPMIVALARKLLIALWRLMREGIVPDGVVLRPAQ

SEQ ID NO: 408292 - protein, 320 aa, unidentified
MDAVLGIDIAKAKFTVTLRTPDGKQRRKTCPNSPAGFEALAGWLTRQHVTQVHACLEATGTYGEALATWLYDAGHQVSVVNPAVIHAYARVQLARGKTDALDADLIAQFTVTQQPPPWVPPAPEIRALQALVRRLDALYGMHAQETNRLAAGVTVAAVRGSIDAVLANLDEQIAHVKQLIRDHIDRHPGLRQQRTLLTSIPGIGDATAAVLIAELFDKPYASARQAAAFAGLVPRLHESGTLRGRSRLSKIGPGRVRKALYFPAIAALRFNPTIRAVRQRLAAAGKPNMVIIGAAMRKLIHIAYGVLKSGKEYQATCSHP

SEQ ID NO: 408293 - protein, 311 aa, unidentified
MYYIGIDVSKKDLSVFDGKDLNFTNQEGLTSFKKYLKKKVNFSDLVIIFEPTGVYSLYLKEFCAENNIRAYIVNPKQSHNFTRALGRRSKTDKIDARILYQFHKLIDSKDIKVPKIDQQAKALSGYLVSYEFALKQRISLSHHLESLRDKRLIALMRKDLKRAKNLEDKIFNDIKEYLGKNQDLKEDYQRLSTIPGIGEKAAIALLALFKTYQGTNRAQITALAGLDPVKRESGTSVKYKVKISKNGKGIYRKILYLPTLCATVHNQKIRLFYQRLLANHKNKKLAVIASMRKILLIAHAMYQDKTEYITV

SEQ ID NO: 408294 - protein, 355 aa, unidentified
MNSEKYIGLDVHQATIVVAVTDASGKLIMESILETEAATILQFFAGLRGTLSVTFEEGTWSAWLYDLLNPHVDKLVVCNPRKNALLKDGNKSDRIDACKLAELLRGNQLKPVYHGETGVRMLRELSRSYLTIVKDLSRVMNRLKAVYRSWAIPCAGRDVYYRRHRAQWLDKIREAGVRRRAERLYEQLDMLQHLRQQARRELLAESRKHAITARLRQIPYLGPIRTALAVALMQTPHRFRTKRQLWAYSGLALETRISAEYRMVEGQVRRSKKLLSIRGLNKDHNHDLKGLFKGAATMASVRPGPFQDFYQAALAKGIQPTMARLTLARKIAAITLTLWKKGENFDAEKLKSQAA

SEQ ID NO: 408295 - protein, 373 aa, unidentified
MQYSIVYVGMDVHKDSFSLCCYTNEKEKAEYSQRVLGHYSKVINYLEAMRFHYGKDVSFICGYEAGCLGYTLYHQLTEHNVQCVILAPTTMLVSRGKKKVKTDKRDAALIARCLAHHDYSAVHIPSAKDEEVKEFIRMRDDHKIAQKKVKQQILSFCLRHNYRYPGGTRYWTQAHMKWLRDLKPEGLYREILAEYLVTYNSLTDKLERLDKRIEELAAAEEYRDKVHKLSCFHGMRAHSALSIITETGDFNRFATAQQYASYLGLVPGEDSSGEEQIRIGITKAGNRHLRMLLVEGAQCFGRGEIGYKSKALKARQQGNPAEIIAYADKANERLRRRYYRMILTQGKRTNVVKTAIARELACFIWGMMTDNIA

SEQ ID NO: 408296 - protein, 317 aa, unidentified
MSKHSIACAGIDTGKRKLDAALDGRAEWLQVDNTPDGQRRLSVWLRQHRIKRIGIVASGVYVQAIVCQLRRDGFLVIVFHPAQVRAYAKFHLQRAKNDKIDAALIAACTAATKTIHAPPDPRLAPFAEHLTLIEQITEDIAHIKTRRASCRDPRIRHFWNEEIARFKCRLRTELKELVVAIRQHPDLAARLDLINSVDGVGLRTAVAILVRMPEIGRITREHAAALAGLAAYDDDSGEHVGVRHIAGGRERLRKSLYTAALAAAFHWNPQLIAIYRRLIAAGKPHKVALIACARKLLIFVNTVVARGAPWTERPGLI

SEQ ID NO: 408297 - protein, 391 aa, unidentified
MILVGVDVAKDKHDCYIMTSEGEVLFKSFTIANNMEGFNQLYEKILSVIDNFDNVKIGLEATGHYSYNILGYLLDKGLTPYVINPLHSNLYRKSLSLRKTKTDKVDSRIIASMLMSDVSLKPYSNTLYHNEELKSLTRYRFTKVQERAKLKISISRLVTILFPELEKLVPTLQMNSIYALLYEFPSAHAISKAHLTRLTNLLNTTSKGHYTKDKAVLIREAAKNSIGSNMPAKSLELKHTIKLIKELTSEINEIEEEIKIIMNKINSPILTIPGIGLSTGAQILAEIGDFKNFSSPDKLLAFAGLSPSTYQSGNMYSSNAKMEKRGSKYLRFALFNAAIYVSYWEPTFSQCLKKKRVEGKHYYVAISHVVKKLVRLIFHLEKTNERYSTVV

SEQ ID NO: 408298 - protein, 375 aa, unidentified
MNQFIKYIGLDTHKDTIAVAIADAAGGKPRFYGEIANTPTALSKLLKDVSPNGEVASYCYEAGPCGYGIYRQISDSGHDCSVVAPSLIPTKPGDRVKTDRRDSENLARLHRAGELTPVWVPDQEQEAIRDLTRAREDMKHLERQARQRLCAFLLRHGQRYESGKSKWTQAYWRWLEGIKFSHRVQQTVFQEYIDSVKQQQQRVADLEQAMHEGMADWTLAPVVTGLMALRGCRLITAMTVVAELGDITRFDSPRQLMKYLGLVPSESSSGPKTRRGGITKTGNGHVRRVLVEAAWCYRFPARKTAALQRRAEQTPDEVQAIAWKAQKRLCGRYQALSKRGLLPQKTVTAIARELTGFIWAIACEVMPRNATETNT

SEQ ID NO: 408299 - protein, 338 aa, unidentified
MKLYGAIDLHSTNNVTVLIDEQDEVVYQKRLPNDLASVLQQLSPYQLSIQGIVVESTYNWYWLVDGLMEAGHVVHLANTAAIQQYEGLKHTDDHSDARWLAHILRLGLLPEGYIYPRQERAVRDVLRKRSQLVRQRTANLLSIQNQITRNTGSSISANRIKRLSAHEVEGLLPDGDVALAVKANLSVLRCLETEITQLERVVKERVQLQPAFRHLLTVSGIGPILALTIMLETGDIRRFGSVGRFASYCRCVRSEKLSNGKRKGSGNTKNGNRYLSWAFVEAAHFAVRYEPQIRSFYQRKKAKTHGVVAIKAVAHKLARACYHIMRDEVPFDVARAFS

SEQ ID NO: 408300 - protein, 344 aa, unidentified
MVYHTALDVSLRSVSICIIDGDGNICFEDKVVSEVDEIAAALKRFSPEICSVGFEAGTLTQYLSYGLQAAGFEVICMEARQVSAALSAMRNKTDKNDARGIAQILRSGWYSRVYVKSMESHLTRALLSGRKAVLKKCVDLENEIRGLIRLLGIKLPGTLKHGAFDDLVRPIIEEHGLMVDSLIPLLDARLMLYQTYLKLDAQVTAMARKDEVCQRLMTVPGVGAITALTFKAGVDNPNRFKRSRTVAAHFGLTPKRFQSGEVDNPGHISRAGDADVRSALYIAAHSLVIRSDKWTYLKAWGLRLSKTKGHRRAVIAVARKLAVILHRIWIDNTDFRYGSTEVKL

SEQ ID NO: 408301 - protein, 354 aa, unidentified
MTTPSIQNDFTPASVGIDIGKDVFHLVGFDLDGNIVLRRKIRRSALVSEFEKLPPCIVGMEACLSAHFVSRTLRKLGFEPRIIPAIYVKPFIKGQKNDYNDAEAIAEAALRPNLKFVQEKTQDQLDLQALHRVRSRLVSRRTATINQIRAFLIEQGITVRTGAHALRNSLFAILENRKDEISPRMSDLIIGLYEDWRELDERIGTITGEIEMISKSEENCQRLMSVPGIGPIISTAVVAAIGTGDAFGRGRDFGAWLGLVPRQYSTGGKTVLGRISKRGSKYLRTLFIQAAHVILMRPNNWRKFSFGPWLTEASTRLHRNKLATALANKLARIAWSVLANRKAFDANRKEVTAI

SEQ ID NO: 408302 - protein, 379 aa, unidentified
MATTATNDIVTTIGVDLGKNVFHLIGMNARGAVIFRERLSRAKLPRRLANMTSCLIGMEACAGAHHIGRQLAALGHEVRLIPAKYVKPFLKGHKNDYRDAEAIAEAVQRPTMRFVALKSIEQLDLQSLHRVRSRLVGQRTAVINQIRGFLLEHGIAIRQGPAGLRQALPSILAQPIGELSPLLLRLLEDLVDDWRQLDRRIEAVTAEIETLAKQNDKCKRLMAMPGIGPLIASAMIAAIGDGAAFIKGRDFAAWLGLVPKQISTGDRTILGGISRRGNRYLRTLFVQGARSVLFRPNSWANYSFARWLTDATRRLHKNVLAIALANKLARIAWAAPWHTIRARRASNRRESLISKVSCRGSRDGMTTMETRSPGATVTW

SEQ ID NO: 408303 - protein, 341 aa, unidentified
MNNSTTICIDLAKEVFQVAVFNQAGKAKLNKEVTAKKMCLIIAQYPDAAIYMEACGSAHHWARRFTSSGHKVGLIPPHLAAKYRVGNKSDKNDVLSIYKACKNQQLHCVQIRTLEQQDIATLHKFREGYKKERNQIANRLRGFGREYGVNFALGINKLLKQVPIALEDAENEMTVVARRVIFRLLEQLRHVIMLMKEVTDEIEAIAKQIDACQRLVQLPGIAWLGASMMYAKFGSAECFRRGRDASASIGLVPAHSGSGGKVTIGRITKRGDTYLRTLIINGARSLVIHVKEKTDGLSCWVRQLLNTKGFNKTIVAVANKLVRMATAMLKSGLEYRQPVAQ

SEQ ID NO: 408304 - protein, 371 aa, unidentified
MKQQTKSSNITVGLDLGDRRHRFCALDERGEVVEQDSICNDRVSLRKLAGRYHGALGVMEAGAHSPWISRFLEALGWRVVVSNPRKVRAIYQHERKSDQRDALMLARIGRMDLALLYPVRHGTAEAQQDLLRIKLRDSLVRARVAVINSVRFTLKSLGYTVRNPSSARFHKVVMEEVPESVREIITPSVQALAELTARIKMLELEINTLAQMKYPQSAQLQQIPGVGPITALYFVLKIEDPNRFAHVRDVGAYAGLCPRRDQSGESDPQLRISKRGDAYLRRLLVSAAHYILGPFGPQSALRAYGLMLAADGTARAKKRATVAVARKLAVLLLSLWKSQQPYQPFPGACLNGEQEDRRSGTIALHRMEATD

SEQ ID NO: 408305 - protein, 347 aa, unidentified
MLYVGLDLSRKRLDWRALEPEGAVVGGGAVPPDRDGLGLLARRLGDAGQPIKAVIESMTGARFVHDQLELAGWDVRIADAVKARGIAPLACKTDRIDCWVLAELARLELVPEIWLPDPRVRAERERARFRLHLVKHRNSLKNRIHAILFQHGIANTSSDLFGAGGRRLLERLALPEPWASTVRASLQLIDNLDEQIDACALELRQLGADHRYIPLLLTCPGIGWVLAFTIASEIGDINRFPSPRKLVGYTGLCPRVDQSGERDRRGPLRKNGPNYLRWALVEAAHTAARSHPPYTTIRERMQTRHGKTRGTKIAAIEIARRLAEANWHMLTKNQPFTPASAPASLAA

SEQ ID NO: 408306 - protein, 436 aa, unidentified
MRGCRCSMIMGFTKPIEHFNLQRKKVITMNTLYVGIDVSSKSNVVYLMLPNGDKHSNFSVANSHEGSTQLVKRILSALTSHSLDTVLIGLEATSVYGDNLVYFLREDATLAPFNRKIHVLNPKQVKKFHDTYNDLPKNDYVDSFVIADCLRFGRINKEVYLGDYRYKALQNLTRARFFAVQNLIKEKQRFMNVLFKKYSTMTQEKVFSDAFSTTALAVYDEFESAEALANMDLHELTDFIMEKGKNRFPDPDAVAKAIQKAARSSYRLPKTVNDSVNQVLSISITSMKALESQIKEFDKAIKAQMELLPNVLISIPGIGPVYSAGIMAEIGDINRFDNQAALAKYAGLAWKQHQSGSFEAEVTRLIPSGNRFLKYYLYEAAFSLVRCDKEYSDFYHLKYKEVNRCQHKRALALTARKFVRLVFRLLKDNRLYVPAK

SEQ ID NO: 408307 - protein, 356 aa, unidentified
MSRDLKYIGMDVHKEAVVIAVLNSSGKLVMESIVETKASSILQFIHGLRGELHVTWEEGTWAAWLYDLLQPQVKRVLVCDPRRNALLKEGNKSDKIDARKLVDLLRTGMVRPVYHGEHGLRTLRELGRSYQTISQDLNRVMNRIKALYRGWSIPCAGTQVYAPRYREQWLQKIEHVGVRRRAELLYQQLDGLQALRRTLRPELLAESRKHKAAKLLRQIPCIGPIRAARLIALMQTPHRFRSKRQLWTYSGLGIETRDSAQYCYVHGQLQRTKKPQQIRGLNRNHNHEMKAIFKGAATRASCGVGPLRDFYVALVAKGMKPEMARLTLARKIAAIALTLWKKEERFDAEQLKPQAA

SEQ ID NO: 408308 - protein, 374 aa, unidentified
MTTRQRSTSSSTDPPVPSEVVLGVDTHGEVHVAAVVSPLGKVLGTESFPATADGYRRLLVWARRLGTVRRAGVEGTGTFGAGLSRYLLAQHVQVYEVNRPDRTARRLLGKSDPLDAQAAARAVLSGHARARAKSGDGPVHSARMFKLAKDSAVKARTQAINQLKAVLVIADPALRERLSRLGNRELFRTCARLSPRDGEDGGGDEDAVAQATHITLSLLAQRIEQLTAQIDELNQRLTRLVERHAPQLLTPVGIGPDSAVTLLITMGDNPERLNSEASFAALCGVSPVEYSSGRRNSRRLNQGGDRQANAALHRIVFTRLRTTRAPRRTTNAAPRRARPDVRSSDASSDMPPARSSTWSGRYPASPRYRSLPPL

SEQ ID NO: 408309 - protein, 510 aa, unidentified
MRRCVLSVFHPLIRYLSYGLIWWQIKHRWVKLLAVSNREQPSPIGERSATRTFLIRRCERLQRTVRRACRDYTVKSMLRRQRPHRNTVTRVHRWASIHRRDAMLYWGIDWSEHTQFVCICNAQGARLSQFNFELSAAGLQRLERERMQLAAPAADCLVAIETTQHLLVDYLLDQHYGVYWVPPNATHAYRNRQRSSQAHTDQSDAALLAEIVRTDRASHVRLQPNLPLTQQLHALVRLSETLRRSIQRQSNQLRAWLVRVFPAALELFADLTTQTALHVLSAYPSAPAARALSLDEFRTFCCAHGYTRPQRLAARYAHLQAAWPQASPALVQAAQEPVRLLASLLLPQVQARAQLHTQLQRLFVQHPDAPIFDSLPDAGVLLAPALLVKFGDQRERFPNAQSVQALAGTCPVTERSGQKRWIHFRHGCDHEFRRISQQYARASLRSSGWAQAYWAELRPHCRSDSHAYRCVANRWLAIIWKLWQTRQPYDEAQHLQHRAARRRPLAVPLH

SEQ ID NO: 408310 - protein, 344 aa, unidentified
MKITTIGIDLAKIVFQIHGVDERGKVGVRKQLKRAEMSVYFANLEPCLIGMEACGSAHHWARKLEGYGHTVKLMAPQFVKPYVKTNKNDMADAEAICEAVSRPNMRFVAIKTVEQQAILSVHRARQGFVKARTAQGNQIRGLLSEFGIIIPQGIRSIAKQIPEILEDGDNGLPGTMRNLLERLTDNLKEMDRQVNELEAKIQLWHRENVASCKLAEIPGLGPITASAIVATVGDAREFKNGRQLAAWLGLVPKQHSSGGKPTLLGISKRGDTYLRTLMIHGARAVIRFAENKAEPNVWLGKLMARRNKNIAAVALANKNARIVWALLANDRIFRPDYTPAAAGM

SEQ ID NO: 408311 - protein, 369 aa, unidentified
MENNITVVGLDVHKDNVVGAVLPPGAENVKDIFTIENTPKALVKTVKRLGERRPVTFVYEAGPCGYDVHRQLTQLGLKCVVIAPGKIPVKTGDRVKTDRRDAEKLARLWRAGELTEVRIPTIQEESCRDLVRVREDALEDRLRAQHRLSKFLLRQGRIFREARAWGAVHEAWLKAQKFEPYELQETFDAYVRGKQEAYERLRSLTIQVEGLADQEPYRKLVKHLRCLKGIDTLSALTLAVEGRDLRRFGSARNFMGYSGLGICENSSGGKIRRGGITKTGNAHLRRILVESAWSYRHGKSTGLALQQRREGCPLGILKIARRAQERLSHKFSKMIRRNKPAQKTAVAVARELAGFVWAIAQETAATETA

SEQ ID NO: 408312 - protein, 414 aa, unidentified
MDVIVARCAGLDVHKKTVMLAVRTPRRGGGRAEVVREFSTFTDGLVELRDWLVEARVTQVAMEATGSYWKPVWHVLEDAAGFELLLVNPTHVKKVPGRKTDVSDASWLAQLLECGLLRGSFVPPVEIARLRDLTRYRKKLVQERTREVQRIQKLLEDAGIKLHSVASDVVGKSSRQMLEALIAGERDPEVLAEMAKTRMRSKIPELRRALVGRFEEHHALLARMHLDHVDQLDELVRRLDTEVDQLMAPFAEPATRLISIPGIAKRNAEVIVAEIGTDMSRFPDPAHLASWAGLAPGNYESAGKRKTGRAPKGNPALCSALCESAWVATRSDTYLAAQYRRFRRRFGAKSEPKAIFAVAHTMLGIVWHVLTSETTYQDLGADYFERRTDTEARQRYLVRQLEALGHQVTLQPAA

SEQ ID NO: 408313 - protein, 338 aa, unidentified
MELKRVGLDLAKNVFQVHGVDGYEVVRCRRQLRRSEVLKFFAGRPPCLIGMEACAGAHYWARELAKLGHTVKLMAPQLVKPYVTSQKNDANDADGICEAVGRPKMRFVAVKTVAQQEVQAAHRIRSELIRHRTAKVNQIRGLLAEFGLVVGRRIEVLRRALPELLEDGDNGLSGGVRRLVDGLRRDLVQLDERVAEVEAVIVAEARANEACARLQTIPGIGPLTASALVSAVGDGRQFKNGRQLAAWVGLVPGQDSSGGKPRLLGISKHGDTYLRTLLIHGGRAVERTCGAKTDPRSRWLRAVGERRHRNIAAVAQANRNARIAWALLTRGESYRAPA

SEQ ID NO: 408314 - protein, 314 aa, unidentified
MRIVGIDVSKDKVDAAIVSASARMSFTTSEQDQQQLLSWLDDHEVGKAVMEASGGYERRWARILHGAGIEVRIVDPKRVRHYAKAAGQEAKTDRLDAEMIALFGETFADQPGRPHDGDSEAVDQLVSGRARLKLLAVQLANWTEHEAPAELQQIYQELGGLLESRLGSLEKTIAERIGQTERLATRAEIIESVPGLGPGSAAGLIAWLPELGLVDNKAIAALVGVAPYADQSGSRDGQRSIRGGRRKLRNLLFLPVVGAATRNNPVLKAYYDRLIANGKEPKVALIACMRKLVVILNTMIARGEKWQPEKHIQS

SEQ ID NO: 408315 - protein, 343 aa, unidentified
MYYIGLDVHKKTISFCVKDAAGHVHQEGKVGSTRRELDAWIQTLPQPRMIAMEATIFTGWIYDHLLPHAEKVKVAHPLMLRAIAAAKKKNDKIDARKIADCLRCDFLPECHMASTQIRDRRRTLRYRNLVIRQTVQMKNRISGLLMETGVDYNKRRLHKVGYFEDLMSTNKEVDQSIRPLLKLSREMIERGQKLDYALVSSLERDPLLAERLQRLRTVPGVGPITALTWALEIGDYTRFQSIKEAISYCGLCGDEKSSADKVLRMPLSKQRNKHIQRTLIEAAKFATRFNHELAEIYEKKRDRGNANRATLAVARKLVAYLLAVDRRKQNFVSAEEFRATPAA

SEQ ID NO: 408316 - protein, 371 aa, unidentified
MKQQTKSSNITVGLDLGDRRHRFCALDERGEVVEQDSICNDRVSLRKLAGRYHAALGVMEAGAHSPWISRFLEALGWRVVVSNPRKVRAIYQHERKSDQRDALMLARIGRMDLALLYPVRHGTAEAQQDLLRIKLRDSLVRARVAVINSVRFTLKSLGYTVRNPSSARFHKVVMEEVPESVREMITPSVQALAELTARIKMLELEINTLAQMKYPQSAQLQQIPGVGPITALYFVLKIEDPNRFAHVRDVGAYAGLCPRRDQSGESDPQLRISKRGDAYLRRLLVSAAHYILGPFGPQSALRAYGLMLAADGTARAKKRATVAVARKLAVLLLSLWKSQQPYQPFPGACLNGEQEDRRSGTIALHRMEATD

SEQ ID NO: 408317 - protein, 394 aa, unidentified
MVLKEWLEPDAGRPARPVLRGRRRSDAPLLPDKDSITAAYAMGLDEVELFGKIGTTQMEVDRLCKRLQSKARHVHVVYEAGPCGYGLNRRLVEKGFESMVCAPSLIPRKPGDRVKTDRRDAFKLVRSLRAGDLSAVHVPTVEDEAFRDLARAWSSARDDLKQARQRLQSFLLSHGVQYSGRANWGPAHRRWLSILSFNSAWQQLAFNEHRRTIEDRLAQCERLEVALREAVAGWRFYPVVLALQAMRGIQFTSAVGLVSELGDLSRFDHPRQLMAWLGVTPSEHSSGSKRRQGSITKAGNSYARKLLVESAWSYQHPARVSKDIQSRQEGIPKPIVDRSWDAQLRLCGRYRRLVARGKSRQVAIIAVARELAAFIWDIGRMGMTLAVPQSEQPA

SEQ ID NO: 408318 - protein, 359 aa, unidentified
MAMTVAIDLAKTVFELAAADETGRIVERRRVSRRQLEQYFANRSVGKVVMEACGTAHYWGRWFARRDIRVVLLPAHYVRAYVRRDKTDRADATALLEASRAPDIIPVTVKSVEQQALQGLHRIRSAWRATEIARSNQLRGLCREFGIVAPLGDRGVEQLGRAINAKGSEVPEFIRDMLYQLLEEIRELKGREIGVERQLGEIARQSEVCNRLYTIPGVAVLTATALAGGVGDIHTFRNARCFAAWLGLTPREHSSGTKRQLGSISKRGDGYLRMLLVFGARAVLWSANSAKRAGRPLDALRAWALRVEARTCHNKAAIALANKLARIVWATWHRGQDFQLRASFLRRPETTTSLEMLIR

SEQ ID NO: 408319 - protein, 482 aa, unidentified
MKPTQKDKSKTATGRPTQPSWQEMNRKQRREMLRKIQSEELRLDVIHPDAAGIDIGNESHYVAVPPSRDSQPVRRFGCTTAELKVMAGWLHQCGIRTIAMQSTGVYWIAVYDILEEAGFEVYLVNARETKNLPGRKTDVQESQWLMKLHTYGLLRNSFRPPQEIRTMRTYWRQRNDSVQAGARHIQRIQKALTQMNIQLANVLSDVSGMTGQAIIKAILAGERDPHKLAELRDPRVKASEEQVERSLEGHWQEDLLFVLKQEQDGYEFCQNQMAECDRRLEQYLQQQKDRSQGASLPEEKRKERLKKKKGNKPRFDLRTGLFRMAGVDLTQIDCIDVMTATTILSEAGSDMSKWETEHHFVSWLRLCPDNRISGNKIIGKGRLPTSNRITSALKMAASTLRTSNTYLGAQFRRLRTKLGAPIAIKAMAAKLARLIYRMLRYGMKYVDQGAEFYEVQHRKLQIKHLKSKAAKLGFQIVQAPAA

SEQ ID NO: 408320 - protein, 355 aa, unidentified
MQLQDALIKPKIFIGLDIHKKSWTVSIQTDLFFHKTYSMPSVAEDLYQYVERTFPDHEVNLVYEAGCCGFTSARYFLNLGWNVLVVNPADVKTSDKERYQKTDALDSKNLSNQLKAGVLRGIHIPTEEQEQFTTLVRHRTQVTKKLRQTKTHIKSMLLFHGIKVPDEFDNSNWTKDFVLWLENIKFTTTCGNLALQGKIRMYKFIKSEYLEIANQMRAYSRKNQKKDYNLLRSIPGIGGYLASVILAECGDLRRFSNERQFSSYIGLVPGIYNSGDSEKCLGITPRSRSQLRSYLVEASWIAIRKDSEMQNYYRKHQGKNVKSIIIKVAHKMSRRILSVIKTETPYQINRNLATL

SEQ ID NO: 408321 - protein, 405 aa, unidentified
MNAVGIDVSKGKSTVTIRKPGDVVLMSPCDIPHTQSAINDLIIQIKSLKGETKVCMEHTGRYYEPVATWLSDAGIFVSAVNPILIRDFGDDSLRTPKTDKADSKKIARYTLDRWAKLKQYGIMDKTRNQLKTMNRQFGFYMAQKTAMKNNLIALIDQTYPGANDFFDSPARNDGSQKWVDFIHTYWHVDCVRSKSLNAFTEHYQNWCKRKNYNFSAEKAAKIYQISSDLIAVFPKNDITKMLIWQAVALLNTASKTVESLRSKMNELASTLPEYPVVMDMNGVGATLGPQLIAEIGDVSRFTHREALTAFAGVDPGKNDSGKHIQNSVRTSKKGSPYLRKALFQIMDSLIKRSPVDDPVYAFMDKKRSEGKPYYVYMTAGANKFLRIYYGRVREYLSNLSNNETI

SEQ ID NO: 408322 - protein, 347 aa, unidentified
MDHIIIGVDTHKSNHIAVAINAQGARLGVVTIPTNRQGYRDLEIWAAKFGRIKAFGIEGTGSYGAALSRDLLVKGHTVLDVMRPNRQLRYLHGKSDSLDAESAARSVLNGQASALAKTQTGSSEMIRHIKIVRDSAVKVRSQAMITLKTMIINAPAELRDTLDQIKGPISLIRHIAALRPGDIASPTASAKWAMRALARRWLALHEEIQAHEVELERMAREKAPELMKSHGISTQTVAEMLILVGDNPERIKSEAALAKLCGVCPIPASSGKTNRMRLNRGGNRQANAALYRVAIVRMRDDEKTKTYVTRRTAEGKTRREIVRCIKRYIVREIYRHLCLPPTAASST

SEQ ID NO: 408323 - protein, 355 aa, unidentified
MTANRACVIGGVDTHGRSHHAAVIDSAGRVLGSAEFEANAAGYRRLLAWMRRHGELAQIGVEGTGTYGAGLTRHLLAEGVPVVEVDRPNRRLRRQRGKSDPIDAEAAARAVLAGTATVPPKDRGGIVESIRALRTARSGAVKARGAALNALKAMIVSAPAELRAALDDLHAVPLVTTCAALRPDQQRLSDPLQATKAALRSLARRIVALDAEITELDAALTQLVHRAAPHTISLLAIGVDHAGQLLVTAGERPERLRSEAAFAHLCGVAPVPASSGQTQRHRLHRGGDRAANRALHLAVVVRLRCCPRTRAYVERRTQEGLSKPEIMRCLKRYLAREVFHTLSADLQELHGLDGI

SEQ ID NO: 408324 - protein, 343 aa, unidentified
MDHFAGLDVSVKDTSVCIVDGAGKIVREVKVASEPDALLQVLTNPIYCFKRIGLEAGPLSQWLFSALGEANLPVICVETRHMRAVLKAQINKTDRNDARGIAQMMRVGLYRPVHVKTLRSQKLRMLLTHRKLLQSKAIAIENDLRGTLRNFGLKVGMAGRTKFEARIEELVEEIPDLAALVKPLLVVRRVVREQIAVLHRRLLAIVRDDEVCRRLMTIPGVGSVVALTYRAAVDVPARFRKSKSVGAVFGLTCSRDQSGERDRPGAISRCGDEMMRTMLYEAAQCMLVRSTRWSWLKAWAMQIAKRRGIKRAIVALARRLAVIMHRIWMDGTEFRWTREPVVA

SEQ ID NO: 408325 - protein, 355 aa, unidentified
MDNAKYIGMDVHTETISIAVLNSTGKLVMESVIETKALTVIQFMQGLRGDLHVTLEEGTWAAWLYDLLRPHVHQVLVCDPRQNAFLKVGNKSDKIDARKLAELLLSNLLRPVYHGEHGVRTLKELSRSYLAIRGDLARVMTRLKAVYRSWAIPCVGKQVYAPRYRAEWLGKLSEAGVRRRAEIYYEQFDALRSLRQQVRRELLAESAKHKASKLLCQIPSIGPIRAAQLIAILQTPYRFRTKRQLWAYGGLAIETHSSADHRYVDGQLRAAKKQVSLRGLNRNHNHELKNIFKGAAIIAATKPGPLQDFYAALVAKGIRPEMARLTLARKLAAITLIVWKKGVSFDAQHLKLQTA

SEQ ID NO: 408326 - protein, 338 aa, unidentified
METYAGIDLHSSNNFIGVINDKDKILYGKRHANRLDDVLKALDPFKDSLKGVVVESTFNWYWLVDGLQEHGYRLHLANPSAIQQYEGLKHTDDQWDSFWLAHMYRLGILPEGYIYPKEHRAVRDLLRRRLLFVRHSTAHILSLQSMISRNLGFKMSNNEIKKLKPADIESLFDCSNLVFMANNSLAAIEFLKKITKGIEKKVKSQVKMRKEFEMLLTIPGIGNILGLTINLEVGDIGRFPKVGDYSSYCRCVESKRLSNGKKKGENNKKNGNRYLAWAYVEAAQFCRRFCVKAQSFYQSKEAKTKPVVAIKALSNKLSKASYYIMRDQVAFDEEKLFG

SEQ ID NO: 408327 - protein, 354 aa, unidentified
MAEALKNSIAFVGIDIGKNSFHVVGLDECGAIVLRQKWSRGQVEARFANMPPCLIGMEACVGAHHLSRGLQKLGHDARLMPARYVRPYSKGQKNDFRDAEAIAEAVQRPTMKFVATKTADQLDLQAMHRVRERLVSQRTGIINQIRAFLLERGVAVRQGLRFLRSELPGILARPSDMLSPRMVRIIEDLAGDWHRLDERIEGLSSEIEAIARRDSSCERLMSVPGIGPIISSAMIAAIGAGDVFSKGRDFAAWLGLVPKQISTGDRTVLGKISKRGNRYLRVLFVQAAWVVLIRPKSWERHGLKSWIEAAKKRLHRNVLAIALANKLARIAWSVLAHGRSFEASKLAEVAAKSA

SEQ ID NO: 408328 - protein, 340 aa, unidentified
MKRYLGVDLHRNCFTVCTLKEDGQSELRKWSIHSLCDFAQEVQATDAVAVEATGNARYFCQALKERGCRLVVVNPHQFQVVSRSVKKTDAHDAKTLAEFLAKDMLPEVRMKEALPAEIASVLQTRDKLVKLRTVLKNKINNLLAGRGILIRRESLSSDKGLEQVLQAPVSDLERVELEVLVGQIRHLNDSIRRLEAAIKEQGPKLPGYESLKSIKGIGDIGGSTMLSTIGDINDFASEGKLAAYFGIVPRVQNSNATERSGRITKRGSKLGRTALVQCALIAMRYSPYLAHYYARIKAARGTGKAIIALARKFLGIIYKTLKNGWVFEDFPAFVLAPAAG

SEQ ID NO: 408329 - protein, 329 aa, unidentified
MYYVGIDISKRFIDVCLLVDGIKGKRKTKVLPNDLNSAQALAQWLTLQKCDPSQAHIIMEATGVYHEHLADGLHQSDILVSVINPHRVREFAKGMGILTKTDKVDAYVLACYGCLKQPENWLPPSQEIRKLKALLQHRDSLLNDKQRIENRLSTLKSTTAPEEVLTSLESIEQNLKDELARIERLIAEHIDKHPRLKNDLKLLKSIDGVGEQIGWNMLAIIRGNNFRSAEQVAAYLGVIPIERRSGTSVCGRARLSRIGPPGIRAKLYMGAIAAISWNSHVRALYERLRLKGKEKMVAIGAAMRKLVHLCYGVLHTQQPYDKNHGVVAG

SEQ ID NO: 408330 - protein, 344 aa, unidentified
MEKKLNVLGIDIAKQVFHLVGMNEQGTILLRKRLYRAQVMAFIAQLPPTLIGMEACGGAHYWARRFREHGHEVRLMAPQFVTPYRKANKNDMRDAEAIAEAMTRPTMRFVPVKSGAQQDLQALHRVRERLMKARTALINETRGLLHEYGIIVPQGAATFRKHVLEKLTTEAAKLTPHSLELFRQLLEELAALESRVATYDAQLAQVAQTHPVCQRLMTIPGLGELTATALVAAVHDATRFKNGRQFAAWLGLVPRQHSTGGKSRLLGISKHGDSYLRKLLVHGARSCLRWVGRKRDRRSQWVQSLMERRGWNKAAVALANKNARVAWVLMGTAQVYRTAEASAA

SEQ ID NO: 408331 - protein, 391 aa, unidentified
MVCVGIDVAKDKHDCCILDSEGTTLVDCFTIPNNMDGFKSLLQTIQDCSQKSDKIKVGLEATGHYSYNILGFLLDNDLPVYVMNPLHTNLYRKSLSLRKTKTDRVDAKTIATMLLSDVDLKSYTDTAYHNEELKSLTRYRFDKVQERAKLKQSVSRLVTILFPELEQLVSSIHGTSIYALLSEYPGAKQISEAHLTRLANILVKTSRGHYRKDKAAHIRDAARTSIGSVMPAKSLELKHTIKLIQELTSEINEIEDAIRKIMDELKPPILSIPGMGFHSAAMILAEVGDFSNFNSPDKVLAYAGCSPSTYQSGKLTNCYAHMEKRGSRYLRYALYTATKYVCYWNPVFTEYLTKKQAEGKHYNVALSHATKKLVRLIYALQKSGKAYLAVT

SEQ ID NO: 408332 - protein, 407 aa, unidentified
MAKVIIGVDPHKLSATIEVVDRREKLLGSGRFSTDQAGYTAMRAYVKAWPERVWAVEGSNGAGRPLAQRLLEAGEYVVDVPAKLAARVRLFDTGHNRKTDARDAHSIAGVAVRTKALRVLSADGELEALRMLCDRREELTRLRVQTVNRLQRLLAELIPGQGKKDLTALQAKTILATVRPRDIAGKTRRRIAVEELADLVAVEAKMKKATAELKTIVLARGSRLMDIHGVGPVVSARILADVGDITRFADRNRFASWTGTAPLDASSGEQDRHRLSRAGNRRMNHMLHIAAVTQIRLDTEGRTYYRRKRTAGKKPLEAIRCLKRRLSDVVYRQLVADAQRAALANSPEVTGTGPGGHCGATQESSAVDLPPHIDTSDQPLPGPAKPTLQPSRTVRKSPSRKTPQTTG

SEQ ID NO: 408333 - protein, 412 aa, unidentified
MEVYCGIDWAEDHHDIALADRDGQLLARRRISDDAAGLAALLALLAEHGDTPDAPVPVAIETPRGLLVACLRATGRKVYPVNPMAVARYRDRHSVAGKKSDHGDSFVLANVLRTDLHAHRPLPADTELAQAIAVLARAQQDAVWDRTQACNRLRSHLREYYPAFLAAFAPLKGGITRPEARAVLAAAPTPAGAAKLTLTQLRAALKKAGRSRGTDTEAARLREAFRTEQMRQLPLVEQAMGRQALALLRQLDAACAAADDLEHAATESFNQHPDAGIITSFPGLGALAGARVLAETGDDRSRFSDAKGLKAYAGAAPITRASGKTRSVTRRRVKNNRLNAAGYIWAFSALTASPGARAHYDRRRGAGDRHAAAQRNLFSRLLGCLHHCLITGQHYDEATAFPAPASQSRHAA

SEQ ID NO: 408334 - protein, 357 aa, unidentified
MKIVGCDLHARQQTIAMVDTETGEFTEKTLCHEGDAVRAFYAALEGLVVVGIEATGSMQWFLELLEEWGIECRVGHPAKIRAKETRKQKHDRRDARLILELLIEDRFPEIWMPSTEERDLRTLLRDRHQWVKMRARLQHTLQAIALNHALRQGHALWSQAGQSALQALPLPPYTSQRRAELLSLYVQLQKRIQELDKEVEAQARQRPPARRLLTHPGVGPVTALATDVFLGDPSRFATANQVASYIGMIPCEHTSGKRQRLGKMSTQGNSLLRYLWTEAAMSTVRKDPELQRFYRRKLIQKGMGKARIAAARKLGIRLWIMMRDQIDYEEFCRRGKLRQKGKAHAGMPDFNSGPAQQ

SEQ ID NO: 408335 - protein, 433 aa, unidentified
MPKSKSQSVVQTDDDALYYERCAGIDVHKKLLVVCLRIGRKCESRDFGTTTGEIRGMTAWLKDNGCQMVAMESTGSLWKPLYNIFEQEQLPAMVCNAYHIKNVPGRKTDWNDAFWIAKCLAQGLLKPSFVPGREQRELRDMTRFRKSQIEERARNINRLQKFLEGSNVKLGSWLSDVEGKSAAALLELVIGKPDFTLADVKSRMHGRMKSAPEMIFASLESCITPTQRIFLTHVMDVIRQQTAQIEKTDTMIKASLNEDQKSAVKALDEIPGIGVISAEQIIAETGTDMSHFRNQHAFSNWTGTAPGNNESAGKRKSGRTNPGNKTLKSTLVQCAKSAANNKHSFFSAQYSRLVPHRGKNRATMAVAHSLVIAIFFVLSGKEFQDLGADYYTQFNREKKINSHIKQLSKLGVTIPDDLLQLAIQHPPEPLASA

SEQ ID NO: 408336 - protein, 361 aa, unidentified
MYATTVAVDLAKSVFQLAVANAHWRVTEQHRLTRSQFEKWFSNRAVSLVVMEACGSAHHWGRWLNSLGIEVKLLPAAYIRAYVKRNKTDAADACALLEAARCADIIPVKVKSIEQQALQGLHRTRSLWMGTRTARINALRGFCREFGISVAAGSRNGLEQISRVLADPYSAVPGLIRGTMTLLVEEIRLLEVRIAQLERELTELAKQSPACTTLLSIPGIGLLTATAMVAATSGQVSHFKDARHFASWFGLTPKEHSSGSTRHLGRISKRGDRYLRMLLTHGARSVLRAASVAHAAGRQIDGLRHWALTVQGRTNHNKAACALANKLARICYAALRDGEPYTGMVTRMNKKIERTAYAMPA

SEQ ID NO: 408337 - protein, 355 aa, unidentified
MTITAYRPKDYNTFIGLDVDKNNFSFTVYTHSQQKISKRIPSNPDHLYNYIQKAYDLKKVICAYEAGPTGFHLYDYLLKQGICCFVTSPSSIPKAPNERVKNNRIDSSKIADHLMSGKLKPIRVPEGIYRELRHLVMIYEENAAQRKVAKQRIKSLLLYENLYPLIKDAENNWSSRYIKELKNISCSFAVRQRLDLLLDDLAYARQKVLWTLKTLKNFCKEHDETHQYLHYLQSIPGIGFIIAVTLLGKIGDPAYLHDPRELAAFIGLVPTEHSTGDEIHKGSITRLGDKTLRFMMIEAAWVAIRFDTQLGQFYYRIKQRHHPQSASKIAITAVARKLTQIVYRVLKDKREYIQH

SEQ ID NO: 408338 - protein, 506 aa, unidentified
MTTPTTRTTRRKPDPSSTSGPQTQARAHRQAHNRRKTRAKAKSEALHQKEAAQVQALPVLHPHATGIDIGSRSHWVCVGFTTEADSGLIQEFPSHTDGLKALAAFLHEHQVTTIAMESTGIYWIALYELLESEGFEVLLVDPSYTHQLRGRPKTDRRDCQWIYRLHSVGLLAAAFRPDEKTCQLRAYLRQRANLIRQASQHVQHMQKALEQMNLKLTEILSDITGATGRTILRAILRGTRAPEKLAQYRDKACKASETEIAQALTGSYREEHLFALKLAYEAWQFSLKQVEKVDGQIALQLGRMKCDRALPPLTLKKRLSRKINVPRFDVRMALYYVVGLDLTEIEGISELTALTIISEIGPEVSKFPTVKQFCSWLGLCPNWKKTGGRVKSSRTRRGVNRAATAFRLAAHGLHRSQGALGAFLRRMKARLGTPAALTAAAHKLARIVYLALKHGLPYVRKSQAEYEAQMKEKQLQALQRKARQLGLELIEKPSACSGTAETPVQG

SEQ ID NO: 408339 - protein, 352 aa, unidentified
MNKIKYIGMDVHKATTVIAVLNHLGKVISEAIVETKGVSILDFLKSVRGTLHVTFEEGTQAAWLYDLIRPHVALVLVCNPKKVAVQANKADKRDARRLAEMLRTGSLESVYHGEHSTRPLKEFAQSYGAIVSDSTRVKNRIKALFRGRGIECSGTAVYDKAQHEQWLNQMSMPALRLRSSRLFRELDFLTDLRAEAEKDLVMETRKHPAAKILQGIPGIGPLRAGVIIGFAITPYRFRTRKQFWTYCGLAVMSHITGEYVVVEGRVRRSQKLPLVRGLNHNYNRSLKEVFKGAAATAAMGPWKSHFDAMVEKGTEPSLALLTLARKLASTTLVLWRKGERYDEFKMNKSHVA

SEQ ID NO: 408340 - protein, 362 aa, unidentified
MAKAMTLVGLDVHALQTHAAVLDPATGELDVRKLRIAPEEVVSFLERLGRPVRAVYEAGPTGFGLARAARERGIDVQVAAPGSIPKGADDRVKTDRRDAVRLARLLAAGELRFAFVPSLADERFRDLVRSIEDVRGDLMRARHRLGKFLLRRSERYPGPYRAWTGAHLRWLRALRFDDPCSQATFVDYLAAVELLLGRRASLLEALEQAIPACSHEPVIARLRCFRGIDTLSAAGLAAEVGDFGRFPKPSPLSGFLGIVPSEHTSDLKRRQGSITKAGPPHARRLLVEAAHHYRRPPRIGEPLARRQHGQDARVIAIAWRAQRRLHQRWQHLREQRRKPVGVVAIACARELTGFLWEAATLD

SEQ ID NO: 408341 - protein, 371 aa, unidentified
MPSARQLGERGKAWQGRSVVRGAEPFSSKTSNGCLGTSPHSQARGVRRGKGTRLERPSEGQTVFVGIDVSKARLDVAFRPEGASFQVSNDEAGIGDCVRRLQALRPELIVVEATGGFETALVAGAAVVGLPIVVVNPKQVRHFAKAIGRLAKTDSIDAGVIARFAEAVRPEVRPIQNEAGELLTALLSRRRQVLEMMVAEKNRLVTMRERHVRQRITHHLHFLKQELRELDKDLDKEVRSTPAWREKEDLLKSVPGVGPVLARTLLAELPELGQLDRKRIASLVGVAPMNNDSGSLRGQRRIQGGRAQVRTVLYMAALVASRFNPRLKRFYDSLRARGKTGKVALVACMRKLLVILNALVRTGERWNAEAT

SEQ ID NO: 408342 - protein, 344 aa, unidentified
MIYLGMDISSKNFIVHGIDEKKRVLINGEIAPTRVGLKGMIRGLGDQKKLVIFEAGNQLKWIAKTLKDMEGVEIHVVHPNEIKWINQISGKTDKIDARKLAHLGRGDMLPRKVHIVEGKIRELRELLSARQRLQGKRVALINSIRGQMKQEGHSLPAKFFQGKHWREKLKGITIGEVQKLIIESFMESIDSLLISDEKLTEKIGTIKDKRIELLESIPSVGRLSSRVVISALDDVGRFDSKKCVAKYGALTPRIYQSGGITHLGRINRDGRQEVRRVLLQCAHVIARMRSYGARPLREFFERIMKRRGKKIAIVAVARKLLTIAYGVLKSKKAYDPLRLPGVSA

SEQ ID NO: 408343 - protein, 374 aa, unidentified
MSRSIIYLGLDVHQDSITIAVLPAGAPAPTRVERLPNDLAKLRRFCERLAAQGDLRACYEASGAGYVLHRAMREWGYPCDVIAPSLIPTKPGQQRKHDKHDAAQLARLYRAGELTVVRIPSEAEERVRDVVRCRETLQREVLRSRHYILKFLTRRGFVYREGTNWSTAHYNWLRRLAAASSPLAVEDQMVFGEYLGLLEYKLSRRDELDRRIAELALTPALAPAVNRLQCFRGVQRHVAMVLTTEIGDWRRFASPRQLMAYLGLVPKERSSGDRERRGSLTKAGNSHCRHALVQAAWAYRYQPKVGTALKARQQGQSPVVIAHAWKAQHRLHTLYRRLAFRTKPQIAVVAVARELVGFLWAVMQEQDLSSRAAA

SEQ ID NO: 408344 - protein, 408 aa, unidentified
MKYLKQIVGIDVARKELVVTLGRMREDLSIELCARKTFANDKNGFWSLVCWAKKLTDNSVSIRFVMEATGAYHELLAYYLDERGDEVSIILPSKISNYVRTLETKTVTDKTSADAIARFGLERQLERWHRPSLVYATLRQLTRERNQLLDEQTVAKNQLHAELAGALVNKQSVKRLGERLALCERQSKEIEKELSAVVKADKEVGDQVVLLCSIPGIGFLTAVTLLGETNGFDLIRNKRQLTSYAGLDVREKQSGTSVKGQSRISKRGNKHIRKALYFPALAAIRCDERYKSLYQRILSRTGKTMKGAVAVQRKILEMAYTVFSTGVKYDKQYLAKQEAQATAAQSQATQAEQEKVAGQPTEELSTVAATSPAAAAEPSVASEQPQSKGMIRKEKNILQLVRKAELVE

SEQ ID NO: 408345 - protein, 355 aa, unidentified
MDSIKYIGLDVHRDTISVAVLNGEGKLVMQSVLATRASAILEFLHGVRGSLHVTFEEGTYSAWLYDLLVRRVAYLVVCNPRKNALLKAGSKSDAIDARKLAELLRAGLLSPVYHGQNSTAAVKHLGRSYAALTEDTTRIMGRVKALYRSQAIACAGSKVFGARHREEWLAQLSDSGLQRRARRLYQELDVLQQLRREARQDLIQECRKHREAKLLRTVPWLGPIRVALLLGRVQTPHRFRSKRQFWAYCGLALETRDSGEYCVVNGQIERKKKPLFIRGLNRNHNHDLKNLFKSAATTASGSAGAFGEFYENLLKKGMRAEMARLTLARKIAAITLHVWKKGEAFDAEYVKPQAA

SEQ ID NO: 408346 - protein, 422 aa, unidentified
MVKNNRKENTMKEKVYVGIDLAKDSSRVAAFDETGEALVKPFSITNSKEGIKKLLSRLSGYKASQIVCGMEISSNYWENMCSHLKGMDVGIILLNPYQVNKYRQATGAKIKTDTIDAEAIADLIRGRKYDSLYISDDTTIELRELVRIKYGFQRRVKDLKKSVLALLFLVFPEYTKMISRPFSKVSMEILSKYPTSCHMAKVSPSRLVKIFRRYQGCNFDLNKAKELISAAKDSFYSGRASKSRGLSITMQLDEIRSLSQKIADIEEEIKYILCPDDPSGGSSYYNTLNSIKGVGIGTIAAFLGCVGDVSRFSSADKLVSFIGFYPTIFESGKYKKKGPVIQKAGPKELRYMLYLTSVSCIKHNSELKKYYYDKVSAGMPVKKAIIKVAVKLARMMYSMLKYDSLYDSSRVFLKPVSLKNAA

SEQ ID NO: 408347 - protein, 422 aa, unidentified
MNEQEVIGYSVYVGIDWADKKHDVCICPRDSDTRVFDVIRHRAEAIDDWVKDLHQRYGGRIAIAVELSKGPIVSALQKYDFIDLFPVNPSTLAKYREAFQPSKAKDDPTDAAIAVDMLLRHPEHFKVLKPQSAEMRALATMVEQRRRLVNDQGRITNRLRSALKQYYPQVLEWFEHIDTPLFCAFVKHWPTLTQARRARANTLKQFFHEHHMYREEVVERRRKAIKAASPLTLDEAVIVPYRMQVLVLVEQLELMFKAIDQFDDAIAKLASQHSDYALFEPLPGAGPSLTPRLMVAFGEQRERFSSAGDVQKLSGIAPVTERSGQKHWVHWRLQCPTFMRQTFVEWAAQTINKSYWAGAYYRQQRAKGSTYQAAVRSLAFKWIRILYRCWQTGVAYDESRYLKALERRGSPLVKRQEMLKTT

SEQ ID NO: 408348 - protein, 393 aa, unidentified
MFKIWYYLFYNRKVEERDRPTVPWVSKPVKEHGSSRSYLYATRTVAWDKDPVFLQGRVSREKKKRRKKGGKGMSKLEVFVGIDVSMAKLDIAVRPTSEVWQVSNDKTGIELLVGKLKALNPSLIVVEATGGIEIPVVGELGKEGLPVVAVNPRQVRDFAKATGRLAKTDVIDAGIIAHFGEAVRPELRPLKDEQTLKLDGLISRRRQIVEMIVMEKNRFTSAPVHIRKDISEHIKWLEKRLSGIDKELGDLIKSSPMWLEKVELLQSVPGVGPVLCATLLAELPELGRLDHKRIAALVGVAPLNRDSGTMHGIRAIWGGRAGVRYVLYLSTISAIRYNPVIKGFYKRLRSAGKKPKVAIVACMRKLIIILNAMVKNGTAWDISFGKLENGVAQ

SEQ ID NO: 408349 - protein, 316 aa, unidentified
MANSKTFVGIDVSKNTLHVAIRPDGTRWSVPNTDNGIAELVGRLEALAPTRVVLEASGGYEAPLAAALLAAGLPAAIINPRHSRHFAQAIGRLAKTDNVDAEVLALFGEAVMPPISRLPTEDTQELADLVTRRQQVIAMITAESNRLATASERVRPSIRAHLEWLRAEQKRLDKQLRSALRACEHSRELDKLLQSVPGVGPVMSATILAKLPEIGFLDRRQIASLTGVAPFSRDSGQYRGTRSVWGGRGDVRHVLYMATMSAIQHNPDIRQFYERLLAAGKKPKVALTACMRKLITILNAIVRDRTPWQSRLAVEA

SEQ ID NO: 408350 - protein, 343 aa, unidentified
MSEYDGRQFVGIDLHRRRTVIVRQGESGEQLGSSRIVNDPLALAAEIGKAGPSPEVVLEATYGWYWAADVLAEAGARVHLAHPLGIKGFAARRVKNDLRDAADLADLLRMNRLPEAWIAPPEVRELRELVRHRAKLVAVRSGFKAGVHAVLAKQGLHIAVSDLFGPRGRAELAQAPLDTAYRARVNAYCRLIDTLDREIELAAGWIAARLATHPGYRAIQQIPGVGPTWAAVFVAEIGDVTRFASARHLCSWAGLTPRHRESDTTVHRGPITKQGATLVRWAAVEAVQKLPPTAGWLVSTREQIAARRGRNIAKVAVARKLLILVYYGLRDGHIRALHNVGAA

SEQ ID NO: 408351 - protein, 402 aa, unidentified
MNCVGIDVSKGKSMIAVMRPFGEVVVSPFEVRHTASELSELARLLKNLDGETRVVMESTGNYHAPVAWLLHDAGFYVSVVNAMLVHDYGNNSLRRAKTDKKDAVKLANYGLDHWLTLPRYIPEEDTRLMLKICYRQYQQYSKVQTMLKNNLISLLDTAFPDANRLFTSPPRADGSEKWVDFVATFWHCECVCGRSEKAFTTQYQKWCRKHGYNFSQDKALDIYSSACGRFGVMPKTNTAKLLVEQAISQLQTTSSALAALKQEMQSLAASLPEYPVVMEMFGVGPTLGPQLLAEIGDVRRFHSKKALVAFAGIDAPPYQSGQIDVRSRSISKRGSASLRRTLFLVMSVILQCAPIDEPVYQFMDKKRSEGKPYRVYMMASANKFLRIYYASVKAYLESLEHD

SEQ ID NO: 408352 - protein, 424 aa, unidentified
MKVTYQTCCGVDVHKSFLVATIVKTTGGIEPSYQKKRFSTFNNSILEFKQWLLDNDCRDVCMESTGKYWIPVFNLLENEINVVIANPKWVKAVKGNKDDAKDSKWIGDLFRLGLVKGSYIPCRKIRILREYSRYRYKLVSCRSSEKNRYQNALTVCNVALDSVVSDIFGKSSTSIIDYLLEQSGISINHEEIAPKLLRSLKSKEDAVIESVEGYQMTDAQKYRMRLIRAHMDYITAEINDVDKMIENMISSNPDFENAVRFLCTIPGVKHDSAVTIISEIGTDMSQFSSSKRLCCWAGLTPGSNESAGKKKSVRITRAGVCLKPALVQCAHAAVKSDKSPYYKKKYDSLVKRRGKKRAIIAIARMILTAIYQMLSTGEQWNPSDLYKIDMPAPLLEKQKAKAIKQAKKLLQREGLLPPDEPLAS

SEQ ID NO: 408353 - protein, 355 aa, unidentified
MNSEKYIGLDVHQATISVAVMDSMGKLIMESILETKAATILEFVAGLRGTLSVTFEEGTWAAWLYDLLKPHVDELVVCNPRKIALLKDGNKSDRIDARKLAERLRLNDLKPVYHGETGVRMLRELARSYLNLVKDQTRVMNRLKAMYRSWAIPCAGRDVYYARHRAEWLGKIREAGVRRRAEHLYQQLDMLQHLRQQARRELLAESRQHPITAKLRQIPSLGPIRSALAVALIRTPHRFRTRRQLWAYSGLALETRTSGEYRCVEGQIRRSKKQISIRGLNKDHNHDLKGLFKGAATRASVLPGPFQDFYQRSLAKGIKPTMVRLTLARKIAAITLTLWKKGENFDAEKLKSQAA

SEQ ID NO: 408354 - protein, 364 aa, unidentified
MKQKEKHNTIGLDLGERRHRFCVLDEAGEVVEQGSLSNERVALARLTQRYRGALVVMEAGTHSPWISRYLKELGSEVIVSNPRKVRAIYQHERKSDQRDAQMLARLGRMDRALLYPVRHCSEQAQQDLLRIKLRDSLVRARVGLINSVRFSLKSLGYTVRNPSSERFHKVVWETLPQAVRQMISPSVETLAELSARIKVLEREINLLAQSKYPQTLWLQQVPGVGALTALYFVLKIEDPQRFENVRDVGAYAGLCPRRDQSGGSDPQLRISKRGDAYLRRLLVSAAQYILGPFGPKSALRAYGLMLAADGGARAKKRAVVAVARKLAVLLLSLWKNRSHYEAFPHCQTIEDKPSGTIAIHRVEA

SEQ ID NO: 408355 - protein, 344 aa, unidentified
MTDIAVIGLDLAKSVFQIHAVNQQGLPVLKRQLRRGELLKFFQKLSPCLIGMEACGSAHYWAREFEALGHTVRLMPPSYVKPYLKRGKTDARDAEAICEAVTRPTMQFVPVKSVEQQSVLMLHSSRDLLVKQKTMLINALRGHLSEIGIIAPKGVVGAKSLGGLVHENQDAWPDEMRTVAHAFLDQLRMIQTQIEKLDDKILQWHRNSESSMRLATVPGIGPVVASAIAASVPDPKLFRSGRHFAAWLGLTPRVHGSGGKDTLGRITKAGNGYIRRLLVVGVTSLLRIDRKKTPTHLWGQMLREKKPGRVVAVALANKTARIAWALMSRGETYNGTAAALSAVC

SEQ ID NO: 408356 - protein, 408 aa, unidentified
MERFYLGVDWADQFHQVWVSDFDGKKVVEKKVTQNVEGLAEFGRWLDEQRAKPIELWAAIEKPQGRIVDFLLDHGVEVYPVNPKALDRARDRFRMSRSKSDGFDAYVLAQFLRTDHGHLRALKPNSVQAQELKLLTRDQQRLGHQKTRLLNQLTATLKEYYSRPLEVFSDLETQIALDFLKQNPTPDDLSKLTRRQWNRFAKREHHLGAERAQELWEQLNQPQLTVPEHVVRAKAHLLRVLLGQLDPLRKAVKSYEERIKSFFGSMPTAELFKGLPGAKTGTIIATLSAELGDAKNRWESFRHLQAEAGVVPVTKTSGKSRVVQFRFSCNKIMRHAAYWLAFVSLNRSEWANHYYRDQRAKGHSHHQSLRALGAKWLKIIFVMWRDHKPYDENYHLANIARQKMRQAA

SEQ ID NO: 408357 - protein, 312 aa, unidentified
MDVMVVGIDVSKDRLDVAVRPTGEGFVFKRTAAGIDGLVAWLKTLSPVLVAIEATGGFETVVAAGLASACLPVVVVNPAQVRAFAMALGKRAKTDPIDAAVIAHFAEATKPQLRQLPDEMTRRLADLVARRRQIVAMIAAEGQRARRISDHRLSRSIARLRKALEKELAELDWLISDHMRGSTVWVEKEKLLSSVPGVGKTIARTLIAELPELGSLDRRRIAALVGLAPWTRRSGQWRGKSFIGGGRKSVRSSLFIGAMVAARYNPQLKQFRDKLVAAGKPKVLALVAVARKLITILNAILRDRRPWQTLPA

SEQ ID NO: 408358 - protein, 347 aa, unidentified
MKFYTTLHKYYCGIDLHAKILYVCILDQQGNKLVHQKIGADPQALLRLLEPYIGNVVVGVECMHCWYWVSDFCQAHEINFVLGHALYMKAIHGGKAKNDKIDSYKIASLLKGGNFPLAYNYPKEMRATRDLLRRRTGVVRHGASLKAHVVNTDSQYNLPAQSLNLKNISARESLRHHYDDEVVQRTIELDMVLLDCYAKELAKVEYFIERQAKQHHGAYLYIIRSFPGIGQILGLTILYEIGHITRFKSVQNFASYSRLVKCKAESAGKTYGTSGNKIGNGHLKWAFSEAAVLYLRGNDKAKNYLNKLQRRMSKGKALSALAHKIGRCIYFMLRDKTVFDENKFLKG

SEQ ID NO: 408359 - protein, 407 aa, unidentified
MISIGIDVSKSKSTVAALGFGKELIFKPFNIYHVKNDVSKLIGKIKSLDEDVKIVMEATEIYHIPILISLVNEGFFVSVINPLKMKRFCQALSFRNVKTDKKDAIHIAEYGLMNWNDLIEYKEDKEEYVRLKQLNRSYQHYQKIRINHLNYLDKEIEKRHPGLKKLIPHANGNYQKDKLIDFVEKWSSSEKILKRSQEQFVNDYEKWAKKKGYHPNAQKAIIIYQNALESIPTISSSNSKIDANVLDSIEFLRVINKTLNNILSQMKEISTELEEYKIAKEFSGIGEKLAIQITAEIGDIRKYKTKKSLISFAGIDSPPYQSGNFSAKQRKISKRGNPILRKVLYMAILCMKKAKDETNPVYKYIIKKEREGKAKKVSNIAGINKFLRIYYAKVMEEKNKEELQKAA

SEQ ID NO: 408360 - protein, 385 aa, unidentified
MPQTPDIFSVLEYDRTLVLAIELSSKCWVVAAQVPGLPHAKAKRTVKPTVEALMAAIDGYRSRAATAGRIVERVIATYEAGWSGFWLARWLARRGIETYVIQPSSVPVDRRARRAKSDGIDVELLLRTLLAWLRGEPRVCSMVPIPSEADEDARRSIRERTELVAERVSLVNRIGAVLATLGVQGYDPLRRDRRQRLDASCTALGNPLPTNARAKIARMLDRLELLLQQIAELDRQRDAVLEDDAPDKAGEMIQQLATLRGIGVQSATVLVREAFVRDFANGKALGSYAGLSATPYSSGSVNREQGIGKAGNRRLRTVMVELAWLWQRYQPDSANVRWYRERAGTTGARMRKVMVVALARKLLISLWRFVTQGLVPDGAVMKPAS

SEQ ID NO: 408361 - protein, 351 aa, unidentified
MEYVGIDWASRRAAWCALDSAGELLGEGVIAADLDGLTGLVARRGLEVSAALEMMSGAVWVAATLRAGGWRVQVADARRAKALAPLAAKTDRIDARVLAELCRRELVPEVWIASLDDRALRERLLRRMHLVRLRTSAKNRIFGLLSQWGLRVSVKRLRQADGLALLERLELPEVWRTSIAEALAVIELLDQRIAPIEAELAPLAQADERVQLLRTIPGVGSLLGLTIASVIGDISRFPSPAKLVGYSGLVPRVHQSGESSRTGRLSKAGSPLLRWAAVEAAQQAWRPHNPWHRLYVDVRRRQGNGNAAKAAVARKVLIACWHVLARNEPFKPAARAAAPIVPASSSTSLAA

SEQ ID NO: 408362 - protein, 343 aa, unidentified
MRHSSVPVAVGIDVAKATLSVCFRSREGAEIALTFRNIEADINKKLIASLKGFTGKIVLEATSYYHWLVTLLLTDAGYQVYVVNPLLAKQYTTGNIRKVKTDPADAASLARMAAIADNLPPAFQETRATLAIKRKLSCIARLTNQIQSLRGMLNQLKESHDILGIPLSKGEKALSKTLQTLCKQKKVLEQETIQGLQPIAVTHLDTIPGVTPFVAKACLTYFNYRPDQTAKSWIGFAGLDVSSRESGGWKGQCKLTKRGNNFLRHRLFSAAWGAVMTNADFKSYYTILRLQGRSHVESLLIVARRIVRIMFKMVEQNKSYDPSRMILSRKETIPATLSTVVTC

SEQ ID NO: 408363 - protein, 339 aa, unidentified
MEQIKFFVGTDVSKEWLDMSLVSEGRVMYHSQIENKPGAVKRWLRQTQKEFGYQYGDTLFSMEFTGLYNHHLLEVLHEQGAMVWLIPGLQISEGSTSGLKRGKSDKQDAGRIAVYASKNTEQVRLWRKPRKVIQQLQTLLMIREKLQKTQHQYETTLKEYKSFSEASVCRIVKETTAALLKITRQQLVRVEKEMNDLIQGDEKLHQLNEYITSVDAVGLITSANVLVTTNEFLNISEARQYACYAGVAPFKDESGKVKKKQKVSHKANKKMKKLFHLLAMSAIRMKGEMKSYYERKLAEGKNKMSVLNAIRNKIILRIFSCVKNKKLYEKNYVYSLAKP

SEQ ID NO: 408364 - protein, 344 aa, unidentified
MLYIGLDVHKEFCQACVIDEHGRVRSNEKFSSTQDELDRFLARFKDAKFVLESTGIWEFIYEGIEKRGFEVQLAHPLKVRAIAEARVKTDKVDAETLAQLLRANLIPKSWIPSKDMRDLRQLVRQRAYLVQQSTSFKNRIHAELLRRGVRRPLKFVMPFSKKSIDWMRSLEIPTVISCLNCLESVQAQIEEMNIKLLDEFNRRPDAQLIATVPGIGFYGALLIHAEIDDIRRFSHPEKLCAYAGLVPTVSQSASSVHYGAISKDGSSYLRWMLTEAVHTHTHCEPGSRLSKFHAKIARRRGKQKATIATARKPLLIIYWMLVRHEPYHSQGLDPGLPPARVSAT

SEQ ID NO: 408365 - protein, 340 aa, unidentified
MDKTLPTVGIDVSKLSLDVRVDAQERPRRSPGHLANSGQGFLQLQGWLQSQGMPRVHACLEATGTYSDAIARFLFEQGHQVSVVNPARVAAFRTSEGIRTKTDRHDALVLARFCAQKRPPLWSLTPASVQQLQVLLGRHEEVQVTCRQERNRLENHRADPLTRLEIQQHIDWLQRQSAHALQRADTLLLDHGELRQACAHLDSIPGIARLTAMRLYSVFFDQQRFDGAAKLVAHAGLCSAKEESGTSVHRKASISKKGNALVRKWLYMSALAVKRCNPDFRQWAAELKARGKSGMCIVVAIMRKLLHLVHGVLKAGEDDDARKAFPSHYGRPTPPVEEAA

SEQ ID NO: 408366 - protein, 420 aa, unidentified
MKVVYQTCCGVDVHKSFLVATIIKTTSGVEPSYQKKRFSTFNNSILHFKEWLVKNQCRDVCMESTGKYWVPVFNLLENEINVTIANPKWVKAVKGNKDDTKDSKWIGDLFRLGLVPGSYIPCKPIRILREFTRYRYKLTSCRTGEKNRYQNALTVCNVALDSVVSDIFGKSATSVIDYLIEQSDNSINHEEIASRLLRSLKKKSDSVIESIEGYQMTDSQKYRMRLVRAHMDYITSTINDIDTMLDSLIAPYENAVQLLCTIPGVDRNSAITVISEIGTDMAPFSNSKRLCCWAGLTPGNNESAGKKKSVRITRAGVYLKPALVQVAHAAVKSDKSPYYKQKYERIMKRRGKKRAIIAIARMILTAIYQMLSTGETWNPTDLFKIDMPEPMKEKQKEKAIKQAMKLLIREGKISKSQLAS

SEQ ID NO: 408367 - protein, 319 aa, unidentified
MSARGVFVGVDVAKDALDVAVRPSDERWSVANDEADVAALVARLRPLEPTLVVCEATGGFEHAVIAALAAAGLPVVVANPRQVRDFARATGQLAKTDQLDAGILALFAERVRPTPRPLPDAAAQLLDAVLTRRRQLLEMLTAEKNRLGFAPKPLHRGIRAHIRWLERQLDDVTKELAAQIEQSPVWRAKDDLLQSVPGVGPIVSYTLLGELPELGTLTHKQIAALVGVAPLARDSGTLRGKRLIWGGRASVRTALFMAALCGRRWNPTLKIFYERLKAAGKPTKVALIACARKLLVILNAMVRNNTRWMTPTARIQYSC

SEQ ID NO: 408368 - protein, 357 aa, unidentified
MASGFCGTVIGIDLGRKYSWCRAISTETGEVLGDERMRTRREEFLSFLQGLPRPIRVVMEATGNWQYPYECLEGLVEEIQLAHPLKTKAIASARIKTDRIDATILAHLGMADLVPQAYIPPREVRDLREILRHRAFLVYLQTATKNRIHSYLSKQGIEPPFTDLFGKSGLAWLRTLEIREPYRSLLDQDLRILESLRQEIKKVTQTIEALAEEDPRVRLILPIRGLGKYSVLLILAEIGDVHRFPDEKHLVSFAGLCPSTFQSGKVFYHGRLTKQGSKWLRWILVEAAQHYARAPGRLGDLYRRVERRRGSKVARVVVAREILVCIYHCLKKGVVFEENPRGGRKRLSQHAPVLSGR

SEQ ID NO: 408369 - protein, 388 aa, unidentified
MGRAYPQRTGDEPMKRSREAFVGIDTAKARNAVAVAETGRRGEIRYLGEFDTTADAVAKLVRRLSDRYEAVHFCYEAGPTGYGLYRQILDLGQSCTVVAPSMIPRKPGARVKTNRRDAQTLARMHRAGELTAVWVPDETHEAVRDLVRTRAAAVADYRRKRQQVSSFLLRHGHIFERRPAWKGQHLRWLNSQNFGHPAQRLAYQEMLNAVRAAAERIDRLDAMLGEIIPAWTMAPVVAAFQAVRGVAFTTAATVVAEAGDIRRFEHPRQLMAFLGLVPSERSTGETRRQGGITKTGNIRARKALIEAAWTYRHPAGIGDAHQRRQTQLPQKIRDIAWKAQVRLCARYRRFMAKGKRSTVATTAIAREIAAFLWDIAHHVEPARMSAST

SEQ ID NO: 408370 - protein, 355 aa, unidentified
MSSEKYIGLDVDQATISVAVMDSQGKVVMESILETKASTILEFFAGLRGSLFVTFEEGTWAAWLYDLLKPHVTEVLVCNPRKIPLLKQGNKSDKIDARKLAERLRLHDLKPVYHGETGIRRLRELARSYLTVVKDLSRMMNRLKALYRSWAISCAGRDVYYRRHRSQWLEKIPEAGTRWRAEQLYQQLDLLRHLRQQARRELLAESRKHAITAKLRQIPSLGPIRSALAVALIQTPHRFRSKRQLWTYSGLGLETRDSGEYQFVKGQPQRRKKQATIGGLNKDYNHDLKGLFKGAATRASVKPGPLQEFYQRSLAKGIKPTMVRLTLARKIAAITLTLWKKGEDFDINKLNSQAA

SEQ ID NO: 408371 - protein, 389 aa, unidentified
MKIFVGIDIAKLNHFAAAISSDGEILIEPFKFTNDADGFQLLVSKLESFDKNSIIIGLESTAHYGDNLVRYLVAEFYQVCVLNPIKTCQIRKNNVRKTKTDKVDTFVIAKTLMMQDDLRFITFFDLDMMDLKALGRFRQKTIKQRTRLKIQLTTYVDQVFPEIQYFFKSGLHQNAVYALLKEAPSPKEIASMHMTHLANLLKVNSHGHFTKEQAKELRVLAQKSVGANDSAISIQITQTIQQIELLDSQLEKIEAEMTDIMKFNDSVIMTIPGIGYINGGMILGEIGDIHRFSNPNKLLAFAGLDPSVYQSGNFQAKTTRMSKRGSRVLRYALVNAAWNVVRNNATFKAYYDAKRAEGRSHYNALGHCVGKLVRVIWKMLTDEVEFNLE

SEQ ID NO: 408372 - protein, 411 aa, unidentified
MQRVIGMDIHRTFAEVVFWEAGRLRPAGRIDMTRSGLEGFGRSLSKEDEVVVEATGNTMAVVRVLSRYVARVIVANPLQVKAIAHAHVKTDKIDAGVLASLRAAGFLPEVWLPDAETELRRRLVARRNQVVRHRTQIKNGVHSILQAHLIPPCPHADLFGRLGRNWLGRQELPADERAAIDRHLRELDRLGEDLAVLDREISERMIEDPSVKRLLTITGVNIHVAAGLVAAIGDVRRFSSPQKLVSYVGLNPRVRQSGLGLAQHGRISKRGRSHARAMLVEAAWAAAKAPGPLRSFFLRIRTRRGHQIAAVAVARKLAVLCWHLLSKDADYQWARPALVASKIRAMQLQAGQPARKGNKRGAAYAYNVKELRDREIDVARHAEHAYEQFVNRWQPRRPEKRRTGAANEDRR

SEQ ID NO: 408373 - protein, 371 aa, unidentified
MKKSSMFVGLDIHKSSIEIAIAEAGRDGEIRSYGAIDGTLTALDKVVRKLVSKGCNLHFVYEAGPCGYDVYRHLTAQGFDCVVVAPSKIPRQSGNRIKNDRRDAQMLARLHRAGELTAVYVPCIEDEAMRDLTRAREDAKALERKAKQRILAFLLRHGHCYSGKSPWSRAHFRWISMLKMPHPAQQIVLQESLDTLAECTCRVDRLTEQIQTLSPQWRLFPVTQALQTMRGVSLIVATTTIAEIGDLTRFKRPTELMSYLGLVPSEHSSGRATRRGSITKTGNGHVRRVLVEAAWAYRLPARVSRKLLIRQEGMSQEVCAISWRAQLRLCARYKRFIAKGKPHQLVVTAIARELCAFMWAIANEVQGPVKV

SEQ ID NO: 408374 - protein, 449 aa, unidentified
MSKVSPPINGLPVIHERAAGIDIGSRFHVVAVPSTLSDEPVQTFQAFTADIQRMADWLKSIGVETVVMESTGVYWVPVFEVLESAGINVMVANARETRSVPGRKSDINDAQWLQRLHACGLLRASFRPGRDIAALRAYLRHRERLLDYAAAHIQHMQKALTFMNLQLHHVVQDITGVTGMKIIRAIVAGERNPQALAEFRDVRCKSSIETIQAALVGNYQPEHVFALTQSLALYDFYQARIDDCDVQIEQVLAVLNADKPEPEQPIPKARHRTKQPNAVNFDVRTTLYQLIGVDLTQIHGIGPFLALRLIAECGTDLSKWPTAKHFTSWLTLSPGCKISGGKVLSAHSRKSNNRLTAHLRLAAVTVGRTNTALGAFYRRLAARIGKAKAVTATARKIAVLFYNAMRFGMHYSDPGADQYEQKYRERVIKQLYRRAAEFGFVLQEVECVS

SEQ ID NO: 408375 - protein, 330 aa, unidentified
MDASGVILDEFTFTNNREGIEGLASRLTLNDRVVMESTGSVWTNLYNHLDAKHIHVALANPLKTKAIASAKIKSDRVDARILAHLLRSNLIAESYVPPKHLREIRALIRHRANIVKIRTMVKNQIHALADTHGFACPYSDLFGKRGLEWLRSIELPPLDRLILNNHLIHLESLSQQTQRVDEEIHSKACEDEDVRLLLSMTGVDVYSALLIRSEIGSIERFPDYKKLVSWAGLAPSLHQSGSVEYHGSITKQGSRMLRWIIVEAARVAVNHDARMRSFYERVKHRRGDQKAIIAVANKMLKIIWFMLTRREPYESRNEKRYRQKLNSIAA

SEQ ID NO: 408376 - protein, 454 aa, unidentified
MANKRQKRATASLHVLQPDAAGADIGAEEIFVAVPPDRDDEPVRRFPTFTCDLHRLADWLQQCKIRTIAMESTSVYWIPLHQILEERGLEVYLVNAQYVKNVPGRKTDVSDCQWIQYLHSVGLLRPSFRPPAAICAIRSHWRHRENLIQMGAQHVRHMQKALDQMNLQIHHVLSDITGVSGQRMLNAILEGDRDPVRLARLCHGGVKSSQERIAKALEGDYRPEHLFALKQSLSGYRSYQKMIADVDKEIEGNLKGLPTADQAKAELPERTKKSPYQRQHYEPAFNLRKELYRVFGVDLTNVPGISAVTAHTILSEIGTDLSQFRHASAFSSWLGLCPEKQISGGKVLYVRTRAVKNRVAVALRLAAHSLHHADNYLGEFHRRMRRKLGPAQAITATAHKLARIVFHLLKTHESYDETVFQKHDEQAQKRAEGRLRRQAAQLGFQVIPAAPEQT

SEQ ID NO: 408377 - protein, 356 aa, unidentified
MEKLTTVGIDLAKDVIAVCVLDVHGAAMERRVFRREAFERWAEQLPASNVAMEACGSAHHWGRWFAARGHTARLIAAEFVVPFRKGGKNDTADAEAVAIAARQPTMRFVPIKSVDQQAILAWHSVREGWKEERTALLNRMRGLLAEYGVVIARSADRFLAALPKLSEDSRLPDPVRALLLEVREQFAALHARLARCDAQIAAHARNSSAARRASELLGVGPITSSALVATLPDARVFKSGRQLGAWLGLAPRQHSSGGKTRLGRISLRGNVYLRTLLIQGARSTLQSAINTEPSRASRLQRWIIELYARKGYYKTLIAIANKHARMLWVMLAKDQGYDAAAWQRHPMHQPPLAGNA

SEQ ID NO: 408378 - protein, 308 aa, unidentified
MHYLYYVGLDVSKETFDASLVAFEDANEMAHRKFANSRKGICSCLHWVEKRHGIRLDDVIFCAEDMGSYISEMAVCASDRTLNFNFSLISPLVIKYSMGIARGKTDRVDARRIAEYAITHYRKIALYLPAEKELCQLRTWLILRAHLAKQRVAKLVLLEKLDYKEKFADVSIQRSMLQEEIAYAETHMKTIEREMKELITADSNICRNYKLLTSIKGVGPITAIVMLCSTLNFTKITDHRKFACYCGLAPFEHSSGTSVCGGCHTSSMANRDIKVQLNRRALIAIRCDPQLKAYTNAKWLKVNINSAS

SEQ ID NO: 408379 - protein, 285 aa, unidentified
MSQPITRRHPTTSLTPPHRCYIGIDVAKESFQAAHSPGTDNISFAYDAAGIKALLQWLEGFTVELIVLESTGGYQRRLVAAMVEAGHPVVVANPRQVKDFARAMGILAKSDPIDASVIARFACVIRPQIRPLPDANQQHLADLSTRRSQLINMRTQEQNRLAQVTGRDLTKSIQCSIKQLDKEIVKIEMLTEKALDACPDAAFVAEELDKTVGVGRTSSIALVAALPEIGTLNRQKIVALAGLAPFNYDSGKFRASNRHHRQNARAGSVQLRFGQVQGTTSHLGR

SEQ ID NO: 408380 - protein, 345 aa, unidentified
MFDCNVIAIDLAKNLFQVCKTDKNGNVIYNKAITRAKLKQLLIKEKQSLVAMESCGGTHYWARFAKQAGHQVKAINARQVKAFRQGQKTDANDALAISVAARQPHIKESRLLSVQEQCLQGIECMRDLLVKQKVSLSNQLRGLLLELGYPIAQGDTPLIHAIPEILEEAENSLTASFRFSIHLLFQRFKETIEEAKLIEKQLHEIIKEDKTCNRLQALEGVGPVCAILIKIALGNATHFKSGREAAACFGLTPVQHSSGGKEKIGSISKVIGNKKLRSALFKGALAVVSQLEKRESRSEKDVWLKALTARRGKKVAAIALANKTIRTAFAMQKHDKEYQPQLLAA

SEQ ID NO: 408381 - protein, 411 aa, unidentified
MDIVHERSVGMDISKRDAKVCIRVPGKRQGQFTSTVTTWGSTTNQILELRRFLEEQNVTVVVMEATSDYWKPFYYLLEESLPVMLVNARHARNLPGRKTDVSDAAWLAQLGAHGLLRASFVPPGPVRELRDLTRARAVTVQDRTRELQRLEKFLESTGIKLSGIVSELTGVSSRAMLEALIRGERDPQVLAQFARASMRSKIPALTEALTGMFGEHHAFMVRLHLDRIDQLARTVTVLTEQIDTAMEPFRAAREALSTIPGVSTLVADVIIAETGGDMSVFPTAAHLASWAGVCPGSNESAGRVKSARIMPGNKYLKGALGIAAMAASRGKNTYVSVKYKRIALRRGRVKAIVAIEHVILTATWHMLANGEVYKDPGADFYLKREPEQTKARAIRQLKTLGYDVNLTLAVA

SEQ ID NO: 408382 - protein, 418 aa, unidentified
MPDPLLVGLDVHHKTQSVCVMNVLGAIIDDKLTVHNTPAGAEALAGYLHALASRDGYEAIHIAAEATGWYWWHFFCALSSDPRLQQSPLALYPLNPRLVAKFKETYSDDDKTDPGDAFVVADRLRLGRDLPHPFSDDLRYLRLRLLTRHRRHLVRDLVREKSFCLAHLYLKASEYTHLQPFADPFGATSRAIIRDYPSMEQIAAIPLDDLVETIDRLGKRRFADPLQAAQTLQEVARQSYPLPEVLQGPVNLILRQTLQQVTTLQRLIHQTDTAIAEAIQDFPNTLETIPGFGPVFAGGIIAEIGDLSRFAYDQTKVAKYAGLKWRRTQSADFEAEETPMTQAGNRYLRYYLCEAANSVRMRDAEYQAYYERKYDEVRKHQHKRAIVLTARKLVRLVVRLLTTNQPYRPRRDPLPPSA

SEQ ID NO: 408383 - protein, 420 aa, unidentified
MKSASNTLPEEPVNAVTGGIDWARDDHALSVVDARGREIHRCTVEHSITGLREMLAVLARTGAGEVAIERPDGPVIDTLLEAGITVVVISPNQVKNLRGRYGSAGNKDDRFDAYVLADTLRTDRARLRPLTPDSAATVSLRRACRARKDLVTHRVGLANQLRAHLRNVLPGAVGLFAEIDSPISLAFLSRFDTQDRADWLTPTRLGKWLASAGYSGRTDPTVLYTRLTAAPRGALGDEGTANAPITRALVGVLTSLLEQIKTLAAQIDTQLTAHADAHIFTSLPRSGRVRAARLLAEIGDCRARFPTPESLACLAGAAPSTRQSGKLRAVTFRWACDKQLRDAVTDFAGDTRHANPWAADLYQRARTRGHDHPHAVRILARAWLFVIWHCWQDNTSYDPTRHKALQRILTEQTKIENAAA

SEQ ID NO: 408384 - protein, 317 aa, unidentified
MDVAFKSFVGIDIAKRTLDVHVLPERTSLKQQNDSKGRQQLREKLPPPGECLIVVEATGGYERALVAELIDAGYQVAVVNPRQARDFAKACGIVAKTDRIDAAVLARFGQAVELRTQTKIPEKQLELQDLVARRRQLVELRTTEMNRRENVASQFVKKSLQESVDAINKQIRRFEKRIAALVQSDDEWKQKADIVQSAPGIGPSTSATLIAEVPELGQLSRRKISALVGLAPFNRDSGEFRGRRAIRGGRSSVRCSLYMATLSARRSNPVIRAFSDRLKALGKKPKVIITACMRKLLVILNTMVKNNTHWNPAISTT

SEQ ID NO: 408385 - protein, 456 aa, unidentified
MKIPQSTIRLLTGRLVKILLNREVSTMKSNTQNAKIEAITEKTLVLGIDVGSETHYARAFDYRGIEYSKKPFKFSNTEAGFVTFKEWILDIKERHEKDKVVLGMEPTGHYWFNLGKFLQDNEMKPVLVNPHHVKKSKELDDNNPTKNDRKDPKVIAGLVREGRYMIPYLPDGVYADLRTASNIRFQLQAELTRIQNRISRWFNIYFPEYKTVYGKPDAKSGILILKAAPLPEDILTLGIDGVNQIWRDAKLRAVGKARAKTLIEAAEHSVGSKEGVVSARMEIRMLLEDYESRSIRLQEVMTLIEGLVKQIPMAEKLLVIKGVGIRTVSGFLAEVGDISRFNNPKELQKLAGLALVENSSGKHKGETTISRRGRKRLRYLLFEVAMSLVAKNPEFRELHNYYTTRRLNPLKKMQSLMAIAAKLIRVFYVMLTKGVNYDPKKMVNDIKRPAVYLQTA

SEQ ID NO: 408386 - protein, 397 aa, unidentified
MARIWAGMDIGKEHHHCVVIDTDGRRLLSRRVPNDEAALLELIGDVLAISPEVLWAVDINHGGASLLIALLAAQGQVVAYLTGRVVRQASGTYRGEGKTDAKDAFVIADQARMRRDLGLLRPGDEIAVDLRILTTRRSDLVADRTRQINRLRAQLLEIFPGLERAFDYSTSKAALILLTGYQTPAAIRAAGVPGIQAWLRDRKARNAAALARTAVDAAHAQHTAVPGEKLGAEMVARLAGEVMGLDEQIAGINALIEARFRDHPLAEVIISLPGLGPVLGAEFIAATGGDMTAFSSADHLAAYAGLAPAPRDSGRIDGNLHRPRHYHRGLLRVFYLSSMISIRGCPASRTYYDRKRAAGKTHTQAVLALSRRRVNVLWAMIRDSQRYQDSPATAAAA

SEQ ID NO: 408387 - protein, 370 aa, unidentified
MKTQPTALPKLYIGMDIHKKSWSVHLRTDISDHKTLTIPSNCDVLYDYVEKYFQGHEVSLTYEAGCCGFSASRHFMNLGWNVLVVNPADVPRMDKQNYQKTDKIDCRNLAKQLYAGQLKGIYIPDEAQDLLKSLLRQRAETSKQLRAIKSNIKGLLLYHGIEIPKEFDNPNWTKSFLQWLQQINWPHSTGKICIDSKLRMREVIHKEYLQLANELRSYCRKHHKKDYYLLKSIPGVGGYLASAILAEIGDLRRFNSEAQFASYIGIVPTMRNSGGTEKIQGVTPRCRGLLRSYIIESSWVALRMDPEMQAYYRKHIGRNPKSIIVKIARKLLNRMLAVIKTEKPYHTNYSLNNGKGTKKSAIIQQNASSN

SEQ ID NO: 408388 - protein, 353 aa, unidentified
MLAELVDHVIGIDPDRDWITAAVVDAKTTGVVVTAKFAANNDGYDEALEWADTHTTAGDRSWVIEGSGSYGRGLSAALSRGGEWVIEFDRPHQRQTKDGAKTDELDAVRAAREALGRHRLHTPRAHDGHREALRVHTVTRAGVVRARTAAINELKALVLTSPDGLRSELRGLSTKALVTRCATFRATSKRPIAERCVRNTMRVVARRVQHFNEEIAVHDVAMKQLVDDTAPQLVAESGVGYVTAAMFVIAWSHPGRCRSEAAYARLGGVAPLPANSGQSQDRHRLNRYGDRQLNSAFYVVALARMCHHEPTKAYVARRRAEGKTDREIRRCLKRYIARKVWRLLEHQTPKIAT

SEQ ID NO: 408389 - protein, 364 aa, unidentified
MSIIAYVGIDAHEKSHRIGVLLEGSEKPFPTMLVANEEREVKRFFVKLKSEYDVRCCYEASGIGYVLQRWLSQIGISCEVIAPSLIPQRSGDRIKTDKRDALKLARLYRAGQLTPIHVPSVQEEAVRNLVRLRDALVRDVVESKNLVNKFLSVHGRHFPGKSRWTQKHWVWLRQQCFAAPEDFAWAEYLGLLEFKQSRLAEVDRRIEAYAVSDLYKDQVRRLCCLRGIGTVTAMTLVTEIIDFRRFPSARSLMSYLGLVPKENSSGERRRQSGITKTGNSRCRRVLVEAAWKYKHKPVLSLALKQRQEGMAAALTAHSWKAQRRLYEKFWSIANRKENAKAVVAVARELTGFVWAIMVTPVATA

SEQ ID NO: 408390 - protein, 471 aa, unidentified
MPRRKSALSRPDPAAAALLQTLHPHAAGIDIGATELWVCVPSSAVVAPSVSSAPTVLPPHVRRFGAFTADLHAIAAWLRQCQVTTVAMESTGVYWIPLYDLLEAEGFEVLLVDPRQVQRAPNRPKTDVHDCQWIQRLHSLGLLTAAFRPKEPIRVWRSYQRHRASLIEDASRHLQRIDKALEQMNVKLPAVVSDITGVTGMGIIRAIVRGERDPQALAKLRDRRCKESAATIARALQGTWQPEHLFALQQSLALYDYYHEQIRTCDQVIEDHLKGMALPEVPPLAPTRRVRRRRDNEVTFDARQRLHQVTRVGLTAIEGIEESTALVVLSEIGTDMSRWPSENHFGSWLGLTPNPKKSGGKVKSSATRPGVNRAAQALRLAAQNVQRSQSALGAFFRRIAARRGLAKAMTATAYKLARIVYALLKHGTAYVAQGLAAYETAYRERVVRQVKRKAAELGLVVVEPEVVGQPS

SEQ ID NO: 408391 - protein, 342 aa, unidentified
MNKIYIGMDLHKSTSSFCVMNKEGEILKEQRIATTPESITRFIKSLGKKNKISITFEPVSQSWRYIDIFEEMNLDIHPANPRKLKAIATATSKTDKLDARVLADHLRTNHLPESYIPPKEVRGWKELVRNRSSLVRLRTQAKNRIHSVLFKNGLASPFQTLWTARAKKWLRTLELEPHFRLTIEKQLSVIEHLDKEIKDVEKTIKEIVKETKQMQLLKTIPGVGDIFAISIMSEIGDIKRFKNYKKLQSYAGLAPWVRNSGGKTWTGHITKRGSAWLRYAVIELAVSIARTRKSSDLKDYYLKVKRNKGGKTATVATARKSLAIIWAVLHNERKFEARYPAI

SEQ ID NO: 408392 - protein, 318 aa, unidentified
MFKSVCIGIDVAKAHVDVAMDVGGAVQRHANDVDGHTAVVAALSKDAVALIVMEATGGYEAELACALQAAGLPVAVINPRQARDFAKAMGHLAKTDRLDAAILAALAAVIARRPDAMRFVRPLPDAERQRLSALVARRRQLLSMLTSERLRLATAHPAVRASINAAIEAIRKLLDDADSELVRHVDEHHAAAEALLRSVSGIGPTTAATLIAELPELGRLNRRQISALVGVAPMNRDSGQKRGPRTIQGGRAQVRHTLYMATLTAAHHNPVIRNFYKRLVTAGKLKKVALVACMRKLLTILNAMVRDSASFNPNYAKT

SEQ ID NO: 408393 - protein, 470 aa, unidentified
MNDNREAGRRRTKGSRQRKSPGLLERIQPDAAGIDCGAEYHYVAVPPDRDPEPVRPFRTFTADLERLADWLAACGVKTVAMESTGVYWIPLYELLEARGFQVVLVNARDVRNVPGRKSDVADSEWLRELHSVGLLRASFRPAGEIAALRAYLRHRETLVHGAATHIQRMQKALVQMNLQLHTVIADLTGVTGQRIVRDILAGVRDPHALAAHRDHRCRASADVIAASLTGHYRAEHLFALRQNFEAYEFLKRQIDACDAAIDAHLTTLAERQAPPPHTLPTPRRTRKPRDNDPRFEIRAPLFRLTGTDLTQIDAIGPSTALQLIGEIGTDMSRWRSEKHFTSWLTLAPHNKVSGGRLLSSKTPPSANRAAAILRRCAMSLGRTATALGAYYRRLAYRVGKPKAITATARKLAILVYRVLRGDLVYRDPGALAYEQLHRARTLRGLRKRANQLGFGLLNLETGEVLDAAVS

SEQ ID NO: 408394 - protein, 1044 aa, unidentified
MTSAAIYARVSSARQKKDQTIGSQTAALRAHAAQHRLEVPEEWIFEDEGHSGATLVRPALERLRDLAAQGCVDVVLCYSPDRLARKFAYQALLAEELARAGTRVQFVNGPRGDSPEDQLLVQFQGMFAEYEKAQLMERYRRGKAYRARSGSVNVLGGAPFGYRYIRKTPESGARYEITGHEAVLVAEMFRRYADDGVTIADLARWLAGQGVATRTGKHRWDRSVIWGMLRNPAYAGKAVFGKTQIIHAQPGLNRVARLQGRTTPRAVKAVDRPRGEWTEIPVPAIVDEDTFTRVQQRLEDNKRFASRNSRVPSLLQGLAACSACGYGYYRTSTRTTNKKIYYYRCLGSDDYRYEGGRVCGNKPVRADYLDTVVWDHITHLLADPALIRAEISKRLDTARTSDPVTRQRHRLELALAKATASITRMIEAFQEQLITIDELRTRMPGLRAREQNLRAQLDALDAQAADRDAYLKLADDLEGFLARLRGKAATASTEERQRVLRLLVKDILIGPEKITIRHRIPVRERAANGGGHHDSTDTEGDMRQGYPLCWGRDGTPAGTSGFVAPATVFRPPGSPNRQTTGCCRTTGRTEGNDLHAAASTTGIETQARRIGREDVGSASGPASVVLRWCGRRVGGLGPGLTCESADAARAVLRNDLPAGSQVCGTRRRCRSDLPGLGRGRGSQVRRPAGACHPFNQRKEMALTIVETRAITGGVDTHADMHVAAALDPVGGLPGVAEFPVTPAGYARLLGWLGGFGTPCLVGIEGTGSYGAGLARHVAAAGIRVAGADRQDRRRQGKSDPLDAVSAARAAQSGRARGAPKGRDGAVEAIRALMVAKRSARTERTQTINQARSLIVTGPDDLRARFAGHTVAALVAETASLRPRPGSTVGYATRITLRELGRRAEFPGGQLERLDELIVPLVTARAPGLLALYGVGPDTAALLLIAAGDHPGRLRSEAAWAHLCAAAPIPASSGKRTRHRLNPGGDRQAGHALWRIVITRMSSHPPTRAYVERRTAEGLSKTEIIRCLKRYVAREIYPRLRAATS

SEQ ID NO: 408395 - protein, 400 aa, unidentified
MNERKAQVWAGVDAGKGHHWAAVVDETGATLWSKKIDNDESTILTALGEILGLADEVHWAVDISGTSSALLLTLLAAHGQRAVYVPGRTVNRMSGAYRGEAKTGARDAYVIAETTRHRNDFATIDVPAQLAADLALLTAHRTDLVADRVRMINRLRDVLTGVFPALERAFDYSAHKGALVLLTGYQTPAAIRRRGRARLAAWLANRTVRGADAVAATALEAAQTQQTALPGEDVAAQIIADLAAQILDLDDRLKRIDKQIRERFRSHPQAEIIESLPGVGPILGAEFIVAAGDLSAYADAGHLASAAGLVPVPRDSGRRTGNLHRPKRYSRRLRRVFYLSAQTSIIREGPNRDFYLKKRGEGCKHVQAVIALARRRASVLWALLRDGRVFTSAPPVTQAA

SEQ ID NO: 408396 - protein, 342 aa, unidentified
MRYIGLDCHKKFDHATMIDTETGEVKAKRLAHVKEDFAEFIGERSDTRLVMESCWNWCKTYELVKDLVEEVTLAHPLKVRAIASAKIKTDAIDSRTLVKLLMADLVPEAHLRKAENRIKQRIIRHRAFLIAMRTRLKCRIHDLVDSQLLSRDAVQAKPVNIFSKKGMKWLCSLVFNTEEDRKMLESYLKLLEAINHEIASSNEMVEEIYDKDKDAQLLATIPGIGVTLATLISTEIDGIERFKSPSRLCSYAGLVPSTRSSGGKTYHGRITSEGNRWLRWGLIEAVVPASYADAEIRRQLSDLRRIKSGNVAKTIMARRLLKIVYHVLKEHRAYVPDYPGRL

SEQ ID NO: 408397 - protein, 423 aa, unidentified
MEVMHRRVAGLDVHKQTVVACVRLMAGRKPTRECRTFATTTQALLELRAWLTTSRVTHVAMEATGVYWTPVWKILSAGEFELTVANAAHIKQVPGRKTDMNDAMWIADLLACGLLKASFVPPENIQELRALTRTRKQLVREQTRHVQRIEKTLEDANIKLGAVLSDLLGVSGRRMIEAMIAGERDPHRLAALAKRMVKASPKELHDALHGRLREHHLFLLQLHLQQWDAIDAAIRQIDKQIADQIERVDEDAAEGQPPFRELIPRLCAIPGISSLSATAILAEIGRDMSRFPTAGHLVAWSGLCPGQNESAGKRKSTRLRKGAPWLKTMLVQCAWAAKRTKDSYYRAQFLRLCARRGPQKAICAVAASILTAIYHMLKSGTPHRDLGADYFDRRAPEAKAKRLLAQLAKLGFAAQLQPLADAA

SEQ ID NO: 408398 - protein, 301 aa, unidentified
MSTQFFCGVDLAKHHFSLHAVDDHGKVILHKSVSRAKLLAKLANMPTMCIGIEACSGAHYWAREFNKLGHDTRIMAAKYVGPYRTKGKNDLNDAVAICDAVQRPNSRFIPVKSPERQAILATHRVREHWVNERTALINRIRALLAEFGIIIPTGRAAIHREVPLILEAAENGLPDIARAVVADCFDHLQTLNQRIDDTEQCFDMVTKASPNAQRILNVRGIGPQTATAIIATIGKGEQFDSGRDFAAWLGLVPKQYSTGGKPRLGRISKRGDKYLRTLLVHGARAVITNLGDKQDRLSVWG

SEQ ID NO: 408399 - protein, 355 aa, unidentified
MSQDKYIGMDVHAATISAAVRNAEGKLLMECVLETKAATILEFIQGLRGTLALTFEEGTMAAWLHDLLKPHVSRLVVCDPRKNALMRDGNQNDRMDARNLAELLRTNHLHGVYHEKHGTRALKELGRSYLTLTKDSTRVMNRIKSVYRSWGIPCAGTSIYSRRHRAEWLAKLVEPGVKIRAEHLYEQLDSLQPVRQAARRELLRESRKHAAVKLLQQIPAIGPIRSALLVAIVQTPHRFRTKRQLWAYSGFAVQTYDSGEYRFVRGKLQRNRERITVRGLNHNHNHDLKNLLKGAAITAIERPGPLQDFYAAMVDKGIRPSMARLTLARKIAAISLTVWKKGVSFDPKQLRRQAA

SEQ ID NO: 408400 - protein, 308 aa, unidentified
MIVQNYVGCDISKARLDFFDETSGRYQHIANRAEAIAAYAAGLRPGQDFVVMEATGVHDRLLRHALAKAGLAFARLNPARTHHYAKSATQRAKTDRLDARMLSDYGRRYQPAPEAAPCEKAEHLQSLARHRDRLVEIRAEMKRYLSEAFDEEVVADAESLVADLDIRIGTLESRIATAIRETEGTARDYALMVSVPGVSTITALSLLAHMPELGQRSPKSIAALAGLAPFDHESGKSRRRARISGGRSRVRRALYMAALGAVRANQRFKAFYSALAARSGSKKLAIVAVARKLLITLNAIIRDKTAFA

SEQ ID NO: 408401 - protein, 359 aa, unidentified
MRKRLTKKDRFFNDINFTADDDIYVGIDVHKVDYHIAIWLNNGIALTFVAPADNSAITKELDKLTPGLKKIVYEAGPTGFSLARTLAAASLPVAVIAPSKTPRPAGQESKSDRLDCRKLAQLAAKDMLTEVAIPTEQQEVDRQVSRLRNQLGDKKIRIKQQIKSLLLQHNIKEPAGLARWTKQSIIQLGDMELCPEIRFTLDVMLDQLNYLQAQIKRVDKQLKEIFRKDDHARQMEILRSHPGVGPITSRQFCAEVFSPERFNKSTQITRYVGLCPLVCQSGQKRKDGRLMKAGQIKLRATLIEAAWVWIRLDPDAKETFKRLLSNTGEPNKAIAAMARRLAIHLWKMLCDDKLYCKAA

SEQ ID NO: 408402 - protein, 370 aa, unidentified
MEKTIRFVGLDVHKDSISVAVAEDGRGGEVRYLGTVGATAAALCKLVARLSGSGITLRLCYEAGPCGYGVYRHLTALGQDCAVVAPSLVPRRAGDRVKTDRRDAELLARTHRAGELVAVWVPDGAHEAMRDLVRAREAAVRDLRKARQRLSGFLLRHGRSYGSKAWSRAHRRWLASLTFAHPARQITVQEYIDAVDTAAARRDRLLAEIEALVPRWSMAPVVGALQAMRGMGLITAVTLIVEVGDLRRFEAPPRLMAYLGLVPSENSSSDRLRRGSITKTGNGRARKALIEAAWTYRWPARVSRVLHDRIEGQPEPVRRIAWQAQRRLCGRYRRLIGAGKKPQVVTTAIAREMVGFAWAIANQVPPRRSA

SEQ ID NO: 408403 - protein, 340 aa, unidentified
MGCSHRFRRRKATAKLMYAALDLHERSIQCVLKDDTGKIVRESKMGKDEERILEFLDGTQASVVMESGYNHQHIYDLLKEKGYDVRVAHPLMVKAIAYARVKNDKVDARVLADLLRAGMIPEAYVPGKDVREVRDLVRRRRYMVRLRTMLKNKVHAEIATRWIKHNDGDLFTEEGRKYLRSLSIEAVNDYLDTIEFLGTKIRELDERVRPLAESDRYAKLLMTIPGVGHYSALLISSEIADIDRFPDHEHLCSYAKLSPGVRQSGDTQHTTRAVGDSMLSWIMVQCTRVHVRRCDSSITRFYAQVSRRRGEKIAIVAAARKLMRTVYIMLKEEQAFRLDG

SEQ ID NO: 408404 - protein, 343 aa, unidentified
MKLHVLGIDLGKTVFHLVGLDSTGKVVIRKKCSRTQLLAFTANLQVQLIGMESCSGSHFLGRALREQGHEVRLMPAQYVKPYVQTNKSDFLDAEAIAEAVQRPRMRFVPIKTEEQLDLQALHRVRERWVMRRTAVVNQIRSLLLERGLTLPKGRSYVDRQLPRILEDGELRLSGSFRVLLAQLKLELEQLTARIEEMDRVIQKTAKENEDCQRLTEIPGIGPVTATALIAAVGNASAFQKGRNLAAWMGIVPGEYSTGGKQKLLGISKRGNKYLRTLFIQGARSVLQQRHKQAPGLSHWLAQLLGRTHQNVVIVALANKLVRMAWAVLCKNERYRAPVLAVTT

SEQ ID NO: 408405 - protein, 315 aa, unidentified
MDNSTTIPSGFIGCDVGKTEIVVFDSQTGRTTKIPNKSSPLTAFAEAIDPNALVICEATGGYEADLLAALVMAGRAAHRADARKVKAFIRSFGTLGKTDQIDARALARYGAERHSHLPRWQPRDQQRDKLSRLVAARRTFVDQRVACRNRIQAPGHSTVADREARIIKALNEEIAGLDADIAALIAQCQPLAKTVKVLRTIPGIGPTTAAVLVALMPELGTLRRRQAASLAGLAPHPRQSGANDHYRSTKGGRPDIKPAIFMAALTATKHDPSLRKFYNHLKDSGKKPIVALVAVMRKIIVIANARIRDANAQLS

SEQ ID NO: 408406 - protein, 383 aa, unidentified
MKSVCGLDVHKDSVYLCILSEFGELIEKVFGVLTYQLEEMRDLMLHHHVVEVSMESTSVYWIPIWRVLSPHFKLNLANPYFIKQLPGRKSDVKDAQWIAECTMKELIRGSFVPPETIQQLRQYDRRIFDLNEEIVRKLSKLDAVLQRCNIRLSNYVSNVDSKSYKAVVRAISQGITAPEELVKLIHGRIINHHGIDVITASLKGVVSLAEIDMISQLRDELDMAEAHKEKCQAKMLEICEREFPEELKRLQTIPGIKERAATSLIAEIGTDMNKFETANHLASWSGLKPRNDESNKKIKSRSITHGNVYLRKTIIECAWAASRTKGCFFSRFSYHQTQVRKKNKMKVLVAVARKMLIAVWHVLHDNTIYIDFTTDRKTSRTRG

SEQ ID NO: 408407 - protein, 542 aa, unidentified
MRFEPRIFSSPVIDPPLCSRCPDTVSRVIHPVARRARGSSPQPTVNNSAASKNLRSDYSKSGRTAPGPSRSSVSGRAKVSQSLPADLEAPVKKSERIVAHEAPSIRSTRNRAQVLRQPKEPMKTWTESRFYAGLDWAKDHHDVVVVDPQGTIVADFRFAHTLEGWKQFQEKIAPFMPLAVVLETSQGMAVDQLMAAHCLVFALHAKSAQRYRDRKIPSGNKTDRSDAWALAEALRTDGSQWAPLQPGDPLAEQIRLLCRDEMSLIQQRTLLVNQLQQALYEYYPVVLEAFEDWTMESAWDFVIEFPTPQALQKAGRRRWEKFLHAHHLWRQKTAEERLAIFARATEFCGAPTTLEAKSLLALSLAKLLRTLQAQLNQYRQRIQQLSEQHPHHDLFDSLPGAGATLAPRLLGSLGAQPDRFENHQALQCLAGTAPVSYQSGQIHKVHLRYQCDKFLRQTVHLWSDCSRKTCTWAQVYYQKKRAEGKSHACALRCLGQRWLKILWKMWQTKTPYNPELHAANQQKHGSWVLTLMPQKQTACSGE

SEQ ID NO: 408408 - protein, 338 aa, unidentified
MALFAGIDLHSNNGYYGIVDSTGKRVFSKRLPNKLPEIIERLEPFKSELEAVAVEATYNWYWLVDGLMDHGYPMRLANPAAMGQYDGLKHADDENDAFFVAELLRLGILPQGYIYPKEERPVRDLLRRRMLLVKQRTTHILSFQSLLTRQTSGHMSGSHIKQLEASDVAGLLGEEHLALAGETNIALIRFLTQRILQMEGAVKKRIQLKPEYELLLTVPGIGTILGSTIMLETGPIDRFAKVGDYTSYCRCAKARRTSNGKKKGDNNRKNGNRYLSWAYVEAAHHAMRFLPEAKSFYQRKAAQTKVCVATKALASKLSKACYFIMRDQVPFDKTKMFG

SEQ ID NO: 408409 - protein, 407 aa, unidentified
MNAVGIDVSKGKSMVAALRPMGEVAFLPQEFLHTEVGLEQMAYAIIALGEDTRVIMEATGRYHEPVAAALHEYGIYVCVLNPLFIKQSGGGSIRKVKTDKADAMKIAKYGLDNWVDLREYTPMDTIRQQLKLCSRQYNLYMKTVVSLQNNLISLTDKTFPGVNELFTSPERADGHQKWVDFVMTFWHCDCICRVSEKAFTERYQKWCKRKGYHFRAEKALDIYASSCGHFTTLPKNDNTKLLITTAAQQLLTGKMTLAALRAEMTRIASQLPEYETVCAMYGVGDTTAAQLMAEIGDVRRFPRRSSIVGFAGVDPGIDESGKHSAKSVPTTKRGSPHLRKTLYQIVCTYLKKSPADEPVYQFLDKKRAEGKPYFVYMTAAQNKFLRIYYARVKECLEAFDSQTAEQK

SEQ ID NO: 408410 - protein, 362 aa, unidentified
MPKMIWLGMDVHAASITVAQYEDQAPTAMVQTIANDPAQVRRLVRRLPAGSDVRACYEAGSCGYGLHRQLTALGVHCDVIAPALIPRRPGERIKTDRRDAEKLGRFYRSGELTTITVPTPSQEGVRDLVRAREDVRRDRTAARQRLAKFLLRHGHRYPGSHWTKRHWEWVCGHTFDGPARTVFVHYCDHVLALNERLAHLEREIRTLAESAAYQPVVTRLSCLRGLATLSALVLIAELYDLRRFRTPRELMAYLGLVPSEHSSGARERRGRITKTGNALARRLLIEAAWAYRHPARQTRRVHQALSTQPPEVHAISDRALHRLTARYRRLLSRGKTPHHAVTAIARELCGFVWAIALVPDLA

SEQ ID NO: 408411 - protein, 359 aa, unidentified
MEQISRIGMDTSKNFFQLHGVNAAEKAVLCKKLRRKEMLAFYQRLPPTVIGMEACGASHHWGRILRSFGHEVRLVAPQFVKPYVKRGKNDSADAEALCEAMSRPTMRFVPVKTAEQQAALMMVGLRDRLIRNRTQLTNAIRGYAAEFGFTAAKGMAHIAPLLERVQADESVPELARELFAAQAREYERLQAQIAEVDARLMARHKADEQGRRLAKIPGVGPIGATLLPMKTAAPELFRSGRQFAAWIGLTPKDHSTAGKVRLGGITRAGDETLRSVLVVGATAVVQHIRRGGRGPSWVVDLLKRKPPKLAAVALANKMARIAWKMMVTGEDCVDPSAPARLTGSHRDRPGAGATELRPS

SEQ ID NO: 408412 - protein, 338 aa, unidentified
MKITTIGLDIAKTVFHLFAVSKTGRLVKKKQLKRNQVLPFMANLEPCLIAMEACGGAHYWAREFEALGHQVKLIAPQYVKPFVKGNKNDYNDAEAIAEAAQRPTMRFVPNKSVEQQDVQNFHRQRERIKKERTVLANQVRGLLAEYGIVIHKGIRTVSKSLPNILEDAENGLTPLTRELFAELYDELQALNERFAQCEQRINVINQSHEVCQRLDEILGIGPITATAIYAAAGDGKDFSNGRHFSAWIGLVPGQHSTGGRTTLLGISKRGNAYLRTLLIHGARAVLQQCGKKTDRFSLWAQALLVRRGHNKACVAVANKMARMAWVIMAKGETYRVPA

SEQ ID NO: 408413 - protein, 416 aa, unidentified
MQSAPTTLSSAPPNGLTCGIDWAKDDHAVAVVDSAGREVHRWTVEHTNAGLHGLLRRLARTGVAEVAIERSDGPVVDALLGGGLTVVVIAPSQLKNLRSRYGSAGNKDDRFDAFVLADTLRTDRARLRPLTPDSPATVTLRASCRARRDLVTHRVALANQLRAHLQTVFPAAVGLFRDLDSSISLRFLTRFDCQDRADWLSVNRLAAWLASVGYCGRVDPAVLHARLTAAPRGATGEHGTAAAHVTHALLAALTTLVEQIKALTEQIDEQLDLHADAHIFTSLPRSGRVRAARLLAEIGDCRARYPTPEALYCSAGAAPSTRQSGKHRAVTFRWACDKQLRDAVCDFAADSRHANPWAANLYQRAIDRGHDHPHAVRILARAWLYIIWHCWQHGVAYDPAQHKALQRLTQDHQAAA

SEQ ID NO: 408414 - protein, 334 aa, unidentified
MKQVNEVGVDVDSEALVCAMKRAGQRMPLATFANSAAGHKKFIGWATKGARPARVCLEATGIYSLEFALALHHAKNVEVMVVNPRAIKDFARACMQRAKTDAVDAGGILEYLERMPFTTWQPPAPEILELQAINRRIDQLHTELTREKNRRHAAEFTGASADAIAHDIEVNIHHLERRIARMQESGLQLVRRVPALTIKLAHLVSTKGIGEVSAMRLLAELLVLPDDLAAPQWVAHAGLDPRPYESGTSVHRPRRITKVGNRHLRAALYMPALVAIQHEPNVKAFYNKLVTAGKKPMQAVVAVMRKLLHAIWGMLKHDQDFDGNKFFKLTGKPA

SEQ ID NO: 408415 - protein, 283 aa, unidentified
MKPNSQMTLDKYFRQCVGIDVSKDKFTACLFMYDMASDVGCCTESIDFPNSKTGFNQMVKWSRKEAQKGFLLTYLMEPTGSYYEPLAYHLHKIGLTLYVVLPNKARSFCEYEGIKTKTDAMDARCLALLGCKNQRLRPWQPPKAIYRELRQLTRLRASLTKMQTQILNHIEAIDHMESVTSEVCKSYKKLLSSIQKQLEQNEQAIAAKVAQDKELEARIKRIATAKGIRSNTVTCIVAETQGFHLITNRKQLTSFAGLDVKARQSGKDDPRHHITKKNLRQAS

SEQ ID NO: 408416 - protein, 408 aa, unidentified
MARKRTLSTLDTSIAYEAVGLDLAKEDTAIAAFGPDHEGPYLIDRMPYDKLYELLADMAPTLVAMEPCSGAHQIAEQIQELGHEVMMISGRHVQAWVKDHCNGQKTDLNDAFAILNLAYDRWLTPIRGKTREECRLLALQSSYRQLKGQRTKTMVHVEATLHAWGFPIRTGSFNQKALHELIDANREAFGDEVVETLHLMINRVHDLDHDIATVLKLLTEATQRDPRASLLRSIPGFGVLTTSRWCAVVGDIARFDTPKQTMAFIGLVPNNRITGHHTETSSGREARGQGKMSKRGDKMLRSLCILGAGALCLMVRNDRLPDCPFVASIKKRLASPRPWFKVLVYVAAKLVRIATALLKYGETFSFEKAGISKAVLKQWELEQAKAAKALTARKRIVRPQARLIHEMP

SEQ ID NO: 408417 - protein, 371 aa, unidentified
MESIIYVGMDVHTTNYTLCCYSVADDRIFAGVQVEPDYHEILKYLARVEKQHGKKCQFLCGYEAGCLGYSLYHQLRSHGIDCVILAPTTMMTAPGKRVKTDRKDAERISKCLAFHTYSPVHIPTEMDDAVKEYIRMRDDGNTALIRVKQQIIAFCTRHGKPYTGGKSYWTKKHIDWLYNLKFENAVLGEVLQEYLILYFQLREKVDMYDARIMELSQMDAYLEPVQELGCLRGIAAHTALSLCVEVGDFRRFATAQQFASYLGLTPGECSSGDKQHYTGITKAGNSHLRKLLVEAAQTFSKSATKSGKSAALKERQAKCDSVVVAYADKANERLKRKYFRIAMRSKANVAKTAVARELACFIWGLMTDHIV

SEQ ID NO: 408418 - protein, 275 aa, unidentified
MSLPGPLCVGIDVSKATLDIAASSAIEPFSVTNDTDGFDSIIAELRKYSVALVLMEATGGLEAAVACALQAEGFELAVVNPRQARDFARAMGYLAKTDRIDARVLTQMAEVINRHPERSRFIRALPDVERQVLNAMIVRRRQLIAMLVAERNRLYLAPPQSRKSINTIIKALEDELVRIDDDMNNHIRSHFKELSERLSSIKGVGAMTVAALLAEVPELGRLSRREISALVGVAPVNRDSGTMRGRRTIFGGRAGVRTALYMAALVATRYNPVIY

SEQ ID NO: 408419 - protein, 354 aa, unidentified
MNVTHDGGLVAGVDTHRDTHTAAICDSSGRELAQLQVPADPGGYDAVLAWARQAAAGRELRWAIEGTRHYGLGLARHLAAVGEQVEEIDASKHAGKRRKGKSDAIDAVRAARELLARPHPAQMRADGDREALRLMMCDRDNAVGSAKTARTVLASVIVTAPAGLREQLRHIPRDRRVTVCAALACPDDADRQTRVLYQTLARLGERITSLAKTAADLEKQITGIIEDMAPGLVAAEAGLGALTAAQLMLSFSHTGRIRSEAAFAMLSGTAPVPVSSGNTSRHRLNRLGDRQLNRAFQVIAVARMRSDPRTKAYVRDRIAEGKTQREARRCIKRYLARHFYRVLTHQPGLAPRTT

SEQ ID NO: 408420 - protein, 374 aa, unidentified
MSDHSEAFVAFDTSKLRNAVAIADGGRAGEVRFLGEIENTATATAKLVRKLAAKYQRLTFCYEAGPTGYGLYRQIKSLGQECVVVAPSLTPKKPGDRVKTNRRDAVNLAKLLRAGELTAVWVPDRHHEAMRNLTRGREAAVMDLRSKRQQISAFLLRQGLHYPGKTTWGKAHMSWLASQKLEYGEQRLVFEEMQLAMRQGQERLERLEQAIRTAVPDWSLAKLVTALMAMRGIDLISAAGFLAEIGDLSRFRTPSELMAYLGLVPSEDSTGDTIKRGPITKAGNRRARRILVESSWSYQHPPRVGKQKQEKVAAAPRAAREIAWKAQCRLSGRYRALIRRGKLKTVAVTAVARELAGFIWAISREVTTARVAAK

SEQ ID NO: 408421 - protein, 355 aa, unidentified
MSQEKYIGMDVHAATISAAVKNAEGKLLMECVLETKAATILEFIQGLRGTLALTFEEGTLATWLHDLLKPHVSRLVVCDPRKNALLRDGNQNDRVDARNLAELLRTNQVKPVYHEEHGIRTLKELGRSYSTLTKDSTRVMNRIKSVYRSWAIPCAGTSVYSRRHRAEWLAKLVEPGVRIRAQHLYQQLDSLEPVRQAARRELLRESGKHAAVKLLRQIPAIGPIRSALLVAILQTPHRFRTKRQLWAYSGFAVQTYDSGEYRFVRGKLQRNRERITVRGLNHNHNHDLKNLLKGAAVSAIERPGPLQDFYAALVEKGMRPSMARLTLARKIAAITLTMWKKGVSFDPKQLQRQTA

SEQ ID NO: 408422 - protein, 402 aa, unidentified
MQRTAGLDLASEEHRLVVVAEDGSRLDERRVSHTEDGIAMLARRLHELQVARVAIEQPNGLVVERLLDAGIAVVPVHPNQLAAARDRYRTGGKSDGFDAYVLAELARTDMHRFRPLEPDSDETKALRALTRTREDLVEQKVALANQLRAQLDAFWPGAKRIFAEVDSPIALAFLDRYPSPADARSLGAKRLAGLLARNGYSGRRDPSELLDRLRTAPQGRAGEAEQEARRTIVLALVAALRPLVEQIRLLTGQIAGALRAHHDGPIFLSLFRDPKSVVTAAELLAEIGDNRARHRTSSSLEAIAGQAPVAVESGKKKVARFRWACNKNLRDAVSVLADSSRHHNPWAHDIYQRARNRGHDHPHAIRILGRAWLRIIWRLWQDHTTYDPARHGSLNRLLATKG

SEQ ID NO: 408423 - protein, 355 aa, unidentified
MDTTKYVGMDVHTEAITIAVVNSAGKIVMESTLETKAKTILEFFQGLRGNVQVTFEEGTWAAWLYDLLKPHVTTVVVCNPRKNALLKDGNKGDKIDARKLAKLLHLNNLKPVYHGENGIRALKELSRSYLTITKDLGRVMNRLKALYRSWAIPCAGQQVYAPRHRPEWLGKITEAGVRRRAEYYYQQLDALQALRHEVRRDLLAESRKQTGTKLLRQIPCIGPIRAALLIALIQTPHRFRTKRQLWNYSGLGIQTRDSAQYRFVKGELQRSKRPQILRGLNENHNHDLKNIFKGAATMATISPGPFHDFYEGLLAKGRKPTMARLTLARKIAAITLIVWKKGDSFDAKHLKQQAA

SEQ ID NO: 408424 - protein, 335 aa, unidentified
MKKFKLVIGIDISKAKLDVCIIEDPTSKQHKYFIVSNDKKGIASILKEVKKYKIDLTDCLFCFETTGVYTMHLCTELESKNHSYAMVPAIEIKRAKGLVRGKSDKADSRDIAMYAITHAHKLNLTSLPEADLMKLRLLLTEREKLMKSIAVFDSTNENESFIDKNILKVVLAQNKKTLTFLKRQLIELEKTIQSIINSNEKIKAQFELAQSVPGVGAQTAINLIVTTRCFSAFKNWRKLACYAGIAPFEYSSGTSIRGKTKVSPMGNKKLKSLLNMAALTAIKRDKQLKDYFERKKEEGKSGMLIMNAIRCKIISRVFATINREKPYVDVLKYYA

SEQ ID NO: 408425 - protein, 412 aa, unidentified
MLVPPKLHVAVDIGCRRHSVAIGLSSGERLEEFDIEHRPEGFADFFRRIERHHRRYPGSVPTVAMEGYNGHARPLDTLIGERGWRLLNVNNLKLARFKQMFPAAAKSDRIDTRRMLDLLQLGEHMPQARRALQEVHAPTPENAELKRLTRRRRALVDEKSRGLARMQGDLRAVCPGLLDITGDAENLWFLNLLTHGDDLEKLARLREQTLRGIPAIGAKYAATIRQWQQHARFSHEAPYAGPMIVEDARRILALKASINALERRCKALAEASDIARLIDTVPGFALVCSAELAGEIGTLDRFAGEASLAVYLGMANLDNSSGERAGARAPGQVNKRAKAAMMTGVDRHRKQVPESQRYYEKKRAEGKTHNQAIRALGRHLCRVLYRMLKHGQAYRVRAPADACTDAEQRFAA

SEQ ID NO: 408426 - protein, 395 aa, unidentified
MTEQYDVYCGLDVGKEAHHAVALDRNGKRLHDAALPQDEGRLRALYDKLGRHGRVLVVVDQPATIGALPVTVARAAGVQVSYLPGLAMRRIADLFPGNAKTDARDAFIIAEAARTMPHALRRVDVGDDTLAELNVLVGYDDDLAEESTRLINRIRGLLTHIHPALERVLGPKLDGKAALELLIRHGGPAGLRKAGKRRLTTTALAHAPRSGAALVEDLLAALDEQSVVVPGTAAAEAVLPRLAQSLRDVQTRRSELAKEVERILDDHPLAGVLISMPGIGIRTAARILLEVGDGAAFPTPGHLAAYAGIAPVTHRSGTSIRGEHPSRGGNKQLKRAFFLAAFASLKHPASRAYYDRKRAEGKKHNAAIICLARRRCDVLYAMLRDKKPYQPRLAT

SEQ ID NO: 408427 - protein, 429 aa, unidentified
MIGLGRARAEKAMMLKILRWWVGIDTGEEEHHACLVGADGQRLEERRIAHSGAGMLELVAWLNKVSGGRPGEVGVALESPHGAAVDVLLENGFRAFSINPKQADRFRDRHTPAGSKDDRLDAYVLADALRTDQHLFRPLRPLSPLVIRLRAWLHTESELKQEYRRLANRLRCLLCRFFPELLELSPAADEPWLWALLEKAPNPAVAARLRESTVQRLLRTHRIRRWSASAVIERFARTHLPAAPGIIAASEDSIAVLIPRLRLVHQQLKQCALKSEELLAHVPDATASDDEKREHRDVQILLSLPGAGRVIAGTMLTEASQALVSRDYHALRAQAGAAPVARSTGKRHRRHNDLVLMRRACNHRLRSAVFCWVNLAVQRDPKARALYQAHRQQGHSFARTVRAVADRLLAMLIALLKNDCVYDPARRTI

SEQ ID NO: 408428 - protein, 411 aa, unidentified
MDVVHERCAGIDISKADAKVCVRVQGRGRRRTEQSVRTWGATTGQILALRDELLERRVGLVVMEATGDYWKPFYYLLEDAGFEVVLANPRRVRAIPGRKSDVSDAAWLADLGAHGLVAGSLVPPPPIRELRDLTRTRTAIIRERSREYQRLEKVLEDAGLKLSTQTSSLTLVSVRRMLEALVAGERDPRVLAEMAQGQLRNKIPALAEALVGRFTEHHAFLVRLHLDLIDRHAEAIEELTGRIDAQMEPFRGFHTLICTIPGVSTLVADVVVAETGGDMTRFPTAQHLASWAGTSPGSNESAGKVKSSATRPGSPHLKGALGVAARAAARSKGTFLSARYKRIAARRGPMRALVATERSILVTIWTMGHTGELYADLGADYYRRRNPERSKQRALAQLRALGYQVTLSAVS

SEQ ID NO: 408429 - protein, 350 aa, unidentified
MIARSDAACFVGIDLHKDTLVACTIAAKDREVAYRKIACVAREKVREFLADLPRPSVVAIETVGFYRWLWTEAEPLVDQVVLADARGCRALAGRRIKTDREDAFNVAELLMTGRLPTAWAPPNHIQRLRDLTRHRNGLSRDHAKTLHRVKSIMNRLNRPGPARMDAAGLQRYLLASVERIEADDLMMLWQHQRRLVEVEQDRSAIERRIIDLMRAEEFRRLREILESIPGVGLITAATAIAEIGDFSRFPDAKAIGRYAGLTPTGYSSADKHRLGRICKTGSPDLRWVLQQAAWTAIRCEPAFKKVASKISKGDKKKKAAAVAVARKLLVLMWTLVRKDELYKAREPVAA

SEQ ID NO: 408430 - protein, 431 aa, unidentified
MLKTRENAAGIDIGAKKVFVFVEGQQVKTFYTFTEDFEILAQYLLTHKIQTVAMEATGVYWTILYDVLEESGIDVWLVDGRQTKQVPGRKTDVKDCQWIQELHSHGLLNRCFVAKDLVKELRSYYRLREDHINSSAMHINHMQKALTEMNIRLKEVLSQIHGVSGLKMVRAILQGERDKNVLLKMCDGRIIKNKRIEVLKALNGRYTKAGIFALQQALDGYNFYQGQISQCDEQIEHIIHKMGNGGNDNDLPSKRKPIRHNKPNVKDLGANLIDIFEGKDATIISGITDYTWMQLLAETGTDLSRWPTKKHFTSWLGVAPGQHHSGKMKRAKRKQGRPRAGQIFRQIAQSMLTSKTIAIGAFGRRIRSKKGPAVAIKAMARKLAELYWNVMVNGIDYAEHGIKKYEMQLLAQKQKTVERLAKELSLQLVST

SEQ ID NO: 408431 - protein, 371 aa, unidentified
MNKHTTKRNGNKQTNLADVSTCTTVAVDLAKRVFQVAGEDARGQVTYEDRLKSREAFHDWLRKLPPQVTVLMETGPGAQAWARQLQAQGQRVRILPAQRVAEHRSGAKNDRNDVLAILRAGRDVNIIAVPIKTPEALAMQALHRVRQGCVRRRTALGNQLRGLLLEHGIALAQGETPIRIRVPAVLEDASWPLPELLRELVAELLAEWEHLGQRIEVLSGRLDASARQDPTAVRLMTTRGVGPIIATAVLAKQVDPQRFASARQFAAYFGTVPDQHSSGQKLRLGRMSKRGDAYIRSLVIQGAHAVLQQVRADSRAVDDQRLLRWRQRHGVKGAAIRLANRTLRIVWVLLRSEQVYRRESGTPAREAVMTH

SEQ ID NO: 408432 - protein, 385 aa, unidentified
MNLKYSVGLDVSSKKIDACISVIDQRQRVIVKSSKKILNTKTGFEDLVVWILKHQKDSIPVVICMEATGIYHENCAYFLYEKGFTVSIILPNKAKKYLDCLGLKSKNDSIDAKGLSQMGAEQCLEAWEPIGVFFYELRLLTRQRQNLTELKTIIRNQLDALSHAMHQLASVTAQLKENISLFESQIKELDKAILEHIASDKEVLEKVKNICTIKGLGILTTAVILAETNGFTLFNNYKQVVSYAGFDVVEAQSGTRVGKTKISKRGNSRIRRALYMPSLVVIQCEVQQFKDLYDRTYKKHGIKMKSYVAVQKKLLTMIYYLWNKNEAYDPNYKVKFQEEEQELYSLFAFEKGIKSSPNKIEATQGKLPVNDPVCFLSVKTKIMKN

SEQ ID NO: 408433 - protein, 372 aa, unidentified
MSTLRFVGLDVHAETIAVCVAEGTGEVRPLGTIPNRLESIRKLVGKLGPVEQLRTCYEAGPTGYVLYWQLTTLGVACDVVAPTLVPVKAGDRVKTDRRDAEKLARCHRAGELTAVWVPDAEHEALRDLVRAREAGKKDQLRARHRLGKFLLRHGGRQPEGMTAWTKKYLEWVKSQVHFEQAALEATLSDYFHEVEHAAARIERLEKAIDAAVEKMPPKLRAVVEGLQALRGIAQITAVTIVSEIGNFSRFEPRKLMGYSGLVSSEHSSGNRIQRGAITKTGNSHLRRVIVEAAWAYQHRPWLGGYLLKRQRALNLSEETKQIAWKAQNRLHSRYKKLSAGGKNKNQVVTAVGRELLGFIWSVAVQIEAGDKA

SEQ ID NO: 408434 - protein, 319 aa, unidentified
METLQVSFKQVVSRGCGLDVHKKVVVATIDGEGLRKQTREFNTVTSSLKELREWLLENTVTHVVMESTGVFWKPVYNVLEPAGLIVWIVNAAHVKYVPGHKTDKKDSAWLCKLLLAGLLKPSYIPSKEQRELRDLTRYRTTLIQSNASNKNRIIRILEDANIKLSSVLSSTSGAVGTKLIDKICEGREITMQDIDEVYHKKLEATKEEIFDACQGFITSHHVYMLQIIRQEIDNTLHTIASLDQRIKEVLLPYENALELLKKVPGISSKSVEDLVAEIGLDMNVFPTEKHLSSWAGMSPGNNESAGKKKADVQPGETNR

SEQ ID NO: 408435 - protein, 389 aa, unidentified
MFYIGIDVAKHKHSCAVISEGGEKIFTHFEFANTTEGFSLLIKKLDASGVTPSASRACMESTGHYGYALWSHLSEYGFEVCLANPFQTHNYVKAQSVRKVKNDALDALALAQWLLIEKPAASALSPEETAELKSIARFRTFQSRIIGDCKRKVITLLDVSFPEYAPFFTDTFGKTSLAILMRYPSAEALSHAHIDALTNLMVRGSKGKFTGTHAAALRDLARNSFGIRYASEASAFQIRELLCQIEFTKRQMAAAEAKMTELLARAATPITTIPGIGTVCAAIILGEIGDIARFSKPSQLVAYAGYDPSVFQSGQFSGTNNHISKRGSRYLRWAIWLAADRARMFDPILHEYYEKKRGEGKCHKVAICAVARKLCNIIFAVLSTNQPYF

SEQ ID NO: 408436 - protein, 372 aa, unidentified
MDAPTRNGIECQSGSVCNHLNRKGASAMKITTVGIDLAKNLFQVHAVDERGRAVLRKQLRRDQMARFFANLPPCLIGMEACASAHHWARTLQKFGHTVRLMAPQFVKPYVKTNKNDVADAEAICEAVSRPNMRFVPIKSVEQQAVLSLHRVRQGFVRARTAQGNQIRGLLGEAGLIIPKGIVNVAKRVPALLEDAGDEVPASFRQLIQRLTEHLKELDRQVDELETQIKAWHRGSKLSCKLEKIPGIGPLGASALVASIADAKSFDNGRQLSAWLGLVPRQDSSGGKPKLLGISKRGDVYLRTLLIHGARSAILAAQRKALNTNVWLASLLNRRHPNIAAVALANKNARTVWALLAHGREFRADYAPEASAA

SEQ ID NO: 408437 - protein, 398 aa, unidentified
MTESSDYESVQVFIGVDVGKDTHHAVAINRSGKRLFDKALPNDENKLMSLISDLKQHGQILLVVDQPATIGALPVAVARSEGVLVGYLPGLAMRRIADLHAGEAKTDARDAAIIAEAARTLPHALRTLKLADEQIAELSMLCGFDDDLAAQTTQASNRIRGLLTQIHPALERVLGPRLDHPAVLDLLQRYPSPEKLASLGEKKLAAQLCKLAPRLGKRLAADIAQALAEQTVVVPGTNAAAVVLPRLALQLITLRKQRDEVALAVEQRVLAHPLYPVLTSMPGVGVRTAARLLTEVACRAFASVAHLAAYAGLAPVTRRSGSSIRGEHPSRRGNKALKRALFLSAFAALRDPLSRAYYTRKMSQGKRHNQALIALARRRCDVLFAMMHDETFYTPQAS

SEQ ID NO: 408438 - protein, 366 aa, unidentified
MKKTSTVQAFRSDIFKEQKLTIGLDLGDRWSFYCVMDEAGQIILEQKLPTTPEAMKQTFGKIPRCLMALETGTHSPWVSRLLSELGQEVIVAHAQKVQWITKSSRKDDRHDARTLARLARVDRELLGPVRHRSAQAQLHLTVIRARAELVSARTALVNAARGLVKSSGQRLPKCGTYQVSEKLAEGLSAELREVLVPLFKEIESLNGHIKEYDERMEKIAKEVYPEVALLKQVKGVGTQIALTYVLTIEDPYRFAKSREVGCFLGLRPGRRNSGESEPQKGISKEGDRYLRTMMVQGAHYILGPFGEDSDLRRWGLKLAERGGKNAKKRAVVAVARKLAVLLHRLWVGGEVYEPLRNSQKAKQEAA

SEQ ID NO: 408439 - protein, 422 aa, unidentified
MSYCPVAGIDVSKQFSDMCILSPDNKIFAQEKIYHDETSINRANALLQKAERLFFSKPVIVMESTSHYHLILFQFFSEHGYDVIVVNPLQSNSMKDFSIRKRKTDRVDAFKLAMMYRTKTLRPSQIPQTATRALRQLCRHRAELLNDVSSYKNRLTALLDQTFPGYDKVFSDVGGVTSCAVLVRFPTPTILLVEEESELVEVIAAASKSGYSFAKKKAGLLISAAQKAQTLGIHSCADETLIVCTIQMLRTLSESVLQIETAIDNLLAQRKEMRNNVSLLQSIPGVGSHSAAFLLGEIGDISLFKKPKQLAAYFGLDPTERQSGSFRGTKNKLSKRGSPYARAALHMGVVNSICKRGKDSAANPVLLSYYEKKCKNKPAKVAQAASMHKLVFIVFAILRDQKPFELKTPEQHAVEQGFVKAA

SEQ ID NO: 408440 - protein, 338 aa, unidentified
MFFIGVDPHKTSHTAAVLDAHEHLVSEVRVGADRSQRAQLMAFAAGFEPRCWAIEGATGTGALLAQQLVAAGETVLDVPPALSARVRLLDNARSDKTDAHDARSAAVVALRHSKLRTVGLEDHSALLRLLAKRHHDLVAHRTRAVCRLHTVLCLLVAGGLSKGLSAARAARELRRIRPTDQVGIERRRLAGELLAEVRRGDVDLIELKARIAGAVTASSTTITDVVGVGPIMAAYLIGYSGDVRRFPTAGHYARYNATAPIEASSGPNARHRLNPRGNRQLNHALHIVAVTQVRNDTPGRAYYLRKQAEGKTRKEAMRALKRRISDAVYRQLLTDTPR

SEQ ID NO: 408441 - protein, 410 aa, unidentified
MEVLHPHCAGLDVHKESVVACMRHMVDGKVSSEVRTFGSTTQELMALSDWLSAEACTHIAMEATGVYWKPVWHILSDGEFELVLANAAHVKNVPGRKTDVNDATWLADLLAHGLIRASFVPDEPTRQMRDLLRSRKQFVRERSSHTQRLQKTLEDANIKLDSVVTDILGLTGRRIIAALIDGQTAPQALATLAHRNIRATAAELEASLRGRVTAHHRFMLRLHLDHLDAVDAAIARIDKEVDGNVEPFRAAIEMLSTIPGISRLTAEVIVSEIGIDMGRFPTEGHLISWAGLCPKNDESAGKRRSTRMKKGAPWLKTTLIQCAWAATRTKQSYLRAQYLRLRSRRGAKKAIGAVAASILTAAYHMLKNGTLYQDLGADHFDNRAKGRQVLRLVKRLQNLGFEVQIMPQAA

SEQ ID NO: 408442 - protein, 355 aa, unidentified
MNSEKYIGLDVHQATISVAVLDSTGKVVMECILKTKAATILEFFAGLGGALSVTFEEGTWAAWLYDLLKPHVDEVVVCNPRKNALLKDGNKSERIAARKLAELLRGNQLKPVYHGETGVRMLRELARSYLTIVKDVSRVMNRLKALYRSWAIPSAGRDVYYSRPRAEWLAKIQEAGVRRRAERLYLQLDMLKKLRQQARRELLAESRKHAIPSKLRQIPYLGPIRSARAVALIQTPHRFRTQRQLWAYSGMALETRISGEYSYATGQLRRSKKLISIRGLNKNHNHDLKGLFKGVATMASERPGPLQNFYQDLLAKGMKPTMARLTLARKIAAITLAPWKKGESFDPEKLKSQAA

SEQ ID NO: 408443 - protein, 317 aa, unidentified
MNNQNTTTWIGVDISKKELEIHCYDSAFKLPATAANTKLGINKIISKLKNCDNPHLVFEATGGYEKHLLVLLQSEGVKASRISPSLARNFAKAKGLLAKTDSIDAQILTDYGIQFSPRETTPLDPIFEEIQALIKYRRHLNDELHRERMHLEHLLPKSVESMVKSRMKSLQKQMEKVISMMINLKEKSSSLDQAVELLTDTKGVGDNSALSLLVAMPELGKISNKEAASLAGLAPFNRDSGKMRGQRKIFGGRREIRQSLYMAALSGSRYNPVLKEFYQRLLEKGKPKKLALTAVMRKLLCHLNSLMKKHLQKPQSA

SEQ ID NO: 408444 - protein, 470 aa, unidentified
MKKHQERKTKSKGTKPIHDSQPDAAGIDIGANEIWVAVAADRTQEPVKRFGAFTQELKAIVQWLLDCRVRSVAMESTGVYWIPLYQLLEDAGLKVCLVNARHVKNVPGRKSDVRDCQWLQYLHSVGLLMGSFRPPQAICAARSIYRYRQNLLSMAAQHTQHMQAALDQMNIKLHHVIDDLSGVTGQAIIEAILAGQRDAHQLAKLRDKRIQASEATIAKALEGDWRSEHLFVLAAALENWKQVQQQIQKCDQQLLVYSRQFEACTTVAQPIKVMHLKPELEGTKWGESRAQKPRKKTSKNQPEGSWREELERFFGVDLTAIPGISVLSGLTLMTELGNDLSAFKTAHHFASWLCLCPDNETSASKVLRRRTRRSQNRVRQALRMAASTLHHNKSYLGDKYRRLRAKLGAPKAITAMAHQLARIIWTLITRRLPFDLSIFALEQRANEQRRLKSLSKTARQMGFQLIPIPA

SEQ ID NO: 408445 - protein, 416 aa, unidentified
MQPTLFVGVDVHRQQNVFCVMDQDGQELSERFSFDNNRPGTQELVGRLAHLMQEGDYEQLQLGAEATGLYWLHFCMTLSQDPMLNQWPLTLYAVNPRLTANYKRSFSDLDKTDDIDAFVVADRLRMGRGLPHPFVYDERYLPLRFLTRYRYHLVHNLAREKAYCLAMLYLKASEYTRRDVKPFSDVFGAASRAVLQEFASLEEIAALPFDDLVEFIDVKGKRRFPDPTDNARRLQQVALDSYSLPEPFHAPFQLVLNMSLQHIAHMERQQKRLNSAIAEQMASLPQTLDTIPGIGPVFVAGIVAEIGDIARFQFNQAKVAKYAGFKWRKSQSADFVADETPLARTGNRFLRYYFCEAANIARMHDADYRAYYDRKFREVRKHAHKRALVLTARKLVRLVVRLLTTNQPYRPRRMTA

SEQ ID NO: 408446 - protein, 446 aa, unidentified
MSNSKLKNKTVEPSVQEVPCPVSGIYFSSIGVDVHAQILVCHSQRYDPDSKSLFESDVRFGTSRQQLELFAQWIIEKNPEVVLMESTGVYWFSPYEALEQAGFNTDSIKVVKATEVKAAKGRKTDKVDAKRLSEFARMGSFHNSFIPTKDIREARQIGRALHKATQDCARYSNRLHKLFSASGSRLSSVFSDINGKTATKIIEAYLDKEWQEFISVVRKLNSRLKADFEDILDAFACVSAQTKTLLKEVRGQLMHARSYRDRLEELLRDSLMPYSKLVSRLTAIPGVKELSALKIVSEIGGDLSKFRNIEAFCSWIGICSGNNESAGKRKSGSSPKGNPYLRTYLAEVGQAIGLMKTTETQLRVCFQALKERRGHNRAVIAIGHKVVRVIYAMITKDEPYVEKDCLTLKAVRLARLVNSIRKAPEVELAVNGASVVDLKSGQIYKT

SEQ ID NO: 408447 - protein, 339 aa, unidentified
MKLYAGFDLHSRSSHLAVLDQEGKKVFKAKLANDTQVMTLTLEPYRERLVAIAVESTFNWYWLVDALMESGYQVRLANPAAIQKYKGLKHSDDSSDAQWLAEMLRLDILPQGYIYPREHRPVRDLLRKRMHLVKLRTSLINSLKNIIARNAGVSMPVEKIKQLTCDHVAPLLEGDDDLALCGRVSKEAIDYLTRQINKVEKAVESKVLLKQEYTLLKTIPGVGTILSLTIMLETGSVDRFPQVGNYASYCRKVPTRWLSAGKGKGKGNKKNGNKYLAWAFSEAAEMTRRLDPKMKAYYDRKASRTNLMVAHSALAHKLCRAAYYIIRDQVPFDSDKFFA

SEQ ID NO: 408448 - protein, 313 aa, unidentified
MDCMELDVGVDVSKPLLDVAVVQTDEEFQVTNDEAGWADLIKRFKGRKVRVIGLEASGGYERGLIKALRKAGFRVHRVDAYRLRQYARAMGRLAKNDRIDARMIARFAAQMPTREPYVDPLVEQMAELVVARRQRTKDKVRLSNQLEQVRDPMLRRITRQRLQRIEAEILLIGKRLAEIVASDANLATRDRLIQSFLGAGPVLSHTLLALAPEIGEVDRRELAALIGVAPFDDQSGKRNGKRHIWGGRAEVRNVAYMAAMTAARCNPALRAFKERLIANGKCKKEAIVAVARRMLGIITALLRTGQEWNPHHA

SEQ ID NO: 408449 - protein, 353 aa, unidentified
MITIGVDAHKHMHMAVALDERGRVTGQWRGENSAAGWDEATRWARALGEERRWGIEGGGGYGRGLAQHLVDLGEVIYDINPRLTAKERRRSRRVDKSDAFDAQAVAMVVHREEDTLPRVAAEDETVALDLLTAEREDAQAEATRLRNRLHHLLLHLDPEYHLHLSALTSIAGVRAAETYTTASGSLVQQERAAVVRRLAGRLRLVMEQVAELGRRIEALAQTRYAPLTRLCGVSLLTAGSLAGILGPGRRFASEAQLAAYAGVAPLETSSAGRVRHRLNRGGNRRLNAIVYRIALVQARSSPEARAYLARRVAEGKTKREAFRALKRYLIRAIWRLWGACLSSASVEPADYAA

SEQ ID NO: 408450 - protein, 550 aa, unidentified
MTSVKIAAKPCKHGTLPNDRLRLFCKTAKPTAVGDSLKSPALRGFVGGLRALATAALYLVIFSNGDITPQSTFKTGINALKSDDIISSCGQRISCFYLCSQVYCAQTGTSALWDVTYELDVEAMDRFLLISQQVVTFSSTRNVRNLNTRGAYTMYIVGIDIAKRKHEAAVIDGEGAVVIKPFSFTNNCSGYNRLLAMLTKAKLPLDEVSFAMEATGHYWLALFTRLQKEGFRVQVINPVQTNSIRSFYIRQAKTDPRDALLIAEVIRFGHFSESTLHPENIYELRELCRGRHAIVSMQADVKRKVVALLDQVFPEYETAFTNMFSDTSMAILQTCPTPKELSEMPFEELCHLIEVSSHKRFRMAKAQELQELARNSFGFAMAGDVFSTMIRLYAKHLDFLKQQVREMDRKIAEIMETLDTPITTITGIGPTLGAYILSEIGDISRFSSAAKLAAYAGIDPTMRQSGEYNGVRNRMSKRGSPYLRHAIWLAASSAVLHDPALKLYFQKKRDEGKPYMASVGHACRKMVSIIYAVMRDNKAYTPCIPNEISA

SEQ ID NO: 408451 - protein, 369 aa, unidentified
MEQSTEIFIGIDVSKARNAIAVATEGRNGEVRYVGEVDSSVDSMRRLIKRITAKHAQAHFCYEAEPTGYGLHRLIVSMGFPCSVVAPSLIPRKPGDRVKTNRRDAVALAKLLRAGELTAVWVPDESHEAMRDLVRARAAAVETLCVHRQQVSAFMLRHGRIFPRKTAWGARHLRWLQEQKFDHPAHQIALQEMVEAVRISKERVERLEAAIKEFVPEWSLAPVVQALQTLRGIDLIVAVTCATELGDLSRFDNPRQLMGYLGLTPSERSTGDTVRRGGITKAGNGRVRHLLIESAWTYRHPPRVGKEKLYKMEAAPPRIREIAWKAQTRLTARYRALGARGKKTTVICAAIARELVGFMWCVAKETQTA

SEQ ID NO: 408452 - protein, 387 aa, unidentified
MQSVTSATAVATTARANDITLFASLELSQSKWVVTINSPGGEKFSKHVVEGGDGAGLLALLSRSRAKAEQRHGVEIKSIVIQEAGLDGFWIHRLLLANGIESHVVDAASIAVARRHRRAKTDAIDGETLLRTLMAWARGERRVCSMVRAPSPEDEDRRRLTRERGTLLKERIQHTNRIRGLLSGQGVRDYNPLRRDRFERLEALRTGDGRELPPMLKAEIRRELDRIALVTTQLAAVEWERDALIRTDAKERDNPAALLLKLKGLGPEFASLLWLESLFRSFGNRRQVAAYGGLAPSPWQSGGIERDQGISKSGNRRLRKTMIELAWFWLRHQPDSALSRWFQARVGAAKGRIRRIAIVALARKLLVALWRYATQGVVPEGAVFKAA

SEQ ID NO: 408453 - protein, 408 aa, unidentified
MNPLFVGIDVSSKNNVAYLMKPDGSKHSSFSVQNNLGGAKLLSERIVSALGSMQLERVVIGLEATSIYGDSLVYALREDGRLGRFQRKIHVLNPKQVRKFKEAYSDLPKNDWVDAFVIADHLRFGRINREVYMDDYRYKALQTLTRARFDVIQNLTREKQRFANYLFLKCSGMAQDKDIQNTSATTIALMEHFETVDDLANADLEELTAFITETGRGKFADPDATAKAARAAAKGSYRLPKTVNDTVNQAMAVSIASMRALKGQVKVLDKAIEQQFEIIPNTLTSIPGIGKVYSAGIIAEIGDIHRFDSQASVAKYAGLVWNRSQSGDFEAEHSRMIKSGNRYLRYYLLEAANSVRRCDSEFRRYYDLKFKEVNKYQHKRALALTARKLVRLVFRLLKDNRLYIPPEG

SEQ ID NO: 408454 - protein, 341 aa, unidentified
MTAKSTFIYTIGVDIAQAECVWAAYHHPTQTFLARGTVARTQEALAAWAAELQRQWPQALVVLEATGGLERAVRRALQEVGLAVAIANPKRVQRMREAGGKAKTDRLDAETLALWGALYGRPQPPVSLAEERMRDLLLRREQVQAMVHQERMRLRQAQDAFVRAQIQAVIQLLEKQKADLEAEIRRQWQRWQEEVPQVADDVALLMSLPGVGFQTALELRVWMPELGTLRAKEVGALSGTAPQARDSGKRRGRRRIRDGRRRVRGALYMTVLTVLRRKEGPLWAFYQRLRQRGKPFYVAATALIRKILVIANAMLRDRRPWNPPQAQTRFRFHPVSPLTTS

SEQ ID NO: 408455 - protein, 410 aa, unidentified
MIKENYVYVGIDLHKETHTAVMIDCYNQKLGEITFPNRPADFPKLVTKVKKCNTDGKEVVYGLENAYGYGRALAVWLIDKGYLVKDVNTAISHRQAKHRGAMYRKSDSDDAKAIALATLNMLDKLPDACPNDAYWSLGQLVHRRDNIMKQRTRLVNQLHEQLCIAYPSYKQFFNDISRPTALYFWEHYPSRKYLKGKSVEDLRTELVPVSHNRCSTKNCEKILDAVASDKVKNIDYQDARDMVTLSIVSDLQHYDSQLAEVDKMLEQMYKMLGCTLTTIPGVNVITAVKILAEIGDIKRFSNANKLAQFAGIAPLHLSSSGKGKDVATKQGNRRLQAAIYFLAIQMVQVSSKGTPRNSVVRAYYEKRKTEGKTSQQALICISRRLISIIYGMLKHGTEYRMPVVESAGEK

SEQ ID NO: 408456 - protein, 352 aa, unidentified
MPMLEGQVDAVIGVDTHRDRHAGAVLDPNGGVRATLEVPSDRAGHARLLQLAQVHASGRRVWALEGTGCYGAGLTRFLVDQGEWVVEIDRPKRPRGRHGAKSDVLDAVRAGRDALARDHLTTPRQRGHREALRVLHTTRAGIVAAGADARRQLKALIVTAPEPLRDSLRGRPWRQQLRVCAGLVALPTDPVEHRATVRVLALTSQRALAARHDAEQLEAELRQLVTAVAPALLTQPGIGPITAAQLLISWSHPGRFRSEAAFAMLAGAAPVEASSGQVVRHRLNRGGDRQLNRALHTIVMLRQVHHGPTRAYTSRRIAQGRSQREIRRCLKRTVARQLYRLLERTATNPPSS

SEQ ID NO: 408457 - protein, 345 aa, unidentified
MPIVGGLDIHRKQITFDYLDTETGQVQRGQVSPADREHLRAWLARFAGRKDVAFAAEGCTGWRYVAEELAAAGVAAHLAEPADTAFARGRKRHAKTDKTDCRHLRMLLAEGRLPECWIPPGNILECRALLETYHDLRREHTAWAQRIHAVLFHQGAPALGEGTLRSEQGLAELRAAAAAHLSPAGQLQIATALDMTDALDARLHELRHQLLDAARHLTGAKVLAARLYGVGPVTALALTCWLGGAGRFSSSRKAVRFAGLDVTVHSSDRKGPPGRLSRQGPPVLRWAVYEAGKTHARSSAPDHGYYAQVKERQNGKRAALSEARKILRQACHILAELGDDALSAA

SEQ ID NO: 408458 - protein, 410 aa, unidentified
MAALARWVGRAIGLDVHRDFCVVAICEDGRVRSAGRVPSTPEGIRTLAESLLPSDRVALEVTGSCWEVARMLEPYVNRVIVVSPDDTGISSARAKTDKLDARTLASLLWKGELEAVWMPDERCRILRRRLARREQLMRARTRVKNEIHAVLHRRLQERPPCSDLFGVKGRQWLAGLELPVEERESVDAGIRQVEFLDAEIAAVERLIAQQALSWPEIRRLMTVPGVNLVCAATFIAAVGNANRFLTSRKLVAYLGLDPKVRQSGEAPARSGRISKRGSASARWALVEAAWTAVLAPGPLHAFYERTRDRRGHGKAIVATARKLAILFWCMLNRSEDYAHQQPSLTRKKLRRLEITAGAPKNTPRSAGIWSTNEMMREAELELARQAELSYKRTVTDQQAGAPAKRERARA

SEQ ID NO: 408459 - protein, 340 aa, unidentified
MEEYDGRQYVGIDLHRRRSVIVRMTPKGQRIGLPVRIDNDPFDLARQVASWGENPEVVLEATYGWYWAADVLADAGATVHLAHPLGVKGFAYRRVKNDERDAADLADLLRMGRLPEAWIAPPEIRGLREAIRHRSKMVAVRSGLKAQVHAVLAKQGVRVAVSDLFGVGGSRLLDELRLDAPYNARVASLRRLIDAFTFEIDIVAKRTSAQLKTHPGYQAIQAIRGVGPVLAAIFVAEIGDVTRFPRPQQLCPWAGMTPKHHESDTKVRRGRITKQGNPLVRWAAVEAVQTLREGPLGHARVRIGERRGANIGKVAAARKLLTLVYYGLRDGHIRCLTRPA

SEQ ID NO: 408460 - protein, 339 aa, unidentified
MSLYAGLDLHSSNTYIGVLDPQFNRIFKKRVCNDLDLILQTLEPFRDRLRGLVVESTYNWYWLVDGIMDAGYSCVHLANPSAIKQYEGLKHSDDQHDAFFLAQLLILGILPQGYIYPKEARPVRDLARKRMFLVQQRTAHILSLQSLLARCCGQKVSSSQLRKVTGQDLKRWLKEEHLVLSAQANLDNIVFLKQQIGRIEAAIQKQVKLTEAFNCLLTVPGIGKILAMTIMLEAGDIRRFANVGNFASYCRCVSTQRLSDGKSKGSGNRKNGNRYLSWAFTEAAQMARRFNSRFRSYYDRKAAQTNSILATRALSNKLARVCYYIMRDQVEFREESVSN

SEQ ID NO: 408461 - protein, 344 aa, unidentified
MEYYAGLDVSLRSVAVCIIDERGKTVLERSVPFEIADIEACLRSWSHPLKQVGFEAGAMSQHLFFGLKEAGFDVVCMEARQVNAALSAMRNKTDRTDARGIAQILRSGWFSPVHMKSCEAHAIRALLTCRKAIQRKCIDLANEIRGLFRVFGLRLPPRVDQGSFDERVRVIIEADPDLSRALLPLLDARAVLYKTYRELDRRVKQAASRDEVCLRFMAIPGVGPVAALTFRAAVDDPSRFTRSRTVAAYFGLTPKRYQSGEMDNPGRISKAGDPEVRTALYAAANAMMMRAVASSGIKSWGLRLTRRKGRRRALVAVARKLAVVMHRMWTDGTEFRRDPLEGVA

SEQ ID NO: 408462 - protein, 366 aa, unidentified
MKKISTAQILGNEIFKEQKLTIGVDLGDRWSFYCVLDEAGKIILEQKVPTTPEAIKQAFGKMPQSLIALETGTHSPWVSRLLTELGYKVIVAHAQKVQLITKSNRKDDRHDARTLARLVRIDPELLGPVRHRSAKAQIHLTVIRARAELVSARTALVNAARGLVKSYGERLPQCGTYQVSEKLAEGLSAELREVLVPLLREIESLSERIQEYDEWMEKIAQEVYPEVSLLEQVKGVGTQIALTYVLTIEDPYRFAKSREVGCFLGLKPGRRNSGESEPQKHISKEGDRYLRTMMVQGAHYILGPFGEDSDLRRWGRKLAERGGKNAKKRAVVAVARKLAVLLHRLWVSGEVYEPLRNSQKAMRAVA

SEQ ID NO: 408463 - protein, 358 aa, unidentified
MQLENRKPDFSSQKIFIGIDVHKKSWTVTIRNNQLALKTFSMNPSPEELIKYMKVHYPGGEYYSVYESGFCGYWIDKKLTMGGIKNIIVNAADVPTMNKEKLNKRDRIDSRKLARELESGSLTGIYIPGEIEEQIRTLSRLRFQLVGNRAQVKNRIKSLLNYYGEKIPEEYEAMNWTSRFIEHLRSEVLKDKMIPQESLHILIEELDDNQKRIKKVLKQMVQYSQEYGFNTTIKNLKSIPGISTITSMTIYSEIMNIDRFKSLDELACFVGLVPAVYGSGEKEKVLGLSNRHNRYLRNMLIESAWVAVRKDPALTLKYSELIRRMSKQEAIIRIAKKLLNRIRFVWKNNTCYSFALVA

SEQ ID NO: 408464 - protein, 349 aa, unidentified
MLADQVDYVVGVDTHRDEHVLAVVVAPSGAVVAQQSVRASARGYAQSLRFVEQHSSGRRVWAVEGAGHYGAGLARYLSRRGETVLEIGRGPRDERRLRGKDDSLDAIRAARTALASQALSLPRAGQRREALRLLLLARRSAVDVRREALVQLRSVIVTCPDRLREDLRGLPAGRLILRCSRLRRSSPCTPDELASRLVLRSLARRVEAATAEAAELEAEILVHVQAFAPQLLDEPGIGPIVAAQLIVTWSHPGRVRSEAAFARLAGVAPIPASSGQTIRHRLSRGGDRQLNCALHTVILHRRQHDPTTKDYIARRVAEGKTTRDAVRSLKRYLARHLYRVLDSQAPNMA

SEQ ID NO: 408465 - protein, 413 aa, unidentified
MDKIYDICCGIDVHKKLIVACLNHKRKKELREFGATTRELMELAEWLQKNECEIVAMESTGSYWKPLYNIMESYGLHAIVVNPAHMKAVPGRKTDVKDAEWIAELLQHGLLQPSYIPSKDQRELRELVQYRKSLVGERTRELNRLQKMLEGANIKLSGTVTNINGKSARKILEYILSGNEINEKKYDEMYEEKLIAHNLKASKEQILDDLKGFMSPLQRRMLKELLQHLDELNVHIENLNDEIDNFMKPEEKQASQVIQDVTGIGNTSAQTIIAVIGTDMERFPSDRHISSWAGLCPGDNVSAKKRKSGKIRKGNALLKSTLVLCAHAAVRHKSSYFHAQFKRISTHRGKKRAYVAVAHSILIAIYHILKDGVKYQDLGAEYYNHFNAERKIHAYLKKLKALGWEPPKEAVPA

SEQ ID NO: 408466 - protein, 331 aa, unidentified
MYVGVDYHKRYTVATQMDSQGVILNQVRLKNDPDSLRAFASSLPPGSKIALEATEGWYYFYEMLESYCPEIYLAHPLKTRAIAEARIKTDKIDSSILAHLLRANLLPTSYIPPREIRDVREILRYRASLVSLRTSIKNKVHALLSKNGVMMTYSDVFGKKALRSLEELPLRPCYKQELQGYLQCIVTLRRLIMEVSETIQRLAEESPQARLLITIPGISYYSSVLILSEIGDIGRFPSAKKLCSYAGLVPRVHSSGGKTRYGSITKQGSKWLRWILVELSHHFIKGSPRLKCLYARIAKSHGRNTARVAVAREMLKIMYVMLRDNRAFVIK

SEQ ID NO: 408467 - protein, 337 aa, unidentified
MIVIGVDVHKQSLTAAAVDELGRVFAEWSGPVERGVVAWARALGEERLWALEDCRHVTRGLEQELLDAAERLVRVPPRLTAPQRRRGRVRGKSDRIDALAVARAALQEPELERPRPGEAVLRELKLLVDHRDDLVAERRRCQQRLRWHLHELDPTLTVPLGALDRAIWLERLTRQLARREQTTQVRIARDLVGRCRTLTRSIGELERELHARTAALAPRLLQLPGCGALSAAKLLCEIGPIDRFPTDAQLARHAGVAPLDASSGKHQHHRLDRGGNRQLNCALHRLAVTQGRVHPPARAYLERKQSQGKTRREAIRCLKRQLARTVYTTLKNEPLLT

SEQ ID NO: 408468 - protein, 415 aa, unidentified
MALKIVYKICCGIDVHKTFVVACIASTNDKGVTSYESHRFSTYTSGLKTLLQWLLDRNCKDVCMESTGKYWIPVYNILEKDCSIVLAHPKYVKAIRGKKTDKKDAKWIADLFKHDLVAGSFMPPADIRQLRDLMRYRFKLTCFKSSEKNRLQNCLTVSNIQLGNVVSDTFGKSAQAILDKLLENPADTSFDLEPLVFKSLKKKLPELRDAIDGYITPEQAGKLKVIKAHYENLESRKAELEELILALAAPYQQELAILQTAPGISSDFTAIGIISEIGTNMEAFPSAKHLCSWAGLTPTNNESAGKKKSVRVSKAGCYIKPLLVQCANAVVKSTKHPEMRNRYLRLKKRRGHKKAIIAIARMLLTALYHMLKNGENYNAELYQKSDLLPVDREITVEQALMIARNQGYKIKSATA

SEQ ID NO: 408469 - protein, 399 aa, unidentified
MYVGWDWASERHDVSVVDQDGKVVFHPGVEHTEAGLESILRRLRRFGEPAELPVAIERPSGLVVERLLAQGHPVVPIHPNPFNAARPRWGASRAKSDPGDRDRLADFLRTDGHRRRRLEPLGEVTRNLQALVRSRDDQIEAKVAATNQLAALLDAHWPGAGAIFGRLDSEIALAFLETYPTPESAARLGEKRMARFQVRHSSCGRRTPAELLARLQSAPVAPNRLDPEILRELVLAQVRLLRTLLASIASLDRAIAALLPEHPKTPLLAALPRLGGGVNLAQVLAEAGPILDRALDVEQAAAECGASPVTKASGTSKSVCFRWAANTRARKALQTFADNSRHRSPWAAQVYAQARARGKRHPHAIRILMRAWLRVIWACWHSGIAYDPIRHGGEQRAAA

SEQ ID NO: 408470 - protein, 352 aa, unidentified
MITIPVITERCAGIDVGKRGLAAAVAVGPADKEAEIRTRWFGTTIPALRELRTWLSEEGCTTVAMESTGSYWIPVKNMLEQDVRITLVCPRKHRPRKGDKTDFRDAVDLAIHHRHGLLTGSYLPERGVVELRDLTRRRKKLLGNLRSEKNRIQKVLETASVKMGNVVSDVFGVSGQEILQTLLDRSPVTAEEMAGMAKKKLRQKIPQLTEALQGHQMNDHHRWLIRQSIEHAAFLDCQVEEIEKKIQIQLEPCRRQYELLMTIPGIKEAAAANILAEIGPDMTQFPTADQLCHWAGICPGNNRSAGKSKSSHIRKANKFLLAGLVESSWGAVRKEGSTFQRKFRRWIKRGER

SEQ ID NO: 408471 - protein, 346 aa, unidentified
MTILDRTRPVTGGVDTHLDLNVAAALDSIGGLLGVAEFRTTRIGHGLLVDWLGGFGPVARVGVEGTGSYGAGLARFLRGAGIEVVEVDRPNRQTRRRTGKSDPADAIEAARAALSGRAQGAGKTRDGNVEAIRALVVAKRSARSSKIKALNQIRHLGFTASDELRERLSGISRQQLGAAAARLRPRAGSDAITFATKTALSTLGRRVLALDEEKERLNVLLAELVGKTAPSLLELHGVGVDTAATLLVAAGDNPGRLRCEAAWAHLCGVAPIQASSGKVTRYRLNRGGDRQANSALWGIVITRLRSDPRTQMYMERRLKEGRSKPEIIRVLKRYVAREVYPHLPRG

SEQ ID NO: 408472 - protein, 426 aa, unidentified
MQYALPLVLPDVPAGGVCAGIDWATADHVACVVDMTGRVTDRFSAAHDKAGIAAMIARLRRNKVTEVAIERGDGPLVDALLTAGLTVVVITSRQVKNLRSRFGAAGAKDDRFDAFVLADTLRTDRARLRPLVPDTPATISLRMAVRARRDLVRHRVAVCNQLRAHLAVAFPAGITLFHDLDSPISLAFLARFGSQDAAAELDEQAIGAWLATIAVRGRPAPASVLHARLQAAPPGATGADGAAQAGVTAALTATLTALSAQIKALETQIAGQLAAHPDRHIFTSLPRPGTVRAARLLAEIGDCRSRFPDAESLAGLAGVAPVTRRSGTRIAHGFRWSVNRQLRDALCDFAADSRHASPWAAAIYDDARARGKDHPLAVRITARAWSYVIWRCWHDGTAYDPAKHNALQAVLARQAAQTAGARQQDQ

SEQ ID NO: 408473 - protein, 307 aa, unidentified
MFVGIDVSKDRLDVHLRPSGEAFAVPRDGEGIEALAARLGELDLELVVIEATGGFETVVAAGLAAAGLPLAVVNPRQIRDFARAAGRLAKTDTLDAGIIAHFADAVRPEPRPVPDAAARALGELVARRRQIVEMMVAERNRRRLMTQKKAIRTVERVLATLQTQLSDIENEIDGAIRGTPAWRAKEDLLISVPGIGPNIARTLIAELPELGNTDRRSLAALAGLAPFNHDSGKMRGRRAIAGGRAPVRSALFMAVLVAIRRDMPLALTYHRMVQAGKPPKVAIVACMRKLLGILNAIIRDQKPWQNI

SEQ ID NO: 408474 - protein, 422 aa, unidentified
MAVFCGIDWAEGHHDVALIDGDGSLIAKRRINESLDGVAELAAMLATAGDSAETPIPLAIETPRGLLVAVLRATGRPIYPINPLAVARYRERTSVSGKKSDHVDAMALANILRTDAHLHRMLPDDSPEARSISVLARAYQDGVWRRTKLVQELRARLREFYPGFLAAFAAGSGSGRGLSTTQLASGDARAVLAIAPSPADGLTVSKARVETALRRGGRQRRISSLAASVVAGLRVPQLRQDPRVEQAMRVETLALLGVLDVACASVDQLADALVEAFSQHPDHEIITSFPGLGDISGAIVLAEIGDDRSRFRDDRALQAFAGSAPVTRASGKSRTVTRRRTKNNRLAAVGYSWAFTAAARPSPARDHYLRRREHGDGHPAALRHLFNKMLGQLHHCLLTGHTYDSTKAYPHALPRHSGAVAA

SEQ ID NO: 408475 - protein, 286 aa, unidentified
MAIVTIGLDLAKLVFQVHGVDEAGKAVIRRQLRRVEIEAFFQSLPPCLVAMEACGSAHHWARRISALGHEVRLIAPTRVKAYVQRGKKNDANDAAAIAEAVTRPHMTFVPVKSAEQQGVLMLHRTRDLLVRQRTQSINALRGHLAEFGIVAAQGWRKVRELIDGLDNAEIPAQARIALQKIAEQIDACGKGVDALEKQIVAWHKTDEASRNLATIPGIGPITASALAASVVDPKSFKSGRQLAAWLGLVPRQNSTGGKDRLGRITVSVAPPPPSASPARMRAFLQQ

SEQ ID NO: 408476 - protein, 418 aa, unidentified
MEAIHDRVAGLDVHKKTVVACVRLTTGKRMERECRTFDTTTAGLEALLAWLEETGCTHVAMEATGVYWQPVWRILSEGEFELILANAAHIKNVPGRKTDMNDATWIADLLACGLIRASFVPAPQMQDLRALLRTRKQAVREQTRCVQRMQKALEQANIKLDSVISDLLGASGRRMIEAMIAGESNPEVLASLADRRLKATRAELRDALRGRLSETSRFLLQTHLKNWDAQDASIKAIDQQADRLIGGFEQAARFRLLIMLLCQVPGVSKLAATSILAEIGIDMSRFATAGHLVAWAGLCPGQNESAGKRKSSRLRKGAPWLKTMLVQCAWAAKRQKNSYYRAQFYRLSSRRGPQKAICAVAASMLTAIYHIISRGTAYQDLGADYFDRRSADHKARRLVAQLNKLGFDVQIQPAAEAA

SEQ ID NO: 408477 - protein, 355 aa, unidentified
MKYYTSTTQFNCGIDLHARQMYVCVMDRDGKKLVHTNVRNNDFEFFLKLVAPYRHDLTVCAECMFGWYWLADACQEAGIHFVLAHALYVKAIHGGKNKNDRIDSEKLTHLLRSNLIPPGYVYPAAKRPLRALLRQRILYVWNRGDLLSRIQSHQLAYNRPTFRQTPYNRDPWEKQLLAHEDHPARQFALQNDLALIRHYDAQLAILEKKLLKLTRQTAHRDFTLLQTVPGIGEHLGLTLLYEIGDIQRFPTVKDFVSYCRLVKGTVASAGKIKGLRGAKLGNPYLRWAFGEAAVIAKRDHALLGPLAQRLEARMGGNKFKANTVLAIKLARAVYFMLKNKTVFDPDRLVTALSKN

SEQ ID NO: 408478 - protein, 390 aa, unidentified
MILVGIDVAKDKHDCCIINSDGNFPEEVFSILNNREGYETLYKRICSLAVDLAKVKVGLESTGHYSSNLLAFLLDKHLTAYVINPLRVNLFHKGQSLRRTKTDKIDSRNIAHLLMTDSSLKPYSLSSYHMEELKSLTRYRSSKVRERTKLKTSIARLVTILFPELEQLVSSIHIHSIYAMLEKFPGSAYIAATHLTRLTALLLKASRGRFGRETAIRIRDTARQSIGAVSPAKSMELQHTIAHLRVYDQEIGEIESEIEKIMDDVNSPITSVPGIGMQMGAVILAEIGSFRRFDSPDKILAYAGMSPSTYQSGKLTGSYSRMEKRGSRYLRYALFNVTRYVCHYDPGFTAYLSKKRKEGKHYYVAISHAVKRLVRVLYAMEISGNRYKTA

SEQ ID NO: 408479 - protein, 340 aa, unidentified
MGEVTTIGLDLAKHVFQVHGVDADGATVLRKSLRRAQVLTFFSRLPPCLVGLEACATAHHWARELSALGHEVRLMPAQYVKAYVKRNKNDAADAEAICEAVQRPTMRFVAIKTAEQQAGVLLHRGRERLVRQRTGLVNALRAHLAEFGIIAPQGLRHVGKLIAIVRDDNDARLPALARQVLMVLAGQIEQLEAAVAALERQLVAWHRVNPVSQRLATIPGIGPIIATAIAATVTEPGQFRSGREFAAWLGLVPRQNSTGSKTRLGGISKRGNQYLRRLLINGASANLLRSRATKADPWVIGLRRRRPSLVVAVALANKTARIAWAVMQRQQPYQRMAAAA

SEQ ID NO: 408480 - protein, 358 aa, unidentified
MNRNTGMNAGQIIGTMNGLQVFGLDIAKHVFQEHTVDMGTGEISNIQLRRAAVVEHFANKPPCLIAIEACGGAHHWARELKKLGHTVRLIHAKAVRPFVAGNKTDATDARAIWLAVQQPGVKFVGVKTTEQQATLTLHRQRDLLMKMSTMQTNALRGLLYEFGATFAKGRKALFKDVEQALEDLADKLPQMVRDSLHEQVERIKALGQDMQAIEKRLALQLKVDPQMQRIAQIPGVGVLTATAAIATMGEASAFKSGREFCAWLGLVPTQTGSGGKVRLGNISKRGDTYMRTLLIHGARSVLHHVKDPGPWLQQIKERRPANVVIVAQAAKMARTIWALTAKETDYQRGFRSVRPLAA

SEQ ID NO: 408481 - protein, 359 aa, unidentified
MQSMDQGGRQRRVVIGVDTHKHVHVAVALDELGTPVSDTAVPADRGGYQRLLEWAVRQGTVMAFGIEGTGSYGAGLTSLVRRRSHRVVEVARPDRRERRLNGKSDLLDAHNAARAVLAGVATALPKDADGVVEMLRQIKVAKDTAVKGRTSAMITLKALIVNVDPALREELQALPKMALIERCAALRPGPVDTPIAASKHALRSMARRWRHLHEEIRGHEELLEDLTRSLAPQLLDAFGIAADTAAEMLIVAGDNPDRIRSEAAWAKLCGVAPIPASAGTTTRHRLNRGGHRQANAALYRTVIVRMRFHEPTIAYVERRTAEGRTKAEIIRCLKRFVAREIWALIRPLRTQPTPAAEVV

SEQ ID NO: 408482 - protein, 412 aa, unidentified
MDTMYRCCAGLDVHKETVAACVRRVDAGGRVSKDIRTFGTMTGELLKLLDWLMAEAVEAVAMEATGVFWKPIWNILDGSVKLILANARHIKNVPGRKTDVKDCEWIAQLCQYGLVRASFVPDRPQRELRDLTRHRSQLVAEQTRVANRIHKTLEDANVKLGSVATDILGVSGQKMIRALIGGQTDPAELAELARGRLRGKLPALREALCGHLTAHHRFMLGQLMDHLEYLDRQIVQFDERIAELMAPFVHAVQRVMTIPGVGLRTAQNVLAEIGTDMGRFPTDQHLASWAAMCPGNRQSAGKRQSGRTNHGNHWLRAALGQAAWAASRSKKTYLAAQYRRLAGRRGKKRAIVALGHTILVMMYHMLRDGVDYRELGPDYLDKLQPQRLTTYLVKRLESLGHKVTLTPNDQAA

SEQ ID NO: 408483 - protein, 312 aa, unidentified
MFEGKVVHEEETANHQNAIMALLHQFEEDYGIAGGQMLVCAEHTGQYTFPLACACKAVECKLWLENPAEIKYSSGVQRGKNDKVDAKRIAIYAKRFQDRVQYYERPTEDIERLKQLESERTLYVTDLAKYKGQMKDQKDYMPRKPYERKMKRLQTLMDDLEKAIQAITYEMDEVIASCPVLCRQRELLMSIDGVGRVVATNMIITTEAFTRFDDPRKFNCYAGVAPFSYSSGSSQHSKARVSHRADKVMKRLLHLAAVAVTHRIGGELKKYYERKVAEGKNKMSVINALRAKIVARMFAVIKRNEKYKPILS

SEQ ID NO: 408484 - protein, 427 aa, unidentified
MEVIYSKACGVDVHKTFIVAVICDSTSITPKYLRKRFSTFNNSLIQFRNWLIENDCQNVCMESTGKYYIPVYNALEGYISNVVVANPKWVKCIKGEKDDNKDAKWIADLFKLGIVRSSFIPHKDFRILREYTRYLYKLTCNMVSEKNRFTNALTVGNCKLDMTFTDIFGKSSQDIINIILNNDSFSDNDIIKCLRKNCKSSHEDILSSVNGITFTLEQKLRIKLIKEHIDYLNNQIKTLRDIIDTLVAPYENYINLLCTIPGVNRNSAITILSEIGTDMKQFSNHYRLTSWAGLAPGCNESAGKKKSVKISHAGVYLKPCLVEVAHCAVKDKTNSYYADKFNKISKRRGKKRSTIAIARKILVAIYHMFSTGEVWNPKDLASIETNNNDRIKYTKNNFNSSLKQLLSLGLTSEDLINLVTQNATLNT

SEQ ID NO: 408485 - protein, 385 aa, unidentified
MANQNDLSRSVVAFEQHNTIIAVIEMSLNSWLVAGIVPGIERHPLKKLSINEEVLLKLLHRWRDEAVKAGHTISRIVVAFEAGRDGFWLARWLRARGIEAYVIHPTSVAVSREHRRAKTDRLDTELLKRAFLGWLRGEPDHCSMVAIPSLQEEDAKRPTRERENLVGERTRIINRMKACLVRFGIRNFNPTLRTAPERLNALCTPEGVSLPPNTLAELRRDLARLRFVMDQINEIEVARLQRLERAPTAEPHAMVRLLARVIGVGIETADMLVHEILSRKLRDRRAVARYAGLTGAPDESGSKRREKGLAKAGNARVRRGMIQLAWRFLLFQKDSALSQWYRTRTESAGKKRKTMIVALARKLLIALWRLVTTGEVPAGVVLRAA

SEQ ID NO: 408486 - protein, 363 aa, unidentified
MTDGICFVGLDVHARKTVAAAVQLGSGEVFKAQLPGSPAAALQWLATLPGPVRAVYEAGPTGFGLARAARAAGVQMMVCAPGAIPRQPGDGIKTDTRDALKLARLHAAGQLRPVVVPAPELEGLRDLVRAREDLRGDLMSARHRVGKLLLRRGLVWEGPGDAWSQRHLRWLGTIRFDDALVELVFGEYLAHHEVLLARRDRLDAILLEQSTQGSWAPTVARLRCMRGIDTLTAVGLVAEIGDITAFMHPKQLASYLGLVPSEHTSGTKRRQGAITKAGSSHARRLLVEAAWHYRRPPRASETLRRRQVGQPAAAIDAAWRAQLRLHRRWAHLDAARAKKRTTVAVAVARELACFVWEIAQQPD

SEQ ID NO: 408487 - protein, 340 aa, unidentified
MSEITTIGLDLAKNVFQVHGIDGTGQVVVRKQLRRGQVLGFFAGLPRCLIGMEACATAHHWARELMALGHEVRLMPPYYVKAYVKRNKNDAADAEAICEAVKRPTMRFVSVKTAEQQSALMMHRARDLLVRQRTMLVNALRGHLAEFGLVGAQGLHKVAALVTIIRNGTDERIPEGARQVLTVIADQIDAVEATVAALEAQILAWHKINPVSQRLATIPGIGPIIATAIAATVPDPSVFRSGREFAAWLGLVPRQNSTGGKARLGGISKRGDSYLRRLLVNGAHAVLFWAKAAKTDPWLMSLRARKHRLVVAVALANKTARIAWAIMSKGEIYRTVAAAA

SEQ ID NO: 408488 - protein, 329 aa, unidentified
MEHFAGLDVSVKETSVCIVDEAGRITREVKVASTPEALMQVLRAPAYHLKRVGLEAGPLSQWLFGALAEANVPVICVETRHMRAVLKAQINKTDRNDARGIAQMMRAGLYRPVHVKTLRSQKLRMLLTHRKLLQSKAIAIENDLRATLRNFGLKVGMVGTAKFEARIKELVGDDSDLVLMVEPMLIVRRVLREQLAILHRHLLALARDDGVCRRLMTVPGVGPVVALTFRATVDVPARFQNSRAVGAVFGLTPCKHQSGESDYTGGISKCGDEMMRMMLYEAAQIPADPRNKMVLAEELGNADRQTPWREESDCGAGAPVGRDHAPHLD

SEQ ID NO: 408489 - protein, 402 aa, unidentified
MDVHKEDVKVCLVWRDEAEERCEEVRTFSTMTRPLLLMREWLESHGCKVVAIESTGNYWKPIFNLLEGDFEVMLVNPGHLKYVEGFKTDPKDARWLASLLEYGLLRGSFIPPREIRDLRDMTRYRRRLIEEHTAEVNRVQKILEDANIKLASVASNVMGVSGRAILEALLSGEMTPEQMAELSKGRLRNKREELAESLVGRFRPHHALLLSRMLEHIDFLDNAIEDCDRVIEDMLRPFVLKIENMDTVPGIDVRAAQDIIAEIGLDMSVFSSHKHLCSWAAVCPGNHESGGKRKSGKTRKGNKWLRAMLVQCAHAAGHSRKTYLGAQYGRFAARKGKQRAAVAVGHSILEAVYFILRDDVPYQELGPEYFDKINKDHIIRNYKKRLEALGLVVEVSEAPVAA

SEQ ID NO: 408490 - protein, 398 aa, unidentified
MFKHFLGINISKDSFDFALLDNKAKSVLNDKLSMSKDGFNTLKEYLSSHDKDEVLFILESTSIYHLPLLSFLLECDFKCCVVNPLLIKSFISSTTLRKTKNDAKDAKAIALFGLKSHSSLKLASLDNLNSLRSIVRERESLAKQVARLKTEIKANLNTLFPEMLKNTNIFTTSILNLLLYAPSRKRIRNLKQKTIERILNDTKGNKSRISAPDILSLAKSSIGINDKHLEFVLQSKIRRLFSINEELSLLDEELSLCLKDSNINDDIDLLKSIPGIGEVTSKNFLIETDNITRFKSVKQLCAYIGIDPSLKQSGSSINIQGKISKRGNANLRRTIYQMAIGVIRSCEKFNTYFNKKRAEGKKYKQAVIAVANKLLRTIFVMLKNKTKFDENLAYSVSK

SEQ ID NO: 408491 - protein, 347 aa, unidentified
MRFYTRQHRHYGGVDLHARSMYVCVLDRDGNVLVSKNIASAPGPFLELIAPYREDLVVAAECMFTWYWLADLCAREGIAFVLGHALYMRAIHGGKAKNDRIDAHKIAGLLRGGMLPQAYVYPQAMRATRDLMRRRNYLMRQRAELLAHITNTNHQYNLPALGVRPARPAERSGLLEHFAEPQVRRSVAVDLSFVEHYDRELPALERYLESNAQAHDPLGLAIVRTIQGLGQVLGLSILYEIHDIGRFARVQQFLSYGRLVKPTKESGGKILGHSGRKIGNAHLKWAFSEAAVCFLRANPRAQALRARLAAKHGKGKSLAIIAAKLARAVYFMLKRREPFDPERFFAH

SEQ ID NO: 408492 - protein, 366 aa, unidentified
MSKRSTVFVGLDVHKNSISVAYALENSRTEPVFVGSIGSRQYDIDKLVRRLQSKGSGLLCAYEAGPCGYVLHRHLASKGIECLVVAPSLIPKKPGERVKTDRRDAVELARLLRSGDLTPVYVPGVEDEAIRDLCRARQDALIDLKGARQRLKSFLLRLGLHYTGRANWSDAHRRYLSKLVCPTPVQQIVFQEYIRAIDQHLERVDRIEQQLREVVFSWRLLPLVEALQALRGVQLITALTIVAELGDITRFDSPRQLAAFLGLTPSEYSSGDSRRQGRITKAGNSNARRVLVEGAWAYRYPAKVSPLIRKRLEKLPQPIQDISWKAQVCHLSRDSRPRISGIGGHPVSPDRGPLISLEWGPPHFGR

SEQ ID NO: 408493 - protein, 411 aa, unidentified
MQVVYERCAAIDVHQKTAVTTIMITQANGHVQKETRTFATMTSDLLRLDDWLHELGVTVVAMESTGVFWHPIFNILEEGREIILVNAQHMKAVPGRKTDVKDSEWLADLLRHGLLQASFIPPQPIRELRDLTRYRKTLVQERSREVNRLQKLLEGANIKLAVVATDVLGKSGRDMLEAVIGGEQDAEALAALARGRLRAKLPDLRKALEGRVQPRHRFLLQQILAHIDFLEHAISRVEREMEHYLLPYEEAMALLQSIPGLQATTAAGILAEIGTDMSRFPSDKHLTSWAGVCPGSKVSAGKRLGGRTTRGDTHLQALLGEAAWAASHTKGTYLSAFYQRIARRRGKKKATVALERKLLVIIYHVLRTKKPYSELGPDYFDQMQKTRLERHHIHRLEQLGYTVTLTPKEAA

SEQ ID NO: 408494 - protein, 412 aa, unidentified
MQDILTCAMGLDIHRDVIVACLAKGELGTDPEIEIRSFSTLIPEMRKLRDWVLEAECRYVAMESTGIYWQPIYEMLEPCFDGQISILVVNARHMKNVPGRKTDMRDAQWIATLLRAGLLKGSFIPDKTFRELRHLTRYRKSIVRDITAQKNRIDKFLQSSGFRFTAFLSDAFGASGRNIIRHLMEYGSISREALDRCLKTQTRKRIDEILIALNGSLSEHQRGFLRMIFGHLEALEQHRHTVEDAITKEITKHEEALSLLCSIPGIDVTAAAAIIAEIGTDMSAFPDSQHICSWAGLSPGNNESAGKRKSAHINKGNPYLKSMLCEVGWVISGKRSLYLSGWYWRIKQRKGAKRATIALARKLLALIYTMLKTGSPYNEDCFEIRRKQSERKRTSRMVNELQKLGYFVVAPG

SEQ ID NO: 408495 - protein, 476 aa, unidentified
MVTPNEKPDKPTNPDKPTKPNQSRQRSLPVPVPVSAAALNVINPDAAGIDVHSDMHMVCVPADRDANPVRQFGANTADLQEIAAWLKKCRVRTIALESTGVYWIPLFEFLESEGFEVNLVEPGQLSRCGARPKTDVLDAQWIQRLHSYGLLRASFRPPDSVLALRAYWRQRQMQVRYAAGHVQHMQKAMEQMNVKLTEVVSDITGLTGMAIIGAILEGQRDPIQLARLRHERCHHSEEQIALALEGTWRPEHLFELRQAHELYQFHHRQITECDQQVQAELAKFPNRAGAKTHAVKPRKRGRKSNDVRFEATGPLFQALGVDLTLIEGIDVGTALVILAEIGVDVSRFPTEKHFASWLRLCPPQDESNKTKKRRGHRKGTNPVTLALRMCARSLGKTMTPLGLFYRRIRSRIGGLGAVKATAHKLACLVYRMLKYGKEYVTQSMEEYEAKMEANVLKALKRKAAAMGFELSPLPPQ

SEQ ID NO: 408496 - protein, 413 aa, unidentified
MKEVYRRCCGMDVHKDTVVVCVLPPVGGEGKAIRKTYGTFRNDLIRMRVWLKQLKVSEIAMESTGVYWRPLWNVLEDEGFRLLLVNPAQVKALAGRKSDGRDAQRIAEFLQDRRLDASFVPPAEIRQLRMMLRHRIALLEQRNEVHNQIRDLFETAGLKLSSVVSDLLGVSGRRILEALIAGEQSPEILCWKLRGRLRAKEKLVKESLKGYFTEFHRSMLESHYKHYRFLTSEIGIFEERIARAMKPYDSQIDLLVSIPGVDRIVAWHLIAELGMDHTTFPDADHCASWAGLVPGQNESAGKQKSTRCRKGNRTLRRVLTQAAWAASHCKAGYMPAFFRRVKSRRGWAKAIVATAHKILTIAFNVLRTGTPYHDLGHDYFDRLNPARATKKLVARLEALGHHVQLSPLARSNA

SEQ ID NO: 408497 - protein, 341 aa, unidentified
MTAIGIDTHKDSLAACAVDDLGGVLGEATFANDPAGHADLAAWAARVAPGARLGFEGSSTYGAAAARMIERLGYAVCEVPPQLSRRERGRTRRAGKSDPGDALAIARVTAREADLPPIRQADPTTELRLLLAARTDLVGEATRVRNRLHADLVVLVPGYGATAANLVWERHLVTIARALRRLSGVHPELARDRLVELRRLQGRSRALTGRIERLIAGHPLLELPGVGHLTAAALVAATGDPARFRSPDAFAMLAGVAPIPASSGQTQRMRLNRGGNRQLNRAMHVIAQVQARCHPPAKVYVARKIAEGKSWRDAIRCLKRQLIRTVFRLLVAGSQQAKAAA

SEQ ID NO: 408498 - protein, 469 aa, unidentified
MQLLYRCCAGLDVHRDTVSACIRRQVRGKAEAVIEEEVFGTFTEDLERLGRWLKKHHIQQVAMESTGVYWIPVWNVLETKVELMLVNPATVHALQGNKTDRIDARRIAEYLQHGLLRGSFIPAKPIRELRELTRMRVHGQQDRNRVVNRIARLLETANLKLASVISNIVGMSGLEMLRLLAKGQTKPERLAECARGHMRVKIPALVQALDGRIDEHFRWKLSELLRKLDALDAEQGRLDARLSELAAPYADVLRRLDTIPGVDRIAALALLAEFGSDMAQFPTPAHLASWAGLCPGNAESAGKRFSGRTRKGNRYVRRMLVQSAWAAARTNDCFLAALFFRTAQRRGMKKAAVAVAHRILIIAWHILAEAGVEYHERGGDYFDRRNPQRTAKRLTERLQAIGYTVTLTPRSDTHALPKKTKPARAKPPRPCIDPAICQRCARRQLPRCICLLKPKPRNPSVVSSVVSTT

SEQ ID NO: 408499 - protein, 414 aa, unidentified
MRIVYPRCCGLDVHKKSITACLLTPTEQGETQQEVRRFGTMTRDLLELSDWLTGNGVTHVAMESTGVYWKPVWNILEPACTILLVNAQHVKAVPGRKTDAKDCQWIADLLQHGLLRGSFVPPTPVRELRDLTRTRASLRQDHTAVANRMQKILEDANVKIASVATDWLGVSGRLILNRMIDGEQDSGKLADLCRGRLRDKIPQMQLAVEGRMTEHHRWMLRLQRQQLEFLEHQITQLDIRIQEQINDYQRAVDLCTTIPGIEVVAAGNLIAEIGVNMDQFPSAQHLASWAGLCPGNNESAGKRLSGKARNGNVWLRRNLCQAAWAASHTKNTYLSAQFRRLAARKGKKRAIVAVGHTILVIVYHMLKNQQPYRDLGSDYFDRRNSEQLKRSLIHRLEGLGLQVSVKSPNRPEER

SEQ ID NO: 408500 - protein, 316 aa, unidentified
MSQFNVFVGIDVSKDHLDVHLLPDEQSWRVANDEAGCAELSERLMGLSGPVLVVMEATNVFWRLAATRLASAGLNAAVVNPRQVRDFAKATGQLAKTDAIDAHVLALFAQRIEPPVRALPSEQCQVAAELLSRRAQLMGMRVAEKNRLSSARAAKVRKDIAATIAFLEKRLAALDEEIDQWLKSTPIDQSRANLLKSFAGIGEHTAKSLLITLPELGSLTAKQIGALAGLAPFARDSGNKRGQRQIRGGRSSVRAALYMPALTAIRCNAVIRALYQRLINAGKHHYVAITACMRKMLIILNAMLKSNQPWKNPQEA

SEQ ID NO: 408501 - protein, 348 aa, unidentified
MKIVGCDLHARQQSIAMLDTETGELTEKVIRHEGNGVREFYAALGNSVVVGIEATGSMQWFLELLEELGIESRVGDPAKIRAAETRKQKHDRRDARLILDLLERDRFPAIWMPTSGQRDLRSFLRDRHQWVQMRARLQHTLQAMALNHALRKGPSLWSGRGQDALRKLPLPPYASQRRNELMSLYAQLQRRIQELDKQVEEQAQQRPQARRLLTHPGVGPVTALATDVFLGDPSRFTTANQVASYIGMIPSEHSSGKRQRLGKMSKQGNSLLRYLWTEAGMHATGKDPELKRFYRRKLIQKGMGKARVAAARKLGIRLWIMMRDEIDYEEFCRRGKLRQIGESPCGNA

SEQ ID NO: 408502 - protein, 326 aa, unidentified
MKKVFFVGADVSREKVDFCFLTSVENVKPKFVSLPNDTDTIKAYFQSFIKDDIFITFEYTNNYHLPLQSALSDLKIKYSALSPAKTSYFLKHLTLQKSDITDAYGLAIYCKIFKADLNPSTHNREYNLIKSYNSTILLLSKIKVQLRNFKKSQEFVADTELSEIIKSLMLQVQKTQEKLKLIAFEILKSFVPNCEEIIRNNKGFGIDLALNLFPQLHFNRAKSEKQFISFLGLSPRIYESGSSVHKTKRINKRGSSAIRRVLYLSALVSSRFNAKFKERYENLISKGKSKKVALVAVMCAIVRYLKSLFPLNESYLNENLYNAHTS

SEQ ID NO: 408503 - protein, 443 aa, unidentified
MKVSNLHFGESPTITNREPTRPDAILVAIDVSKLRNDVLIEMPGQTRRRRLTVPNTLAEHDRLVDLLCRLGGPVIAGFEATGNYHRPLAYRLLEAGFSLRLVSSVALARTREALHNGWDKNDPKDAQVILHMLRIGATQTYLDPLRAGIHDIQELSKTHEIISKAKTELWHRLLTHYLPLYFPEVARFAGNSRSDWFLAFLERFPTPASITAYTKEAFIEAAWDVVGKKVSKARLLGDIYETACSSIGLPVPIDASSIAMFRMVVAEGRSLIRQRDEIEEKAHEALAANADYQRLRQIPGIGPINAMTILAEAGDLRRFRHHRQFLKFCGLDLATHQSGQFRGQTKLSKFGNARLRRTFWVAAQVAIRQRDNSFRTKYERYIARDRDNADLKRKALTAITAKMARTAHAVIKSGSDYRPFVEGPMPSGRTSIRTGREGASATL

SEQ ID NO: 408504 - protein, 339 aa, unidentified
MGNVTTIAIDLAKRVFQVAGEDARGEEQWQKRLTSREALTAFIQTWEPPLVVAMEVGLGAQAWARALQARGLTARLLPAQRVAEHRSGAKNDRNDVRAILRANRDASIHPVPVKTVEQLTMQALHRVRGGWIRRKTALGNQIRGLLLEHEVVMAKGDRALEYALEHLDRVPLPARLRELVDELAGEWQGLIGRLATLDAELASLARIDPLARRLATTPGIGPITATAMVCKTLDPERFANARQFAAYFGLVPDQHSSGERVRLGHMSRRGDRYLRSLLISGAHAVLRTTRSDASEPDRKRLLRWLERHGRKGAAVRLANRNLRVIWALVQRQCDYQRAH

SEQ ID NO: 408505 - protein, 328 aa, unidentified
MSVDVAGRFVGIDVSKARLDCAVLVDEVVTQSKSFNNDSAGHERLLRWLQDGECQPGLIVVEATGGYESAMVALLATAKLPIAVVNPRQARDFAKATGVLAKTDAVDARVLAQFGRAIRPQVRGPKSEELSLLEALLTRRRQLVEMITAETHRRGVATSPVIARQIDRHLRWLERQVQAADDDLNGMIGKSSLMQRKLDVLTSVPGVGRVTAVALLAQLPELGGLNERQLSALVGVCPFSRDSGTLRGRRVIWGGRARVRAALYMAALVASRHNPILRTFYRRLLNNGKAKKVALVACMHKLLLILNAMIKRDQMWQPAYVHPGAQVA

SEQ ID NO: 408506 - protein, 401 aa, unidentified
MKYGIGIDISKGKSTIAIISIAGEIIGEPFEITHDIEGLNLLEEKIKDIPKEDLKIVMEQTGTYHLPLLGYLLDKGYFVVAENALKIKKYLDRGLRKVKTDKKDSLKLAEYCCDNWYKLNKVRENDEIYDNLRFLSRQYLGHLSVQAKQKINFSNLCDLLFPGYYQLLDENNFVLGLKIFKKYYHPEIVINKKQPQFVNEIDKLAKKLGHKGAGITLANKIYLLAQKTISPRPNNEYAQLSAISCAAALILTIKTTTTIISEMDKLARELPEYDVISEIPGCGKKLTSRVIAEIGDVRRFKNAGSVIAYAGLDAPPYQSGQFEATNRHISKRGNKYLRKTGYEVMKSIKSCCKSDNELKSYIIKKENEGKLKKVAKIAGLNKFLRMYYGIVKKKYKELEIW

SEQ ID NO: 408507 - protein, 362 aa, unidentified
MAIVNSIVKNYTKIIAIDTAKNSFQVCVGRTDGEGKVKQYKFSRSKFHDGIVKLGVDGSAIVMEACATSHNWGRLFQKDGFTVLLVAPQHAKKYLKNTRMKNDANDAEAIYVCSLQHNTRFIKVKTLEDSAIASLHTNRHACVKNMVEAGNRMRGCAAEFGIVVAKGHSHIKDLLAIIDSPEKMATLNIPDIAQWNLTKLAETYRHAQKMLDEVTEMIVGYGETSALIQCAMSCPGIGPITASALVAKISDGSAFDNGRQLAAFLGLVPSQNSTGGKSTLGKISKTGDRYLRALLCQCAHSIIRFSEHRTKECKDTQLDRFVMRLKANHKAGCNIAIALANKMARIVWALLKRGVKFETKVA

SEQ ID NO: 408508 - protein, 342 aa, unidentified
MYYIGLDVHKKTISYCVKDAAGCVHQEGKIGATRRELDAWVRTLPQPRVMAMEATIFTGWIYDHLLPYTSAIKVAHPLMLRAIAAAKKKNDKIDASKLADCLRCDFLPECHMASTEIRDRRRVLRYRHLLVRQMVQTKNRLSGLLLETGVEHNKSRLHKVGYFRRLMTTNSEIDDSIRPLLRISRETIERCQKTEYALVSSLERDPLLKERIRRLRTVPGVGPITALNWALEMGDISRFRSIKEAVSYCGLCGDERSSADKVMRMPLSKQRNKHIQHVLVEAAKLAPRQSAELALIHQKAMEKGNRNRATLAVARKMVAWLLAVDRENREFIPAEQRESRAA

SEQ ID NO: 408509 - protein, 368 aa, unidentified
MAMLQKQLIREKERAMTDIAMHNDRIATIGMDLGKRSFHLVGMDARGKVIMRQQLSRGRFERHMANLQPCLVGVEACAGAHHIGRRLSAFGHNVRLIPGQYVKPFRKGQKNDYRDAEAIAEAVQRPTMRFVPIKSAEQLDLQALHRIRSRLVGHRTAVINQLRGFLLECGVIVPQGPARLRKTLPSVLAQRTDVLSPRMIRLIEELADDWRRLDDRVDAVTSEVQALARQDAGCRRLMSVPGIGALTASAVVATIGNGAAFTKGRDFGAWLGLVPKQLSTGDRTILGRLSKRGNKYVRTLFIIGARAVLAKPGSWAKFGLEGWLAAAAKRLHHNVLAAALANKLARIAWSVLYHGRSFARDFEPQSVS

SEQ ID NO: 408510 - protein, 323 aa, unidentified
MQGKVSFQEDAMPVVYAGVDVSKEWLDVHLHPLGESRRLSNDKTGIRQLKRLLARHQPKSIVMEATGKFHRPAHRSLWLDGFAVAVVDPLRARMFARACGYLAKTDRLDARFLALLAESLRPPADTPPSPHIEALQELVNARSAAKCDITALQNRSKTATTALLRGELNRLLRRLEQHVERLDKEIERCVGEDPQLCRKAEILTSIPGIGRVTALALMAGMDELGSCSGKQAAMLAGLAPIANDSGARTGRRSIRAGRPAPRRALYMAALSARRYNPALARFADTLKAAGKPAKVILVAIMRKLLVLANCLLAHDRIWTPNPP

SEQ ID NO: 408511 - protein, 346 aa, unidentified
MKKHSAKGEVKVLGIDLAKQSFQLHGVDESGQTVLRKKLTRNKLSAFVANFPPCVIGLEACGGAHHWVRVFKEFGHTVKMMAPQFVKPYVKSNKNDSLDAEAICEAVQRPNMRFVPEKSIEQQDMQSLHRIRSQLVARRTAQSNQIRGLLLEYGIIVPQGIGHVRKQLPLILEAVDNGLSNLSREFFHELYEELVHLNERIDGLEQKLLRLSAQNEDCQRLLTIPGVGLLSATALVAAVGDVSNFRNGRELAAWLGLVPRQHSTGGKAMLMGISKRGDCYLRTLLIHGGRTVVRVAHQHQDRRNRWVSELEQRRGKNISAVAVANNNARIAWALLSHKTTYQASAA

SEQ ID NO: 408512 - protein, 341 aa, unidentified
MNHYAGIDVSLKCSSVCVVDANGKIVREGTVASEPEALIAWFSELRFEVTLIGLEAGPQSQWLYAAMQKAGLAVALLETRHVRDAFKAMPVKTDRKDAQGIAQLMRLGWFRPVHCKSIEAQETRAILSARKLVQSKLHDIEMSLRGTLRGFGLKVGKTTPNRFAARINQLVEGHPTLQVIATSLLAVHAALLREFKVFEKRVRIMARDDERARLLMSTPGVGALVALTYASAIDDPGRFKSSKQAGAHFGMTPKKYQSGETDIIGRISKIGDKGVRTALYEAAHIILTKPVKGSGLKSWAARLAKRAGMNKAKVALARKLAVIMHRMLVDKTPFNPAAAAA

SEQ ID NO: 408513 - protein, 347 aa, unidentified
MIIRGADYHPGFQQIAFVDTDSGEFQERRLEHREEAEKFYRDLGAQGATVRVGMEASGHARWFERLLGELQVELWIGDAAEIRTKRVRKQKTDARDAAHVLELLLSERFPRIWRPTMAERDLRQLVWHRQKLVWMRNAAGNQLHALAMGEGVCRKKKLFTKKGRAELESLRLGPWASYRRQELLTMLDQLDESLEKLDGAVAEQAEQSPAAVLLMTHPGVGPVTSLAFVLTLGPVERFERSKQVVSYLGLNPREHSSGGRQRLGAISKQGNPMMRSLLVEAGHSAARLDSELRQDYQRLKLRRGSGVAKVAIARKLAVRMYWMLRGQASYAQLVRMQGSPGATLVKE

SEQ ID NO: 408514 - protein, 343 aa, unidentified
MEHIGIDVHKNQSQVCILTADSELVEKRIRTDRDRFAAVLGSRPRAKILIEASTESEWVARCLEAQGHEVIVADPNYAPMYAHRSRRVKTDRRDARALAEACRIKAYRKAHRAADDRRHLRGRLAVREALVQTRTKYISLARALLRREGLRVRPGTSSSFVERVGELEIPRPLQREIAPILKLMGPLNRQIERATKDVDKIAHQDPTVGRLCTAPGVGSITAASFAAVIDTPERFKGAHQVEAYLGLVPRELSSGEKQRKGRITKRGDRRTRCLLVEAAWALLRTRRPAVAPLRAWTERLAARRGRRVAVVALARKLAGILYAMMRDGTEFNDTYWTTENKGA

SEQ ID NO: 408515 - protein, 395 aa, unidentified
MFYVGIDVAKNKHEASLVDASGNALLDSISFSNSKEGCEKLLALFERFQVDKNNVVIGMEATGHYWLSIHAFFLELGYEIKVINPIQSEAFRKMYIRQTKNDSKDSFIIAQIMRFGQFSATNLSEEGIVALRQLSRYRLALVDSCGDCKRRVIALLDQVFPEYGKFFSDTFGVTSKEVLLNYPTPEDMLTVSTDELADILKKASRGRFREAKAEELKALAGNTFGINFAKDAFAFQIRQLIEQLVFLENQIRELENEIALLLEQSGSFITTISGIGHTLGAIIISEIGDIHRFDAASKLVAFAGLDIKVNQSGEFSSTRNKISKRGSPYLRRAIWLAAGRAAFCDPILSGYYQSLRARNKHHLTAVGAVARKLCNIIFVILKENRPYESQPPNKH

SEQ ID NO: 408516 - protein, 322 aa, unidentified
MSAPVLGIDIAKQRVEVALLVDGKVKNKSFKNTTEGFEALALWLKKLGISRVQACLEATGNYGEDLATYLHEAGHLVSIVNPARIKGFAQSELIRTKTDKIDAGIIARFCLAMKPETWIPPSPEVRGLRALVRRADSLIDMLTQEKNRLGTAHESVIPLIKEHIAYLNKEIKKVRGQIADLIDQNPNLRQKKELLVSIPGIGKATIAVILAELDNLEKFSHVRELVAFIGLAPKENLSGSSIKGKPRLCKVGHARFRKALYMPALVSIQCNPVIIPFYNRLKEKGKNGKVIVCAIMRKLVHIIFGILKSGKKFDPNYKPVFA

SEQ ID NO: 408517 - protein, 322 aa, unidentified
MSPHAQGRESAMSIFVGIDVAKAFFDLYDQEAAHAERFEYTQVGIGACLKYLNERSVDLIVMESTGGYETELAVALSDAGMPVAVVNPKRIRDFARATGRLAKTDQIDARVIAGYAASLQPPPQGVWDQQTRTIKALVARRNQLIEMKTAESNRREHSADPIIARSITAVIRTLEKEIVKVEEQLRDQITGSPRLKQRADQLTSVPGIGETTALMLIAEVPELGQLNRRQIAALIGVAPINRDSGSFRGKRMTGGGRRSVRTKLYMPTVVATRHNPQIKQFYQRLLQSGKTTMTALVAAMRKLITILNTMLAENETWKIQNT

SEQ ID NO: 408518 - protein, 344 aa, unidentified
MGEVSTIGLDIGKSVFQVHGVDDAGAVVIRKRVSRARVLEYFGELPPCLIGIEACPSAHHWGRELQLLGHMVRLVPPSYVKAYLKRSKNDANDAAAICEAVTRPSMRFVPIKTKEQQTALMLHRTRQLLVRQRTMLSNALRGHLAELGIVSAKGRNGTAELLRIITNGADSRVSPAVRDILDVLARQYSAIGIEIASIDRSIMALHRGCEASRRLAEIPGIGPIAATALVAEIGDWKTFSSGRSLAAWIGLVPKQYTTGGKDRLGSITKQGNRYLRWLLIVGAMAVIRYARKHGTEKRPWLGRLMERRPTKVAAVALANKIARMAWAIMVRGERYKEPKLLLAA

SEQ ID NO: 408519 - protein, 370 aa, unidentified
MLDTTTFIGLDVHARSIKAVSLDVMTGEVRAATFGYDAGAVAEWVRSVDPEARCVYESGVTGFDLQKRLSGLGVGCVVGAVSKMIKPSADRRRKNDRNDAEFLARMLSVGNVVEVWVPDDECEAARDLTRALEDARDDLSRAKQRLSKFLLRHGLAFDERTPTGRRKGNWTRAHWSWIESIRFAEGADNDVLAYYVDAVRRAAEDKARLEGLVEAEARKPRWRRRVDSLRCLKGVDTASAADLVFEAGEFSRFRNARSFAAWVGLTPSEHSSGESDRRGAITKAGNKHLRKTLVEAAWHYLTCSGRPKDLAKGQAPDRGARRHAAKGVRRLVERREALLARGVHGNKANVATARELACWVWAVGLMAEEA

SEQ ID NO: 408520 - protein, 349 aa, unidentified
MRYIGVDLHKTNFVVCFLSEDDNYKLETFPLSKAGISRFTSELRKEDAVAVEVTQNIYYFYDQIKTYVGRIVLVDTYRFAIIAQSKKKTDKADAQALARFLKLDHLPEVPVPSERVRQLRHLLQARETIVGMRTKLKNLGHAALTRNGIALSRSAFASAIGRERLQKREDLSAADTVILQSALRQIAELDKEIEQLEAEIVCLGKTLAGVKRLLQLHGLNLLSAISLLAEIGDIHLFETSKQLVAYSGLATSVRQSNQMTKQGHITKQGRKRLRTVAIRAVLSMVNRTNTPLMDFYARKKREKGSGKAICATARKLLTIIFVMLKKELDYWYLEDRLYNRKLRQLNAAA

SEQ ID NO: 408521 - protein, 294 aa, unidentified
MQKISTMQTSGKNIFEGQLTIGVDLGDRSSAYCVLNEAGEIVLEHKLATTPEAMKQVFGSMPRCRIAMETGTHSPWVSRLLAALGHEVIVGHAQKVRLITKSRRKDDRLDARTLARLARIDPELLSPVKHRSAPAQLHLAEIRARAGLVSARTALVNAARGLVKSYGERLRKCGTEQFRRETMSGLSAGLRDALEPLLQEVESLNEGIQEYDRRIAKMAKEKYPETALLKQVKGVGDLIATTYVLTVEDPHRFRKSRDAGCFVGLQPARRNSGESEPQMRISRVENHYVDAWLG

SEQ ID NO: 408522 - protein, 355 aa, unidentified
MMVIGVDPHKQTHTAVAVDELGRRKAQKTARARRDGHRELIAWGRQACPGGRTWAVEDVRHVAGGLVRDLLAAGEQVVFVPPKLMAGARRGGRERGKSDPIDALAVARVALREEITLPAARLDGPVLEVRRLGDYRDDLVAERTRVINTLRWMVHDLDPGLAPPPRSLGSARARARLQAGLAALPPSAGRAVALSQLARVAALSAEITQLEQDLGPLVTALVPGLLALPGVAVLTAAKILGEAGDIRRFTGPSAFARHNGTAPIPASSGTGEDGPHRLNRGGNRQLNAAIHRIALAQARCHPGARVLLERRGRDKHETRKASFRVLKRHLSDAVYRTLKADAWRLDDPQPASSLT

SEQ ID NO: 408523 - protein, 342 aa, unidentified
MNITTIGLDLAKNVVQVHGVNEQGKTVLKKQLKRSQVLPFFANLAPCRIGMEACAAAHHWARKLVTLGHDAKLMAPQFVKPYVKSNKNDARDAEAICEAVSRPNMRFVPVKTPAQQAVLSLHRARQGFIKARTAQANQLRGLLGEFGIAIPQGIRQLSTHVPDIVEDADNGLPGLMRGLVQRLWEHFQELDRQVGELDRDIRRLQREDEASRRLAEIPGIGFLSASAVAATVGDAKAFANGRQLAAWLGLVPRQHSSGGKEILMGISKRGDCYVRTLLIHGARAVIQQAERRNEADSWLKRLLARRSKNVATVAVAAKNARIAWAILAHGRDYDREYQPVAP

SEQ ID NO: 408524 - protein, 484 aa, unidentified
MAKRKMSTFERLKRGELNRKQRRDLGRKVAAGDPGLTIENPNAGGIDVGNESHYVAVPPDRDPNPVQEFGCWTEALQRMAEWLKACRIDTVAMQATGVYWIALYDVLEQHGIRVVLVNAQHTKNVPGRKTDVQESQWLMKLHTYGLVRDSFRLPEQIESVRTIWRLRDRHVKEAGRTVQHMQKALTKMNIQLANVISDIFGVSGQAIIGAILKGERDPYKLADLKDYRVKASREEVARSLEGNWREDVLFELQQAVNSYQFVHQQMQESDRKLECYLASLPTRILDVPAQPEGAPAATPKKKKRAKKPQGNEPQLDLKVELKRICGVDLTSIDGINVMTAQTIVSEIGTDMSGFKDENHFASWLGLTPSKDISAGKTVRRGKKKVNNRVAVALRTAATTLLESDSYLGARYRHLRRQLPTLASAVKAMAHYLALLVYRMFTKGEAWVDRGAAQFERRRTEREMVSLNSRARANGFKLIPIAEAS

SEQ ID NO: 408525 - protein, 345 aa, unidentified
MQPMYYIGLDVHKRKISYCVKDSSGKLHSEGSIPATRFDLDRWMKTLPQPWSAAMEATMFTGWIYDHLKPHAAALKVAHPLMLRAIAAAKKKNDRIDANKICDCLRCDFLPECYMASIAIRERRRTLRYRNLLVRQMVQMKNKIGMLLMEAGVRYNKQRLHQAGYFRELLATNPEIDEGLRVLLRQCRETVVRLGKTESALIRSLRLDGLLAERVERLMSIPAIGPITALTWALEVGEVQRFSSIKKAISYCGLCGAEKSSGQTVQRTPLSKQRNKHLQTTLIEAAKMAPRYSPTLALLYDRELQRGNANRATLAVARKLVAYLMAVDRGQTHFLVVDREACVAA

SEQ ID NO: 408526 - protein, 356 aa, unidentified
MSRLAGSIDGVIGVDTHRDTLAAAAIDPVGGLLAQTSVSADAAGYRLLFGFARAHVPGRRCWAVEGAGSYGAGLASFLQAHGERVVEVGRPKRPPRRTGAKTDALDAVGAAREALTHDHPLAPRRRGDREALRVLLATRHSACVARVCAINQLKALIAAAPEELRAELRGLNSKRQIRRCASLRDRPSRSLEHRMTVRALRSTARRIQLLAAEAIELRAELDRLVTAIAPWLLELPGVGPISASQVLVSWSHVGRLRSEAAFAALAGVNPIPASSGQVVRHRLNRSGDRQLNRALHTIVVARLRDDPQTRAYAARRRAEGKSAREIRRCLKRAIARQLFKLLERCDRPGVELLAAA

SEQ ID NO: 408527 - protein, 346 aa, unidentified
MKYFAGLDVSLEETAICVVDEAGAMVREARIPSEPEALVAFFQGSGLVLERIGLEACSLSAWLHESLVAAGLPAVCIETRRAKAAMGAMPNKTDRNDARGLAQIIRTGWYRAVHVKSPACRSWRALLTARRLLLNKMRDLENGLRAVLREAGLKLGTPTRKEFAARVRELTAADPVLSVLAEPLLTIIAAMTRELAQLTKRVLEIVRDEPVCRRLMGVPGVGPLTALTFRATIDQPERFRHSRDVGAHLGLTPKRYQSGETDVQGAISRCGDELARTALYEAAHSLLVRSRRWSALRAWGMQVAKRRGMARARIAVARKLATILHRMWADGTEFRWGKEGTMPAAA

SEQ ID NO: 408528 - protein, 476 aa, unidentified
MAKRKLSTFERLQRGERLLRRERRDLQRQLESCDPELKMVHPDAAGIDVGNASHFVSVPAGRDREPVREFGSGTADLHKAADWLKSCGIRTVAMQSTGVYWIALQEVLEQAGLEVFLVNAQGTKNLPGRKSDVQECQWLMKLHTYGLLRNSFRPPEEIRGVRTIWRQRSRLVEEAGRRVQQIQKALTTMNVQLANAISDLSGVTGMAIVRAIVGGQRDPYALAKLRNNRIQASEEEIAHSLEGHWREEVLFELQQVVEGYDFHQKQIAECDVELEKRMGKLSSHPTQEHKEKEGKGGKKLGKKPRKNQPGFDLRAELHRIFGVDLTRIDGIDVMTAQVILTELGPDLSGFPSEGDFSSWLELAPRNDITGGKTIRKKARKSKNRVANALRMAAEALSRSDSYLGARYRKFRGRMEGQPAVKAMARYLACLVYRLLTKGQEYVDKGAEHFVQKYKQREVANLQRKAAELGLKLVAAR

SEQ ID NO: 408529 - protein, 343 aa, unidentified
MEHYAGIDVSLETASVCVVDASGRIVREAKVASEPEALITWFGKLGVEVSRIGLEAGPLSQWLYAGMREVGLAVELLETRHVRDAFKAMPVKTDRNDARGIAQLMRLGWFRPVHCKSLPAQELRAVLTARKLVQGKRHDIEMSLRGILRGFGLKVGPTTTRSFEGRVRQLVEGHPTLLAIADALLLARATLAQQLGKLQKRLVSLARDDTRTRLLMSTPGVGVLVALTYVAAIDDPARFRSSKVAGAHFGLTPKKYQSGETDITGRISKIGDASVRTALYEAANVILTRPVKGSSLKSWAMRVAKRAGMRKAKVALARKLAVVLHRMLADGTQFAADKAAAAI

SEQ ID NO: 408530 - protein, 351 aa, unidentified
MLIIGVDYHPSDQYIAFADTETGQCGERRLNHSDGEAEKFYRGLQSGAASVRVGMEATGYSRWFERLLTELGIELWIGDAAEIKTRRVRKQKTDTNDARLLLKLLLEDNFPRIWVPSPENRDLRQLLWHRHRMVQMRTRIMNQLQALAMNEGQRRKKKLWSEQGRAQLEKLPLARWASRRREDLLELLDRMNPTIEELTRAVEQEARKRCEVKRLMTHPGVGPITALAFSLIIGTPERFPRGKQIGSYVGLIPAEDSSAGHQRLGRITKQGSTLLRFLLVEAAQAAARCDTDWRRRYMHLAMRRQRNIAKVAMARRLGVRLYWMWRNGWEYPELVKFGSNAGQLGTGHSVH

SEQ ID NO: 408531 - protein, 367 aa, unidentified
MEKRITFVGLDAHKVSISVAALLPGTTKPQEWQLANEKAAVRRMVKKAQRLSPDSELRFCYEAGPCGYALQRWIQEAGVVCVVVAPSMIPRKPGDRIKTDRRDARKLAELYRAGLLTEVHAPTPEDEAARDLCRAREDAQEDLMRCRHRLSKMLLRRGWTWNGTKRAWSQAHRLWLRSLRLEHGADQVVVEDYLLAIEQLELRLPWLEQRIEELSHQPVYTEAVGALRCFRGIDTITAMGLVTELHDFMRFASARGLMAFLGLVPSKHSSGGSERRGGITKAGNRHARRLLIEAAWHYRHRPNAANLKRRRQGQPTHAIALADKAMLRLNRRFNRMLEKGKPRPKIVVAVARELAGFIWAALHPKAA

SEQ ID NO: 408532 - protein, 470 aa, unidentified
MSTTPTSSKQRRGVRVVSQPKVPLPPQLKRVNLDAAGIDIGAEEHWAAVPPGRNTEGQDVRRFGAFTGELCALADWLKQCGIQTVAMESTGVYWIPLYELLVERGFEVLLVDARQAKNVPGRKTDVLDCQWLQELHTYGLLRGAFRPVDQVCILRSYLRQRSMLVSYASHHIQHMQKALEQMNLKLAHVVSDITGLTGMGIIKAILSGERDPVKLAKLRDPRCKSSEATVARALEGHYREEHLFTLQQAVELVEFYQQQMTACDRQIEACLQQFEEKSSETPVTTRRRKRRRGIAFDARSYLYRMTGIDLTQIDSIEGNTALTVISEIGLDMSRWPTEKHFGSWLGLAPGSKVSGGKRLSGRTKPSANRAAAALRLAAQSLNQSQSALGAYFRRLKARLGAPKALTAAAYKLARIVYRMLKYGAGYVDQGEAVYEERYRDRLLRNLKRRAAELGFQLTAIELNSGQVALT

SEQ ID NO: 408533 - protein, 337 aa, unidentified
MPSVIGVDIAKRVFQVHTVDEVTGEIRRCTLSRAKLLEFFGKMRPSIVAMEACGSSHHWARRFTAMGHEARLIATKFVRPFVKTNKTDAADAEAIWEAAQRPGMRFVPIKSEQQQGIMALHNMRDLLVKSRTAQMHQIRAVFYEFGFELPRGRHWGLKALPEAFAAIEQRVSALVLDSLRGQLELIHDLSRRVEANERQLEIYERSDDRCRRLRAIPGVGPLTATAIVASVGDAREFRTAREFAAWIGVVPRQSGTGGRVRLLGISKRGSPYLRAMIIHCARAVAARQKQPGPWLTNLIRTKHWNVAVVAQANKIARVIWALLAHEREYRPAAPTVA

SEQ ID NO: 408534 - protein, 317 aa, unidentified
MPEAVEAGRFVGIDVAKAELEVAERPSGARWTVPNDAAGWGQLGEQWVVNRPTLVVLEATAGYELGVVASLAATGVPVVVLNPRQVRDFAKAIGRLAKTDAIDAAVVAHFAEVVRPIPRPRPDAVSQTLEGWLTRRRQLVEMLTAEELRRARAPRAVQRQIDAHIQWLRRQLDDVEKELTDTVRASPVWREKDELLRGVPGIGPIMAATLVGALPELGRLNRKPIAALVGVAPINRDSGTHRGRRAIWGGRAHVRATLYMATLAATRCNPVIRHFFTRLVAAGKVKKVALTACMRKLLTILNAMMRTRTPWQPLVAA

SEQ ID NO: 408535 - protein, 496 aa, unidentified
MSMHYTTKQKVEQVKEKLLAAIDVGKRSLHVKYMDYTRKVHNRKAYRFDNSSKGFEDLIDCTKKMCDSLGLEEAVFGMEATGHYWQNLAVHLEILGYTLVTVNQNHTKKVEEIVDGSQRKDDDKDPEGIGILMALGDWSPYYRPEGDYAEIRKAYRLLEWCTEDTTRYTNKLHGYLDKHLPGYEPCFSKEKGVTGALSLAVLKKAALPEDIINLGAEGIINIWKEAGLRGTKNRAEKIVSAVSGNKGYAITDGSQTCRLELACIVRELELAIRTEKEAEEQVRKIVARIPGAQRLLGIKGISYRTVAGFFAIVGDLKKRFSNVKQIVKLAGLNIVIRSSGTYKGEARISKRGCPELRAALYRVLTALLENTPAFKPLRDHFMKRTDNPLNAIKANVAMCNKLLRIFYAMVIHDEDYDEKKMLGDIKRMERTKVSQAAVEAGKLKNELDMILCGAKGKEVTNEMIESIRKVGKAMKGLVAVAERGTVKETLPQAVGG

SEQ ID NO: 408536 - protein, 377 aa, unidentified
MKAPSTRPAAVLGLDVGKSSHWACLIDRDGEVLASAPVRNREAELDALFASAPAGTLVVVDQFRNIGSLAVRRARAAGLGVAYLPGLAASRAAGLFAGEAKTDERDAAVIARTALGVPDSLSGVPGRGEALEAARALSSQRDHVVACATRDKNRLRAVLLESCPALEAAVDLSDRRWLELLAGFGGAWGIARSGAEGPRAEAAGEAAAASAAPPPALVEAENRQVRFLAARISEALDEAGALEAETAALLEGDETYACLLTVPGIGPRTAAQLAVSVDIGRFPDHDHLASYCGIAPRVRSSGTSVRSVRASRRGDARLKSLLIFSCNSLVRSSGRYGEYYRACRARGMGHGRALKAVARKRLRAIYAVMRDRVPYRE

SEQ ID NO: 408537 - protein, 428 aa, unidentified
MSAREAVEQEPEFVAFVGIDWADQKHVWCLQAAGSTQRETGELEHKPEVVEAWVSELCRRFGQGAIAVAVEQVKGALVFMLCKYECLHLYPVPSTMSSSMREALYPSGAKDDPRDADLLLDLLLQHRDKLRRLTPDNEATRRVQNLVEERRKLVEEKTAQLNRLSGYLKVYFPQMLEWFAKLDTKLACEFLEHWPSLEELQSSSPAEVRKFFRRRRGRHGELTEWRVQGIGQAMPAIRDRAVIEAKRLVVQVIARLLRTLLEGIATLDSKIAEAAEAHPDFFIFRSFPGAGAALAPRLLAALGSQRDRYASAEEVQKYSGIAPVTERSGKKKWVHFRWACPKFLRQSFHEWAGHSIAQSVWARAYYQQQRQRGKDHHAAVRALAFKWIRIVFRCWQERAAYDENRYLAALAKRGSPLTSVVAAAAISM

SEQ ID NO: 408538 - protein, 372 aa, unidentified
MGDYSVAYVGFDTAKLRHAVAIAEEGRTGEVRFLGEIENTEAATIKLVKKLASKYRSLSFCYEAGPTGYELYRLIKRLGHDCIVAAPSLIPRKAGDRVKTNRRDAVGLARLLRAGDLTAVWVPDPRHEAMRDLTRSREAAVEDLISKRQQVLSLLLRIGRHYPGKRNWTRMHMNWLVSQKLEHGEQRIAFEEMLLAIRQAQERVARLEQAIRNALPEWSLSDLVTALMAMRGLDLVSASAFLAEMGDLSRFASARELMAYLGLVPSEQSTGEKVKRGGITKAGNRRARRILIESSWSYRHPPRVGKDKLARTAAVPREVREIAWKAQHRLTSRYRTLIRNGEKPTVVVTAIARELSGFIWAINRAVRPAMTG

SEQ ID NO: 408539 - protein, 410 aa, unidentified
MNEIRKRYIGLDVHKHYLIALGVDEDLNVVLPARRVELSNLESWMKNNLTKQDDVALEMTTNTWQLYDELSVYAGSVTVVHPPHVALITRSQVMNDKIAASILARLLAKGLLVGIWVPPQEIRELRGLVAQRQKMTRLATQAKNRLHAVIQRHHLKPPAGNPFAKTNNGWWQALPLGKLEKMNLQCDLETLQFAEQQKARLQAVMTGIAAENEEIGRLLHLAGFGVITAVTVYAAIGDIRRFSEAKKLVGYAGLGARVHDSGMTTRTGKITKAGRRDLRVALVEAAHVAANSHPHWKAELARLQPRLGYNKAIVAIARKLLVTVWHVLARKVVDRFAEPEKVSKKMLRFAYEVGKENRPGRQTAAQFARDRLDVLGMGQELTSIPWGSKKPIPLPPSKLLEKKVSDVPNR

SEQ ID NO: 408540 - protein, 337 aa, unidentified
MNIKVIGIDLAKNIFQIHGVDEKGKTVLTKRISRSQLASFIAQLAPCLIGMEACSSSNYWARKFQSYGHEVKLMAPQYVKPYVKTNKNDANDAAGICEAVSRLSMRFVPIKSIEQQDIQCLHRIRSGLIQERTALTNQIRGLLAEYGIVVSQGITKLKKQLPEILADTDNELSLLIRSTLTELNTYLTQKNEQIDNMTIKIMEVCKQSEVCQRLVKVEGIGPMIATAFVAAVGDAKNFKNGRHLAAWLGLVPRQASSGNKRVLLGISKRGDRYLRSLLIQGASAVIRCIKGKTDARSLWLEQLIKRSNKFKANVALANKNARILWALMAHGTEYRGA

SEQ ID NO: 408541 - protein, 340 aa, unidentified
MASIASTSRVVIGGIDTHKDLHVAAVLDTAGVLLGTEAFSTTRAGYRALVRWLRGFGDVRLVGIEGTGSYGAGITRHLGEAGIEVAEVDRPDRSDRRRRGKNDTIDAENAARAALTGRRTSTPKTKDGKVEALRVLRLTRTTAVKSRRAALQLLGNHIVSAPEELRDQVRNLTRMQLLRTCASWRPDTTGFRDPVVATRIALKSLARRILDLNDEIADLDQLITTLVGELAPQLVAATGIGVETAGQLLVTAGDNPQRLRSEPAFAMLCAAAPLPASSGKTQRHRLNRGGDRQANSALHLIVVTRMRVDPRTKAYVTRRIAEGHSKLEIIRCLIGRVLVL

SEQ ID NO: 408542 - protein, 366 aa, unidentified
MQEISTMQASGSDNFKGPQVTIGLDLGDRTSNYCVLNATGDILLEDKLPTTSQAMKQLFGRMLRSRIAMETSTHSPWVSRLLKELGHEVIVAHAQKVGLIVKSRKKDDRIDARTLARLARIDPQLLSPVQHRSAQAQIHLTEIRARAELVRARTALVNSARGLAKSYGERLRKCGTQQVGRELAMGLSAELRAALEPLLREIESLNEHIKEYDRRIEKMAKDTYPEVKLLKQVKGVGDLIALAYVLTIEDPHRFKKSRDAGCFVGLQPGRRNSGESEPQMHITKEGDRYLRTLLVQGAHYILGPFGEDSDLRRWGKKLAERGGKKAKRRAVVAVARKLAVLLHRLWVSGEVYEPLRNSKKAMSTAA

SEQ ID NO: 408543 - protein, 386 aa, unidentified
MKTVAGLDVHKDSVYLCILRENGEKIERVFGVLTPQLDSMRDFMAENEVSEVAMESTSVYWIPIWRVLVDSFELKLVNPYFIKQLPGRKSDVKDAQWIAECVMKELIRGSFIPPPLVQQLRLYDRRIFEINAELGRKYSKIDAILQRCNIRLSNYVSNTDCKSYKNVVKQISEGVTSPQELLAHVHKRIINKHGEDTILAALTGVVSEAETDMLAQYVAESALLEDNKNKCIEKMREICNREFEEQMKNLQTIPGVSERSAQTILAEIGPDVNAFPSAKHLVSWCGFNPRNDESNKKIKSNKITHGNRFIRVASIQCAWAASRTKECYFSKFYAFHTQVRKKFKLKVVVAVARKVLVCIWHILKFNVSYKDFEPQKSVTKDCTQFA

SEQ ID NO: 408544 - protein, 340 aa, unidentified
MSVSLVFVGLDVHKDSIVIASARQGNSASTFVDTLPHDFPKLLKRLKRIADPAALRVCYEAGPTGFELARNLKAKGIDCAVIAPSLIPVQQGCHIKTDRRDAVRLTSLFRAGELTKVAIPEPHVEAMRDLARARDDFKRDERVARQRLDKFLLRQSRFWSGGTKWTQRHLAWVRAQTFEHLPQTRTLATYLTAIDQATGRVDQLTKDLEELVQNWELGPLVTALQALRGVQLVTAVTLVSEVGNFARFHSAHRLMSYVGLVPREHSSGARRRQGSGRRPGQRARRSGTPAPRGAGRRRRRAPRCTSSRARRLPPPSARRDAAPGRRQGSRPMPSQSRSGT

SEQ ID NO: 408545 - protein, 329 aa, unidentified
MYHVGIDVSKAKLDICLLADGLDGKRKTKSLPNGISSAEAVINWLVMQKRDPKQARIVMEATGIYHEHLAYGLHREGLSVSVVNPCRIREFAKGMGILTKTDKVDAYVLACYSSLKQPQEWQPPSEEIRKLRALLQHRDVLLEDKLRTENRLNTLSSTQSTEEVMMSLSLMINHLKDELARIEALISKHVDNHPGLKDDLSLLTSFSGVGPQTGLNMLVVLRGNTFESASQAAAYLGVVPIERRSGSSVRGKSRLSKTGPSKLRAKLYMAALTAISKNMHVKNQYERLLLKGKAKMQALGAAMRKLVHLCYGVLHTQQPYSQDFGMVTE

SEQ ID NO: 408546 - protein, 325 aa, unidentified
MNLPVRIGMDTSKSVFQLHGVDENEVVVVRRQFRRAEMIRYFERLPPVLVAIESCGSSHHWARLLQSFGHQVKLIPPQYVKAYVKRGKNDAADAEALCEAVTRPNMRFVPVKSKERQAACMLMTVRERLVSVKSQLSNAFRSYAAEFGIVGPAGRQNIAQLIKRVLEDDSLPEMAKDLFRLQAEEYAAVEARLAKIEAKLMRWHRDDDVSRRIATIPGVGPIGSSMLSMKAPPPETFRSGRDFAAWLGLTPKDHSTGGRQRYGGITKAGDSMLRSTLIVGATALLRHIRKGRHKPTPWLASLLERKPPKLVAVALATSSPVSLGV

SEQ ID NO: 408547 - protein, 450 aa, unidentified
MQFMKKKAGFPVLYPNAAGIDIASREHYVAVNPDAAEQSIRSFGSFTDDLHEIAAWLLQCKVDTVAMEATGIYWVSLYLILEEAGFEVVLVNAKHVKNVSGKKSDVKDAEWIRQLHSCGLLSKGFQPDHFTRTLRAYMRHRKNLTEMAATHIRMMQKALEQMNIKLQNVIADITGKSGQAIIKAIIDGEHDPQNLVKLLDGRIKATKESICKSLHGIWKTENLFELKQSFDLYHTYQEMIKECDLHIKRHIEEKASYCESDQIQSLYPVKKKYKTNKNNLNFDATDMLQKIVGTDLTEIFGITDTNATEIISEIGLDMSKWPTAKHFTAWLNLAPNNKVSGGKLLSSRVPRKRNKAGQIFKMAAFAVQRSKNWLAIFYNRIKMRSGTSRAVTATARKIAVIFYKLMKEKLRFCPLDRDQYLESFKVRQLKKLKQQATRLGLVLVPDNLVT

SEQ ID NO: 408548 - protein, 370 aa, unidentified
MQTIHRSQTLFVGIDVHKDTHTAVGLSPFGEKVFEMTIGNEAEDFILLVEKTKVEAERIGLAPSFGLEDVHSWGERLSSFLVEEGLPVRAVAPILVDHCRQKTTHPEKNDSLDAQGVAEVMIKKIDTLPAYTLTEEAKKAKQIRELSLEREWLVKERSRLKNQLHILLYRIHNTVYRVKFKDPFSKKALRYWMRSVPKNTDAILEQRMKRAVRRLLNLREEIQEIENDLKMMMKDNGQTLSTASGCGTVIAAEIVGEIGDVNRFHSPGALAKYAGCAPREHSSGKTIRWRKTRSGNRRLNRSFHRMALSQISRSGNDAARAYFKRKVSEGKTKAQALVCLRRQLVNVVWMMLKHKTEYRYPQEKVIDFFS

SEQ ID NO: 408549 - protein, 342 aa, unidentified
MTEIAAVGLDLAKNVFQAHGAGASGRPVLRKKLRRDQVLAFFVQLPACVVAMEACGGAHFWGREIERLGHDVRLIPPAYVKPFVKRQKNDAADAEAICEAAQRPTMRFVAVKSEDSQAAAVIFRTRDLLVRQRTQLINALRGHMGEFGLVVPQGASQAGRLVAMVADPDAPLPDAARSALHALVSALEKLEVEIRSVEAEITRRAREGEVARRLMTIPGVGPLIATALVALAPPPETFRRGRDFAAWLGLTPRQHSTGGKQRLGATTRMGERSLRRLLILGANSVIIKRHVHQEAQPGTWLGGMLARKPPMLVRVALANKMARIVWALMRKGEDYRAPAVAA

SEQ ID NO: 408550 - protein, 384 aa, unidentified
MNKHSMIFIGLDTHKEFHEVAYCEEQRGATPVHYGRIPSSKVSVKKLLRQFESKYPGATLHVVYEAGPCGYWIYRLITSLGHCCYVVAPSLIPKKPGERIKTDRRDALKLVRTLKSEDLTPIYVPEPEDEAVRDLSRAREAAMKDLKEAKYQLKALLLRNNIRYEGTANWSKKHLRWLTELILPHPAQQIVLQEQLRTIEERIRRLERLDNELTHHVHQWRYYPVVKAIQAMRGVRLLVAVGVVAELGDLHRFDHPRKLMAYLGLVPSEQSSGGKRHLGAITKAGNGRARRLLIEGAHSYRYPANVSTELQLRQEGLPKDIVDIAWKAQLRLCKRYQRMSKKGKHYNLIITAIAREVAAYIWAIAKEVVLTPVNPKLRLSRVPA

SEQ ID NO: 408551 - protein, 336 aa, unidentified
MSLYSAIDLHSDNNFIVIIDNNDSILFQRRLPNDLGTVLSVLEPYKGGLQGVAVEATFNWYWLVDGLIEAGYTTRLVNTAKVKQYSGLKHTEDRYDAYWLAHLMRLGILPTGYIYPREQRAVRDLLRKRRQLVNHRTIHVLSIQNQYWRNTGIKLKAGYIKRSNDYLGEFEDSNIHLALVSNYEIMQALDEQIGRIETSVKQQIKLRPEYELLLGVDGIGFILAVTIMLETGEISRFEEVGNYASYCRCVESKHTSNTKKKGEGNAKNGNRYLAWAYIEAANFAKRFSAKARRFHQRKKAKTSNVVATKALAHKLARACYYIIRDQVPFDENKTFG

SEQ ID NO: 408552 - protein, 314 aa, unidentified
MSEPTCFVGIDVSKNTLEVCALPGPKRNQFDNNPCGLVELLAWLRPLAPELVVLEPTGGYELEILNALSDAQLPVALVNARQIRDFAKSRGRLAKTDTIDAEIIALFAQANRPEVRPMPDPAQRQMQALVVRRRQLIEVRATEQARKHLAAPSVRPSIEMLIEHLSQQLVELDGQIQELLEQNSTWQQQDALLTSVTGVGNVTSAMMIALLPELGTLNRKQISALVGVAPLNCDSGRKQGKRKIWGGRAAVRAGLYMATLAASHHNETIRSYYKHLREAGKPFKVALVACMRKLLCILNAMLRDRRAFTPSLAA

SEQ ID NO: 408553 - protein, 313 aa, unidentified
MRTQVFVGIDVSKAQLDVAFRPEGRFSAPNDEAGVTQVLERLRAVPPTLVVLEATGGLEILLTGVLVAAGVPVAVVNPRQVRDFAKATGRLAKTDTLDAQTLAHFAEVMRPELRPLPDEQTQALAAILARRRQLVEMLTAEKNRLGSAPKPVRQSLRTHIAWLERAVSHTDRDLAHAIRESPVWREKDALLRSTPGVGPVMTTTLLANLPELGTLTGKQIAALAGVAPLNRDSGTWHGKRTVWGGRAQIRATLYMAALVAARFNPVIRAFYQRLCAAGKAKKVALTACMRKLLIILNAMLKHRTPWRAELVHA

SEQ ID NO: 408554 - protein, 346 aa, unidentified
MTIMRIGLDTSKHVFQVHGVDEKEQPVLRRQLQRSEVEKFFKKQQPTRVGLEACGAAHHWARVLRGLGHEAVLLPPQYIKPYVKRGKNDAIDAAAICEAMSRPEMRYVPIKSQEEQAALMLLKVRDLLTKQRTMLVNAIRGHAAEFGVIGAKGPATIAALLQRIAEEGQLPALARDMLASLAGQLAAAEMRLATIEAKLVARYKADPRSRLLATIPGVGPVGAVSFTLKVPDATVFRSGRHFAAWLGITPREHSTAGRQRLGRISRQGDEGLRRLLVLGATAVIQQVVRRAEAADPRRGVGASPWLLQLLARKPKKLATIALANKMARIVWAMLVSGEIYRRPLAA

SEQ ID NO: 408555 - protein, 346 aa, unidentified
MHYIGMDCHITTLEFAVVNEAGRLVKAHRVATSVNGFMEFVKKVPPPRTIYMEEGTLAAWALETCVRFREKLVIIDAKKNHWIGSSGQKGDSIDALKLAQLARGGYIKEIHHPVGQRRRFRELMIAYHDTVRSTTRIKNKIKARFRQNGIQCTGTTVYSPIHREEWKGKLPQEVTLLLILDGLWRQLKQSEQAEEELLAAAKAQAKHYPEIKLFKDIPGIGFIHAATISAILETPYRFADKRKVWMYSGLGIMTRSSGGKTYSEKLSTDYNRLLKYTLKQAAEAAIQAKDNPFRRKYLDMTLLQGVAPHRAKLTIARDMLATMWAMWRKGEKYSPEIRKKAACKQD

SEQ ID NO: 408556 - protein, 412 aa, unidentified
MEVLVEICSGLDVHQASVVACVRRPGKRGRRTSEVRTFGTTTPELLQLADWLTTEGVTHVAMESTGVFWKPVFNILEGHVEVILVNAEHYKAVPGRKTDVRDCEWLAQLLEHGLLRASFIPPQPIRELRDLTRYRKSLVQHRATEGNRVQKLLESANIKLGVVATDILGASGRAMLQALMAGEGDGTVLAELAKGALRQKRGRLADALTGRFTAHHAVLLGELLAHIEYLDAAIARLDERVEAALRPYADHVARLQTIPGVGREAAETIVAEIGVDMSRFPSAAHLASWAGLCPGNNESAGKRKTGKTRKGNRWLKPLLVEFGWGAGRARRTYLGAQYARLGRRRGKKKAAIAVGHSILVAAYYILRDGVPYRDLGPDHFDRLVTERLTRHYVCRLEQLGHRVTLDADQPAA

SEQ ID NO: 408557 - protein, 410 aa, unidentified
MIYVGIDWADDHHDVAITDDSAKTLSQFQISHDSSGFAALHGQLAKFRQSPDQILIALETSRGLLVHELLRSGYSVYAVNPKAVNRYKDRYVLSKAKSDALDALALAHLLRTDRHRFKALCPFPEDYRLLDRLCQDLRKLVEEKSRISNQITSVLKEFYPIALELFSLDSNIGIAFLRAFPDPQALSTCKKRTLGAFFRKHSYSRPQKLEELWKLIQRPGLHPDPVVLKAGRFRLLALLDQLIPLREHVALYEKEVKAILDKLPEAKSISSLPGVGDRLAPELTAALGPKDSDSQSRFECAEGIMKLSGCVPVTRESGKWKTVSFRYACVKNLRRTFRDWAFASLEQSVWARAYYDFYKAMNMPHSTILRNLGKKWARILFALWSQGTIYDETLYIQSLKNHNVRWAMAL

SEQ ID NO: 408558 - protein, 324 aa, unidentified
MLTRATGAEMKKATTEIFVGIDVSKSWLDFAVHEQAGAFRTGNDDTGIASLVKQLRKLKPALIVLEPTGGFEMLVVAELTHAGLPTVVVNAKRVRDFARATGQLAKTDKLDAKVLAHFAAAVRPAVRNLRSEGEEQLTALLTRRKQVLDMLTMEKNRLVTVRAKMRLEIEAHIQWLSRSLKELDKEIKAFVEGTPVWKEKDALLQSVPGVGPVTSATMLGMLPELGQLNRQEIAALVGVAPLNKDSGKKQGKRRVYGGRADVRSVLYMAALAAKKFNPVIKEFYERLIKHGKEKKVALTACMRKLLVILNAMMRTNQPWRTQAA

SEQ ID NO: 408559 - protein, 373 aa, unidentified
MKEKVRFLGLDVHADTIAAAVAEPNGEVRSLGRIPNRAESIRKLVKKLGGVEHLRACYEAGPTGYVLYWQLSELGVQCEVVAPTLVPVKAGDRVKTDRRDAEKLARNHRSGDLTAVWVPDAGSEALRDLVRAREAAKQDQLRARHRLSKFLLRTGQRPGPGVKAWTQGYLVWVRQLCYAQPAQTATLLDYLHEVEHMGERVGRLEQAISEAVKLASPQMQAVVRDLQALRGIAEISAVTIASELGQISRFESARQLMGYSGTVPGEDSSGKRMRRGPITKTGNAHLRRIVVEAAWSYRLRPAVGPGLRKRQQEVPQEIKEIAWKAQIRLYKRYARLAAAGKDKRKIVTAVGRELLGFIWAIGVKTEASGQIAA

SEQ ID NO: 408560 - protein, 402 aa, unidentified
MTYDYVIGMDACKYFHHACVLDIDGTQVLSKRINQNEQSLRALFSALSAYDHKVLVVVDQPNNIGRLTVAVAQDIGIDVRYLPGLAMRQLSRIHAGNAKTDIRDAYIIAHAAKNLPESLRSVDRVEEAFLQLKVLNGIDEDLARSYTRLINQIRSALVGCYPQFEQALRGQIIHRKWVLHLLARYGGPTKIKRLGKAKAAAFARRYKARNPEPVLDAIFAAISEQTVTIAGAHYAEMGVAMSAKDALLKLEHRQQIEKEVIELINDIPHTQFLLSMPGIGPKTAAQILMTAGDMSDFPSAGHLASYAGLSPRTNQSGTSIMSNSLNRAGNKKLKNALWQSSFASIRFHERSRQFYERKRREGKRHNAAVVALARRRLNVLYAMMRNHEHYHDPAPSQEDLAA

SEQ ID NO: 408561 - protein, 338 aa, unidentified
MQAYAGIDLHSSNNYIGIINEQDHRLYGKRMPNDLNHVLMALEPFRDQLEGIVVESTYNWYWLVDGLQENGYNVHLANPSAIKQYEGLKHTDDKWDAYWLAHMRRLNILPEGYIYPKESRAIRDLLRRRLLFVRHRTSHILSLQSMITRNLGFKVSGNNIKKLKGEDVDRMFNSSNLKFMAKNNIAVIQFLKKIIVDIGKNVKSQVKLRKEFKTLLTIPGIGDILGLTIMLEVDNINRFPKVGDYSSYSRCVKSERISNGKKKDQNNRKNGNKYLSWAYVEAANFMIRHNAKAQRFYQKKKAERNGIVAIKALSNKICRASYYIMRDHVPFDEDMLFR

SEQ ID NO: 408562 - protein, 408 aa, unidentified
MEVLYARCAGLDVHAASLTACVRVATGAAVTYQHRTVSTTTRGLLDLGEWLAACGCTHVAMEATGVYWKPVWHVLEGRFTLILANAMHIRNIPGRKSDMNDATWIADLLAHGLIRSSFVPPAPIADLRDLTRTRKQLVREITRHTQRIHKTLEHANVKLTEIISDIVGTSGRAVLRGLIAGETDPQRLADLTSGRLKASRAQLVDALEGRVTAHHRFMLQLHLTQIEALETAVHDLEARIREALAPFRAAVSLVTTMPAVKATTAAVILAEIGTDMTQFPSAGHLLSWAGVCPRLDESAGKRRSTRTREGARWLKTTLVQAAWAAVRKHDSYFHAQFVRLKRRRGSKKAILAVAASMLTAVYYMLRDGVEFHDLGSQYFAHHDKEQLTQQLLRRLRDLGVEVEVKNAA

SEQ ID NO: 408563 - protein, 337 aa, unidentified
MDNYIGIDVAKATMQIYIPKNDLDIEIANNESGLKTLYSKLKKQYKKQIDDIVFVYESTGSYSTYLEQFSESKSIKCFKVGAYQSASFSKVVKNRNKTDRIDARMLSNMHVIATDEDIKIPSRDVKAHQIRSYIKYYQSLVKEEIRSKNYLEAATFNLEDKFVLKQVEKKIKNIQKEQVDIISKTMEIINFNEKYKKAYENITSIKGIGEKSGIILLYLFLRYPKASRQHVTALCGLDPIQRTSGTSVQHKERISKQGLSLVRAILFMPTMVAIQHNEEMKLIYDRLVDRGKPKPLAQIAVMRKIILLAHSLYKNDEIYDERRYLKFTQIKKVDNVK

SEQ ID NO: 408564 - protein, 362 aa, unidentified
MTNPQSTPEAVVWVAIDIAKDRHEALIEAPGWKSRKKFRVQNTAEEFRAFAEFLHGLALPVRIGFEPTGNYHRALAYFLHSEGFSLELISSLALARTREAMHNSWDKNDPKDAQVILHLLKGRLTQHFHDPLVHNLNDLQELSKTHHQVSLEKTRTQHRILTHHLPLYFPEIARYHSCSRSQWLWNLLIEFPTPRCITQLPKDEFVRKAWKVVGRKVAKERILTDIYLTAQSSVGLPAEENSEAVTMLRFVLRQLLTLCHLRATIEERANDLLSSNEDYQRLRRIPGIGPISALTILAEAGNLRRFSHHRQFLKFCGLDLATEQSGQFRGLSRLSKRGNARLRAVFWLAAGVAVRMRENSQV

SEQ ID NO: 408565 - protein, 460 aa, unidentified
MKHKRSKSKDGGKMPMVHPNAAAIDVGATMHMAAVRADRALEPVRSFGTFTADLHRLVNWFTECGVETIVMESTSVYWIPIFELLDSRGFTVCLVNARDAKHVPGRKTDVSDAQWLQRLHSFGLLRASFRPKGQIAELRSYVRQRERLLEYAASHIQHMQKALTEMNLQLHHVVADITGATGLRIIRAILAGERDPEVLACLRHYSCHSSAETIAKALTGSYRAEHLFALEQALALYDAYQEKASACDARIEAVLKELSVHRGRGHGSPPRASRRRNRTDQANALAFDVREALFALLGKDVTSIDGLGPYLSLKLIAECGDDLSSWPSAKHFTSWLGLAPSNKVSGGKMLSSRTRRSGGRTAALLRLAAVAVGRTDTALGAFYRRLSSRIGKAKAVTATARKIAVLFYNAVRYGMDYVDPGASSYETRYRARVVNNLHRRAKAFGFVLQPLEPKVGAAVS

SEQ ID NO: 408566 - protein, 402 aa, unidentified
MPMLSIGIDVSKGKSTVCGMKPGGEIVYTPFEVQHTREGMSELVSLLRSSGEEVRAVLESTGSYHCPVVAALLENGIFVSVVNSLRMKRFCSQSIRKVKTDRIDAMQIALYGLAYWQELQPTKLPEDTYRELQLLARQYYQMTSLLIKAKVDFNAICDQVLPGMQELMNDHAGRHKLSDFVLRYHHTTHILEMGETRFRKDYCKWAEKKGYRNCERMAALIFATAQNGIPVLPNAPSTQIVITEAIRVLHTVEASRDTILAQMQALAKTLPEYSLVREMPCIGDTLAPRLIAEIGDVRRFHSKRALIAYAGIDAPPYQSGKFCANNRHISKRGNRYLRKTGYEVMQSYVMHKPANDPIFTFIEKKRGEGKSGKLAMVAGLNKFLRIYYGKVTELYRSSSAIE

SEQ ID NO: 408567 - protein, 332 aa, unidentified
MRLDERPLPQHHIGGDAMESICEKTVAIGVDPHPGSHTATAVSRLGEVLGSITVSNSEAGQKKLREWAEQHRCRCWAIEGAGNRFVAPLVSELLSDGEQVYAIPPSMTAQYRSRRGRKKDDEVDAENAAKALLANPGITRYLPTGYEQRLKELTRCYQRLSHQLKASRMASKAIDDDLISQVTLKVIRALEDALATLKREIEKTVRKVAPELLEIRGVGPIVASVVLAEAGRITRFADRDHFVAFAGCAPIRWESGAHQTVRVNPGGNRRLNWAAHIIAISRLRIDTNTKAYRDRKLAEGKTQRQVIRLLKTYACRELYKNLKRRQLSAVGA

SEQ ID NO: 408568 - protein, 334 aa, unidentified
MQNITLIGIDLGKHSFHIHCQDKSGKALLRKKFTRTKLMQFLATCPPSVVVMEACAGAHFMARRISDFGHETKLISPQFVRPFVKSNKNDFVDAEAICEAASRPSMRFVQPRTEPLQAMRALHRVRESLIRDKVKTTNQIHGFLLEFGVSLPTGDAVIKRLSLVLAEHEIPEYLSRLLVRLHTHYLYLVEQIAELESELSQSINADDTAQRIMTIPGVGPITASLLSSQPGDGKQFSCSRDFAASTGLVPRQYSTGGKSTLLGISKRGDKNLRRLLVQCARSFMMRLERQHGKLAEWVREQLNKKHSNVVACALANKLARIAWVITTQQKEYQA

SEQ ID NO: 408569 - protein, 405 aa, unidentified
MDGIRRYAGIDWAKDAHAVCIIDERGSALARFEVEHSAAGLRELVRRLTGVAGVAIERPDGPIIEALLEAGLPVVVIAPRHVKALRTRHGLAGNKDDRADAYVLADALRTDGQRLRPLQPDAPETLALRATVRARKDLVHHRTALGQQLAAHLALAFPGAVDLFDELASPIARAFLRRFPSAERAAWLSPRRFDHWLAAQGYSGRRSGAELHARLVAAPAGVGGETAEAMAAVTLALVAAVGAIDEQAKALEARIAEQLARHPDSALFRSLPRAGRVRAAALLAEIGDRRERFPTPESLACLAGATPSTRQSGQHRAVSFRYTCDKKLREALVDFAQDSRRANPWAEDLYRRARERGKSHPHAVRILARAWTSVIWRCWQDRVPYDPARHRALQRVLLGPTAVAA

SEQ ID NO: 408570 - protein, 454 aa, unidentified
MAPRHKKTNKKVHVQLPTLHPNAAGIDIGAREIWVAVPPDADPNPVRQFETFTDALLQLRDWLKATGVTSVAMESTGVYWIPLFQILEAAGLEVFLVNARHCKNLPGRKTDVQDCQWLQYLHSVGLLRGSFRPPETICAIRSVLRHRNRLLRCAADQVRLLHKALTQMNIQLHHVISDLTGVTGQAILQAILAGERNPLALATLKDPRIKASRDIIARSLHGNWLPEHLFTLRQSHDTWLHYQQQVAACDQHLQTQLAELDSRVDLQAQPLSAPRTTHRTPQRNEPRFDARSECYRVLGVDLTVVPSFQTPTVLVLVAELGPGFAEKFPSAKHFSSWLGVCPDNRISGGKILSVATRSVKSRVAEALRLAAQSLVHAKNYFGDLYRRWKAKLGAPKAITAMAHKLARIIWHLVKFKQPFDPEVFRKEEEHQQKKKLKRLHHTATNLGFTLVPIQ

SEQ ID NO: 408571 - protein, 423 aa, unidentified
MKSLRRQNFTAYVGLDWADSKHDICLLEAGSEQREFACVAHQVECIDEWAKSLQQRFGGPIAIALELAKGPIVYALQKYDFLVLFPINPLTLAKYREAFRPSRAKDDPSDAELALDLLVRHPERFAPLQPQSVGMRTLISLTERRRELINDKTRVTNRLTNTLKQYYPQALEWFDQHDTVMFCDFLSRWPTPLQAKRAHRASIKAFHHAHNAHRPKLIAERLAAIKAAVPLTQDPGVVVPCRLHAMVLVEQLRLALQAIEQFDRHIAELAPTLPDYRLFEGLPGAGPHLAPRLLVAFGEDRERFQRAEELQKYSGIAPVTERSGKKNWVHWRWQCPTFLRQTFVEWAGQTINKSFWAGAYYNQQRAKGSTYQAAVRALAFKWIRILYRCWKSRIPYDESKYLKALKKRRSSLLNNLVPDPLNA

SEQ ID NO: 408572 - protein, 373 aa, unidentified
MDEDRTVCVGLDTHKAKIAVAVAEPGRSGEVRFQGEIANRPEAVRQLLERLAGKHGRLRVCYEAGPCGYGLHRQITALGHDCTVVAPSLVPRKPGERVKTNRRDALTLARLHRAGELTAVWIPDPTHEAMRDLVRARTAAMEAVRRARQQLQGFLLRHDRVFTGRKAWSPAHRRWLAGLRFEHPAQQVVLQEQIDVVGEAERRRDRLGEQIRELLPAWSLAPVVAALQAMRGVALLSAVVLVAEIGDFRRFASPRQLMAWLGLVPSEHSSGSRVERGGITKAGNGRARRVLVEGAWSYRFPARVTGPIQARLEGVPDAVRAIAWKAQLRLCARYRRLVAAGKNVNLVTTAIAREMAAFAWAIACQVQPAGAAA

SEQ ID NO: 408573 - protein, 369 aa, unidentified
MADRITYVGLDVHKESIVVAVASGGLRGEVREYGRIANTATALDRLLRKLGDAGMVLRFCYEAGPCGYGIQRHVSAQGHECVVVAPSLIPKRAGDRIKTDRRDAASLAKLHRAGELTAVWVPDPQHEAMRDLVRARLDAVHSLRRARQQLSGFLLRQGCHYGRPAWTKLHRRWLAGLIFEQAIRHIVLEDYIAAVEAAEARRDRLTAQIGTMLPDWTLAPVVAALQTMRGMAMVNAATLIAELGDLSRFADPRQLMAYLGLTPSEYSSGSSVRRGGITKAGNGAARRLLIEAAWSYRFPARLSRELLLRQESQPKPIRDIAWKGQVRLCARYRRLARSGKPANVVTTAIARELTGFVWAIARQVTVTPG

SEQ ID NO: 408574 - protein, 408 aa, unidentified
MNKLFVGIDVGSRDNAVYIMLPNGGKHSSFSVQNNLGGAQTISNKVVSALTGLNLSHVVIGIEATSVYGDNLMCFLREDGALGQFERKFHILNPKQVKKFKEVHSDLPKNDPVDAFVIADNLRFGRITNAVYMDDYRYKPLQNLTRARFYAVTNLTREKQRFMNYLFMKCSGLAQDKVFSDNYGAAALAVFEEFESPDDIVNMDVDELAAFISVKGKNRSPRPDEIAKAVQSAARGSYRLPKTVNDSVNQVLAISISSMRALQSQIKALDKEIERQFQNIPNTLTSVPGIGKVFSAGIIAEVGDVNRFDKGQSALAKYAGLVWNENKSGLFQGQNTRLIKSGNRFLKYYLCEAALALVRCDTEFKRYYDLKFKQVNKYQHKRALALTARKLVRLVFRLLKDNRLYRPV

SEQ ID NO: 408575 - protein, 329 aa, unidentified
METVKQFIGIDVGSKELVKTHGIQTTPEKFIKLSTESIANTIPSINNWIETLSAESHIIFETTGNYSLNLAYCLEIADIPFTIITPSQSKGFAQTLKVSNQNDAIDASLLAYYGVRNQPQPTNLEDETLHHLRQKRKHLSSLMAQKQVVTNQLHALSYDAKADTMVLKSLELLLQTFQIQISQFEKELFTLDNDQYKHIYNLITSIVGIGQAAANAMIIATDGFKNFENVKQLLKFFGIVPKEKDSGTSVRKKYGIAQSGIAYVRSVLYMAARSAKKHNLACIQIYQRQRNMGKPHKIAIVAVMNKLVRQVFAVVTKNTLFVNEYEFAK

SEQ ID NO: 408576 - protein, 336 aa, unidentified
MIHVGVDLHQRFCYMTAVDSRGRLLGAGQVRNQDQALRSYFAQFRGPVQAAVEACSFWPAFRKAVCARVQVRLVHPQRVKAIASAKLKNDRIDSATLAHLLRCDLLPAAWMADEATRELRQQVRMRATLVRQRTRLKNQVHAILHQQGLQFEGSDLFGQGGRAWLKQVSLPAAGGSAVKVYLKLIDEFTAQISTQDEELKRQWKKDARVLWLETIPGIGWYSAVLLVAEIGDILCFQDKRALANYAGLVPWLRESADKRHSGGITRVGSPWLRWIMVEAAHVAVRTSPPVKKWFERLCRRKHKNAALVAVARKLLVAVWAMLHDGVGFEEKHFALN

SEQ ID NO: 408577 - protein, 358 aa, unidentified
MAEHPAETHVIGGVDTHKDLHVAAVVDHCDRVLGTESFPTTRHGYRLMLAWMRSFGDLLRVGVECSGSYGAGLLRYLQAAGVEVLEVTAPDKLDRRRRGKNDDYDAESAAHAAFAERHTVTPRSRDGMVESLRVLRVCRKTAAQARRIALQMIQMTIVCAPDKIREPLRSMTRMQLIRTLAAWRPDLTAYRQVEEAYRIALKSLARRYLELHDEVADLDDMIEAIVRDLAPELLAQTAIGLNSAAQLLLTAGDNPDRLRSEASFAALCGVSPVPASSGKTVRHRLNRGGDRAANSAIHIIAIGRLRLDPRSQDYVARRIAAGHSKMEAIRCLKRYIAREVFGIIIRRHRQINQCQIVA

SEQ ID NO: 408578 - protein, 409 aa, unidentified
MSQMLVGIDVSLRSHHVHFMDEAGKSLANFSVPNSVDGADTLISKLLEKTNKLKSQSLRIGMEATSNLGWHLAHYLKYQLIEPYPDAQIYVLNARKVARFKRGYDTLPKTDNIDAWVIADHLRFGRLPYEMKDVVQYDALQRLTRTRFHFMQTIGREKTYFLNQVFLKFSGLRQDNPFSTTFGTTSLAVIQELDPEQIAAMPINELIDFIKEKGKNRFTDPEEIALYLQKIARSSFRLHKTMADPVNISLAVTLSVIKHMEAEVKKLDKEIAKIMKSIPQTLTSIKGIGDVLAAGIIAEIGDIERFKNHNALAKYAGLSWNKYQSGEFEAEDTRRMMTGNKYLRYYLIQAADSIRKHDSEYKTFYQKKYDEVPKHKHKRALVLTARKLVRLVFSLLNTKQLYTPPERRG

SEQ ID NO: 408579 - protein, 340 aa, unidentified
MNVTTVGIDLAKNVFSVHGVGRDGKVLLRRSVGRADLLPMFAQMPPCLIGMEACSGAHHFARELRRLGHDARIMAPRFVAPYRKSGKNDGNDAEAICEAVARPNMRFVAVKSVEQQAILALHRVRKEVSDQRTALINQLRGMLCEFGMVLPRGRYSFRHKLPPVLEDTGNGIPELARRLFREVNERIGALDAQILAYDREIEALARHSEAAQRLMEMPGVGSITATAIVASVADMKVFKSGREFAAWLGLVPRQYSTGGKVRLGRITKQGDVYLRTLLIHGTRAVLAALGTKNDRLSLWIRSLIERRGYRKATVALAAKHARMIWAILAKGDAYRRPAAV

SEQ ID NO: 408580 - protein, 321 aa, unidentified
MNNDPALGIDVSKDKLDCALCVDGKCKSKVVTNNPQGFADLLNWLHKWHVDSPHVCMEATGVYWEACAEFLTAHDLRVSVVNPAQIWAFGGSRLVRTKTDAVDARLIAEFCQRMTPETWQPPSPAEQALRALVQRLDALQRMHTQESNRLGVAPDTVRKGIADHLAWLDKEIAALTKQIRDHIDGDPDLKRKRDLLDSIPGVGERTIAALLAFGADQHHFSNARQCVAFAGLNPRQHQSGSSVNGKPRISKVGHALLRKALYMPALVTLYKTAWGNVFRSRLVAAGKPPKLIIGAMMRKLLHVAFGVLKSGQPFNSTLHGC

SEQ ID NO: 408581 - protein, 409 aa, unidentified
MDYRVYCGVDFHARQQTISSLTTEDGVVSTHELKHQNKAELKAFYAQFRGPVLVALEASGYSPWFEQMLEELGHEVWLGDAIEIRRRARRRQKNDRRDAELILDLLLHNEFPRIHRPSVKSREILRMLRYRHKLVQMRTIVKNSLHALSIQSGLSLRAKLFTGAGLDQLRSLTMSPVMQYQRDQWLVALASLDQQIIAATNWLGQQAVGDTRVQRLRTHPGIGLLTGLAVVHTLEPVIRFRNQRKVAAYVGFDPQELGSASQLVEVPALAANRIALSGITLSTESADSPRGERVANSIANLAMRRFHSSSNLFYSYVVYVGRARKSTEAPALLAEVRLFRDGALVYGGDAKAIDMSGQSDVERITAAGGLRLNSLAPGTYVLQVKVKEPSGKGGDAMQLIDFEVVPWGE

SEQ ID NO: 408582 - protein, 402 aa, unidentified
MQVYIGIDWSESKHDIVVMNEAGAAIARQTIPHSPEGFLAMESTCQDLGVAPGDCLFGLETAHNLMIDFLWSRNYTNVYVIPPSVVKSTRGRYGQSRARTDQSDALLLADLLRTDRHRLQPWHPDSLLTRQMRAKVSMINHLTRSVVRLSNRLRAILLRYYPSTIRLFSSLRTQIALQFICAYPTPDAANALSFAGFEAFARQHGYTQPRKLPECFARLQCPHPKATPETVLVYRDEAVQLATLLFSTVQAKNTALRELTVLFERHPDHDVFDSLPGAGKFLAPALQVKFGDDRQRFPSPASVQALAGTCPVTDASGKRKVIKFRRSCDREFRDIAQKWALASKSESLWATLYWERVRPRCNSNSHAYRCLLAIAWKLWQTGEMYDEAYHLRQRALHSKPRH

SEQ ID NO: 408583 - protein, 420 aa, unidentified
MTPSKERTIVAVVNPICCGLDVHKESITACILYNDENGKEHSILQEFTTFTDDLVHLRDWLLTHYCPIVAMESTGIYWYPVHNILEGYVKVILVNARDIKNVPGRKTDIKDSEWLAGLLRHGLLRASFIPPKEVRAWRDLTRMRRKYVNTLSDYKKRVQKLFESANIKLDSVVSDLFGVTGRNLMSLLASGHTDITLEDIEQCVRGRLKCKTQELYRSIKGFFSENHRFMLQTLLFTIESLEQTITTLDQRISNLMDSKEELIERMKEVPGISDISARDIIAETGTTLDAFPSDAALSSWCGLCPGNNESAGKRKSGKNHTWKNKVKTVMVEAAWAAVRTKNTYYQEKYHRLKTRRGHNKAIVAIAHRIMICLYHIIKDGVHYKELGMDYLDKKTRAAKFSRLQKQAQSLGYSLIPVVKA

SEQ ID NO: 408584 - protein, 350 aa, unidentified
MVVVGADVHKRTHTFVAVDEVGRKLGEKTVKAITAGHAEAVMWARERFGGQVVWAIEDCRHLSARLERDLLTAGQQVVRVPPKLMAQTRASARTRGKSDPIDALAVARAYLREPDLPVASHDEVSRELKLLVDRREVLVGQRTSTINRLLWRVHELDPERAPKPRSLDLAKHRRILRDWLATRDGLVAELARDELADVTRLTEAINALAKRIGARVRAVAPALLAMPGCGELTAAKLVGETAGVARFKSEAAFARHSGVAPIPVWSGNTAGRVRMTRSGNRQLNTALHRIAITQIRLEGLGQAYYLHRIAAGDSKSEALRCLKRRISRVVFTHLHTDQQNRTQPCQQAAA

SEQ ID NO: 408585 - protein, 358 aa, unidentified
MLYLAIDQHKRQLTVNLRSEDGTVILKRQVSTRWEKVRAFFAELAEKAGADGGFLAILEICGMNEWLVKMLQEYGCREIVVVQPTERAKQKTDRRDASELAHLLWVHRQQFLAGKQPLGLRRVQWPTAQEAEDRQLTMLRVVLTRKRTTVINGIHKLLRKHNLEQSQPTKGFQTKKVRKWLEKVELPYIDRLEMNLLLPQWDLLEEQLKAVDKKIAERAVADEQVLLLETVPGMGHYSALAIRSRIGNVERFKHADSLANYFGLTPGCRNSGEATKRLGSITKRGSKIVRYLLNQAVIKVLRYDGIMRAWFQRIKKRRGAKIARVAVMRRLATILWHMLKRKQRYRFASPDKACAQAA

SEQ ID NO: 408586 - protein, 346 aa, unidentified
MTIVESTRPITGGVDTHLDVHVAAALDANGGVLGVESFPTTTAGYRDLHGWLVGFGHLERIGVEGTGAYGAGLARFLQRAGVAVIEVDRPNRQERRRNGKSDELDAIEAGRAALSGRCSVVAKTGDGSMEAMRAVLVAKRSAREARVSGLNQIRHLGITGPEDLRLRLGSVSSDRLGGVAAALRPARDGDPMRYGTKLALRTLGRRVLELDTQLDELNAALGELITATAPGLLALHGVGVDTAATLLVAAGDNPERIRSEAAWAHLCGVAPIPAGSGKTNGRVRLNPGGNRQANHALWRIVITRMSSDPRTRAYVARRLDEGLSKRETIRVLKRYVARETYRHLPR

SEQ ID NO: 408587 - protein, 347 aa, unidentified
MVVIGIDPHKRSHTAVAVDEVGRKLGQLTIASTAQGLLRLWAWAATFGPDRRWAVENGRGVAGRLVRTLIGHGAAVVWVPPKLMAQCRASARTRGKSDPIDALAIARAALREPDLPTAHLDDVATGARLLTDRREQLVSWRTQTINQLRWHLHDLDPDLDAATGRLNSARGLDRLSGALEALPASVRRDLAQELVGEIRRLSAQVRQLEKQLAKLISPLAPTLLGILGVNVVTAAKILGEVAGITRFRSAAAFAMHSGTAPIPVWSSNRPQVRLNRGGNRQLNTCLHRIAITQLSRSPEARAWREQWTARHPNATGKAALRALKRHLANVVYRALLADHKHQLAEGA

SEQ ID NO: 408588 - protein, 342 aa, unidentified
MGTITTIGLDIAKSVFQVHGIDATGEVVVRRRLSRGRVLAFFEKLPRCLVGMEACNTSHYWARELIALGHDVRLMPAQYVKPYVKRSKNDAADAEAICEAVARPTMRFVPVKTPEQQSIMMLHRVRLMLNRQRTQLSNAMRAHMAEFGVVGPVGRMGLERLMAVIADREDLRIPPDARVCLEMLAAQLAVVKEQILENDRRIRARARETEVGRRLMEIPGVGPLLASAFVASIADPTAFKSGRDVAAWIGLVPKQNSSGGKERLGSISRAGNRYLRQMLVVGAMAVIRHVERHGTKRRWLIQLLARRAKKVAAVALANKTARTIWALMTNGERYREPTVALP

SEQ ID NO: 408589 - protein, 445 aa, unidentified
MSKRTYRAVKINGIDEAKVSERVRGKQVVLGVDIAKDECFGRLMDEQREVVATIKWHQVGETGQMIDFLKRLPATAVQVAMESSGSYGDALRWQMQQAGLPVYRVSGKRCHDAAEVYDGVPSMHDAKAGDIIGKLHLDGISRRWEPKSTVQRELAAVVHTMALYDDQYHRTLNRIEARLARHWPELTTVLQLSSATLLALLEDFGGPQAVNEQVKEARALMRRVGGCFLRAEKIELVIASSAATIGVPMLEAERDLLRVLAREANRCRKAEQKTRMQVEQLSKGNETIKRLASTVGVTTAAVLVVAAGEPQSYERPAAYVKGLGLNLKERSSGKHQGQLRITKRGPSEARQYLYLAALRLIQEQRGDEVVRAWYVRKVARDGGRSRKKAVVAVMRKLAAALWHVGQGSEFDSSLLFDKQKLRRELSQSVSTTCRRPAQAVAQQEN

SEQ ID NO: 408590 - protein, 386 aa, unidentified
MQKLNDLSRCLTPLEPDSTLIAVIEMSLSSWLVAGIVPGVERQPLKKLAVDESVLLKLLHRWREEAEKAGYMIKRIAVAFEAGRDGFWLARWLRARDIEVHVIHTSSVAVSREHRRAKTDRLDTELLKRAFLGWLRGERDHCKMVAIPTIKDEDGKRPNRERESLVGEQSRIINRIKATLVRLGIRGFNPKLKKAAERLEGLRTPEGEPIPPNTLSELYRDMERRRLVRDQIRQIESARLDRLEHAPGEGAHAMVRLLARVMGIGIETADMLVREVLSRNLRDRRAVARYAGLTGSPDESGKKRREKGLARSGNPRVRRGMIQLAWRFLLFQKDSALAQWFRARTENARGTRKTMIVALARKLLIALWRLVREGVVPDGVILRPAQ

SEQ ID NO: 408591 - protein, 343 aa, unidentified
MQIRSVGIDLGKTTFHLVALGAAGKVLVKKKFTQKQLLAFTANMQASLIGLEACSGAHFLGRALRNQGHDVRLIAAQFVKPFVKSNKNDFVDAEAIAEAVERKNMRFVPIKTDDQLDLQAMHRIRDRLVSRRTAVINQIRAFLLERGMVFAQKPAKLKAAMADVLENAENTLTPMMRNMIGILWDEWKTVEQQIDELTDRLEQIASSDAGCCRIRQIPGIGPIVATALVAAIGNGAAFRKGRDFAAWLGLVPRQYSTGGKAKLLGISKRGNTYLRKILIHGARAAAMRIKRDRFAIGGWMNALEARAPRNVLVVAMANKLARIAWAVLSTGEDYRPGVILAAA

SEQ ID NO: 408592 - protein, 398 aa, unidentified
MTESSDYESVQVFIGVDVGKDTHHAVAVNRSGKRLFDKALPNDENKLRSLISDLKQHGQILLVVDQPATIGALPVAVARSEGVLVGYLPGLAMRRIADLHAGEAKADARDAAIIAEAARTLPHALRTLKLADEQIAELSMLCGFDDDLAAQTTQVSNRIRGLLTQIHPALERALGPRLDHPAVLDLLQRYPSPDKLASRGEKKLATQLCKLAPRLGKRLAADITRALTEQTVVVPGTNAAVVVLPRLALQLITLRKQRDEVALEVEQRVLAHPLYPVLTSMPGVGVRTAARLLTEVACRAFASAAHLAAYAGLAPVTRRSGSSIRGEHPSRRGNKTLKRALFLSTFAALRDPISRAYYTRKMSQGKQHNQALIALARRRCDVLFAMMRDGTFYTPAAS

SEQ ID NO: 408593 - protein, 342 aa, unidentified
MKFYCGIDLSARACHLCVINERLKVMVQQKLPNDLSQICQLLEPYKANLKIVVESTFNWYWLIDGLQAAGFEVVLAHTLGLYLITGAKVKTDRRDAYSLAKLLLVGAVPAAYIYPAETRPVRDLLRRRLHLVQVRAGEYGSLRRLLLRQGILSHKQQEIKTATEAELEQWFEHPLVRLHASQELQRIELYSQQIGELEKTILDLAQTEPSYYLLLQLPGVGQTIALTILYEVGAPSRFATAKDFSSYCRVIPGIAQSGQVTRRGRGSKQGNHYLKAAFSQAAVAAVRCYPEVRRYYERQLKRHQGQGRKLVCYNIIAHKLAQAAFHILKEQTEYRAELLFGR

SEQ ID NO: 408594 - protein, 372 aa, unidentified
MNYFLGIDIAKTNHVASLIDKEGNIVIRTIKFTNSNEGFKKLLTTIQDKLDDLSNIDVAMEATGHYWLALYSALVDNNFNVSVYNPYQIKSYRGAYNNRKQKNDIIDSIIIADFLRVFGSKESKLPEDDLMSLKQLTRFRSNIVDNISSLKVQVIGILDKVFPEYKVIFCDVFGSTSKQLLLKYPTPEEILKTSSTKLTNLLSKHSKGRFNKENVKQLKQIAKNSFGIKFTTNACSFEIKQLINQIIFLEEQIDEVEIQIEEIYNKLDSHLLSVPGVGKTLVPVILAEIGDINNFDKPSKLIAFAGIDPSENQSGNKLSSNDKTSKRGSPYLRHAIYTASLVAISNEPELRAYYDKKKSEGKHHFVALAKAS

SEQ ID NO: 408595 - protein, 343 aa, unidentified
MQTITTIGLDIAKSVFQVHGVDAGGQVVVRRQLKRRYVLMFFQKLSPCLVGIEACASAHHWSRELQALGHTVRLMPPAYVKPYVKRHKNDATDAEAICEAVTRANMRFVPTNTPEQQSGLVLHRTRHMFIRQQTSVINAIRAHLAEYGIVAPVGRHGVEELLTVVADVNDRRVPEIARACLSALGAQLRRMKEQILEFDRLIRAWHRSNEMSMRLEEAPGVGPVLATALVAAVADPKSFRSGRNFSAWIGMVPKQNSSGGKNRLGNISKQGDRYLRGLFVAGALSVIRYAKIHGTKHRPWLTALLARRPTKVAAIALANKIARMVWAMMARGERYKEPVALAR

SEQ ID NO: 408596 - protein, 349 aa, unidentified
MRFYTKTHAHYCGIDLHAKTMYLCVLDREGKILLHKNVRSRPDDFLAAVAPFREDLAIAVECIFTWYWLADLCRREGIEFVLGHALYMKAIHGGKAKNDRLDAYKIATLLRGGNLPQAYVYPPEMRATRDLLRRRLHLVRRRANLLAHIQNTHHQYNLAPPAAKITYKANRPGVAESFEALDVRKSIEIDFSLIEHYGKLLREIELHLEHRAKQHDPQAYHRLRSVPGIGKILALTILYEVQDIHRFPRVQEFLSYSRLVKCEHNSAGKKLGTGGAKIGNAQLKWAFSEAAALFLRNNPEGQRYLRRLAGKHGKGKALSILASKLGRAVYFILSKERVFDMKRFLTHTA

SEQ ID NO: 408597 - protein, 319 aa, unidentified
MAQNDRIVVGIDVAKDKVDACIRRFTLRQTFPNTAQGHRKLVAWLRKYKVGKAVMEASGGYEREWRNVLHKAGIEVRIVDPRRVRSFAQSAGRLAKNDPIDAEMIAWFAETFSQAPGQIPDAAREELAALAKARTALVGVKIRLQAQDEHAAPEPARKAYARVLKSLAAEIDKLEAAISAKVKATPEFAERAEIIESVPGLAQATSAILVAGMPELGQVSDKVAAALIGVAPYDDDSGKRRGERYIKGGRRWVRNGIYMPCLGAATQCNPVLKAHYQRLLAKGKEPKVALVACMRKLIIILNTMLARRQKWNPGRHAMA

SEQ ID NO: 408598 - protein, 335 aa, unidentified
MQIYGIDLAKEKFDVSVLRLSSKSNVVTPVHHVVRNTESGIKAFLKGLPSDSVLVAEHTGVYGERLLKMCTEMNVKIAYVGGHVIHTYKSGPDRGKTDEQDCNVLREFGERFTDKLVYTTFPEEDIYELRQLSRQRTMLVEERKRITTADKTEDCRPYRSEAVKRSMQHIVDLLDEEIKDMERAMLTVIRKHDKISSSYDIITSVNGVGLVTAVELIVKTRNFTTITTAKQYSAYAGTAPYEKSSGKINQGAHVSKWGNRRSKTLLYICAECARMHNKEMKLYYERRTIIDKKAHHYVLNAIANKLLRLIFSLINKNEKYNPCYIQRDPRSLNIN

SEQ ID NO: 408599 - protein, 383 aa, unidentified
MKSVCGLDVHKDSVYLCILSEFGELIEKVFGVLTYQLEEMRDLMLHHHVVEVSMESTSVYWIPIWRVLSPHFKLNLANPYFIKQLPGRKSDVKDAQWIAECTMKELIRGSFVPPETIQQLRQYDRRIFDLNEEIVRKLSKLDAVLQRCNIRLSNYVSNVDSKSYKAVVRAISQGITAPEELVKLIHGRIINHHGIDVITASLKGVVSLAEIDMISQLRDELDMAEAHKEKCQARMLEICEREFPEELKRLQTIPGIKERAATSLIAEIGTDMNKFETANHLASWSGLKPRNDESNKKIKSRSITHGNVYLRKTIIECAWAASRTKDCFFSRFSYHQTQVRKKNKMKVLVAVARKMLIAVWHVLHDNTIYIDFTTDRKTSRTKG

SEQ ID NO: 408600 - protein, 380 aa, unidentified
MNNSTADVRRFVGLDVHAETIAVAVAEKDGEVRSLGVIPNRLPSIRKLLSKLGQPGSWRACYEAGPTGYALYWQLTQLGVDCMVVASTLVPMKAGDRVKTDRRDAQRLAKSFRAGELTAVWVPDAAHEALRDLLRAREAAKRDQLRARHRLSKFLLRHGRRPTPGVNAWTQRYMDWVRREVTFEQFAQRATLEDYLAELDHQAQRIARLDRVIDQAIEEAPAAMRQVVSALQALRGVRKLIAVTIVAEVGQLSRFPSARQLMGYSGAVPCELSSGEHTWRGGITKTGNAHLRRVLVEAAWSQRYAPNMSRELRARQHGLSPAVQEIAGKALHRLSARYRRLSARGKPRQQVVNAIARELLGFIWAIGVEVERNGCSGVAA

SEQ ID NO: 408601 - protein, 433 aa, unidentified
MAYAFSFINISNNIIMAKKAKKVKTAKGAELRIVNPDAAGIDIADGIMQVCVPTDRTKDNNRAFGAYTSDLHAISEWLRECGIKTVAMESTGVYWIPLFCRLQDDGLDVVLTNARDVKNITERKTDESDAEWLMLLHQYGLLKASFQPHNDAKRMRTLTRHRDTLSREASSIVLHMQKAMQQMNIKLTLVLFDITGKSGIRIIEAILAGERDPKKLAELADIQCKTPKEEITKALEGNWEEDLMFVLRQNYDTFKHFCAQLDRCDTELEKLMENYRTEVAETGRPSYSPTKKRRNYHKRKRKRTVGFDVERKAYDMWGVNVFEIPGISHLTALELMSELGHYFTRKSLSTKQFCSWCNIAPNTKISGGKRISSHVPHRRNKVGLIFRSVASSLANAKNQLGNFYRRIRSRVGGKAAVIATPWWQTRRLIIRKK

SEQ ID NO: 408602 - protein, 344 aa, unidentified
MKYSAGLDVSLDETAVCVVDEDGTIIREGKAASEPSALAHWLSDTGFEFQRVGLEAGPLSPWLYEGLRAAGLNAICIETRRMKGATAAMAVKTDRNDARAIAQAMRVGWYTAVHVKTAESQELRLLLTNRKTLLAACLDLENEIRGTLKAFGLKVGVVRASGFEGTVLELLEDRRRLQDMVRPMLLAREALRRQFDALHRLVLKATRAHAPCRRLMTVPGVGPVIALTFATAVDDPGRFKHSRDVGAHFGLTPRKYASGEIDRSGRISKCGDGMVRQALYQASLCILTRTHRWSALKAWGMAIAKRRGLRRALVAVSRKLAVVLHRLWTDQTEFRWVRQEVAAA

SEQ ID NO: 408603 - protein, 345 aa, unidentified
MTQYKRIGIDTSKAVFTLHGIDQTDRPLLRINLRRAQMVPFFAKLPPTEIAMEACGGAHYWARELIKLGHKVRLIPPQYVKPYVKRGKNDRNDAEAICEAGGRPGMHFVPVKSVTQQAQGMVLKVRESLVGQRTLLANTLRGHAAEFGVIAGKGLSKIGPLLNAIEQETAIPSEAKDMASLLGKQIAALDTKVREIEVNLAAVHKANAVSQRLATIPGVGPVTALTLAIEIDHAAFESGRHLAAWAGLTPKEKSTGGKQRMGGISRAGNERLRVLLVAGATSVINAAVKPGSKLMTEWLRALLQRKPRKLAAVALANKMVRVAWVLMARGEVYRRPAAITGAAAA

SEQ ID NO: 408604 - protein, 433 aa, unidentified
MPTTHPYDLVIGLDRSDRKADLHLIDTRTGNVQKQTVATSPEALHDWLVQLRRDHPQARVALCLEQPAANLIVFLETYSWITLYPINPISLQKFREAFVTSRAKDDGKDAQYLAELLLSHPDKLKAWQPDDSQTRQLQQLVLHRRAVVDQRTGLTNRLKALLKQYFPQALDLCGEDLWRPLATAFLLKWPTLQSLKKARKESLKQFYYLQGSRSQTLIEQRLERIDKAVPLTDELALLQSYTLRVQLLCKELQLLLKTLQQFDQQIAKVFQQHTDRPIFEAFPGAGPVLAPRLLASMGSERERFAQPENLQSFSGLAPVTKQSGGKCSIHRRYLCPKFLKQSFHEYAKESILHSRWAAAYYGQQRNKGCGHHTAVRALAYKWQRIIWKCWQTRTIYKEAIYEAALKKNKSPLIGLLDQIELGKSPVKSRAKKS

SEQ ID NO: 408605 - protein, 357 aa, unidentified
MFYVGLDVHARKIAGCVLNADGKRIKEFELPGDVSRLLMELQLLKERCQVCYEASCGYGYLFDRLAKLPNVARIAVAHPGQLRLIFRSKKKHDRADARKLALLLFLDQVPEIHVPAVDVRAWRAAIEFRRRLVDRQTAVKNQLRALLRTHGVAGPHRKALWTKPGRTWLAAQVLPTALARLQREVLLDELAQLRARVKTLERELNRIGRAHPGVALLRTIPGVGPRTAEALVAYIDQPKRFRRLKQVGSYFGLVPCQDQSAGANRLGHITREGPATARKLLTEATWPGIQHSPEIRAYFERVQRQDPERKKIALVATAHWLLRVMLAMLRTGETARFTRRTRKQEQEAQRVAASPAA

SEQ ID NO: 408606 - protein, 309 aa, unidentified
MRQEAVHGTRHDRHRSGQEVFDLVGLNRAGEVVVRRRLSRPQLLRFTANLRVRLIGMEACSGSHFLGRRLREQGHEIRLIPAQYVKPYVKTNKNDYIDAEAIAEAVGRPTMRFVPIKSDERLDMQSLHRVRDRWVARRTSVINQIRGLLLERGITFRKGRRHAEACLPGILEDADNRLSGLLRMLLAQLQGELRQLQSQIDEADALVAKAAREHEPCQRLMAIPGIGPLTATAVVASIGSGAEFRKGRSFAQSPGLNMWLGQLASRAHTNIVAVALASKMARVAWAVLAKSEAYRPPLLASPVEAPACN

SEQ ID NO: 408607 - protein, 388 aa, unidentified
MIEAVIERCAGIDVGKKFVVVCLMVGPLESEPKTELRKFGTIMSELEQLRDWLVRENCTHVVMESTGSYWKPIFNVLESNVKVVLANAFDVRNRRGHKTDPNDSRWLAHLLRHGMIRPSFVPPRTIRELRDLTRRRRQLVAEGTRERNRIQKVLEDANVKLGDVLRDVFGLSGRLILSALLEGKLSAEEMAQLSKRSARKKIPQLTAALERHRLTNHHRFLLQHALRHLDFLEQEVETLNQEIRDRLRTPLFEQSHALLQTIPGIKEESAAAILAEVGPDMTQFPSGSHLASWAGVCPGNHESAGVRKTGQTSRGNNWLRSILTQCAWAASSQKNSSLQNIYFRLSPRCGRKRTIVALGHRLLRIVYQVLSHLQPYSETRGYPLPVTT

SEQ ID NO: 408608 - protein, 412 aa, unidentified
MRRIIGIDIHRTFGEVVFWEDGRLRHGGRVDMTRTALEGLGKTLSATDEVVIEATGNCMAVSRVLSPFVQRVVIANPLQVKAIAHAHVKTDKIDAGTLASLYAAGYLPEIWTPDAATERMRRLVARRYQVVRHRTRIKNEVHSILHAHLIAKCPHADLFNGRGRDWLKRQPVPEDERIAIERHVRELDRLREDLVILDRQIAEGTMDDPAVKRLLTITGVNLTVATGLMAAIGDIARFSSPQKLVSYFGLNPRVHQSGLGAAHHGRISKVGRSHARAMLVEAAWAAAKAPGPLHAFFVRVRAKRGHQVAAVAVARKLAVLCWHMLTKGKDYFWARPSLVAHKTRSLELQAGQPQTKGNKRGPAYAYNVKELRDQEMRVAEQAEKHYERFVDAWRPRRPKEKARGRLNPARLQ

SEQ ID NO: 408609 - protein, 409 aa, unidentified
MQVVHEVCCGLDVHKKSVTACVLWASGRRRQTRAFGTFTRELLELGDWLRACGVTHVAMESTGVYWKPVWNLLEGLFEVLLVNAQHIKAVPGRKTDQKDSEWIADLLQHGLLRASFVPPSPIRELRDLTRYRASLAQEINRIANRIQKVLEDANIKLASVATDTLGASGRAMLEAMVQGEQDSQRLAEMAQGKLRNKIPELQEALQGRVSRHHRFLLRELLDHLYFVESKMQRIEQEVAERLGPFQSEVARLCTIPGVDRLTAWGLLAEIGLSMKQFPDAQHLASWAGLCPGSHESAGKRKSGKIRKGSLWLRRCLCQGAWAVSTKKNNYLSALYRRLAARRGSKRATIAVAHKLLVIAYHILRDGTCYSDLGADYFDRLNPEGLRRRLTKRLEGLGFKVTLEPLAQVA

SEQ ID NO: 408610 - protein, 335 aa, unidentified
MQIYGIDLAKEKFDVSFFDLTSKKVSNKPSHKVVKNNFKSIGRFLETLPSDAVLVAEHTGVYGDTLLKCCMDSNVKIAFVGGYVIHRYRATPDRAKTDVLDCALLREFGERYPDKLKYRKFPEEALYELRQLARHREMLVEQRKQLMTADKSEDCRPIRSLAVKRSMDRIKEMLDTEIAETEKEMLKVINGHDSIHHNYEIVKSVNGVGLVTAVELLVKTDNFTKITTARQYSAYAGTAPYEKSSGKMDKGAHISKIGNRRSKTLLYICAESARLHNKEIKLYYERRTLIDKKPRHYVLNAIANKLLRIIFTLVEKGEYYDANFIRQDPRVVKYN

SEQ ID NO: 408611 - protein, 331 aa, unidentified
MARIRHVVGIDISKKTLDLALILDGEYTESFKIQNNPESIKEFETLIKKIGCKISNTIFCAEETGLYGEFLKQFAQKTKWRICFDSPLRIHRSLGIAKGKNDKADAYRIGDYALKNLKSLRYYTPPRRIIQDLRYYDTAIGRLSKAHVLLDSKRKCNLEFNMPVYSDAYLRSMSNVEGDIKRLEKCIEELIAGDERLAKLKEVVCSVPGIGPKLFRALIITTNEFKDFDCPKKYASYSAVAPFRSESGTSLKRRSRGTAIGNKSMKSLLHISVISSLRNKNSHFYRYYTRRKEQNYKGMKLMNALRNKMIHTIFSCVRNMQQYSSERESSL

SEQ ID NO: 408612 - protein, 339 aa, unidentified
MTVKTVGLDLAKDVFQVHGISATGRKIFNKKIKRAKLLAFFETLPRCVVGMEACGSAHHWGRELRKLGHDVRLMPATYVKPYVKRGKTDAVDAEAICEAVRRPTMRFVEIKSEDQQAVLAIHRTRDLVVRQRTQIVNMIRSILREFGHVLPTGVEAVSKFAREYSTEDQLEMPEIADGILGVMCHQLNGLNVRVEGLSKLIEQHAWLDADARRLMRMPGIGPITASAIVATIGDAKQFRTGRDLAAWLGLTPLNRSSGGKERLGRITKKGDRYIRKLLIIGMTSRALMAKNKPEKADIWTAKMLAEKPFRLATVAMANKSARIIWALLTKREEYRQQVA

SEQ ID NO: 408613 - protein, 409 aa, unidentified
MLWGGGEEIVSIVADVNRWSPPSMQTPNDLSKSLTVLKQDSTLIAVIEMSLSSWLVAGVVPGVQRQPLKKLAVDESALLKLLHRWREEAEKAGHKIERIAVAFEAGRDGFWLARWLRTRGIEAHVIHASSVAISREHRRAKTDRLDTELLKRAFLGWLRGERDHCKMVAIPTMEDEDAKRPNRERESLVAEQTRIVNRMKAALSRLGIRGFNPKMKKAGERLEHLRTPEDEPIPPNTLAELRRDMERRRLVNEQIRQIENARLEHIEHAPNHGPHAMVRLLARVIGVGIETADMLVQEVLSRNMRDRRAVARYAGLTGSPDESGTRRREKGLARSGNARVRRGMIQLAWRFLMFQKDCALARWFRARTENAQGTRKTMIVALARKLLIALWRLVHEGIVPDGAVLRPVQ

SEQ ID NO: 408614 - protein, 421 aa, unidentified
MKFKAQDKQNQLIENITVHHLVVGVDIAQDTHVARAVSFRGIALGTPLAFNSHLEGFEQFGRWIQDLFKTYTLNKVIVGMEPTGHYWLSLARWLASQGIEVVLVNPHLVKKNKENRDNTPSKSDRKDALVIADMVKNGYYSPVRFPSETYEGLRILMANRETVTKRLNSAVNQIHRWVDIVSPELRQVFKILTCTSAIATLRLFPLPKEISRLSTDQVLAGWKQFVKRHAGVKRAEQLIALAKCSVGTTQALHAYKLHLGQLLEEYDLALRQLAQIERELYLILERIPYAKKLLEIRGVNVTGLAGVLGEAGDLSGFAHGNALLRHAGLNLAEASSGKWQGKMVLSKRGRPRLRHFLYLMTMCMVMTNPEIRALHRYNVEEKKLKRMKSIMKLCGKVARMLIGLAKSSEAYDPTRVFPQAA

SEQ ID NO: 408615 - protein, 350 aa, unidentified
MLIIGCDYHPGFQQIAYVDTETGEFQERRLQHPEEAEKFYRALWEPSVKVRVGMEASGHARWFERLLEELSFELWTGDAAKIRAKRVRKKKTDREDARHILELLVENRFPKIWVPTWQNRDLRQLLWHRHRMVQTRTRIMNQLQAVAINEGVRYKKRLWREAGRQQLESLSLAPWASRRREDLLEVLDRINPTIAELTQAIENQAEKCCEARRLMTHPGVGALTAVAFVLIIGEAHRFGCGKQIAAYLGLVPEEDSSGERRRLGHISKQGNSLLRFLLVEAAQATARCDQRWRNQFFHLAQRRGRKIAKVAMARRLAVRLYWMWRREWNYEQLQSFGSHVGQPGNPHGVQ

SEQ ID NO: 408616 - protein, 341 aa, unidentified
MKVTTVGLDLAKQVFSVHGVDEHGKAVLRKRVSRGKLLELFAQLPSSLVGMEACSGAHHWARELERLGHRVGIMAPRFVAPYRKSQKNDGNDAEAICEAVGRPSMRLVPVKSTEQQGLLVLHRVRQGLTAERTGAINQLRGLLAEFGIVLPKGRYQLRAHIGAVLEDAENAIPGLARRAFADLNARIGELDQRILAYDRELEGLARHSEAARRLQQIPGIGPITATALVASVADAKLFKNGRQFAAWLGLVPRQYSTGGQVRLGRITKRGDAYLRTLLIHGTRAVLSSTKDKPDRLSRWAEGVRARRGTRKAAVALAAKNARIAWVLLARGEDYQSRCAAG

SEQ ID NO: 408617 - protein, 419 aa, unidentified
MSNRVAKHLASIQPGTLFDGADLILDDLVVVVLNATGERLDRFRTDNTREGYAYLRQRLQRTVEKHGASGSLIGMEPTNYYWKQVGYDLEQHQLPFRLVNALTVKRHREGDQLDRSKDDWRDAFTIADLLRTGKFTETRLPHGVYAELQTGYTAYQRLRRDRGRQATLLVNTVRQLFPEFEQVFKDLSGVTAQAVISAGLLPHIISTHSENTYLASVRSHFTGQRFRVRQVQQLYGLAKDSYGYREATTALCLMAQHQIETIRLLDLQTDQLHQSLLTLFHTLPEAPYLLSIQGVKSPSALGVVACAGDLRQYHCGGALIKLAGTQPTPNTSGRKTYSPTPFSHQGRSGLRTVVYFITLRLIRQNDALHYHYERLTTRAEHPLPKMQAIGACMNKFLWYAWHVVNRREMYDPHRWRTLK

SEQ ID NO: 408618 - protein, 431 aa, unidentified
MNNPPAADSVPSAFVALIGLDWGHQTHAIALQEPGAAVQTRTLEHSAENFHQWLDQLEQSFGAGPVAVAVEASQGGVVYALLERPWITVYPIHPATSTRQRSAFRPSGAKDDVPDALVLLSLLQHHLDRLRPLQKDDEPTRLLAGLVEARRKAVDQRTLLTNQLQSTLRDYFPQALEWVGQRLAAPMALDFLEKWPRLTDLQASKKANIKSFYHRHNVRRPELIQARLEQILAARMLTHDTTVIEVSVRKVHLIVAQLRVLQEHIGAFEEAIAQTFASHPEKNLFAQLPGAGAALAPRLLVAFGTLRDRFADAAAMQRFFGVAPVTEKSGARRWVHWRWSAPVFERQTLVEWAGQTVMYCPWAKAYYEQQRSKNVRHWAILRSLAFKWLRVLWRCWQKSEIYDEPRYLKELVRRNSPIANQALKYAEQMAG

SEQ ID NO: 408619 - protein, 427 aa, unidentified
MNGTNDSRVERFRQFRKRIRGSDTDLIVGIDIAKSKHHAFFGTASGRTVLKGLIVENSASGFEHLVTMVKFYMDRDGFKEVVFGVEPTSVYHKPLAEFLIEHGYLVVYATNEAIKKNRSLLDGRWDKNDTKDCANVADLIAQGKCHYYDFPDHGLRDIRSLLLFRKRLKKQLHSCRVRIRNNLVAQYFPEMDRLWNQAEAENLAIVRWCLSPQRINDLTFEDFYQMVTTHNRGLRQHRRLQKIWEMAPYSIGCRASTASQFEAKLLVDGVDYLKDQIAQVESTIFTMCRSYEQYEDLLTIPGFGPYVSAVVLAAIGDPHRFDNASQVIKMAGFDLNAHRSGNKSDTAVPVISKKGKADLRYALYQAALIASSLTAHFRGYYHRLLEGRQKEKGIRTKMRVKLATKLLVIAWTLMKKKEPFNPAYVKI

SEQ ID NO: 408620 - protein, 352 aa, unidentified
MPLRYIGIDVHTSSCTIAVMGPSGKRLRHWQVETDRQVLVEAVRSVPSPRHICFEEGTLSDWVFELLEPLAAELQVIQPLRTRGVKSDAHDAWAAADTMRLQPADVTRVFKAPGTFTALRKAVRSHGLIQRDMVRAKNRIHACYRARGVQGLDSSIYDPLQRDKWLKKLPPPQRKMTQCFCVELDGLVVACHQAELWMLEEAQRVPIVGLISTAPGISTIRASQIVATVVSPHRFRTSRQFWAYCGLGIVMRSSSDWAMEEKRWVRTNLTHTRGLNHNHQPLLKNVFKGAAFTISSPMMAAHPLHQSYQRLLAAGTKPNLARLTIARRIAAAVLAMWKNKETYNPTKQTIAA

SEQ ID NO: 408621 - protein, 343 aa, unidentified
MKLTRVGVDLAKQVFQVHGVDRAERPAWCKRLKRSRWIADLERDVEPGCEIGMEACGGAHHWARVLQSKGYRVKLIAPQFVKPYVKTNKTDANDAEAICEAMSRPSMRFVAVKTVAQQDLQAVHRVRSSLIRERTAKANQLRGLVYEYGLIAPREIKSLRRAVPQWLEDATNGLTPRFRALLSGLYGDLRLLDERVRELDREVASITREHEPVRRLMQINGIGPLIASALYALVGDARHYRNGRELAVALGLTPGQHSSGGKEKLLGISKRGDKYVRTLLIHGARSALRTAPGRTDRISRWALALAERSHANVAVTALANKTARIAWAMLRHGTNYEPERMAA

SEQ ID NO: 408622 - protein, 347 aa, unidentified
MSIVGGLDIHRQQITFDYLDTDTGQVSVGQIPAADRCQLRTWLARRFADREDRGLVEFSVEGCTGWRYVAEELAAAGMVAHLAEPAETANLRGRKKRAKTDRADARHQRDLLLAGRLPTCWIPPTEVLEARALLGCYHDLRRDHTAWVQRIHAVLFHQGATVCTDLGTSPGREKLAKVAAEQLSPAGRTQVAAAVLMLEATEAQMEILHRQLLWIARHMQGPKVLVERLYGVGPITGLALTCWLGGAGRFSSARKAVRFAGLDITVYSSAGKRSPGRLSRQGPAVLRWCLYEAGKTHARASAPDYAYYTAVKKKIDGKRAALSEARKLVRQGVHILTELGDDAFAYV

SEQ ID NO: 408623 - protein, 356 aa, unidentified
MSYDVKYIGMDVHKEAIVIAVLNESGKLVMESVIETKASSILQFLHGLRGELHVTWEEGTWAAWLYDLLQPQVQHIVVCNPRRNALLKEGSKSDKVDAGKLANLLRTGMLRPVYHGENGLRTLRELARSYQTIGKDLTRVMNRLKALYRGWGIPCTGTQVYAPRYREEWSNRIPHAGVRRRAELLYQQLDGLQGLRRTLRPELLAESRKHKAAKLLRQIPCIGPIRAARLIALIQTPHRFRSKRQLWTYSGLGIETHDSAQYRYVGGQVQRSKKPQQLRGLNQNHNHEMKEIFKSTATRASCSTGPFHDFYAALLAKGMKPEMARLTLARKIAAITLTLWKKEERFDAEQLKTQAA

SEQ ID NO: 408624 - protein, 353 aa, unidentified
MTLDYLPKEYDIFVGLDVDKKSFAFTVKDHNDMKRSKKIPSNPEQFFNYLQNNYTDKKVICAYEAGPTGFHLYDYLNRKDIPCLVVSPLSIPKAPNEKVKTNRIDSEKLAQDLKSGSLRSIRVPQGEYRQLRCLVKTRENYSQLRKATKQRIKALLLSAHLDSHIKDDYEKWSCNYINELKQLPCGDAVRQSLDMLLSDLQYAREQTLAIHRRLKTFCKNNAAIDQYRRYLQSIPGIGFIVATTILAKIGDPRNLRNPREIGAFTGLVPTEKSTGDAIKRGSITHLGNKTLRFLLIEAAWVAIRKDIKLQQFYHRIKRRHHPKIAAKKAITAVARKLTLIIYRILKEQRMYIA

SEQ ID NO: 408625 - protein, 346 aa, unidentified
MKITTIGIDLAKVCFQIHGVDECGKVAVRKQLKRAEMLSYFANLEPCLIGMEACGSGHHWARKFEGYGHTVKLMAPQFVKPYVKTNKNDMADAEAICEAVSRPNMRFVAMKTVEQQAILSVHRARQGFVKARTAQGNQIRGLLSEFGIVIPQGIRSIMKQVPEILEDGENGLPGTMRNLLERLTENLKEMDRQAKELEAQIQLWHRENAASRKLAEIPGLGPITASAIVATVGDAREFRNDRQLAAWMGLVPRQHSSGGKQNLLGISKRGDTYLRTLLIHGARSVIRFAEKKAEPDSWLRKPMARRNKNVAAVALANKNARIVWALLAKDRMFLPDYTPAAVAAGA

SEQ ID NO: 408626 - protein, 387 aa, unidentified
MPQQNDLSRSLIPFEQATTPVAVIELSQSSWLIAGTIPGIECQPLKKIAPDETDLLRVLHRWRDEATRSGRTVTRIAVGFEAGRDGFWLARWLTGYGIETHVIHSSSVAVSREHKRAKTDRLDTAMLMRVFLGWLRGERGHCGVVAIPTIEEEDAKRPSRERETLVGERTRIINRIKSALARLGVRGFKPQLRKAPQLLEALRTPEDSPIPPNTLDEIRRDLTRLALLREQIKAIEQARLARLEQAPQIGPNAMVRMLASIRGVGTETADMLVQEVLSRTLRDRRAVGRYAGLTGAPDESGSKRREKGLAKSGNARVRRGLIQLAWRFLLFQKDSALAQWFRSRTDGVKGARKTKMIVALARKLLIALWRMITIGEVPHGVVLRQGV

SEQ ID NO: 408627 - protein, 329 aa, unidentified
MNFKEVIGIDVSKNTIDVCAHLSQKSTEFANTNKGVKRFLSWVKRDLKDMSEVLFVYEHTGMYSHILTIILQEIGCHYYVAPALDIKRSMGIVRGKDDRIDAKRIALYGYRLREEIIPTVCCKSVEVLKSLMTLRSKLVKQRAAHKSTLKEQKRIYKSKDFKFIFETQQRTIHYLTKQIKAVEQQMEELINSQMALKVNMELMLSIKGVGRQMATTMLIVTENFTKFDNSRKFASYCGIAPFAYQSGTSIKGRNRVSPLANKKIKSLIHMCAVSAIQHNPEMRMYYQKRIENGKSKMSTLNIIRNKLIARIFAVIHRQTPYVDTLKFVA

SEQ ID NO: 408628 - protein, 425 aa, unidentified
MRFIGLDVHRDFCEVAICEDGTVRSGPRVPTSPETLARFAENLGPGDEVALECTGNALAIARIIEPHVARVVIAHAKSVRAISWAKVKNDRIDARTLATLLASGFLPGVWTPDERTRLLRRLVGRRAQLLKHRTSAKNAIHATLQRNLVGRAPATDVFGRRGRTWLSSVELPRDEQDTVEACLRQIDFLDAEISHLDQVLAREVVDSRDVRRLMTIPGVNVTTAATFLSAIGDIDRFPTPRHLASYLGLTPRVRQSGIAEPRLGRISKEGSARARHVLVEAAWAVLKTPGPMRAFGERVAARRGRNVAAVAVARKLAVLCWHLLSTDTDYAFARPSLTAEKLRRMELVAGAESRRGWRGPGATFASKDQHARERAIVIQAETAYRRLVADRTGRRRGAGAITGARISSALEGQAARQDQAPGPAL

SEQ ID NO: 408629 - protein, 341 aa, unidentified
MEQATTIGLDIAKHVFQVHGADAAGHVLFRKRITRAKVLGFLAAQAPCVVAMEACAGAHYWAREIAKLGHHVRLIAPVYVKPFIKRQKNDAADAEAICEAAQRPSMRFVSVKTEQQQANGIVFRARDLLVRQRTQCVNALRGHLMEYGYVFPKGISHVETLVAVVEDLQSSLPDSVRVILKLLVDTFTALEAQIAALDAEIRQRSKSDPTARRLMTIPGVGPIASTAITALVPAAEGFPAGRHFAAWLGLTPLQKSTGGKQKLGAVSKRGERTIRRLLIIGASAVVRQASRRGAPKGSWLAQMLARKPKMLVTVALANKMARIIWALLVKGGTYRTPTAAA

SEQ ID NO: 408630 - protein, 427 aa, unidentified
MSLLISSAVTALNKEMTMEVLVSRGCGLDVHQATVVACLLTGEPGKLPRKQVKTFSTMTSGLIELRDWLAAADCTAVAMEATGVYWKPVYNILEGHFELIVANARHIKAVPGRKTDVKDAEWIADLLRHGLLQPSYVPPPELRELRLLLRYRVKLVNARSAERNRIIKLLESANIKLSGVISDPFGVSGRLMLNALKVGAATPEEMAELAQKRMRSKLPLLKLALDGRMEAHHRQLLSIQLDRLDRFDRDLKQMDAKLEAKLKPYARQMELLDDIPGIDWVVGATIIAEMGIKMGQWPTVGHLTSWAGLCPGQNESAGKRGKSSIRPGNPYLRSALVEAALAATREKNCYFREKYYRLKARRGHKRAVVAVAHKILVAIYHVLSSDTPYQELGADYLERLEPERLKLNLVRRLERLGFQVKLEPRRA

SEQ ID NO: 408631 - protein, 343 aa, unidentified
MDQYVALDVSLQKTAVCVLNVSGRVLIEADVPSEPAALIAFIQTHAPRAARVGLESGPTSPWLWHSLKAAGLPVVCMDARHAHAALSVRPSKSDRNDARGLAEMVRMGWYREVQVKSLAAHERMALLGVRRRLVDMRVEIDGQIRGILKTFGLVVGSGNKGAFAQRARMLAQDHPVLSALIDKLIEVREVAVAKVAALDKEIRRFVRDDLTLRRFMTVPGVGPVTALAFRSTIDEPNRFKRARDVGPYLGLTPRRYQSGETDRQGGISKCGDRFTRTCLYEAASVLLTKVQRWSPLKAWGTRLARRIGSKKARVAIARKIAVILRCIWTDGTEFWWTKETATA

SEQ ID NO: 408632 - protein, 464 aa, unidentified
MATLRIIGIDLAVTAAHRAIVLDSASNQFVSHVISFHANPAEIEGVLAIARKGAPANTRLIAVLEATGMAWFTVGTYLQRRGVEVYRVNGRQTADQRKVYHRHAKSDRIDARVLPRLYLNAAERITRLFLPEPRIMELQRLCREVTRLSQQISASKNRLLAIDNFAWLGIKDILAPYEAPARWFRRQWYNPWQVYQAGSEALKQAWLQSHADPEQDLSWVEALVAQAQQVMAFYGEPAPIDYPRLQAFLGREQARLEQVEAQKHLLQLKMLRPLYRQLYPQRYLESLPGVGQDSAAVFIAFVGDIRRFPSLNDFLGWSGMIPFSSQSGQGQTRGLHITQASPDLLKRTAFLTANIARLYDPQIAVVYYDQMVNKGKHHLQAVCACATHLLTRVFVVLRENRPLELRDVDGSPISKQRARAICQQHYTVPEQVRRQNNHRVRTQRAEQRLEQRTQRRQLKQRSKG

SEQ ID NO: 408633 - protein, 355 aa, unidentified
MNDAKYIGLDVHQATISVAVLDSAGKLMIEAILETKAETILQFIHGLHGSLHVTFEEGTCAAWLHDLLKPHVTQVLVCDPRKNALIKAGNKSDRIDARKLADLLYLNKLNPVYHGETGIRTLKEVARSYLALTRDTTRVMNRIKALFRSWAIPCAGQRVYAPRDRSEWLAKITETGVRRRAEIYYQQLDALRSLREQVRRDLLAEGRKHSAMKLLRQIPSIGPIRAVLLIALMQTPHRFRTKRQLWAYCGLALKTSTSGEYRIVEGRLKRSKKFLAIRGLNQNHNHDLKNILKGAATRAAAVPGPFQEFHAGLVARGMKPTMARLTLARKIAAITLIVWKKGVGFDAEYLKQQAA

SEQ ID NO: 408634 - protein, 402 aa, unidentified
MADGPTRFFGLDIHKEYFVAVGVNVQRQVVFGPQKVSNYQLAEWAERALTLEDAVALEMSTNTYLFYDTLVLHVRSVIAVHPPSVTLVTNAQVKTDKKAALALAQLHAAGMLTGVWIPPHEVRDLRALIARREKMVRLSTMAKNRLHSTLQRNHLILPEKPFSPEQRTWWESLSLSATEKFLVNSDLDTLEFAQKQVEQVEGCLKQASIQDERIPLLVQLPGVAMLTAIAILAAIGDITRFPNAKKLVGYAGLGTRVHDSGMTHVSGRITKTGRKDLRRAMVNAANHAVEHHVHWKKEFERMEPRLGRSKAIIAIARKLLVAVWHVLSKQVADRYADPRDVANSFFAHAYRVGVKNLPEGQSALAFTREQLDRLGIGKDLQELGWSSARHKLPPSKMLLKKE

SEQ ID NO: 408635 - protein, 346 aa, unidentified
MVTIGGDLHKRTHTLVTTDAVGRELAGCTVKATAEGHAKALRWARRWDQRTWALEDCRQVSRRLEADLLRAGERVVRVAPKLTAGSRRSARTRGKSDPIDALAVARAALREPNLPVAQLEGTARDLRLLVDHREDLVAERTRYQNRLRWHLHELEPGQEPGPRSLDRKCVLDALEVQLAASPTLVGRIARELVARCRELNARIKELEREIAGLTKVAAPTLLQLRGCGALSAAKIVGETAGISRFRSRAAFAMHTGTAPIPVWSGNRERHRLNRSGNRQLNAALHRIAVTQLRDGGRGREYYERRVAAGDTKRAAIRVLRRRLSDEVFRRLRIDESGSTTHPSLAA

SEQ ID NO: 408636 - protein, 342 aa, unidentified
MNRVYVGLDLGSSNFHQVAISENGAVTRNCVFATSEANLVKACSGMRGEIHVHLEAGELAPWASEIIRPLVKRVVCSHPQTNAWIARDRDKSDRIDAYKLASLLRLNEFKEVHYPHEQQRRDFKAVVQHYDELTTQQARLKTKIKARLRMQGVITRGEQVFSVHGRKAVLAEVKSQVVRTAIQQLYALLDQSLVSQAEARLLMLRAAQALPEIRILRTAPGMGPIGACRFSAYVHAPQRFNSTRKLWKYCRLSVSHRSSNGKPLRRPRIDRSGCGRLKDVSRKAFEAALRRKDNNGFQRAYYRALEQTHDPMHARLTVQRKIVSTLRAMWINQTPYGDRLMH

SEQ ID NO: 408637 - protein, 365 aa, unidentified
MTDGTTRFIGLDVHKETVTAAVAETSGPPALVGTVRNDSEEIRRLIHRLAQGAQLATAYEAGPTGYQLHRQLVGLGVRSHVVAPTLTPTRPGDRVKTDKRDALALTRLLRSGDLTPVWVPDLEHEALRDLVRACEDAKVDLLRARHRLSKFLLRHGISAPGTFRPNTTRYDRWLNALRFEPLAQQLAFKDYVGALRAAEDRRRRLHAALQQCAEESPLLPLMAAIQCLRGLAFHSAATIVAEVGDFTRFPTARQFMGYTGLTPSEHSSGPTRRRGQITRAGNAHLRHILVQAAHNARHRPNTDALRQRLLDAPPDVVQLAHAAQRRLYRRYWHLQRRIGAPKAVTAVARELAGFVWAVGQRMASA

SEQ ID NO: 408638 - protein, 354 aa, unidentified
MDKTKYIGMDVHKEAISIAVLNSSGKLVMECVIETKVSTILQFFQGLSGSLHVTLEEGTWAPWLYDPLTPHVTELAVCNPRKNALLKQGSESDRIDARKLAELLCNRALSVVYHGENGLRLLQELSRSYLTIRKDLGRVMNRLKALYRSWAIPCAGTQVYAPRHRAAWLTKISEAGVRRRAELYYQLLDAPRPLHRQARKELLAEGRKHSATKLLSQIPGIGPLRAAQLVALLQTPHRFRSKRQLWKYSGLALEIHDSAQYRYAQGQLQRSKKPQPLRGLNTNHNHDLKNIFKGAAMRASTCQGPLHDFYQVLLARGMRTTMARLTLARKIAAITLILGKKGVGFDAPYLKQAA

SEQ ID NO: 408639 - protein, 408 aa, unidentified
MNPLFVGIDVSSKNNVAYLMKPDGSKHSSFSVQNNLGGAKLLSERIVSALGSMQLERVVIGLEATSIYGDNLVYALREDGGLGRFRRKIHVLNPKQVKKFKEAYPDLPKNDWVDAFVIADHLRFGRINREVYMDDYRYKALQTLTRARFDVIQNLTREKQRFANYLFLKCSGMAQDKDIQNTSATTIALMEHFETVDDLANADLEELTAFITETGRGKFADPDATAKAVRAAAKGSYRLPKTVNDTVNQAMAVSIASMRALKGQVKVLDKAIEQQFEIIPNTLTSIPGIGKVYSAGIIAEIGDIHRFDSQASVAKYAGLVWNRSQSGDFEAEHSRMIKSGNRYLRYYLLEAANSVRRCDSEFRRYYDLKFKEVNKYQHKRALALTARKLVRLVFRLLKDNRLYIPPEG

SEQ ID NO: 408640 - protein, 347 aa, unidentified
MSITMIGLDTAKSVFQVHGVNETGRVAIRRKLRRSELIPFFEKQEACTVVMEACGAAHHWARVLSSLGHEVKLIAPEAVRPFVKKGKKNDPADAAALCEAASRPDRMFVPVKTIEQQGILALHSARSLLVKQQTMLVNAMRGLATEFGLTIPQGIGKLDELFVLVDADKAIPEKARQVFTELFGQCSVLAASISALEAEIVAHARHDETARRLATIPGVGPITASLIAATVADIGLFKSARHFAAWLGLVPRQYSTGGKTRLGRITKTGNRDIRRLLVLGATSMVYRAPQWNSVVGMWTRGVLERRPVRLVTVALANKMARITWALMTRKEVSRAKGRVVAATEGAA

SEQ ID NO: 408641 - protein, 344 aa, unidentified
MVGVDTHKETHVAAAVDWQGTPVGEECFPATRQGHRRLESWARSLGDVLRVGAECSGPYGSGLTRHLAGNGFAVPEAAFPDKTVRRKRGKDDFIDAEMAAEAAFTGARTVAPKSRDGMVEALRMLQKTGSTAVAARKVALQMIRADVISAPEELRGQLRGMTRMRPIRHLVATRPGSTDFRSPPGAAKIALKRLAKRYVDLDDEVSELDDMIAATLAGAAPPLVQLKCVGAQSAARLMATVGDNPERLGSEASFAMLCGVAPVPVSSGMTYRHRLNRGGDRQASSAIHIIAIGRLRTDERTKEYVAKKMAEGHTKMEAIRCLKRYIAREVYYTIKKQRGLVNCS

SEQ ID NO: 408642 - protein, 355 aa, unidentified
MTSLQEFAEVVIGVDTHVATHSAAAVDARTGGVLAELTVPATPDGYQALVDFAGEHAGLRAWAIEGTGGHGAGLARLLAGRGELVVELDRPERTQRRHGAKSDPLDAIRAAREALSRAKLGTPRSAGDRQALSVLLAARRSAVDAGTDAQRQLFSLVIAAPECLRGRFRGHRLPAMLRLAAQIRISPRWDTETATTARVLHDLAQRAHALGAEAARHQKDILAIVRRWRPDLLAQFGVGPITAATILCAWYHPGRVRSEAAFAMLGGAAPIPADSGSGRTPVRFRLNRYGDRQLNRTLHTIALARLRYDPATQAYAQRRTAEGKTPREIKRCLKRYIARDLYRLLENPPRPLDNP

SEQ ID NO: 408643 - protein, 388 aa, unidentified
MIYAGIDVAKDKHDCLIVDSNGKVLSEVFTITNNKQGFDELFVNLRTHSKDFSELKVGLEATGHYSDNLLEFLIANDLPTTVINPLHTNLFRKGLSLRKTKTDKVDAHSIVTMLRTECLKPYSQSSYHVRELKSLTRYRFSLVQDCSRLKSSFARLCVILFPELEKLVPSLHMASVYALLTELPSARAISECHLTRLINILSEASKGRYSKDKAIEIRNAAKVSIGSYSKVKSLELQQTIQLIQMMEKQIAQAEARINPIVDSLHSPIMTIPGISYRMAAIIIAETGNFTDFDKAEKVLAFAGLEPSVYQSGQLTSTHAKMVKRGSKYLRFALFNAAKYVCHWDEGFHQYLAKKRAEGKPYNIAVSHAAKKLTRVIFHLVKTNQSFSR

SEQ ID NO: 408644 - protein, 370 aa, unidentified
MNTTHAVAGIDPHKHTATVAIVDVLGVLVTSLSVRVTKSGIDALTGLLKATEMTIDRIGVEGSGGLGRPVMLALAAAGYDVREVQANRTAQRRKRRRRTKTDIEDAEAIARETLAEADLPPAGKDNAPPPAADQLAAVRDWRESLVLQRVRLLNQAEAVLVSLPLRLREQLPASSRVSASLDRLARLEDIRADLGAADRVKLDRLAQTRADVASIGARIKELDSQVPALLKTLGCTLTVIHGVGVVTAMTLMTEIGDPHRFATEGRFARWCGVAPVALSSGEGHGPPRHHRLDLGGNRRVNSMLHIVHITQARCHPSAQAYMARRETERKTKRAARRAHKRQLANVIIRHMWNDADRLAQASPSSSTAAA

SEQ ID NO: 408645 - protein, 352 aa, unidentified
MDKIIRVGVDLAKNIMQVHAVDAAGRVVVRKAIARQRFVSWFANLEPCLVAMEACGAAHYWARKLRALGHDVRLIPPQFVAPYRKGGAHVKNDALDAEATCEAASRPHMRFVPVKSPAQQSVLVLHRMRTGFVEERTALVNRLRGLLAEFGVFLPQGIRQLRRNFLDRVEDGDNELSGAARQALMRGWAQWQALDDEITWFDKQIAEHATHDPQAQRCMDVCGVGRLTASAAVATVVDARQFKNGRQMAAWLGIVPKQKSSGGKQRLGRITKQGDTYLRTLLFQGARSAVLTAHQRKDRLSRWIVQLQARVGFYKTLVAVANKHARILWAVLAKGERFDPSYAPARRMAAGA

SEQ ID NO: 408646 - protein, 428 aa, unidentified
MNCNTQNAKIASITEKTLIVGIDVGSETHYVRAFDWRNYEYTKKPLEFSNTEAGFMTFKAWVEDIAEKHGKTAVIPGMEPTGHYWFALGKFLQDNGMKPVHVNPHHVKKSKEQDDNNPNKNDRKDPKTIAALVNEGRFSYPYIPTGIYAEIRSLSNLRFQTQEELTRIKNRIARWFAIYFPEYKDVYRDLKAVSGRMILKVAPLPEEIKKLGVEGVNQIWRDAKLRGAGMKRAKILVSAAEHSVGSKEAPEAARMELKNLLNDMDVYASRMEELLRCIEEKLKEIPYIDKLMEIKGIGLVTVSGFIAEVGDIGRFDNPKQVQKLAGYAIVANDSGKHNGESRISYRGRKRLRYVLYEAAISLIGKNAEFKAIHECYRTRKENPLRKMQSVVAVACKALRVFYAILTKGVDYDAEKLIGDIRRPQIQAA

SEQ ID NO: 408647 - protein, 405 aa, unidentified
MNTDVFCGLDWATRTHAVCLIDTAGGVLERFEIEHDRDGLAELLRRLARYGARVRIAIERPSGLIVDALVEAGHQVFPIHPNAVKASRPRYRSHGAKSDASDAYLLADLLRTDGHRWAPLLPQSDSIRALRALVRARDDLVATRLSLANQLRSTLDAFWPGAASIFAAVDSPIGLAFLRRYPSPTSAVRLSEAGLRRFCRAQHYSGRRTPAELLARLRAAAQGHTSELTTAAMAEVVNSLVAVLEPLVEQLGTLTRRIEHFVESLPDGQIIMSFPRAGRVCAAQILAELGDVRERYATLDQLASEAGVVPLTYQSGKSRCVAFRWACNHRLRRAITTLADNSRHANLWARAIYTAARARGCDHPHAVRILARAWLRVIWRAWMDHKPYDPELHLGALKVTSSLGG

SEQ ID NO: 408648 - protein, 319 aa, unidentified
MSKNVLGIDVSKKKLDLCLILDGRVFAKKFDNTATGFKLLQGWLSSLRVDQVHACLEATGAYGESVAEFLHELGHRVSVVNPFRVKGFASSDLKRNKTDTADARTIAEFCLAKEPEQWHPLPPEVKQLQALTRRIEALDRMLVVETNRLQVASDATRPSIDRMISSLTEEIDNVQRLIKDHIDKHPDLRQQSDLLQTIPGIGEKTARLLLGEIEFRQFNSARALAAYAGVTPRKFQSGSSLNRTRLSKIGSGRIRKALYFPAITAVKYNDVVKQFARRLSENGKTPMQVIGAAMRKLLHIAYGVIKNNRPFTSNPAQFI

SEQ ID NO: 408649 - protein, 387 aa, unidentified
MGQDITWVGIDDDKKHLTVAVLRGTSAGDTPVSRIPNEDGALRRWVRRLERESSGGEIRMCYEAGPNGFALMRRLEGMGRVVVEVVAPSLTPRRTGRRVKTDPIDATHLAHLYRAGELRVIAVPDGDSESSRDLVRTYHRVGVEQTRKRHHILKFLVQRGRIYRDGVHWTGKHRKWLREQKFESWKDTMAFEEMQSGLSELEDRRSRLTLGLEKLGQEESRAAAVSVLRCFRGIDTTQAVTLVTELFDVDRFEHPRALMSYLGLTPSVSQSADREVRGRITKSGNRYARWTLGQVAKQSRYAPGVGPRVKRRREGQPAWAIEIANRAQRRLHRRYHALLVRGMPRAKVTTAVARELVAFVWEALSTVHRKSRENLSTRAGEPGLAEV

SEQ ID NO: 408650 - protein, 342 aa, unidentified
MSIYVGMDVHRKRSQIAIVDAAGEEQRNRNVPNDPTELVPILGGLPPGTPVAFEAAYGWGWLVELLEELELEPHLVHPSRCKAIASARLKNDKVDARTLAQLLRADLLPEAWIAPQATRDLRALLRHRASLVRLSTMAKNRIHAVLADRGIRQQTGLWTGIGRVWLAELELPPTQRAIVEDYLALLDGLAEPITRLDHQIATLARADPRVQALMVLPGIGRLTAMTLVAEIGDIGRFPTARKLCAWAGLTPAVRNSDRKVRHGHITKQGSPWVRWILQEAAQTAKKRPPFADTYAQLARRRGRSIATVAIARRLLARCFHILNQLEAAPTGEGQPGCARETA

SEQ ID NO: 408651 - protein, 409 aa, unidentified
MKDDTHTVAAPTGAIDWATDAHTGAVVDHTGDLVADYTFSHTAAGLAAMLERFAEHGVERVAIERPDGPVVEALLDGGFTVFVIHPRQMKNLRGRYGNAGNKDDALDAFVLADVLRTDHRRLRPLERDTDPTRALRALTRARKDLVDARVALSNQLLANLQLVLPGAVGLFARLDSPISIAWLRRFTTQTQTDWLSPKRFDAWLKANSYCGGKTGTQLHAHLQAAPRGLDGVEADARAAITLTLVDAIEQLNRKIGGLERQIREALELHPDAHIFTSLPKGGMVRAATLLAEIGDARGRFPTDDALAALAGCAPSTRRSGKLHAVTFRYACDKKLRDAIINFADDSRHASPWAANVYARARARGCRHPHAVRILARAWLRVIWRCWQDGTAYDPTKHGGHQRTLMAAAA

SEQ ID NO: 408652 - protein, 343 aa, unidentified
MDHFAGLDVSVKETSLCIVDDAGRIVREVKVASEPEALLAVLTNPACHFKRIGLEAGPLSQWLFKALAEAGLPVICVETRHMRAALKAQINKTDRNDARGIAQMMRAGLYRPVHVKTLRSQKLRMLLTHRKLLQSKAIAIENDLRATLRNFGLKVGVVGTVKFEARIKGLVDNTPDLVVLVEPLLIVRRVLREQIGILHRRLLAIVRNDAVCRRLMTVPGVGPVVALTYRATVDVPSRFRNSKAVGAVFGLTPSKHQSGESNRTGGISRCGDEMMRMMLYEAAHIMLVRSAKWSWLKAWAMKIARRRGLKKAIVALARRLAVIMHRIWVDGTEFRWTREVAAA

SEQ ID NO: 408653 - protein, 341 aa, unidentified
MEQATTIGLDIAKHVFQVHGADAAGHVLFRKRITRAKVLGFLAAQAPCVVAMEACAGAHYWAREIAKLGHHVRLIAPVYVKPFIKRQKNDAADAEAICEAAQRPSMRFVSVKTEQQQANGIVFRARDLLVRQRTQCVNALRGHLMEYGYVFPKGISHVETLVAVIEDLQSSLPDSVRVILKLLVDTFTALEAQITALDAEIRQRSKSDPTARRLMTIPGVGPIASTAITALVPAAEGFPAGRDFAAWLGLTPLQKSTGGKQKLGAVSKRGERTIRRLLIIGASAVVRQASRRGAPKGSWLAQMLARKPKMLVTVALANKMARIIWALLVKGGTYRTPAAAA

SEQ ID NO: 408654 - protein, 345 aa, unidentified
MNTIKVTQSQGKGKSLCLDDFDHFLALDWSMKVMAIGHMGRRRKEPETFERPSDLKELKQYLATLKGRKVITIEETTTAQWLYVELIDHVDRIILCDPYHNRLLSNGPKTDKIDAGKLCVLLRAGLLKEVFHSLSGLYELRRLVSAYEDLVKAGVRVLNQKASMEQGHFESGKHAPFILEHIEKRIELYQRSKERYERKFSELSKRNKLVKNLMDVSGIGIIGAVKIVAIVVDARRFARAGNYLSYCGLIKHEKISGGRSYGRRGPRFNHTLKAVYKVAAMSVISGNNNPIREYYEYLLAKGIAEHNARHAVARYIARLTYGMLKTGKRYQRYQWRNQAAGPQAA

SEQ ID NO: 408655 - protein, 445 aa, unidentified
MSQASRLSRGDKRRNDRLTRFRGIVRRDHAVVAIDLASNKQVVAVVDHDSRIVARRTFHCAPPQLATAIEWSRTAAAAAGFAGIVIACEPTGHRWKTVRDLTAAVGVDMVCVQPIAVARARETEDFTHDKSDDKDALLTTQLHLYLPEHADEQWSRLRHLGVRRSQQLTRRSAAQQQARDLLESSWPEALDCAGQPFKSVTWLAAMAVIGADPTPLTAQSSRDQAVAWLREQVRAELPRWGGRRVTTRILVALVDAAFATETTITGEAGALERARYALDDFGHARTACEQVEHLMIEVLTGLGLRALAESIPGVSAVSVAAILAETGDLTRFDSARAVVKHAGLCPRGNSSGNYRGTTRISGRGRPLLRVAAWRAAFAALTHNEVYAARYRHLTSREANQLNPNQARVAIAAALLRQLFVVITTATPWNPDIAAGRTRPAERTAA

SEQ ID NO: 408656 - protein, 364 aa, unidentified
MAYSITPTAVFMLTEGLDLGDQFCVSCRIDGQGQIVGRDRIKTTAEALHAHFAAGPCRRVVLEASTHSLWIGRLIEGLGHQLIVANPRHVHLIANNQCKNDHNDAELLARLGRADPALLSPVTPRSERQQNDLSLIRLRDSLIRARTKLINSQRSIAKSAGAKLPACSADSFHRKMTAVAVPAVVWAVLEPGIKAVETLSQQIKVCDRALDTICRERYPQALRLQQIPGVGPVVALAFVLTVGDPARFSRSREVAPFFGLVPRQQQSGEHDPQLSITKCGNTYMRCLLVNAAQRILQKATPDCDLKRHGLQIYQAQGQTRIAKRKAVVAVARKLAVVMHRVWVSGEAYRLFREVVAAEATATAM

SEQ ID NO: 408657 - protein, 355 aa, unidentified
MDSVKYIGMDVHKEAISIAVLNSSGKLVMECVIETKAATILQFFEGLRGSLHVTFEEGTWAAWLYDLLKPHVTKIVVCNPRRNALLKEGSKSDRIDARKLAELLRSNLLRPVYHGEHGVRTLKELARSYLTISKDLARVMSRLKAIYRSWGIPCTGKQVYALRYHSEWLGKIQEAGVRRRAEFYYQQLDALRPLRQQVRRELLIEAGKHSAWKLLRGIPSIGPIRAALIIAMLQTPHRFRTKRQLWSYIGFGIETHSSAEHRYVDGELQRSKKQISIRGLNRNHNHDLKNLFKSAATVAAAKPGPFQEFYDALVAKGIKPEMARLTLARKIAAITLTIWKKGVRFDASYLKPQTA

SEQ ID NO: 408658 - protein, 342 aa, unidentified
MDRLSPVTRICKVGFTMENELHFIGIDVAKAKLDVDILRPDGRHRCKKFDNTLSGHEALVRWLRGHDVNRAHVCMESTSTYMEDAAAHLSDAGYTVSIINPALSKAFAQSEGLRSKTDKVDARMLAHFCREKRPSAWEAPHPTERALKALVLRHQALTEMQTQEKNRRETAPEVQLASIDILLGCLSAELARIEKQIKDLTDNDPDMKRRRKLLNSIPGIGEKTAAVLLAYTGLRLKFGTARQFAAYAGLTPVQHESGSSVMRASRMSKAGPVQLRKALYMPALSALYHTAWGKAFRKRLEESGKGAKVIIGAMMRKLAQVAYGVLKSGKAFDASQHELLIA

SEQ ID NO: 408659 - protein, 346 aa, unidentified
MIGIDIGKNSFHVVGHDQRGAIVLRQKWSRGQVETRLANLSPCLIGMEACVGAHHLSRKLQLLGHNARLMPAKYVRPYSKGQKNDFRDAEAIAEAVQRPTMKFVATNTTDQLDLQALHRVRERLVSQRTGVINQIRAFLLERGIAVRQGLRFLRVELPGILATRTDVLSPRMSRVIEELAGDWRRLDARIEGLSGEIETLAHHDQHCERLMTVPGIGPIISSAMVAAIGTGDVFPKGRDFGAWLGLVPKQVSTGDRTIFGSTSKRGNRYLRALFVQAAWVVLVKLGPKQWERYGLKSWIAAAKRRLHYNVLAIALANKLARIAWAVLNKGRAFTCVKTDAMASRPT

SEQ ID NO: 408660 - protein, 474 aa, unidentified
MNNYFMGLDVSKGYVDITIVDENGNIAGTLNRLFDDYTGHKLLLDYLDNLKKQKNTVIYAALEHTGGYEVHWLKLLQENAGLKDTTFIINGYRIKHFQKAINYKNKTDAVSSHVIAQFIRTNFRELNIAKQSNYYHYKKHYYYLFELEKEQTQYINRLRSLLYESYPEFLTVMPNKFSPTILNLLIKYPSSKSFLAAKDSQIFKIKYLRKKMIADLQDICKKSILVKNKDDEAIEKQNIQNIASKVLGLEHEINEGFERLNHIVDQHQLELLCTIPGISKTSAIGLLLIIDDIKNFDNPKKLAAYFGVHPVQFDSGDVQKSKMSKQGNPFSRAILFNSCYQMFRSESPFHEHIKHQALLLQDNNMKAIGKCMHLMCRIVWALLTYNTPFDMEKFKKDRSGKQKSKNHQKIDFNVDNINSSDDIKAPISKKTKRIIDTLIEKREPQVSEETKTGSSRQFPTNTNIKNDENCQDFT

SEQ ID NO: 408661 - protein, 466 aa, unidentified
MKRNRWAKGHKPRPHISLLERINPDVAGIDCGSAEHFVAVPVGRDPDPVQSFQTFTADLHRLADWLAACGVRSVAMEATGVYWIPLYEILEFRGFEVILTNARHVKNVAGRKSDVVDCEWLRELHSVGLLRGSFRPAEAITALRGYVRHRDTLVEAMSSTIQRMQKALVQMNVQLPQVITDITGTTGLAILHDIAEGRTDPKQLVLHRDPRCHASPEQFVAALTGNYRPEHVFALKQNLALFEHYQGMLAECDTAIERHLLTLAARTQAPATPLPPRRTRVQPRGKEPRFDIRSDLYRLTGTDLSQVDGIGPYQALRLISEIGTDMGRWPSEQHFTAWLTLAPQNKVSGGRLLSSRTPASANRAAAIFRMVAMSLARTQTALGAFYRRLAARIGKAKAITATARKVAILVYRMLKGEIQYQDPGPDAYDARQRQRLVRKLHKRAQALGFALVAVNTAELLPAGGVS

SEQ ID NO: 408662 - protein, 418 aa, unidentified
MNMNAVGIDVSKRKSTVAVLRPGGQVVVKPFDVPHLSADFQSLIKMIRGLEGETRVVLECTGRYYEPVAHELAQAGLFVSSVNPQIIRCFQGQDNPLRRVKTDKADSVKIARYTLDSWDKLKQYTLMDELRSQLKIMNRQFDFYMKHKTAMKNNLISLIDQTYPGANTYFDSPARDDGSQKWVDFLDTYWHVDCVRKMSLEAFTDHYQKWCGRKKYNFSKSKAEEIYGKAKGLIPVLPKDNFTKRVIKQAVEQVNSVSQTVEQLRCLMNETASKLPEYPVVMAMKGIGPSLGPQLMAEIGDVTRFTHKGAITAFAGVDPGVNDSGDYSQKSVHASKHGSPVLRKTLFQVMDILIKTKPDDPVYLFMDKKRAQGKPYYVYMTAGANKFLRVYYGRVKEYLASQQTRQQGAAAAGSQPCV

SEQ ID NO: 408663 - protein, 382 aa, unidentified
MQPIDTVNPTILLAIELSASTWLVAVRVPRLEKPLLHRIDGGDTAALLALISSLQARAARGLDATIGVVCCFEAGRDGFWLHRLLTAHGVVCHVLEPTSILVNRRARRAKTDRLDAEGMLRVLAAYLRGDHQACSMVRVPTPEEEDAKRTHREREKLVQERLRIENRIEALLFTQGIRKRPSLRSWERDLAVLRTGDGREIPRHLRAELDRLRRRLVMTLELIREVEAERDQAAKTKPQDQACRKIAALSRIRGIGENFAAVLTREVFYRSFDNRRQIASYVGITPMPYQSGGMDRDRRISRAGNPRARTTMIQLAWLWLRYQPGSELAEWFRERVGTLAGRTRRIAIVAMARKLLIALWRYAETGVIPAGAEIRAETTVAA

SEQ ID NO: 408664 - protein, 307 aa, unidentified
MNTYVGIDIAKAELVAHALPQELQRSFANTATGLNELVCWLHEIDSTRVVFEATGGYERLLLKALFQAGLAAERLSANRPRELARALGLKAKTDAIDARVLAVAAQLLPATPSAPLPGKTVLLREWLQARSALVSERDAHRRRIKQLESAPVKAVLTGCIDRLQKQIQQIEKTIAKLLAEAPDGLAKAPGLGPILRATLAARLPELGTVNRRQIAALAGLAPYNRDSGLWRGQRHIVGGRADVRRVLYMATWSAIRCDPDIGSCYRRLVDAGKPRKAAAVACMRKYLTRLNAMKRDNTPWQSVPMAA

SEQ ID NO: 408665 - protein, 313 aa, unidentified
MTFYLGIDVSSKSLDVALSTADTPMQCWQYANTPAGVKKLLKALTAHAVQHVVLEATGGYEMRVLEALATQYPTTRIASHRGAAFARSLGRFAKTDRTDAMVLAHMAQAIPPQPYVPLDPTQRHLRGLVKGRDQLVKQRDDNRRRIKQADAAPVRVALERVNALLEKEIRALEARLREAADACDAGRACQLSQVPGVGKVTVATLLAFLPELGRCTNRQVSALVGVAPYTQQSGRRDGPRQIMAGRPFVRRVLYMAALAAIRSKASPLRAHYLALRARGKAAKVAIVACMRKLLITLNAMVRNSTPWQGIVAA

SEQ ID NO: 408666 - protein, 431 aa, unidentified
MRPDAAGIDLGATVHYVAVPPDRDDKPVRWFGTQTGDLHALADWLIACKITTVAMEATGVYWVPLFQILEDRGLEVCLVNARHVKNVPGRKTDVQDCQWLQYLHSVGLLHASFRPPAAVCAVRALVRHRDSLVRAGSEHLLRVQKSLDQMNVQLHRAVTDITGETGQAILCAIINGERKPEVLAQHRDHRCKKTVAEIAAALRGDWRPEHLFTLRQSFEAWQYHQKLIAECETELRKQMDGLADQTKQAAPPKARPDKRCDEKTRQHLFEKFGVDLTAVDAINLQTAYMFLSEVGPSVDKFESPEHFASWLGLCPDNRKTGGRQIGVATRAVANRLSTALRIAAQSLHRVDSPLGEWFRRMKAKLGAPAATTAAAHKLARVLYAMIKFHKPYDPARIGNPALRRTRKENALRRAAKELGFDLRPIQAVAVS

SEQ ID NO: 408667 - protein, 338 aa, unidentified
MKLYCGIDLHSNNVFIVVLDESDRSVLRCRLPNDLALILLRLEPHRADLAGIVVESTFNWYWLVDGLMEAGHRVHLANPGAMQQYNGLKHADDGSDARWLAHMLRIGLLPEGYIYPREQRGLRDLLRRRMRLAQQRTATVLSLQNVIWRSTGRRLSRRALGEIDAGELLAQFGDANVSLAVASTRAVLDCLDVEVGRLEKEVIRQLRPDPLFGLLKSVSGVGNILAPTIRLETGDIGRFADAGHYVSYCRCVGSRHLSNDKTKGQGNTKNGNPYLSWAWLEAATFAIRYHPAVRRFYERKKARTHRIVGLKTVAHKLARAGYYVMRDRVPFEIELAFG

SEQ ID NO: 408668 - protein, 366 aa, unidentified
MENHSIVWVGMDTDAKRNQVAVYRGWEMEPAAEWEAGMDGRGIGKLIDRLKRETDEVRCVYEAGPCGYPLARKLRKAGIRCDVIAPSLTPRKPGDRVKTNRRDARNLARLYRAGELTVIEVPNESQEAVRDLTRAREDVREDLTRRQHRLSRFLQRHGYSYGDGDRWTMKHWAWIRKIAFEDANLQMVLEESIRAVEQSQEQLQSYGARVEEVARQPEYAKKVSRYEVLRGIKTITAMTIVAESTDLRRYATAPQFMGSTGLVPSEHSTGEHERRGKITKTGNAHLRRVLVEAAWHYRHRSIAGRSVKKRRQGQPASVVMIAERADQRLCRKFHKLVDRYNKKPAIAAVAVARELAGFIWAIGQQE

SEQ ID NO: 408669 - protein, 315 aa, unidentified
MNLGIDVSKNTLDCCLISDGIFFERQFKNNRAGFEQLKAWLKKSGATSALHCCCEATGKYYEAVADYLAESYVMSVENPRKIKGYGNAKLQRSKTDRLDARLIAQYCRDLKPRAWQKQSEAQTKLKELNQYRQRLKAQKAAEQTKLHTAPDYLAPLIEDTIRHLQNQIKAVQEKISQFHQDHPDYKANRNRLKTITGVGDNAADTLLTVLAEQDRFENQRQFTAYLGLDPKQFKSGTSVKGRERISKVGSSRLRTALYMPAMYAYRSRTFAPFVSRLQANGKRPKQIIVALMRKLAVIAYNLIKTGKDFELERYK

SEQ ID NO: 408670 - protein, 428 aa, unidentified
MDFTQNKRLKQITGNTLIIGVDIAKHKHVARAIDDRGVDLAKRFMFHNSFEGFTNLIGWIEALSHKLNRTHVIIGMEPTGHYWLNLAYYLKNRGLQTVVVNPMKVNRSKELDDDSPTKNDTKDAKVIAQVVRDGRFHEPTLPEDVYAELHEGMKLHDIIQEDLSSIKAQMHNLLDRYFPEFQQVFKSWTGKAAIQLLKQGYFPSDIIQATEQELLNEINKATKRAVGLKRVQELKEAAEQSVGLQAGLNMAKEELNYLVEQYEQLTKRLKVHQEQLEELIQYIPGAVEMTAIKGVSAMTVVGFFAEIGDLSNYSDPCQIIKLAGLNLTMNQSGLHKGRTSISKRGRKRLRSILFQVARPLSCHNEDFKQLHDYYRNRPNNPLTGKQSFVALSCKLIKIFFVLGTRQCAFSESRMLADIPMLDNNNQVA

SEQ ID NO: 408671 - protein, 412 aa, unidentified
MNKRKEDLIYVGIDLHKESHTAVILDCWNTKLGEITFANTPAEFPKLIRKVNKFCTENKEPVYGLENAYGYGRGLAVWLIGKGLMVKDVNTSLAHRQAKCRAMYKKSDSDDAEAIALATINMLYTLPDACPNDAYWSLSQMVNRRDNIMTQRIRLKNQLHEQVCMAYPSYKQFFEDISRKTALFFWEHYPSEQYLRGKTPESLAEEMKDVGHNSFSVRRCKIVLDAVKRDHTKAKEYQNYRDVITKGLVKDLQHYDEQLKAVDKELEKLYHDLGCTLATMPGMNITTAVKIMSEIGDVNRFPNPAKLAQFAGIAPINLSSAGKGKDKASKQGNRRLQATLYFLAIQMIQVSTKGKPRNPIFRDYYDRKLAEGKNAKLVLVSIARRLVNIIYGMLKNKTEYRLPSLETGEGAE

SEQ ID NO: 408672 - protein, 330 aa, unidentified
MNYSHFVGLDVGKKSFDACLVSLDKELSHHTFPNTPGGIEELLHRVKQRGVEVETALFCAENMGSYVIDLCLSSYQFHFPLALECPLTIKRSIGLQRGKNDRIDARRIARYACLHYRKHRLYELPDKDLVRLRNWMVIRDNLVKQKVSSRKLLELPRETSGLADLVTAMTFLEKQLSLLKEKISYVEQEMEKIISSNIALLTNYQLLTSIKGIGPINAIVLLCVTGNFHRFSDPRKFACYCGVAPFEHSSGTSIRGKTKTSNLANREVKVYLTRAAITAISWDPQIKAYYKRKTGEGKHKASVINAVRAKIIARCFAVIKRKTPFVTLRA

SEQ ID NO: 408673 - protein, 344 aa, unidentified
MNSTTIAVDVAKSVFEVAVSEYPGQVRERHRLSRGRFSRFLAEHPPATVVMEACGSAHHWAREAQSRGHRVILVPPHAARPYVLRNKTDRTDAKGLLEAFRNDDLRPVPVKSETQQALAALHRLRSTWVATRTARLNTVRGILREFGVVIPTGAHHVVPHVRALLEDADAGVPRLLRVPLSEAIREIGELEERILAIERQLARTAEPALLIGRLRTIPGIGILTATALVAAVGDVQRFPSGRHFASYLGLTPREHSTGQRRHLGAISKQGDTYLRMLFIHGARSVLHHAKSKTAPATDRLRTWALQVERLRGHNKAAVALANKLARIAWAVWRSGNDFTAAAAV

SEQ ID NO: 408674 - protein, 437 aa, unidentified
MGKEDEETTMSARGTVQPEPEFVAFVGIDWADQKHVWSLQKADSRQREAGELEHRPEAVEAWVGELCRRFGYGPIAVAVEQVKGALVYMLRKYECLHLYPVPSTMSASMREALYPSGAKDDPRDADLLLELLLLHRDKLRRLTPDNEATRRVQNLVEERRKLVEEKTAQLNRLTGYLKVYFPQILEWFAKLDSKLVCDFLERWPSLEELQKVPSAELKKFFRHRRGRHGELTEWRMQGISQAMSAIRDRAVIEAKRTVVQVIAQLLRTLLEGIATLDRKIAEAAEAHPDFFIFQSLPGAGTALAPRLLAALGSQRDRYSSAQEVQQYSGIAPVMERSGKKKWVHFRWACSKFLRQSFHEWAGHSIAQSVWARAYYQRQRERGKEHHAAVRALAFKWIRIVFRCWQDRVAYDETRYLTALAKRGSHLTSAFAAAAVGI

SEQ ID NO: 408675 - protein, 357 aa, unidentified
MHTTQQLSFANIHFFIGLDAHLRNWKITIRLDGLELKTFSMNPAPLELLAYLHHHYPDGIYHIVYEAGFCGFWALRIFRQHNIDCIIVNPADVPTSNKEKVNKSDPIDSRKLSREHENKSLHGIYIPDTFHEELRMLMRLRYRIIQSQTRTKNRIKGLLSCQGLQIPLQFSGSARWSHNFILWLQQLHLNTPAGNFTLQNLILQLKEVREHNKNVLKQLRKEAQHPDIAPIMKALQGVPGVAFITAMYLYSEIMDMKRFANDNHLVSFVGLVPSTQSSDETVHSNGISFRQNSFLRTMMIEAAWTAVREDPAMTLKFKELTKRMKSQDAIIRIAKKLVKRVRHVWLNQEEYVYALVA

SEQ ID NO: 408676 - protein, 344 aa, unidentified
MGYFAGLDVSLEETAICIVDDAGQIVREARVCSEPEVLVAFFGACGMKMERIGLEACSLTAWLHAGLTEAGLPAICIEARQAKAAMSAMPNKTDRNDARGIAQIMRTGWYRAVHVKSPRCRSWRALLTARRMVLNKRRDVENGIRALLREVGLKVGTPSRKDFPARVRDLAADDPVLANLAESLLSVIEAMTREVERLTKRVLDEVKLEPTCRHLMTVPGVGPLTALAFRATIDQPNRFRRSRDVGAHLGLTPRRYQSGETDVQGGISRCGDELARTALYEAAHSLLIRSSKWSTLRAWGMAVAKRRGMARARVAVARKLAVILHRMWADGSEFRWGKQAAAAA

SEQ ID NO: 408677 - protein, 350 aa, unidentified
MENNCFIGIDVSKNKLDICVLQGKEVLQEDVIDNNPSAIHRFLVDMAEKRGLDLCSCLVCAEHTGNYTYPLTLACRDLGCRLWLENPAQLKYSSGVHRGKNDRVDARRIALYASRFNDKAMLYHELTPELERVKQLRQERSLYRSDLSKYKGQLSDQKNFMESTVYKAKANRLKHVIKELEKMIDVVEREITGIIDSCDVLKRQMKIITSVEGIGRETALCFIVETAAFTRFTDSRKFACHAGIAPFQYTSGSSVRSRNRVSRRANKQVKTLLHMAALSITRKKKSELKVYYKRKVEEGKNKMTVINAIRAKLVARVFAVIRKNDIYSINFILIISYMFIFSFSSPSFFL

SEQ ID NO: 408678 - protein, 352 aa, unidentified
MTVTIVETRPNTRAITGGVDTHADVHVAAALDPVGGLLGVQEFPACPAGYAQLLGWLRGFGAVCLVGIEGTGSYGAGLARHIAAAGVRVVEVDRADRQDRRRQGKSDPLDAVSAARAAQSGRAAGAPKGRDGAVEAIRALMVAKRTARAGRTQTINQARALVLTGPDDIRIRFTQHTPADLVAELASLRPRPGAVVCYATRIALRELGRRAQFLGRQLERLDELIVPLVTARAPGLLALYGVGADTAAMLLIAAGDHPERLRSEAAWAHLCATAPIPASSGKVTRHRLNPGGDRQANHALWRIVITRMSSHPPTRAYVERRAKEGLSKKEIIRCLKRYVAREVYPHLRAPAG

SEQ ID NO: 408679 - protein, 459 aa, unidentified
MRRLFYIDVAGSSLRKTSFVNSKSNPMNTPHPFDLVIGLDRSDRQADLYRIDPRSGKTGQQTINTSPEALHAWLAQLRQENPQGRVAVCLEQPAASLILFLETYAWITLYAINPITLQKFREAFVTSRAKDDGKDAQYLAELLLTHHAKLKPWQPDDAQTRQLQQLVEHRRAVVDERTGLSNRLKALLKQYFPQALELCGEDLWRPLAIAFLLKWPTLQSLQKAKPTSVKAFYYLHGSRSQQLIEQRLERIGKAVALTAELAFLQSHTLRVQLIARELLLLHKTLAAFDQQIAEVFKQHPDHEIFRNLPGAGPVLAPRLLTSLGSERDRFASAQNLQNFSGIAPVTKQSGGKCHVHRRYGCPKFLKQSFHEYAKESILHSRWAAAHYWQQRQKGCGHHTAVRSLAYKWQRIIWKCWQSRTIYQEAIYEAALKKSGSPLVALLDQIEVGKSPVKTIAKKS

SEQ ID NO: 408680 - protein, 321 aa, unidentified
MTETDVQPSFVGIDVAKTHVDVHVHPTGEAFQVSRDTAGLDQLLLRLRLFTPSLVVLEATGGFERMVVATLASAALPVVVINPRQIRDFARATGRLAKTDRLDAQIIARFAAAIRPELRALPNEATRAFAELAARRRQLVDMISAESMRMNQVAHKKVRERLEVHLAWLNKELIQADADLDDAVRASPLWRERETLLLTVTGVGNVLTRTMIAEVPELGSLDRRQIAALIGLAPVAHDSGSHRGIRSIRGGRARVRAVLYMAAWVASRFNPVIKAFYERLRAAGKPRKVALVACMRKLLTILNAMVRTNTPWQNAETAPSI

SEQ ID NO: 408681 - protein, 386 aa, unidentified
MSNLLKYSLGIDASKDNMDVCLMFVDQTLDAKIKAQHKFANTLSGFKELHRWCKKHCKELVPLYVLMEATGVYYEKLAIYLVDQQYSVSVVLPNKARKYMQALGLKSKNDKIDAKGLALMSSQQKFDVWQPLSKFYYQLRQLTRHHQNLQESKTSLANQHHALQHSAYVTKEVTRQLRKTITLFEKQIEQIKIAIVEHISSDQTVQRKVNHICRIKGVDVLTVATVIAETNGFTLFNNIAQLVSFAGYDVIESQSGNHSGKTRISKKGNSRIRRILHMPAFNVVRHQQAPFTNLYERVYDGTKIKMKAYVAVQKKLLVLIYTLWKKDEAFIPGFKNTSGNDEPSALFPLDPLSESPKEIVPPNSSTTQDGHRYNESPEALFPLLQT

SEQ ID NO: 408682 - protein, 351 aa, unidentified
MELEHTACSKLFIGIDIHKRSWKIHCATDLSGGKTFSMSPDPRQLLDYVSRHYDGYQVTTAYEAGCCGYHAHRSFESYGWKSLVVNPADIYRTGKARHTKTDRIDAQLIARELKDGRLDSIHVPDLQREQLRSLFRRRNDLVKDYRRIKSLIKSQLLYFGVIVPEQYDNSHWSHSYRNWLDSLEFEYSPARATLDSRMRMFRFIDQEVRDVSTQLRRFCKVYYKRDYNLLRSIPGIGGIVACGILCELGDLRRFRNLKHLSGYVGLAPGIYQSGDSLRTTGMTPRAHRLIRSYFVEASWQAIRTDPVMQSYYRKHQGKNVKSIIVKVARKLLSRTLAVIKTETPYVIGVVQ

SEQ ID NO: 408683 - protein, 443 aa, unidentified
MKKRIYRRMPVNDFQPDSISLADLGGKLVFAIDIAKVDMVAAIAAADRRVLRILSWKAPEQNRAVLDMLCHFRGQGVSVETVMEPSGTYGDVLRLQLERDGFPVFMVSGKRTFDGRELFDGVPSLHDAKAATIIAKLHADGLSTRRRDEGPDRRQLRAALAIMDLYQERYLQLVHRLESWLARHWPELPKLIELTSSSLMALLARVGGPADVAAAPDKATKVLLGISHRLLADDTVAAVIASAKASVGVPLVGLERDALMAIADDAYRAHRAFTTAKTQVDALAATTPAAALAPAVGHTTAAAVFAEVGDAKSYSCARAFLKAMGLNLKEKSSGTMQGQLKITKRGPSRVRQYLWLAVFRWIQNDPIANAWYQRKKKRDGNRASRAAVGLMRKLAKALFHVGRGATFDSSKLFDVRRLQLSEGRPSVAAQSASRKSVVCLEAP

SEQ ID NO: 408684 - protein, 358 aa, unidentified
MTQSSVNHLSIGIDLGDRYSHMYVLDRATREVVEEGRIRTTRSAFEQRFAEMPPARVAIEVGTHSPWVSRLLTAAGHEVKIANAYKLRLIYENDSKSDRVDAEYLARLAAADPKLLHPLEHRKEEHQATRAVLIARDRLVACRTKLINSIRGTVKAFGERLPSSDTSVFYKKVADHVPEALRPAVGPLLETLAYIEQRIRAYDKEIERLGAQAYPQTRALRQVKGVGPITSLNYVVTISNPQNFKKSRDVGSYLGLRPRRRSSGRGDPELRISKAGDGMLRRHLVQSAQYMLGPHGVDCDLKRWGLKLAARGGKTAKKKAIVAVARKLAVLLHRLWITGQPYEPLRNANKAAAKVATV

SEQ ID NO: 408685 - protein, 320 aa, unidentified
MSATSVVVGIDVAKAYVDVAVLGGEFVAQRFENEAEGHSALAGALQPLDVALVVMEATGGYEAALACALQATGLPVAVVNPKQARDFAKAMGRLAKTDRIDADMLAELAAVLVRRDDLARYLRPLPDAQQQTLAAVVTRRRQLLTMLGSERQRLQLAIPLVRPSIEAMIQAIRAQLDDVEAQMVSHVREHFAELDTLLRSARGIGPIASATLLATLPELGRLTRRQIAALVGVAPIANDSGTTRGRRRVQGGRFETRRVLYMATLTAAKHNPAICAFYQRLVAAGKLPKVALVACMRKLLTTLNAMVRTNKPWDSSPHRA

SEQ ID NO: 408686 - protein, 429 aa, unidentified
MNYTQNEKIEQVTDETLVVGVDIGSQTHYARAFDNRGRELTRKVFVFHNDIEGFNSFNFWTETLKIENKKTKVLVGCEPTGHYWFALAKYLKDHEKKLVMVNPFSVKKIKELDDNSPKKTDAKDPKTIAKLVIDGRYSEPYVPEGIYAEIRDLVYSRDRIMKQHNISANRIQRWLAIHFPEYLGLYKRFDAVCGLMILEKAPLPQDIIALGVDGVKQIWKDAKKRGRGVSKDRAETLVEAAHNSIGLEGGIGARSEFFMLLEEHRLWASQLEATNKVLEDAIRKVSHVEKLLAIKGVGVVTIAGFIAEVGDIRRFKSPKQIQKYAGLELVESSSGKHKGKTRISKRGRRKLRRILYQVMVPLLARNHEFREIYDYYVTRVKNPLKRRQAMMAVSCKLIRVFYAVLTKGMDYDRFKMMTDIHRNSELIAA

SEQ ID NO: 408687 - protein, 351 aa, unidentified
MNKVSTLAANGNGENIPTVIGIDLAKNVFALHAINRYGKPVLVKPQVRRDQLLDVLAQLPPCVIGMEACSGAHHWAREMIALGHTPKLMEPKFVIPYRIQGKRGKNDANDAAAICEAVTRPNIRFVPIKTVDAQSILTLHRVRQGFVEERTATINRIRGLMSEFGIVLPQRAEVIRKQAQLAAEKMPSWAASAVYDLLAHLVTLDMRVAEYDEHLKRMANRDERCKRLMALTGIAHITATALVASIGNGHDFKNGRQLAAWLGLVPGQYSSGGKVKLGHITKAGDRYLRTLLILGARAMLANAVRKNDRISRWAVALQARAGYGKALVAIAAKNARIAWALLAKGEAFEPA

SEQ ID NO: 408688 - protein, 350 aa, unidentified
MLIIGCDYHPGFQQIAFVDTETGECGERRLTNCAEAEQFYRQLQERSLRVRVGMEASGHARWFERLLSELQFELWIGDAAEIRTKRVRKQKTDRQDAQLLLRLMVEDRFPRIWVADTENRDLRQLLWHRHRLVQMRTRVMNQLHVVALNEGLRRKKALWRPEGRNQLQSLKLAPWASRRRQDLLDLLDQLTPKIQELTRALEAEVEKRPVTRRLMTHPGVGPLTALAFELVIGTAERFDCGKQIASYVGLVPTEESSGDRRRLGHISKQGNTLLRFLLVEAAQVTVRSSPPWRSKFFHLALRRGRKIAKVAMARKLAVHLYWMWRQGWDYGQLEKLGSHAGEPGNPHGVQ

SEQ ID NO: 408689 - protein, 387 aa, unidentified
MFMDSLTPRGNSGLEPNLGSGNQLSSIDEAQRGLCNHGGTAMEHYVGLDVSLKLTAICIVDRTGKIVREGVVTSDPETIGAFIKSHAPHVARVGLEAGATSTWLWTELNKMGLPVICIDARHAKAVLKMQINKSDRNDAVGIARIMQCGWYKEVRVKDLDSHATKALLVSRALLVKIKRDIENQIRGLLKNLGLVIGRAKMNVFATRAAELAEARPELAAAVEPLLKAREAVGRQIADLDRKVMRLARNDAQVRRFMTAPGVGPITALCFLATIDDPTRFKRSRSVGAYVGLTTRRFASGEVDWTGRISKCGDAMLRSYLYEAANVLLTRVAKWSTLKAWGIRIAKRSGLRKAKVAVARKLAVILHRMWIEGAEFKWSSKEAANQPA

SEQ ID NO: 408690 - protein, 438 aa, unidentified
MRAKCNDDLSTVNFSTIGLDVHKNRLVACAVHVQHDAKGREVHEKEYFESTGTYSGRQRLTEWCSSQNADLILMESTGIFWKAPFRDLEKADLHPVLINPRIFNRGSDKRKTDKSDATWLANLARLGLYRASFIPAEPYRSLRLVQSQIKSLVAERQRLKNRLVKVLDDSGFRFTVAFADIGGASSQSLIAGILEDAPREELALMIDPLCKKSIEEILDAVSGELSQINKDIVQSILRLIETHTKEIETLEQTVIRELKKCEKVKQNIRLMTTIPGVSQKSAQLLMSMIGPDFVENFSSPHAFARWLGVCPGNNESAGQIKSGRTPHGQRLIKKVLTECAQAACHTKGSHLAVLFGGWKHKGFCKAVMAVAHKLALLIHWVVVNQKPYIDKEFDYTGVFKQDGQRRPRWIRALRRYGLMTLADVEKEKAARGWIIAKA

SEQ ID NO: 408691 - protein, 339 aa, unidentified
MNKVSTVGLDIAKKVFQVHGVDAAGVVKVRRSLRRSQVVTWFAKLAPCLIGLEACATSHYWGRELRKLGHEVRLIPPAYAKAYVRRNKNDAADAAAICEAVSRPGMRFVAIKTEAQQAIGGVHKVRALLLKQRIMLINHLRGLMAEFGLVVATGPQHVGELLAILADPEEGGVAEPLRGALLGMTEVLRGLERRIEAIDRQVVAWGRSNTTYRHLITIPGYGPILASAVAALVIDPTTFRSGRDFSASLGLVPRQEGTGGKVKLGPISKRGNGYLRRLLVNGAMSVLGSKRARQDPWIAKLLASKPRKLAAVAVANKLARIGWAIMMRQEDFRTQPAAA

SEQ ID NO: 408692 - protein, 336 aa, unidentified
MNDATWFLGIDVAKRKLDIALLVTDKIKSKVFDNNTSGHAALTRWLIERGAIQSHTHICLEATGPYSEALAIALVDAGWCVSVVNPARIKGFAQGELARNKTDRADASLLARFCAAMRPGFWTPPSSEWRELRGWVDRLQALKDMHQQESNRLEAHLASGQAALVEAVQTHLDWLTKHIEQLERDIDDHIDRHPELKRDAELLHSIPGIGNTTIAKVLAYAGDVRRFASAKALAAFVGVTPRQRLSGTCVKGRSMMSRTGHADLRRALYMPGLVARRHNPLLKVFGDRLSAAGLAPKAVVGAVMRKLAHLIYGVIKSGQPFDPKFSTARLDFQDGI

SEQ ID NO: 408693 - protein, 314 aa, unidentified
MIISPHCVGIDVSKRMLDIFDDAIGKAERIANTSQAITERVAGWRCGNVFVVFEATGVYDRELAETLRQAGIRFARINPARARDFARADGQLAKTDAIDARMLAVFARKMIPAAEPAPEPARTTLASLAKRRDQLVHIRAQEKNRRSEATDHTMIEGIQRHLDFLNSEIKAIEASIKNLIKAEADISEQARLMRSAPGIGPVACVQLLAKMPELGCLGSKQVAALAGLAPFNVDSGSYRGKRAIGGGRKRVRDALYMAALNAVRRDRTMKAFYQKLRTVGKPAKLAIIAVARKLLTTLNAMLRDRKTYVLPQPT

SEQ ID NO: 408694 - protein, 401 aa, unidentified
MAAQRDTAWVGIDIGKTHHWACVVDAEGKALLSVKVANDETEIEALLAKTGSLAMQLIWAVDIIGAPSALLLALLARAGQSVRYASGRVVAAMSAAYAGEGKTDAKDAYVIAETARLRRDLSVIDTGTDLVRKLAVLTGHREDLIADRVRMINRLRDLMTSVFPSLERAFDYSSHKGALVLLTSYATPDRIRRVGQTRLTGWLRNRNVRGAADVAARATAAAKAQTVVLPGQDMTASIVTELATGILALDDRLKVLDAQIQMTFDEHPHARIIQSMPGFGPFLGASLLVGANDLRAFPSAGHLAAAAGLVPVPNDSGRRTGNLHRPLRYSRRLRHVFYLSAQTSMMRAGPNRDYYLKKRAQGATHSQAVIALARRRIDVLWALLRENRTWTAAPPALAQAA

SEQ ID NO: 408695 - protein, 310 aa, unidentified
MGNDITVFVGLDVHKESIAIAVAHAGREAPRFEGTVRPSLAELLKALRRLGDPATTLLAYEAGCAGYALARRLAEHGWRCQVIAPSKVPRKPGERIKTDRRDALSLASYLRAGELTAVHVPDAVDEAMRDLSRAREDAVHARQKARQHIKAMLLRHGHRYEGKTAWGPAHERYLAGIAFEHPAQTIAWAEYRAAAADAHARVERLEQALREQAADWRFGPVVAALRCFKGIEFVAAVTLVAELGDLHRFAHPKQLMAYLGLVPSEHSSGPSRSQGSITKTGNGHVRRVLVESAKAYRNAARMGVELTRRI

SEQ ID NO: 408696 - protein, 310 aa, unidentified
MTIAHRLIGIDISKAHLDIHDDVTGKSERIANASAAIAAALARWPRAGLRVIFEATGSYDRVLRSALEAANVVYVRVNPARARDFARATSALAKTDAIDARLLAAMGRALALTPSQATDPLRERLTGLQRRRDQLVATRADDKKRLATAEDDEVRASIMAHIAWIDAEIARLQDVIDRLVAGSAELATLRKRLQTAPGVGPVTALTLIALMPELGQRSGKTIAALAGLAPFNNDSGALRGQRHIKGGRGRVRRALYMAALAVIRKVPRLATHYRNVVARSGHAKVGIIAVARKLLVALNAMLKKGEPFRV

SEQ ID NO: 408697 - protein, 371 aa, unidentified
MAQSSKTLYVGLDVHKESIAVAYAPEDRGAEVVSLGPIGTRQCDIDKLIRRLESKGATQVFVYEAGPCGYGLYRYLTGKGFACHVVAPSLIPRKAGDRVKTDRRDAMTLARLMRSGDLSAIYVPGIEDEALRDLSRGRDDAMQDLKRSKRRLKSFLLRQDIRYEGRATWNPAHLRWLSEVVCPTPPQQIVFQEYLRAVSEQHERRQRMEHELHEAVQGWRLYPMVQAIQALRGVELTGAVILMTELGDITRFENPRQLMSYLGLTPSEYSSGERRRQGGITKAGNSHARRALVEGAWAYRYPAKVSRHLQLRLEKLPTEVQAISWKAQVRLCRRYRQLTARGKHVNQVVIAIAREMAAFAWAIARLVPLTA

SEQ ID NO: 408698 - protein, 407 aa, unidentified
MIFVGVDWAEAHHDVFVQDVDGKRVAGGRLPEGVGGIARFHEMVGAHAEEPDEVVIGIETDRGLFVGALVAAGYQVFAVNPMSTSRYRDRHSTSGAKSDPGDAKVLADMVRTDRHNHRPVAGDSELAEAIKVLARAHQTMIWSRTRQTNFLRSTLREFYPAALVAFDDLTSGDALELLQIAPTPTLGAGLSRSKIAAALRRGGRQRRVDQRAEEIQQALRAPQLQGSVLVATAMGSSVSAMVAVIATMNAQVAELAQELNAHFEQHPDAEVVRSLPGLGTILSARVLGEFGDEPNRYATAKSRKNYAGTSPITRASGTKRIVLARYVRNLRLADAIYLWAFASLSGSPGARAFYDYRRAVGDTHHAALRHLGNRLVGILHGCLIHQTSYDERTAWGHRTELELSGAA

SEQ ID NO: 408699 - protein, 358 aa, unidentified
MTTTTTSMTHSALQRRVIVGVDTHKEIHVAVAIDELGALIGTGSFTADRAGYTALISWATSLGAEVTFGVEGTGSYGAGLASAIRRSGIGVLEVLRTDRRDRRLRGKSDALDAENAARSVLAGSVHAVPKSADGIVEMIRVTKVAKDNAVKARTSAMLSLKQLLVNADDELRQSFNGLPKMTLIRRAAALRPGPIDNVTAATKQAIRAIAVRWLALDEEIKGHDLLLTRLTTSIAPDMVAGFGIGPDVAAELLIVLGDNPARIHSEAAFARLCGTNPIPASSGKTTRYRLNRGGHRQANSALYRTVVVRMQYHEPTKAYVERRTEEGKTKPEIIRCLKRLLAREIWARTRDFRAQSGT

SEQ ID NO: 408700 - protein, 373 aa, unidentified
MSNVRFIGLDVHAEKIAVAVAEPDGEVRSLGVIPNQPESIRRLIKKLGPTDQLRVCYEAGPTGYVVYWQLTALGVKCEVVAPTLVPVKAGDRVKTDRRDALKLARSYRARDLTAVWVPDAAHEALRDLVRAREAAKKDQLRARYRLGKFLLRRGQRPPTAMKAWTQKHLKWVKTVHFDHAAQEATLLDYLHEVEHMADRIERLEHAIDDAVKTAPEQMRAVIEALQALRGIALISAATIVTEVGELSRFPKPRQLMGYSGAVASENTTGERTRRGSITKTGNAHLRRVVIEAAWAYRYRPAVGAALRKRQTDLSPEVKAIAWKAQHRLHGRYCWLAAKGKLKQEVVTAVGRELLGFIWAIGVHVEATRRQAAA

SEQ ID NO: 408701 - protein, 374 aa, unidentified
MENTITYVAMDTHKKQHKIALHYPCQEEIVEFTINNTARDIKKMVKKITKQAPGEVEFCYEAGVCGFTLKRRIEQFDCRCSVIAPSLVPRKPGERVKTDRRDAKKLLMMFKAGLLTEVHAPNEHQEAARELTRLRETARENLKRIRHQLLKFLTRHGYVYSNGRHWTQKHIVWLRTVEFTEPMLTNVFENYFNEMIYCIGRLEALDKEVELLANSQEYKEIVGLLRCFHGIDTLTAITILTEIFEFGRFESPRHLMSYLGLTPSEDSSGDKQKKGSITKAGNKRIRRLLNETSWHYRHRYVPSIVLKKRRKGQPQWAIEIADAAGRRLSKRHRYLVNNGKIPTKANIAVARELAGFIWFVVTQYHARKNTKDAA

SEQ ID NO: 408702 - protein, 327 aa, unidentified
MTQLKRVVGIDVNRDQLDVAVSPGEQTTQFANTPAGVSQLLARLADLGPVSEVACEATGGLERLLVEALHAAGHVVRRLNPARVRNFAEALGRAKNDRLDCRTIAQFAGAIDGVAALPDRMRSELSELVGLRALYQEQATAVGNNARTVRNAAARSSAARQLRVLRCQVSALGKAIDQLIAAHREPAEQRALMLTMPAIGPVASAAILAWLPELGRSKDAALAALVGVAPFDDDSGARHGRRHIRGGRLGLRNVLYMAALVASRYNPVLRAYYERLRARGKPAKVALIAVLHKMLRMLNAMLRNGQPWDANHKPSQVAAGTPAPAPA

SEQ ID NO: 408703 - protein, 412 aa, unidentified
MDVFCGIDWAEDHHDVALVDRDGGLLARLRISDDAGGLAALLELLATHGDSAEDPVPVAIETPRGLLTACLRATGRQVYAVNPMATARYRDRHAVSGGKSDHGDAVVLASILRTDRHAHRPLPADTELAQAIAVLARAQQDAVWDRITAHNKLRSHLREYYPGFLAAFATAKGGIMRPEARVILAAAPDPGAAAKLTAARLRALLKKAGRSRGIDAEADRLREAFRVPQMRQLPLVEQAMSLQTLALLRQLDAACASADDLEQAAVESFNQHPDAGIITSFPGLGALTGARVLAETGDDRSRFHDAKGLKAYAGAAPITRASGKTRSVTCRRVKNNRLAAAGYIWAFAALSASPGARAHYDRHKDAGDRHATAQRNLFGRFLSCLHHCLATGQHYDENTAFPSPPAKLPNAA

SEQ ID NO: 408704 - protein, 427 aa, unidentified
MPYRIAGIDVHKKMLAVVVTDVEIDGQYHFERQKVGTSPADLRMLAGWLVEREVEEVVMESTAQYWRPVWEALEQHWRPQRRACADAARMSGTLHLAKAQSNRGPGGRKKDFPDAERLVKRLVAQELTLSFVPDAEQRLWRTVMRRKYQITRNRVQLHNRLEALLEEAHIKLSSLVSDLLGISARRMLQALADGETDPAALAALATPRLRATPEQLCDAFQACPTLHPVYRRLLKLTLEELRVIEDHLGQLDQQMADLLAEHHDAVRRLAEVPGLGVDSAQQIIAEVGATAATFPSPKHLASWMGACPGNEESAGVNYSHRCPKGNRQMRRVLNQAANAAVKARGTIFAVVYRRLVPRLGHAQAIGAITHRLCRLIWKILHERVHYEERGPAVSVEAKKVRARKMIRELRSLGYRVELLPAPSSNPA

SEQ ID NO: 408705 - protein, 408 aa, unidentified
MNPLYVGIDVSSKSNVVYFMLPDGSKHCNFSVANSHTGSSQLVKRILSAMTSCSLDTVLIGLEATSVYGDNLVYFLREDATLAPFNRKIHVLNPKQVSKFKEAYNDLPKNDLIDSFVIADCLRFGRINKEVYIGDYRYKALQNLTRARYFAVSNLIKEKQRFMNILFKKYSTMTQEKVFSDTFSTTALAVYDEFESAEALADMDLHELTAFIMEKGKNRFPNPNAVAKAIQKAARSSYRLPKTVNDSVNQVLSISITSIKALEAQIKEFDKAIATQMELLPNVLISIPGIGPVFSAGIMAEIGDINRFHNQAQLAKYAGLAWKQHQSGDFEAQTTRLINSGNRFLKYYLCEAAFSLVRCDKEYSDFYHLKYKEVNRYQHKRALALTARKFVRLVFRLLKDNRLYTSAE

SEQ ID NO: 408706 - protein, 312 aa, unidentified
MTITTVGIDLAKNVFAVHCIDQNGKAVLVKPKVSRAALSELIAGLPPCVIGMEACSGAHYWARLFRQYGHDVRLMAPKFVSPYRMAGKTGKNDAADAIAICEAVQRPHMRFVPVKDESQQAMQCLHRTRQGFIQERTATYNRLRGLISEFGVIAPQSTDALRHVVSDQKETLPVQVRLCIDDLLTHVTNIEEKIAEYDRVLSRVAKTDHRSQQLMELKGVGPTTASALVASIGNAHDFKNGRQLAAWLGLTPSQYSSGGGTVAKLAMRQPFVLFKGLTFQKLCLPGAFRPGDHHNKMLRPGLCVVHASPQYL

SEQ ID NO: 408707 - protein, 339 aa, unidentified
MGLYCGVDLHSNNGVYAVLDETDRQVFKKRLPNDLPRVLEALAPFKTDLKGVAVESTFNWYWLVDGLQENGYPVRLANPAAMEQYDGLKDANDDTDAVFLAHMLRLGILPEGYIYPKEDRPVRDLLRRRTLLVQTRTSFELSLRSLVTRHTGSNPGWRELCRHEPSYFRHLLGGNQILVFTVEQQMGLIRFLTEKIQLFEKQVLERAQLKPEYKLLLTMPGVGMILALTIMLETGDVGRFPGVANYTSYCRAVKAKRLSNGKCKGDNNGKCGNAYLSWAFVEAVHHAIGVCQPARRFYQRKSAKCNTALATKALASKWSKAAYYVMKRQEPFDLKRVFG

SEQ ID NO: 408708 - protein, 385 aa, unidentified
MAPPARPETVIGLDVGKSSHWACVVTREGELLASKPVLNRENAIDGLYAQYPGALVVVDQVRNIGSLALSRARLAGMPRAYLPGLAAHGASRLFAGDAKTDERDAMVIAKTALGIPDALLPVGDPGPTIAAARALAAQRNFLTCENTRNKNRLRSILLESCPAFEALVDLSDGPQLRLMASLGGAWSVADAGPRRAAALTRGAARGKIEALVRSTTSSTRPDASVVAAEDRAVKLLARRISENSAEIEAITAEISALLEGDDTYRCLLTVPGIGPKTASELAISIDIEDFPSHDRLASYCGLAPRNRQSGTSISSVTASRQGNKRLKNLLIFSCNCLTRTEGRWGDYYTRCRERGMSHGKALKALARKRLKVIYAVMRDRVPYAA

SEQ ID NO: 408709 - protein, 414 aa, unidentified
MVCPGPMAWKWSVLMAVMIGIDPHKGSHTAVAVGAAEEPLGKIRVRACPAQAEQLVGWAQAWPERTWAVEGAPGLGRLLAQQLIAAGERVLDVQPKLAARVRLLHTGNTGKSDPNDALSVAIAALRSTTRREVIADDHATVLKVWAKRHRDLSRARNQIACRLHAVLCELIPGGVPDEITAGHAAKIVGQIRPAGPVAEARCELAAELLADIRHLDAQRREVKKKLATAVKASGTSLTEVFGVGPVIAATVIGDVVTVARFPTRDHFAAYNGTAPVEVSSGEKKIYRLSLRGNRRLNHAIHMAAITQIRHKHSDGRAYYERKLAAGKTHKEALRCLKRRISDAIYARLRADASKGRPGGQPGNHSVSRAASSHPAHRLFGQATPGPQASLRSAAALTPAIPPSEPPAKKTRRAT

SEQ ID NO: 408710 - protein, 373 aa, unidentified
MPRYSTAFGMDVHLRSTTVCALDAETGEAVARRFRGNPWGEVAEWMSGFPGPSLAAYESGYLGFAPQRELSALGVDCVVAAVSKVPRSAADLSSKNDRNDAARMAKAILSHDVTPVWVPSPEIEGLRDLAAAHDAATARPAAAKQRLLAFLARRGYVYGGTTPAGNPRKYWTYGFLRWLDGIRPADDGGIRALAALRNEVEAADETREAVLAEYRAAVAAGPLSAEVEALQSIKGCGFVLAAAFASEVGDFSRFRSGRQVTAYFGLAPKQRSSADSVRLGGISGAGNALVRRLAVEGSWRYAQAGHQPKLMPKGSGVPLEIRMHGRKGSERLLRRREEMLERGMPQAKANAATAAELVRWLWALGMMCREAGE

SEQ ID NO: 408711 - protein, 407 aa, unidentified
MQGSVITLDVSKGSCHYQGFIRKNQPSTKTRILKFTKKSFAELSAYRERLAIKAGQEDIPFIFEATGVYHKPLQKYLDDHGFTYYIISPLMSARYRKLELHSNKTDPLDCANIAKVFYEYDKLRVYQRMDKEYESLRDMSRNYEDMLVHLRKYKVRFKSMLDVIFPYYQKCFKNDGIYADLPLILLKEYKHPDIIHQTSEDIMVKKLSKLCPKHQTGYIRNKVQKVKELAEDVYSGCESTDIYVELFTELIETLQKQMKECDEQLIKIIETAAKSPYFDLIRSVVGIGDNLAARILAEIGDINQFDTRNKLISYAGLDPMIRQSGKKDGIHLSVSKKGNRYLRCLLYQAASANYRLKKNDVIYRFNQKKRQQSNPLNSKAANTATAHKILVIVYGMCKNGTYYNPCE

SEQ ID NO: 408712 - protein, 352 aa, unidentified
MKHALQQESVLGVDTHRDIHVAAVINQSGQLLGTQSVSTNTAGYFQLFQWASSFGALKRAGVEGTGTYGSALCRFLSDKGVMVLEVNRPDRSRRRLNGKSDPIDAENAARSVLSGISQAIPKQQSGACEAMRIVSVARRSAVKAKTQAINQIRAMLVSAPQDVREKLWRIKATDCAKACAAVRSLGDTVVLRALSTTLKSLAKRWLALTEELKDYDKQLETSTQKHAQQLRSRFGVGPQTAAILLSVAGDNPNRLKSEAALASLCGANPLPASSGKTTRHRLNRGGSRAANNALWTIAMVRMRSDPRTKVYVERRTSEGLSTKEIHRCLKRYIARELYPLIMGDLWTMNAIP

SEQ ID NO: 408713 - protein, 325 aa, unidentified
MTDKLSCCGIDVSHLTLDVTYQNNLGELFYLQVGNNNAGFKKLLEHTGQNCHFVMEATGVYYIRLAFFLDSLGCKLSVVNAMSIKRYIQMHLERNKTDKKDSRWICHYAIDQRPPFWQMPDSAYFECKQIYNTIREYAEQVKRFNNQLHSLKLLPFPSKETVKSIEKMKSYLEKEIDHLEVKLQVLLKKWQPEQYKSINSIKGLGKRATALLIIFTQGFKHTTNHRQLISFAGLSPTEYSSGTSIKGSNRIYKKGGKPIRDVLYMCAMNAKQTNEACKQLFDRLKAKGKTGKQALIAVMNKLLKQVFAVVKNNSLYQPNYCSTLH

SEQ ID NO: 408714 - protein, 360 aa, unidentified
MQEITRVGVDLAKRVIQVLAVNAAGSRVTGRALAREKFLPWCAQLPPGCLVAMEASSSAHHWARKLISMGLDARIIAAHLVTPYRMQGRSGKNDANDAAAICEAASRPQMHFVPVKSVEQQSMLCIHRLREGFKTERIACINRIRGLLAEFGLVFPQKPEVLRQALPDVTEDATNELGGLARLALQRAWAQWQELDEHMDWCDQRIAAHLKTNEQVRQAQQLMGVGPVTASAVVATVGDFRQFKNGAQFGAWLGLTPRQNSSGGKNNLGRITKRGDMYLRTLLIQGAKSIVLVAQKRDDPISKWALKIREKSGWQKAVVALANKNARILWAVFVRGKAFDANHVSVKPPAAMPQIGPVPA

SEQ ID NO: 408715 - protein, 402 aa, unidentified
MNCVGIDVSKGKSTIAVMRPFGEVVVSPFEVCHTASELSELARLLKSLDGETRVVMESTGNYHAPVAWLLHDAGFYVSVVNAMLVHDYGNNSLRRAKTDKKDAVKLANYGLDHWLTLPRYVPEEDTRLMLKTCYRQYQQYSKVQTMLKNNLISLLDTAFPNANRLFTSPPRADGSEKWVDFVATFWHCECVCGLSEKAFTAKYQKWCKKHGYNFSEDKALDIYASAFAHFGVMPKTDTAKLLVEQAISQLRATSAALAALKQKMQSLAASLPEYPVVMEMFGVGPTLGPQLMAEIGDVRRFHSKKALVAFAGIDAPPYQSGQIDVRSRSISKRGSASLRRTLFLVMGVLLQCAPMDEPVYQFMDKKRSEGKPYRVYMMASANKFLRIYYASVKAYLDSLEHD

SEQ ID NO: 408716 - protein, 423 aa, unidentified
MKKRIYRGVNVKKVDEERLADAVRGERVVFGVDVAKEAMVGSVVVERNDVKLNVKWTHPAETKELVELITEQPAASIEVAMEPSGTYGDALKHQFAIRGVPVYRVSPKRSHDAAEVYDGVPSWHDVKSAGLIARLHLDGASEPWRDRTDEERKLSASIRTMEMYDGQENNNTNRLEALLARHWPEITQHLRLKSATLVALIKHFGSPQRVARQASQARALMWRVGRGGIREETIEAIVRSARTTVGVSVIEAEARMLQTLAEEILRCRKAASKARADVERLSEAHEAAGRMGQTIGKATAAVMVSKAGDPRDYASASSLVKSLGLNLKERSSGKYKGQLKITKRGPSVCRYYLYLAALRLIQDDPVVRAWYGKKVVRDGGRMKNKAVIAVTRKLVKGLWHVARGEPFDSRVLFDTSKLDLLKA

SEQ ID NO: 408717 - protein, 367 aa, unidentified
MQVLRYGIGLDMAMEKFDACISVIDADQKVTIKASRSFNNNPKGHQQLYKWVTSHCCLAVPVIFLMEATGIYHETFAYYLYSHGCSISVVLPNKAKKYKQALGLRSKTDGIDAKSLSRMICEQALPAWVPMSKTIYLLRAITRQIESVSKDITRTKCQLHAQKFAMYKNKEVINCMKQQLKLFQKQKDQLQQQALLIIESDAALNEKFEKICRIKGVGKLSLAVIIAETNAFSLFEKVGQVVSYSGYDVIENQSGKHVGKTRISKQGNGRIRRILHMPAFNVVRLKQKPFSDLYQRVHDRSKIKMKAYTAVQKKLLILIYILWKKDAAYDPSYLQTSREKEPVLSFVTADVLARQKNSSAVEQSYTR

SEQ ID NO: 408718 - protein, 334 aa, unidentified
MTSKISILAIDLAKGSFQVCAVGSDGTVLYNRALFRNRLATLLGEQPACIVAMEACATSHHWGRMAQSHGHEVRLVPAAYVKPFVKRQKNDRADAEAAMRPTMRFVAVKSAETQGRAVAFRTHQCLVRQRTQLINALRGHLAEFGLVAPKGPASLKLLENALADESSDLPDPVREMGAVYLEQIARLTDVIERLANELEDASKTDCELRRLCTIPGIGPVTAGAVAAFAPDLDTFDSGRNFAAWLGLVPRQRSTGGKARLGSVSKMGQTDIRRLLIVGAMSVIRWVVRKGGSSNRWLAALVARKPRMVAAVALANKMARMIWAMSTKQENYRMA

SEQ ID NO: 408719 - protein, 383 aa, unidentified
MTATTHAPQSIGSQTLLLSLELSKATWRLTCSIGPGAAPRERRIAAGSESAFVAELAHAKQRFGLPQDALVRSCYEAGRDGFWVHRWLTGLGVENVVVDSSSIEVPRRHRRAKTDRIDGRKLLAMLLRVAGGERGVWKVVHVPSDAEEDRRHVARTLRTVKSDRTRTINRLRSLLATQGVTVAGSLQRIDVTQVRGWNGQPLLPGLQHRLARECELLAALTQQRRAWERRQRTAVRRADETAASQARRLRQLNGVGWNAAWLYASEIFSWRSIRNGRELGALAGLVAAPYQSGATQTTLGITKAGNRQWRAMAVELAWGWLRYQPTSALTRWYLARFHAGGPRARRIGIVALARKLLIALWRYVEHGVLPEGAQLKRAYGTVR

SEQ ID NO: 408720 - protein, 405 aa, unidentified
MFYCGIDIAKYKHEATVIDQTGVSLLDSISFSNSKEGCEKLLALFQRLNIAKEDLLIGMEATGHYWLSVYGYLLEQGFEVKVINPIQSEAFRKMYIRQTKNDRKDSFIIAQIMRFGQFSATSLSEEVIIAMRQLSRYRLALVDACGDCKRRVIALLDQVFPEYDALFSDTFGVTSKEILSQYPVPEELLTVSTRKLTTLLENASHGRFGKEKAEQLKAAAANSFGVSFAKNAFAFQIRQLVEQLEFLEGQIMELEAQISSLLKQTGSYITTIPGIGDTLGAIILSEIGDIHRFNAPNKLVAFAGLDVRVTQSGEFTGTRQKISKRGSPYLRRAIWLAASRAAFCDPILSEYYQSLRARGKHHLTAVGAVSRKLCNTIYTILREERPWQPVPPRDKKVSNHTEQQR

SEQ ID NO: 408721 - protein, 364 aa, unidentified
MEIVYERCAGLDVHKKNVKACFTGPGRAGRRTKETRTYLTMTEDLLQLRDWLKEQGCTHIALEATGVYWRPIYNLLEGDFEVLVVNAHHIKVVPGRKTDVKDAEWIADLLSHGLLSASFIPTAPQRELRELTRYRTSLVEERAREVNRLQKTLEDTNLKLGDVVSDVLGKASRLILRAIVEGETDARQLASLAVGRVRADQQTLERALTGKVTAHHRFMLSQHLTLIENLDAAIRRVEEEIARRFTPPEPPTGAEDQSAPEPVAEAESASSEPSSEPLSWQEAVQLIEQVTGISERVAQGLLAEIGVQMSQFPSAKHLASWAGICPGNHESAGKRLSGKTRKGNPYARRLLIQAAHAAAHSKNT

SEQ ID NO: 408722 - protein, 364 aa, unidentified
MNEYSYWVGFDDDAEKICVAILRGEDERPIAEFVVERNDRGMRRLLSQLKRLRGTVRCVYEAGPCGYGLQRWLTSHGVICQVAAPSLTPKKPGKKVKTNRIDARELARLYRGQNLTFVHVPGEEQEALRDLMRAREDARADVLRCRNRLSKFLLRHGHYYTDGVRWTQKHLRWIDSIRLQQPTSEAVLTEYKAALGAALEQLQRYERLVAEEATKPAHAPMVEALSTLRGISTTTALTIKAETGDLRRYRSAPAFMDSTGLVPSEFSTGDDRRQGSITKTGNAHLRRVLIEAAWAYTRRYALRGQVNKRREKLPAELAQVGHRADLRLTGKYRRMVGRHKRPTVAVVAIARELAGFVWAIGQNA

SEQ ID NO: 408723 - protein, 369 aa, unidentified
MQNTIFVGLDVHKATISVAVAGGERGGEVRHWGTITNHADHVRRLAEKLGGGGRQLHFCYEAGPCGYGLYRQLTDLGHDCVLVAPSLIPVKTGDRVKTDRRDGIMLAKLHRAGELTAVWVPDAAHEAMRDLVRARATAVRVVGKARQHLQGFLLRHGRVHAGKKGWTVVYRRWLTTIRFEHPAQQIVLQDYIHAVTDAEARVERLTKQIAELLPGWSLAPVVEAVQAMRGVAFVVAVTVVAEVGDFSRFDNPRQLMAYLGLTPSEHSSGASVRRGGITKAGSSLARRALVEGAWSYRMQARVSRKLHDRIEALPQAVRDIAWKGQLRMCQRYRRLMAAGKPKVVATTAIAREMVGFIWAIARTVTPAHA

SEQ ID NO: 408724 - protein, 425 aa, unidentified
MVVAPALIYFSQGRVLIMEVLYNHCCGLDVHKKSITACAITPKGKEIETFGTMTHDLFQLVDWIKNKKCTHVAMESTGVYWKPIYNLLELEEIQPMVVNAAHIKAVPGRKTDVKDAEWIAKLLRHGLLQHSYIPNREQRELRELVRYRRSLIEERAREISRIQKVLEGANIKLSSVATDIMGVSGRAMIEAIINGVNDPQTLSSLAKRRLKKKKDDLERALVGSVGPHQRMMLKTQLSHIDFMDQQIELLSEEVQQRMQPYEEDIELLDSIPGIGRSHAEQLLAEIGIGVEISKQFPSAPHLCSWAGMVPGNNESAGKKKSGKTRKGNKKLRAALVEAAHSAARTKNTYLSSQYQRLAARVGKKRAAVAVGHTILTIAYHMLNRRVPYIELGADYFDRRKKEIVIKQSIKRLETLGCKVTVEAIA

SEQ ID NO: 408725 - protein, 371 aa, unidentified
MIVIGVDTHKRSHALAAVDEGTGRVRGKRQIEARDAGHMAAVRWAREFDDERVWAIEDCRHVSRRLEQALIAAGERVIRVSPQRMGASRKGEREPGKSDEIDSLAIARAVVKDGVESFPVAYLDERAMQVRLLSDHRKDLVEERTKMENRLRWHLLALDPELEAKVKPRSLSSLKTLERLERQLRRLPASTRLRIAREQLSHIRALTREVLTLERELRALVQSQRPWLLHETGCGPVVASVLVGRTAGAERFPSDAALARQAGACPIPCSSGQTQTRRLNRGGDRQLNWALHTIAASRARTDPRTKEYLARKRAEGKTKKAALRCLKRSLARHFYELLTRPPLTQPCTPQPGPHPNVEQTHTAPNPMVCLS

SEQ ID NO: 408726 - protein, 351 aa, unidentified
MSIMIAETTDVIGGVDTHQDLHTAAIVSIDGAVLGTESFSTTRAGYRAMLRWFRSYGELLRVGVEATGTYGAGITRHLALAGVPVLEVTGPNRAQRRTKGKDDTLDAIAAAQAALTGQRVQVAKDRSGAVEALRVLRTTRKTALKCRRAALQQLHNTIVAAPDEVRDQVRNLTRMQLIRTCVGWRPDTVAFRDPVVATKISLKSLAQRILELNDEIAELDRFIAPLVAELAPTLLKLEGVGTENAGEFIVAAGENPDRLHCEASFAMLCGACPIPASSGKTQRHRLNRGGNRRANSALHMVAICRMRTDPRTKLYVARRTDEGRSKREIMRCLKRYVAREVYKALTDPIAA

SEQ ID NO: 408727 - protein, 437 aa, unidentified
MSDKKSVELRVSVDVGYRRHSVAIGLPSGEVLEEFEIAHRPEGFAEFFSRIEKHQKVRDCEVAVAMEGFNGCARPLDAMVRRRGYRLYNINNLKLARFKEIFPGAAKSDRIDARKGLELFQLSDHLPLAKEVLQEVKGTPRENEVLKRLTRRRRRLVDEQIRVISNLQTDLQAVCPGLLEITKNAGNQWFLNFLLSADTLPQLARLRPATLLKVPAVGRKYARLIEDWQKRAHFSEEVEWVSEMIQEDAQRCLDLDEKIKALRAKIKEVAKDSKIVKVLLSIPGFGTICTAELAGEIGTLERFSKEGSLALYIGMSTLDNSSGKYQGSKQPKHVNTRAKAAMMVALDRHRKFVPESQRYYEKKRSEGKKHNQAIRALGRHLCRIIYKLLKEEREYEIRLEKGNTKGKVSPRSLIKTQIRKAKISTKGTNNKIYQQST

SEQ ID NO: 408728 - protein, 339 aa, unidentified
MANVAVLGIDIAKNVFQLHGVDGDGQVVLRRRVMRDQLLQVTGATPPCLIGIEACTGAFHWQRHFESQGHRVKIIAPQYVKPFVKGQKNDGNDAQAICIAVQQPHMRFVPKKSIVQQDIQGLHRARQRLVNHRVALISQMRGLLLERGVAIAKSASIAQRMIPEIINNPRIDITELTRDIIGTLHAFLLQINEQIRYFDKQIEAVFRESAVCQRIAKIRGVGPKTATAVVAAVGDGADFKNGRHLAAWMGLVPRQHSSGDRRVLLGISKRGSQHLRTLLVHGGRSVVRTAQRKSDAASEWVNELRERRGYNRAAVAVANKNARVIWALLQHGGEYRANP

SEQ ID NO: 408729 - protein, 361 aa, unidentified
MFRERTSVGLDVHARSVIAAAIDGQTGEVFKARLAPAHGEVLAWVSRLPGPLAVVYEAGPTGFGLARALTATGVRCEVAASSKLQRPAGDRVKTDARDALHLARLLRLDGVVSVRIPTPTEEAARDLVRAREASRQDLMRARHRLSKLLLRHGIVYADGKAWTELHDRWLRRQRFASTATQAAFDDAYETVILASARRDRLDEKITTIAEGSEFTAMVHRLACLRGISNLTGFALAVEIGDWDRFTGAGIGAYLGLVPSEHSSGQSRSQGGITKTGNTHVRRLLVEAAWHHRTPYRPSVVLRRRWERATPAARVRAHAGNQRLHSRWVNFNLRKKRGVVANVAVARELAGWCWSLAVLPDD

SEQ ID NO: 408730 - protein, 348 aa, unidentified
MRFYTGQHQHYCGIDLHARTLYLCILDAEGNILLHKNLPCDRTRFLEAIKPFREDLVVACESTFNWYWLADLCAEQDIPFVLGHALYMRAIHGGKAKNDRIDAFKTVSLLRGGLLPMAYVYPSKMRSTRDLLRRRSHFVRKRGQLMAHIQNTFHQYNLPRPPGGLVYKYQREPIPDAFDDPILRKSVETDLALCDTYDELIRDLEKTVVRQARVHNPQTLLRLNTVPGIGEILSLTLLYEIHDIGRFESVQRFASYARLVKCEKSSAGKRLGTSGHKIGSVHLKWAFSEAAVSVIRHLPQSKRLHDRLKRKYGKGKALSILAHKLGRTVYFMLKRNQAFDADRFLANA

SEQ ID NO: 408731 - protein, 418 aa, unidentified
MTATDTTASTLLVAIDISKHRHEVLISVPGKKRRRRLTILNTLDDFQRLSASLASYDLPVRIGFEATGNYHRTLAHHLGQAGFELKLVSSVGLARTREALHNSWDKNDPKDAQVILHMLEIGAVQFFHDPIVVGTVDIQELSKTHEIVSRSKTELWHRILTHYLPLYFPEAERFHRNSRTDWFLAFLEKYPSPHMISAMSREAFVADAWDVVGRKVSKEQLLSDIYATAANSVGLPVHADSDAVRMFRLVLAEGRSLVRQRDVIEARAVELLSDLPDYQLLTTIPGIGPINAMTILAEAGDLRRFRHHRQFLKFCGMDLATVQSGMFRGQSRISKYGNARLRRTLWMAGQTAVLKRTNSFRDKFERYISKDRYNAHLRRKAYTAIAAKMARTVHAVVNHGEPYRPFFEGVSPGGRTSL

SEQ ID NO: 408732 - protein, 345 aa, unidentified
MNEFYEGQQFVGMDLHRRRSVLVRMTETGEHLETVRIVNTCDRLAEVMTRAGESPEVVLEATYGWYWAVDALAELGASVHLAHPLGVKAFSYRRVKNDQRDAADLADLLRMGRLPHAWIAPPETRELRELVRHRAKLVAMRSRCKAEVHAVLAKGGIWVPMTDLFGIEGNLLLDKVRMPAPYLARIASLRRFIEAFDAEIDLFTGLAQRRLTHDAGYTAIQQIPGIGPVLAAVFVAEIGDVHRFDGPAKLTCWAGLTPRHHESDTTVHRGHITKQGSRLVRWAAIESVKILPAASRIGAIRDKVAHRRGNRNIGAVAAARRQLELVFYGLRDHHVRALHRSPRAA

SEQ ID NO: 408733 - protein, 413 aa, unidentified
MLKTKFQKRQQAQQAAAVVGVDAGKHRHALVVRPRGGLDSKPILFESTRAGFEKAVEAIRTHAPGTTPQDVLVGIEFAGNYSFTLAHFLDQQGFQVVSVLPAHTKRWKEVMHNQALKTDPMDALTITDLVSQGHFVGFPFLEPVYADLRYLVSTRERLSRLRTACIARLKAILQVVWPEFEHRFSDFTKKTPLALLRAFPGPNAFLSAPRPRVLRLMKKVSRGHLGEATYAVLRAGAESTIALPGAQGVLSDEIALQLELLETYERQIATVESAMVEALAHAPEAEALLSIPKLGPVTAAVFLGSIGNPQVYDSSRQILRIAGLSMVERSSGQVRGKVRVSKRGRPELRRQAFMFALRAVRSSDGIFRADYERILTNNGGRKMPALVAISRKALKLMYSVARDRRPYTMEPLR

SEQ ID NO: 408734 - protein, 482 aa, unidentified
MKKSSIYPNRSQELAALFEKAGNLSKLICVPIDYAKKDHLVMFCNGNGEVLRKPFSVKNSVDGVKYLLGQVNRSCRHRHIQSDHVFFGGEDVNSYAENFANTIRSKGWLVANVNAHDAKKQRENLQASTDRLDLMGIATMLLNRRANCCPAQTGVYRNLRTLVRHRKKVVKMKTEVRNRIHTLVDRLFPGFLNEKKSGIRPFSNSSLYLMQERFSAPQIRRRQRGALIRNLEKRGTKKAEQVAARLQNYASQVLTTPDEYTAALQVSLASHVTHYRCLFDGAHQLVNEMAQLLAQTQGAFLTSIKGIGIVLAAGVTAEIGDPLVQRSTDQVASYAGIVPKVKQSGGSQGHSITSHVSKRSNHILKDYVVQSAFHIGRYGPKNLKDDYSRREAAGQHADFGIARRFVRMAMCMMRTSQVYLPPDMRSTHIKPERRADYYLAMWSYLRDKWSKAGGFNVAFARDKPLGQWRYIVQEVYGIKLKM

SEQ ID NO: 408735 - protein, 387 aa, unidentified
MQAATVSTPITEHISTIFVAIELSQKTWLVTLHSPDKDKISRHKVGGGDHAGLLTLIGRVRDRAARTLGAVPAVASCYEAGYDGFWLHRLLMAAGITNYVFDPSSIAVDQRARRVKTDRIDGETMLRTLMAYLRAEPRVVRIVRVPTPEQEDARRGTRERHRLTKEQTAHTNRIKALLRLHGFAVGYPRRRDWLTWLAAQRDWQGQAVPPRILTEIEHEHARLMLVRKQLEALAQAPAAADPTPAAAEMTRRSELLLRLKSLGPAFATTLTQEVFYKDFRNRREVASYFGLAPSPWRSGGTNRDQGISKAGNPRARCCAVELSWLWLRHQPDSELSQWFRQRTLNASGRIKRIAIVALARKLMVALWRYLTTGLVPAGAVLKPAAAQ

SEQ ID NO: 408736 - protein, 407 aa, unidentified
MEVLHPRCGGLDVDKDSVGACVRCVSFPEAHHVRTFATTTTGLVALADGLETHGCTTVAMEATGVYWQPVWHLLEGHFTLVLANAQHIRKVPGRKTDVNDATWIAELLAPGLIRSSFVPPAPIQELRDLTRTRKQLVRELSQHCLRLEKVREDANLQVASVLSNLLGHSGRAMLAALIAGEQDPERLADLARGSAGQKRPQLIQALRGRGTPHHRALLQLHLDLIAALEAALAQVDTALGKALAPIAAAADLLKTMPGVSDVVAQVILAEIGAERSRFPTAGHLVSWAGLCPKNDESAGKRRSTRLRKGGTWLKTTRVTAAWAAVRHKEGYLHNQFLRLKARRGAKKAIIAVAAAMLPAAYHLVRDGVEYHDLRPQHFDRRDKHKVIARLMRRLTDLRGEVELKQVA

SEQ ID NO: 408737 - protein, 387 aa, unidentified
MLQSINDHSRSLVALDQNTTVIAVVELSLSAWLIGGMVPGIVRDPLKKLATPDPEALLRLLHRWRDEAVQAGKTVTRIVVAFEAGRDGFWLARWLGARKIEAYVIHPTSIAVSREQRRAKTDRLDIGLLKRSFLGWLRGEKKHCTMAAIPTLEGEDAKRPTREREQLVGKRTGIINRMKAALVRLGVRGFNPKLRKTPEQLATLRTPEGGPIPPNTLAELTREMAHLRFIDEQIKQIEATRLERLKQAPQQRANSKVLQLCRVNGLGIETADMLSHEAFSRDLRDQRAVARYAGLTGSPDESGRRRREKGLAKAGNARVRRGMIQFAWRFLIHQKDSALAQWYQASVAAGKKRKTMVVALARKLLIALWRFVTTGDVPQGMVLRPAS

SEQ ID NO: 408738 - protein, 451 aa, unidentified
MSDLPVLDARAAFVDVGSEQMHVSVAGGPPQVFGAVTAQLHALRDWLEAQGVRSVAMEATGVYWLPLYGVLEAAGFEVRMVNGRQTRNLPGRKTDMQDCQWGATLHSHGLLRAGFVPPAHIRRMQDYMRLRADHISMAATHVQHMQQALERMNVKLHDVIAKLTGVSGLAVVRAILGGERDPQRLLALCDTQIQRAKAERVKESLRGTWTEEHLFALRQALQSWEHYQAQIAECDRRVEAVLHDIDPGQPPNARALAARPSRPGVNAPDIPDLRAILAQICGGQDLTQLPAHTEYGVLQVIAEVGTDLTKWRTEKHFTSWMGLAPGSHQSGKRKRSAKRSRNRAGRLFCVIARSLARSKDIALGGFYRRMAARRGGLVANIALARKLAALFWRVMVKGMDYVELGLQQYEAKVLETKQRSLRRLARQLGQQLVPMTTPAPTKGPSANNATL

SEQ ID NO: 408739 - protein, 411 aa, unidentified
MRRVIGMDIHRTFAEVVFWEEGKLRPAGRITMTRAGLEGFGRSLGKEDEVVIEATGNAMAVVRVLSPYVGRVIVANPLQVKAIAHAHVKTDKIDAGVLASLRAADFLPEIWLPDADTERLRRLVARRSQVVRHRTQIKNEVHAILHAHLIPPCPHADLFGRLGRTWLARQVVPDDERSAIDRHLRELDRLSEDLGILDREIAQTAINDPAVKRLLTITGVNLIVAAGLVAAIGDVRRFSEPQKLVSYVGLNPRVRQSGLGLAQHGRISKRGRSHARAMLVEAAWAASKAPGPLRAFFLRIRSRRGHQIAAVAVARKLAVLCWHLLTKGADYQWARPALVANKLRAMELQAGQPVRKGNKPGPAHAYNIKELRDREIELARYAEQAYERFVSQWQRSGKTKRRTGATSEERL

SEQ ID NO: 408740 - protein, 321 aa, unidentified
MSASSVVVGIDVAKAHVDVSVLGAPLDAQRFDNQAEGHSALTAALKPLDVALVVMEATGGYETELACALQATGLPVAVVNPRQARDFAKSMGGQLAKTDAVDARMLAEFAAVLLRREDLARFLRPLAHPQQQWLAALVTRRRQLLAMMLSERQRLQITPKALHPSIEAIVAAIKAQLDEIEAQMVGHVREHFGEINRLLQSASGIGPVTSATLIAELPELGRLNRREIAALVGIAPMANDSGSSKGRRRIQGGRFDVRRVLYMAALTASCRNPVIKTFYDRLIAAGKLPKVALVACMRKLLTTLNAMVRTHQPWNNSLHGA

SEQ ID NO: 408741 - protein, 348 aa, unidentified
MNATAKMIGLDIAKNVFVAIGHDVRGKVVMKHKLTREAVLPTFANIPATTIAIEACAGSHYWARKLIALGHEVKLIAAQHTRAYVTGNKNDTNDAAAICEAGSRAATKTVPINTEAQQDLQMLHRTRQALVHERTATICRMRAFAGEYGQVYPLGVERFLAGFKTWLADEKNGLSGSAIATFAELKAQLDDKDARIDVYDKRLAQAAKEDARAVRLMEVPGVGKVVATAVLAAVADARHFGSGRDFAANLGLVPREHSSGGKQRLYGITKRGDAYLRTQLIHGARSALRWAGEKPDKMLRWATKLAERRGNNVAATALANKMARVIWALLAHDREYVPVWSKSMTRPA

SEQ ID NO: 408742 - protein, 400 aa, unidentified
MRVVFGIDVSKVSSEVAILVNGEKVHNYTMSNDAIGFSRLLGDLRTVHKPEIIFEATGVYSRRLQAFLDEHGYAYTRLNPLEAKKQLDSLRVRKTDQIDAEKLAQSQFVLNRKPTYVQEEVYQELRDLSRFYQNLTEDIVRAKNRLHKVLQVTFPELETILSTPTGEQYGNLAVAFPCKDFVLDLSKDELSESIRQSTSKRISDKRVAYLAEKLIALANQSYCAVKKTSPMLEEVRYYTKELLRLSEQRQTVLDQMVELAQPLPEYDILLSIPGIAETTATSIIGELGDIRRFQSANQINAFIGIDLRHYESGNFLAKEHITKHGNPYARKILFKCIHNIASASHTNPCHIADSYEKRKRQSQTTSTKPHTIASIHRLIRTMYYLIMHNKLYDYASTQNR

SEQ ID NO: 408743 - protein, 345 aa, unidentified
MTTMPQPVPTPVTVGVDTHAEVHVAVAMDAFGRRLDTTSVATTPAGYAELLGWAQCLGQVEAWGIEGTGSFGAGLTRFLRGHGQVVVEVNRPDRAARRRRGKSDPLDAEAAARTAQAHQGSVPKAGDGQVEMIRSLRVARATAMKARTQAINALKALVVTAPAELREPLRNLSTVRLVQTTAALEPGPVTTPLAAATLGLRTLARRYQLLSAELTTLDAELDRLTRAAAPQLVALFGVGSDSAGALLVAAGDNPDRLRSNAAFSMLCGSSPIEASSGKTRRHRLNRGGDRQANAALHRIVVARLRHDQQTKDYLARRIREGKSKKEAIRCLKRYVAREVFAALPR

SEQ ID NO: 408744 - protein, 413 aa, unidentified
MTVFCGIDWAERHHDVALVDEAGELLAKRRISDDAAGYRMLLELLAEHGDSPESPIPVAIETSRGLLVAVLRTGSRKVFAINPLAASRYRDRHGVSRKKSDPGDALVLANILRTDMAVHRPLPADSDQAQAIAVLARAQQDAVWNRQQIGNQIRSLLREYYPAALDAFLAKQGGLAREEARIILAKAPTPAEGSRLSLSQLRSALKRAGRVRGVEEEAARLRGVLRAEYAHQPAAVENAFGRQLLALLKQFEAACQASDDLAEAVDASFHEHPDAEILLSFPGLGVQLAARVLAETGDDRNRFSDARGLKAYAGSAPITRASSKKHYVGRRMVKNNRLHHAGYLWAFSSLRSSPGAQAHYRHRREAGDWHAQAQRHLFNRLLGQLFHCLQKRVPFDEEHAFNPHVPSSTASAA

SEQ ID NO: 408745 - protein, 344 aa, unidentified
MTYYAALDVSLRSVNICVIDDQGEIKAETKLDSEVTDIIAYLDSLEMEIASVGLEAGTLCQYLTYGLQSAGFEVVCMEARQVKAALSAMRNKTDKNDARGIAQLLRTGWYSKVHIKSMASHRIRVLLSSRKAVLCKCIDLEQEIRGLFKVFGIKLPPKLGHGGFDAAVRSIITTDATLSFALLPLLEARLVLYHCFRELDNRTRNMAHADPVCQRLMSAPGVGFITALTFKAGVDDPARFKRSRTVAAHFGLTPRRFQSGEIDIDGHISRCGDRNVRSTLYTAANALMTRSSRWSSLKVWGMQKAKTRGHRRAVIAVARKLAVILHRMWVDETQFNWGMEDARS

SEQ ID NO: 408746 - protein, 347 aa, unidentified
MKSRQIATYVGADLHKNNTHFIAQDKAGKEIASRKLDNNGVMFREFLSSLPQPVKVIVESTSNWAWFCEEVKAGGHEVMVAHARETSSKSETREKNDPLDARLLATLLRGNLLKKECWQAPPEILRTRERLRYMQFLTRQKVANKNRIHSILTRLNIKSPFKDAFCKGGKKFLRSLDIDAEYKTSMSRSLDLMENIEALLAEDLAFCRKLAIEDPLVGLLTTMPGISAQLACMIRFETGDIDRFERVEAYVNYTGLVPGKRSSSEHSKDIGVTKEGSFWLRWAFVQAAQTADRQRKGRLSSFFWRQFRKNRNRNKAIVATAREMAVIAYHMMQRKEKYNEPAIFVCK

SEQ ID NO: 408747 - protein, 412 aa, unidentified
MLKIVYPICCGIDVHKGFIVACIASTNGQGVTTYQSKRFSTFTNDLRRCAVWLAKNNCKDVCMESTGKYWIPVYNILEATCTIVLAHPKYVKAIRGKKTDKKDAKWIADIFKHDLVSGSFIPPTDIRQLRDLMRYHWKLTNFTTGEKNRAQNCLTVSNIKLDDVFSDVFGKAASAITTRLLVSSEPFDVTPYLTKNIKTPVEKIQAAVDGEMCAEQAEKLRIIRSNMDALELCKLNLQSLILTTAEKYLPQLNIVATAPGIQAFSAIGIISEIGVDMSVFPSSKHLCSWAGLTPQNNESAGKKKTTRISRAGAYIKPLLVQCALCAVRAKQFPEVRRRYLALKKRRGHKKAIIAIARMLLTAIYNMLKKNEPYDPELYRKADRPPTHREVSVEEAVYILQRQGYLVTAPPTA

SEQ ID NO: 408748 - protein, 331 aa, unidentified
MKNNQIIGIDVSKSVLDIFIHSVDFHFTVDNSPIGFAQLLEVCCNQLSCKTESLYLCFENTGRYSRPLAVFCEQNTIPFSMVNALDVKQSKGLIRGKSDKKDARTLALYALRKWNEIEPTVLHAPIVGKLRQLLQLRDKLIKHRTAYKNSIKDLHDCFIAGETDFIRQTNKRLIAQLVSEIKNVEREIESIFESMPQWQTNYKLIQSVKGIGPVLAKYLMIYTENFSRFSNPKKFACYAGIAPFEYSSGTSVKGRTRLHPCANKHLKSLLNIAAMSAIQLNGEYKRYYQRRNSEGKNKMSTLNIIRNKLVFRVFAVVKRQTPYVDLSAFAA

SEQ ID NO: 408749 - protein, 351 aa, unidentified
MQIVGALDVHRSQITTKTLDLDSGEVRYGRISPVTRESVREWLSRFAPGEAEFALEGTTGWRFVVEEIHAAGLSAHLADPAETAARRGRKKRAKTDKADCDLQLELLVAGRLPESWIPPAHILELRTLVRTRKALLDERTGWQQRIQAQLFHQGVPRGIKLRTAAGRAALAEAGLSAAGRELVTLGLRMLDVLDRELDPLDRRLRAFARRQPGCKALIAELYGVGALLAPAILAELGDCRRFSSSDDVVRHSGLDVTVHESDSRRAAGRLSHQGPELLRWALYEAAQCAARPSSPDYGYFLEVQERIDSDRAFLSVARKLVRRAYHILRKLGDDAIAPVDDPPTGEVALAA

SEQ ID NO: 408750 - protein, 451 aa, unidentified
MSKTSEKAPKWTELPRINLHAAGLDIGQSEIMVCVPPGNAEGCVRAYGTYTPDMTALADWLAACQVTTVAMEATGVYWLPVYEVLEARGFSVFLVNARHIKNVPGRKTDVSDAQWIQTLHSYGLLSASFIPEAEIRVLRSYWRQRAGLIEYRAAHIQHMQKALQQMNIQLTQVLSDITGVSGMRIIRAIVAGERDPVTLAQMRDKRCAHSSDEIAKALTGNYRPEHVFALKQALALYDFYTTQIDECDSQMERQYAALESVADEDDLPPQTPGQRASHSKNAPGFDARPQLFRITGVDLVAVPGLDQSTVQTIITEIGTDVSRWPTERHFCSWLGLAPHNDISGGKILRSQTLKTNNRAGQAFRLAAQSVARSQTSFGAFYRRLAARIGKQQAIVATAHKIARVVYAMLKHRTPFNPSSQQEYEQHHRQLEIKRLTRKAASLGFELVSLPT

SEQ ID NO: 408751 - protein, 371 aa, unidentified
MEKGTTYVALDDSKRKIVAGILHPGATTAELRELPNDPPHIRRLFERLQCEGPVVACYEAGVSGYDLYRQITGLGVPCQVMAPALTPRRPGQRVKTDRRDAGKLVHLFRAGELTPIHVPNEAEEAGRDLVRCRDDVRRDVLRWRHRLLRLLDRHGRIYRAGKNWSHGHWRWIREQRFALPALQRTFEASLFALEQALTRLAELDKEVVALAETAPYCDPIGWLRCFRGIDTLSAMTLVVEVVDFQRFERPRQLMAYLGLVPSEHSSGDAQRRGALTKAGSSHARRVLVEAAWHYRHRPGLGPALAARSHGQPREVVAEAWRAQQRLHRRYRHLVGHGKRPPVAVAAVARELVGFLWAARTRRESATIPAAL

SEQ ID NO: 408752 - protein, 386 aa, unidentified
MMTMTRTEESTAVAASTAPTLLLAFELGERSWKLGFTTGLGQQPRIRQISARATDRVEEEIARAKARFRLPADAPVLSCYEAGREGFWLHRWLGAHGVSNHVIESSSIEVNRRARRAKTDRLDLGGLLNLLARHHQGDGRVWRMVRVPSVAEEDARQLHRTRETVQQDRNRLINRLKGLLTTQGLKLPVDATFPTQLETAQLWDGTPIPAGLKARLQRGWAQLEFLTRALTELDAERDALTADPQTAMGRYVEALPTLRGIGPIGTWTLATEIFGWRDIKNRRELAGLVGLVPAPYQSGESHHDQGITRAGNKHVRRLMVQLAWSWVRYQPDSALTKWYEGKFGHGSRRLRRIGIVALARKLLIALWHYVEHGEVPEGAIVKGQAA

SEQ ID NO: 408753 - protein, 348 aa, unidentified
MSKHAVPASDVPGLLHRFAELKRKAAARSGRDFPIIVIQEAGLDGFWIHRVLQSEGIESHVVDPASILTSRRARRAKTDRIDGETLVRTLMAFKRGEPRVCSMARAPTPQEEDRRRVCRERRILVGERVRHVNRIKGLLFAQGIFGYEPLRKCRRERLEDLRTGDGRPLPVHLKAQIIRELDRLELVLAQLKAVAAERDTLLKTASDEMPAPPAMLVQLKGIGPEIAAVLWSEGLFRRFDNRRQVAAYAGLAPTPWQSGSIDHEQGVSKAGNPRLRTTMVELAWLWLRNQPTSALSLWFHERVQSLSGRMRKTIIVALARKLLVALWRYMTAGVVIEGAVMKPASATI

SEQ ID NO: 408754 - protein, 320 aa, unidentified
MEASLGIDIAKAKFAAALLTSDGKVRHKSCANTPAGFADLAAWLQRQHVSTVHACLEATGTYGDALATWLHDAGHVVSVVNPAIIHAYARTQLARSKTDRLDAALIARFTATQQPPAWAPPAPAIRQLQALVRRLDALQGMRTQELNRLEAGVAVADVRASIEAVLANLDAQIAHVKQLIRDHLDRHPGLRAQRELLTTIPGIGETTAAVLIAELFDKSYASARQAAAFAGLVPRMIESGTLRGRSRLSKIGPSRVRKALYMPAVAALRWNPTIRAVRARLHAAGKPPMVILGAVMRKLIHLAFGVLKSQRPYAPPEVTA

SEQ ID NO: 408755 - protein, 410 aa, unidentified
MPMLQVALEPSTAVVAIDPGKVANRVWLSNGSGPLAEPVSMPVSRAGIAGVEQLVSGHLEHGLVIAIEATGSLHRAWSAELERRYPGAVRLFAPSETKAARTQLGSGRFKTDDRDCAALTYLARQGAGRRWSEEADVEALRAVVRHRRGLVHDRKVIQQRLHDQLNALAPGLSAPAGHGRSLVLTRPSGQAVLACAAAFDGRAPTVRSLRARATGRFSLADAQYWAQRWRDCLPPPTDAQQRAARLGRDLIRLQALQADIAGLEAELGQLLKGSDGQVLISLPGVAVVRAAGFAAHSLPIDRFPDAEHLYSATGLAPALYQSATVRRRGRISRQGLAEHREALMGIAWGLSKHSATFADRDREYRARGMSPIQARVALARHACRLAYRLLTSQQSFDEEKYRQGRHSRGR

SEQ ID NO: 408756 - protein, 335 aa, unidentified
MDIHYFVGIDIAKATLDWAIYTGKKIVLQTSTPNSVTGIKTALRLLKALPDWNPKQAVFCMEHTGIYNAHLLDFLHKLHFPIWLESSLQIKKAGGLQRGKTDSIDAQRIAEYAYRFCDQIRLWEAPRQVIQKLALLSAARQRLISVYNQLAGPLAEHQGFIDPTLQKQLNKSCQVSLTALEKDRKAVDRAIGALIEADPRLSQLFELVVSVTGIGTATATEIVIATNEMKTITDPKKMACHAGVAPFSYQSGSSVRGRPGVSQHARKRLKSLFHLGAMSAIRAKGELQDYYQRKVKEGKNKMLVLNAVRNKLIHRVYAVVAKGEKYDKNYVSPLA

SEQ ID NO: 408757 - protein, 391 aa, unidentified
MNRNTGMHAGQVIGWMNGLQVVGMDIAKSVFQLYTADMKTGELRDKRLKRDKVLEYFRLMAPAVVAMEACGGAHHWARQLQKLGHQVRLVHARAVRPFVQGNKTDVTDARAIWLAVQQSGMRFVAVKTEAQQAALTLHRQRQQLVKMSTMQLNGLRGLLYEFGVTLPLGRKAMLAQVVSAIDSVAPVLPKVTVDSLLEQVQRIAQLRQAVDQVEVILKQLIKQDRQMQRALTIPGVGILSATAAVATMGDPHHFKSGREFCAWLGLVPRQEGTGGKVKLLGISKRGDKYVRTLLVHGARAVLLRKAQSSDWQTELQKRRHKNVAIVAQAAKIARTIWAVLAKDQDYQANHKSVRPLQSRAAAQEPSQDASPTCPPQRPFVAGDARRRGQVS

SEQ ID NO: 408758 - protein, 392 aa, unidentified
MYYIGIDIGKNHHEASIVDQSGNQVCKSLRFPSTHKGAVKLLEYIQANTQSNNLVFGLEATGHYWYTLYSFLKEHKYTIYVINPIQSDCFRNFYIRQVKNDSKDSFLIAEVIRFGRFTTTDLTDEDILSLRQLCRYREAVMSARTEIKLRIHTILEQIFPEYEHLFCEIWGSSSMALLSKYLLPENIANASIDELHTILLKNSHNRFSLNKAIEIKDAAMNTFGIKIAQEAFSFQLKMLLERLKLLNEQLKELDEMIISLYNQFDCYLHTIPSITPISAASILAEIGDIRRFKNSSSLVAYAGIDPTVRQSGEYCSTHNRMSKRGSSHLRHTLFLAASCCVFHNSPFNEYYLKKRSQGKHHLVAVGAVSRKLTTVVYAILKSGKPYEAVRFV

SEQ ID NO: 408759 - protein, 368 aa, unidentified
MSTTVYIGMDVHSTNYTLSSYIFEEDKHFATVKLSPETNSILNYIKRIRKEYGDDIDVITGYEAGCLGYTLYKDLKKNDVECIIVAPTSLPKQKTGEIKTDKRDARKIAQCLATGNYKKVYVPDDHDDQIKQYIRMRDDHKLALKKVKQQILSFCLRNGFKYSEGRSHWTKKHLKWLRDLEMSELLKTILEEYLISYDYYSLRMEQMDKRIEQFADEERYKESVEKLCCLSGMSVHKALCHIVETSDFGRFRKASSYSAYIGTVPGEDSSSDKVNRLGLTKAGNSHLRTLDIEAAHAIGRTAKKKSKALMLRQSLCSPEVISYCDKANERMRKMYIDISLRKNKQIAAAAVARELSCFIWGLMTGHTS

SEQ ID NO: 408760 - protein, 326 aa, unidentified
MDDLQTSFESFVGIDVAKESFEVFFLATNTGCTLPYDAAGIQTLIERLQALPRSLIVMEATGGLERRLATELITAGFVVAVVNPRLPYHFGQAHGQNAKTDRIDARMLARFAQDVKPRPLEKTPEKLAELEHLVARRRQLITMRTMEINRRGTCDSKLATKSIDKVLTCLNKQLDSIDREIERLIRCDDDWRRKDELLQTVPGISSKTSAAILAELPELGHLNRAKIAALVGVAPFCADSGNVTGKRRIFGGRAGVRSAIYLAAFNLVHNPHIKPSRIRHFADRLTKGGKATKVVLTACTRKLVTALNTMLKTDTSWNSNFSPVSS

SEQ ID NO: 408761 - protein, 350 aa, unidentified
MSNPTRWVGVDLHRRRSQIAIIDEHGELALSRRIVNDPGTFKDLLGDPDGTHVAIEATYGWEWLAELLEEAGYDVHLAHPLRTQAIAATRVKTDAVDAKTLAHLLRTGLLPEAYIAPPELRDLRELLRHRAVLTRMRTAVKNRVHALLARQGIRPEHTDLFGKAGREFLAGLELPDGSRRRLDSLMSLIGDFDREITATTREIDARAKTDDRVPVLCQIRGIGRYTAMLIIAEVGDVKRFPTARHLCAWAGLAPTVRSSDGKARLGHISRQGSPALRWALTEAAQKIPTGDGPLRAAFERIAKRRGRNIAKVAVARQILTLCYYGLRDGEIRCLKQQPIDDHDHELAQAA

SEQ ID NO: 408762 - protein, 333 aa, unidentified
MYYSGVDLHSDNCFITTLDESGSVVKQQRIENISEYILDYFRSLPGDHQAVVESTTGWYWLNDLLQDNGIELVLAHAKYLKAISYAKVKTDKVDSQTLALLLRQNLIPRAHKISRELRGLRDTMRIRLRLVQQRSDTLRRLKSIQAKFNGSVPDPYRFQLAVLEHTRDTLTTQILNLEKSLHPVLIPNDDIQRLLHVPGIGKLTAFTIYVEIDGIERFASDKHFVSYCRLVPAADNSNRTVHHRSSKDGNKYLKIAFSDAAVHAIQYYGEYKRFYQKLARRSSGATARTVVAKELAKIVYYVLKNKTTYKGLKGQPISRQKSQQWPRLSSPLP

SEQ ID NO: 408763 - protein, 353 aa, unidentified
MAHPTLPPITVGVDTHLDVHVAHAADQLGRRVDTVQVPTTPTGYQHLLAWARGLGEPVAWGVEGTGSYGAALARFLTASGQVVLEVNRPDRQARRRQGKSDPVDAQAAARAVQAGEVTVTPKAGDGQVEMIRSLRVARQTAMRARTQAVNALKALLVTAPAGLRERLRGLSATRLVRTAAELAPGPITSPLAAAMLALRTLAGRHQALSAEITTLTSELDRLTSTAAPKLVALFGVGSDSAGALLVAAGDNPDRLRSDACFAMLCGTSPIQASSGKTTRHRLNRGGDRQANAALYRIVLVRLCYDQQTKDYMARRLKEGKSKKEIIRCLKRYVAREVFAVLNQMGQGRPTAAV

SEQ ID NO: 408764 - protein, 429 aa, unidentified
MTRSKDTTVVTVLHPVCCGLDVHKEFITACLMTTNSSDEETLLLETFGTFTDDLIRLREWLLGHECPVVALESTGVYWRPVHNILEGYLNVVLVNARHIKDLPGRKTDMSDCQWIATLLRVGFLKGSFIPPKIVRQWRDLTRYRRSLVEGLGDVKRQVHKLLEASNIKIDSVVSVLFGKTGRNLLELLAQKPGKLTMEAVQTCLRGTLKKKATELFRSVQGFFEDHHRWLLRDMLHRVDLYERDVKKVESRLKDLMEPHAELVHRLCQIPGIAPTSAYAILSETGTTLESFPNAAALCSWAGVSPANNESAGKRRSTRSPVRRNHLRTHLVEAAWGAIKKKGTYLRSKYFSLRSRLGPKKAIMAIAHKILKALYNIIKHGESFRDLGEDYLIELRSRSVISYIQRQAKKLGMVVLPEGIWKMMLHPSPA

SEQ ID NO: 408765 - protein, 350 aa, unidentified
MFIIGCDYHPSVQQIAWVETETGECGELRLKHIEPAEQFYRELKKKGVSVRVGMEATGHSRWFERLLGELNYELWVGNPAEIRAKRVRKQRNDRFDAQHILKLMLENNFPRIWVPTPENRDVRQLVLHRHRLVGMRTRVMNQLQAIAMNEGIRRKRGLWTEMGRAQLESLRLPPWATRRRQELLELLDRFDPNIDQLSQAIEQEGERMPDVQRLQTHPGVGPITALAFVLVLGTPDRFRCGKQVASYLGLIPCEDSSADSWRLGHISKQGNALLRHLLGQAAQSVARCDEQWRHQYAHLALRRNKQIAKVAMARKLAVRLYWMWRRQWDYQQLKKFGSHAGQLELRHGVQ

SEQ ID NO: 408766 - protein, 269 aa, unidentified
MTFRPHALHLKAELFVKSSRVHVRDDGFTRCNFHLKFFIMVYRGIDISKSSFVAAYPSTNGNPTKTFPNTTAGMRELIGTLAVAEHHCVMEATSNYGCCCTCYIRTVLPSVLPPQKKQIKHFSRMMMPVTKTDEKDAYMIAMYGEKMNPPIYKMPSQATIRILTTEGFTYFDNAKQLSRFIGICPTYQQSRTSVNIREHINRNDDERLRSLLYIAFWTALRYNSRECYIRLKANEKPFKVALIAVTNKLVRPVLTITTINSIYRWICPG

SEQ ID NO: 408767 - protein, 343 aa, unidentified
MDTYIGLDVSLREISVCMVDEAGAIQLERTVAADPDAIAALVHAQASSVRRVGMESGPTSVWLWRELAQRGLPVICIDARHAKAALSMQINKSDRNDAAGIARIMQTGWYREVQVKSPHSHAIRGLLNSRSLLVKVQRDLENQVRGLLKSTGLIVGRAKDGVFSARTKQLLAAHSDLAAIALPLLEAREAIHQQLVQLERRVRQLAKEHRQTSAFMTVPGVGPMTALAFMATVDDPTRFRRARSVGAYVGLTPRRYASGEVDWTGRISKCGDTILRTYLFEAAGVLLTRVQKWCALKAWGLRLAKRSGMKKARTAVARKLAIILLRMWRDGTQFHWTAAPAGS

SEQ ID NO: 408768 - protein, 428 aa, unidentified
MLKINPLSTLYVGIDVSSKSNYVCALDFYKNKYINSSFANNQPGAEELAEKILECLKQHPELNTIVVALESTSVYSIHIANFLSSCEELMNFKPYVFVLNPKCTANYKKSYIGLGKSDPVDAFVIADYARAGNIETEPWRGSQFLALKRLTRHRLHLVECMTREKTYLVSNLYLKFSELQMLEGDDQPFCDIYGATSSSVLTEYLSPEEIIDSSEEDLISFLAEKSRNRIKDISKTAELLKKAARDSYRLDKALYEPLNVSIASSFNCIETFKKEIKLIDTAIEREIKGLNPNAFIILQSIDGVGPVFAGGIVAEIGDISAFHSSDALAKYAGLMWKSNQSGDFNGEDTPMSKAGNRYLRYYLGEAANSMRKHNVEYGAYYRKKYNEVPKHQHKRALALTSRKFVRLVYGLLARNQLYSGVSLDTSNE

SEQ ID NO: 408769 - protein, 387 aa, unidentified
MPQPNDLSRSLVALDQNSTIIAVIEMSQSSWLVAGMLPGIERQPRKKLDPSPERLLGLLHRWRDEAVRAGRTITRIALAFEAGRDGFWLARWLAAHGVEAHVIHASSVAVSREHRRAKTDRLDTELLKRGFLGWLRGERGHCSMARVPTIAEEDAKRPNRERECLVGERTRIVNRIKSTLARLGIRNFKPTQRKAAERLATVNTPEGMPLPPNTLAELQRDMARLGLVVSQIRQIEDARQKRLEQQPETGPHAMVRRLARIVGVGVETADMLVHEVLSRPMRDRRAVARYAGLTGSPDESGAQRREQGLAKAGNARVRRGMIQLAWRFLMFQKESALAIWYWARTADSRMGTRKTMIVALARKLIIALWRFVTTGEPLEGVVLRPAS

SEQ ID NO: 408770 - protein, 352 aa, unidentified
MIIIGVDFHPEFQQIVSVDTDTGEFQEKRLGHREEAEVFYRALAGQKVRIGMEASGHARWFERLVAELQFELWIGNAAEIRTKRVRKQKTDRQDAQLILRLLLEDRFPQIWVPSWENRDLRQLLWHRHRMVQARTRIMNQLQAVALNEGLRCKKRLWREHGRQQLESFRLAPWASRRRRDLLELLDRLNPTIAELSQAIEQEVEKCPEAERLSTHPGVGALTALAFVLIIGRTERFHCGKQVASYLGLVPLEESSGNRRRLGHITKQGSSMLRFLLVEAAQVTVRSVPEWRSKYLHLMMRRGRKTAKVAMARKLAVRLDWMWRKGWDYEQVKKFGSHAGQPGHRDGVPSNTE

SEQ ID NO: 408771 - protein, 381 aa, unidentified
MTSEYGISPNSYWSTRPGIMFRPHTLYIRIRIVRKVHEPVFAMKDQDVSDVVKTKNRTAMKYIGIDVSKATFVVAYASDKGGKIRTFDNTTAGIKQFIGTLPKDGSIHCVMEATGNYSALLLYMLNVAGLTVSMENPLKIKNFARAMLSTVKTDKIDARLIALYGEKMNPLPFKVQGEAILRLRQKRTVIRQLTKQITAMSNLRGSLACLPVPDKGATHTVDETIKFLEKRRDRLQLELTDLVEVEFSRQLALLTTIKGIGITLATALIITTGGFTYFQNAKQVSRYLGICPTYEQSGTSVNIRGHINRNGDAYTRGLLYVAAWPASRFNAQCKEAYTRLRKNGKSGKLALIAVANKLVRQAFAVVAQDKAYIDGFVSNRP

SEQ ID NO: 408772 - protein, 428 aa, unidentified
MKNKETIRHEKYCQLRKEIRGSEDHMIVGIDVAKDKHYAFYGTATGKTLLKRLIFENNMDGYSRLLAQTEAIRVQNSLLKIVFGLEPTGNYHKPLATHLIRCDHNVVLVSGVAVKRNRELLDGRWDKHDTKCAANIADLISQGKCLFYEYPLPDINELRNLLSLRKRLKKEDHSLRMRIRNNLLAKYFPELDRFYGQCETENLAIVRWCLEPGKIADMEFNKFFQMVTTRERGIAQKQRLRKIHSLSSESVGCPMGQASEFEAQVLVDKLKQVRQVIKKTEELIKDVSLGLPEYSWMLTIPGFGPYVSSIVLATIGDPFRFNNRKQVLKMSGYDLNANRSGKTSLSAVPVISKKGSSSLRYALYQAALVASTRNSYFINYYTNLLRGREREQGIKTKMRVKLAAKMLIIAWTLMKKKEPFNPNYLNKK

SEQ ID NO: 408773 - protein, 323 aa, unidentified
MPSSIGVDVSKKKFDVALITAQGKYRCKVFDNDGGGFKAFLDWIKIHVPEGRAQACMEATGVYHEELANFLFDNQVTVFVVNPLRVKRFAESEGFRNKTDEGDAKALARFVAKNDLEVWEAPSKAVRELQALVGRLESLQTMRQCELNRLDMAHSSVRASIEAVVAALDKEIEVVRALIRKTIDDDPDLKQRNDLLDTIPGLGEATIASLLAYIGRPERFKSVKALIAYAGLTPAIRQSGTSLDKRKGLHPAGHRDLRKALFYPAMAAGRFNPIVAAFWQRLKAQNKPGKVIVVACMHKLLAIAYGVLKSRRPFDASLASKGA

SEQ ID NO: 408774 - protein, 409 aa, unidentified
MKRFSKPDGRPVFVAIDIAKSRHHVLIEAADGKRTALSIANTLADFNKLADQLKSAAPRCEVALEPTGDYHRPLANFLLRRGHNVQFVSSIATHRTREALFNSWDKNDPKDAQVILHLLKGGITQHYADPLQSGYQDLQELLSTYSQVVGRKTRVYHSLMTHYLPLYFPEAEPFLGSSRSEWFLDVFLFAPCPAEVLKHSKATFLRKTVKGDEGHPTVRRRLVAEFYETAKESVGIPVKAGSISMRMFRTVLQEYIGLAKLRRQLEKEIHQHLESNADYQHLRTIPGIGPIVALTILSEAGDLRRFSHYRKFLKYCGFDLSTSQSGTQRGTPQLSKRGNARLRCAFWMAARAAVAMRRNGFRKKFDDYTKRDPQNVDLRRKAYSAVAAKMARVSYGLIKSGNEYRHLTA

SEQ ID NO: 408775 - protein, 338 aa, unidentified
MKYSGIDLHSNNSVVVISDEADRVLVRRRVANDAAAILALLAGHREELVGVVVESTYNWYWLVDALQAAGYRVHLANTAAIKRYEGLKHNDDEDDAGYLAHLLRLGILPVGYICPPAARAVRDLARKRMQLVRSRTAQVLAVENMLSRQTGAGMRSYAVQRLTAPAVEAFGFQPDVGRAMCANVAVIKTLNREIDKLEQRLHQCVRLRPEFRLLTSVPGIGPTLATLIMLEVGTIERFAAVGNFASYARCVDSARISNGKKKGGQGNVKNGNAYLAWAFVEAANFARRYCAEARRFYERKKARTNGMVATKALAHKLARACYHMLKEQQPFDVKRCFA

SEQ ID NO: 408776 - protein, 344 aa, unidentified
MEHFAGLDVSVKETSICIVDDTGKIVREVKVASEPDALLQVLKNNAYHFKRIGLEAGPLSQWLYSAFAEVNLPVICVETRHMRAVLKAQINKTDRNDARGIAQMMRAGLYRPVHVKTLRSQKLRMLLTHRKLLQSKAIAIENDLRGTLRNFGLKVGIVGKLKFETRIRELVENLPDLAVLVEPLLVVCRVLREQIAVLHRRLLVIVRDDDVCRRLMTVPGVGPVVALTFRATLDVPARFRNSRAVGAALGLTPGKYQSGESDHTGGISRCGDEMMRVMLYEAAQVMLVRSTRWSWLKAWAMQVARRRGMKKAIVALARRLAVIMHRIWVDGTEFSWSRQEAAEA

SEQ ID NO: 408777 - protein, 411 aa, unidentified
MEPLYPCCAGLDVHKETVVACVRRLDSRGRARAEVRTFGTMTGDLLALGDWLVARGVTHAAMESTGVYWKPVWHLLEGRVELLLVNAQHIKQVPGRKTDVKDCAWIAQLLQHGLLKPSLVPPQPQQELRELTRQRSQLVGEQGRVAQRIQKVLEDANIKLASVATDVLGVSGRSMLRALIAGETDVATMADLAQRKLRAKIPALQQALAGRVTAHHRFLLKLHLEHYEQLEGLVGRLSERIEEQLRPFAATLELLVTIPGVQQRTAEVLLAEIGADVRPFPTAAHLASWAGLCPGNNESAGKRRTGTMRKGSLWLRAALIQAAWAASRAKDTYLAAHFRRVSARRGRKRAAAALAHTLLGVVYHVLSRRQPYHDLGADSLDRLAPDRLAKRLVQRLERLGLKVTVEPQTAA

SEQ ID NO: 408778 - protein, 343 aa, unidentified
MEHIGIDVHKVESQICILTESGEIVERRIRTERERFAAVLGGRAPAKIVIEASTESEWVARCLEKLGHEVVVADPNFAAMYATRSRKVKTDRRDARTLAEACRLGAYRPAHRTSDRQRHVRAQLSVRDALVQTRTRYISLVGALLRREGFRIASGAAEGFAKRVEKLALPGPLKSEIAPLLAVLLSVNQQLAWVDGRLEHLAQSEETVARLCTAPSVGPVTAAAFASTIDDVNRFRNGHQVMAYLGLTPSEMSSGEKQEKGHIAKAGNVRMRRLLVQVAVSILRLRSLRTEALRTWANSIAVRRGKKIAKVALARRMAGVLYAMMRDGTCYVAAQPREVKQAA

SEQ ID NO: 408779 - protein, 342 aa, unidentified
MKQQQYVGLDVSLEQTSVCVVDDSGAIWRGKCRSTPESIHTVIAKHAPEAVRIGLESGQLSTWLFHELKARRLPVICIDARHAKAALSLQINKTDANDAHGIAQIVRVGWYREVAVKSMDSHAIRALLVARAQLVTQKVKLTNCIRGLLKTFGIVLGGGKGRRFEAMVRERIAENPMLTTIIEPMLVVLLTTREQLAVFERLVRRRAHADHDVRRLMTVPGVGAVIALAYTTTIEDPTRFKRSSTVAAYLGLTPRRYQSGEMDRAGHISRCGDAMLRTYLYEAANVMLRRSTRPSQLSLWGRALSERIGARKSLVAVARKLAVVLHSMWRDRMEFRFEQAAA

SEQ ID NO: 408780 - protein, 325 aa, unidentified
MQSVGIDVSKAKLDCCWLRDSQKNKVKCKIFKNQPDEFRHLGDWLVKNTGSQPDEIHVVLEATGVYHEAVALQLYDRGFRVSVVNPARPKKFAESMGYVHKTDKKDSVILAKFGEQAKPALWVPEPRKIRQLKALIARLEALDEDLQRENNRLEAAELTQASEIVIESLTTMLEALEAERKRLLSEIDDHIDNHPDLKKNRALLESIPGVGPVVSRMMLSVIGSRCFSSAKELAAFLGLIPRLRESGTMKGRTMLTKQGPANVRAKLYMAAVVAKSVNPDIRQHYDRLVKNGKTKMQALAAAMRKLTHICFGVLKHQSEYQPQTA

SEQ ID NO: 408781 - protein, 348 aa, unidentified
MRFYQTQHPFYCGVDLHAKSLHVCIVDQVGTIHVHRNLPARPEVFLNTLAPYRQPGIAVAAECMFAWYWLADLCAQEQIPFVLGHALYMKAIHGGKTKTDKIDSQKIALLLKGGMLPQAYVYPPAMRATRDLLRRRTRLVRTRAEALAHIQNTLSQYNLPPIGKKLGFAANRVGVAERFEEPSVRRSVEADLSVIGHLDDETREVELYLVRHAKVDDPQTYARLQTIPGVGKILALIMLYEIHDIARFGEVGNFVSYARLVRCSHESAGKKSPGKGRKIGNAHLKWAFSEAAVLMLREIPQAARFVARKEKQHGKAKAISILAARLGRSVYFMLRRKEAFDEKRMFGA

SEQ ID NO: 408782 - protein, 369 aa, unidentified
MKFYTLKAAPAASAVELKNNHKSTKAKRILVGCDVHLRGYQGARKVDEGAIGVVDNFRSEEALLLYIEKQRQQAEQVVVVYEAGPLGYTLYRKLRATGVLCYVCAPESTPQRKKRRKNNQIDARSLTSKLFNYLNGDQHALQLARVPSEAQEQQRMASRQHDQLVEERKRLGAKGNAMLLSQGMGSWSNWWRPKAWSQLSRVAPPWLLERLQIWVDVLKILDEKISQAKAALARACSGPRPKGVGALSQMQLQSEVLDWSLYSNRRKIACLAGMVPSEWSTGDKATRGSITKVGVPALRRIIVEMVWRMVLFQPQYQPVQKWQEVLKGPNPALKKKAVVAIGRQLMVDLWRLQTGRVTAQDLNLIMVEN

SEQ ID NO: 408783 - protein, 386 aa, unidentified
MRAVCGLDVHKDSVFLCILCETGEIFEKVYGVLTHELRGMCREMRRRGVTEVSMESTSVYWIPIWRVLEPYFRLKLVNPYFIRQLPGRKSDVKDAQWIAECTQKDLIRGSFVPPERIQQLRQYDRRIFDLDAEIVRKLSKLDAVMQRCNIRLSNYVSNTDTKSYKEVVRKLCEGVTAPEELIEVIFGRIINRHGRETILAALTGVVSEAEKDAMRQLRDELDLAEKHKQECQDRMLHICKTYYPDELKRLMTIPGIRERAATSLIAEIGVDMTKFQTAAHLASWSGLKPRNDESNRKIKSRRITHGNVFLRKTIIECAWGASRTKDCFFSRFSYHQTQVRRKNKMKVLVAVARKLLTAVWHVLHDQTGYKDFGAGDCDASAVKNNG

SEQ ID NO: 408784 - protein, 405 aa, unidentified
MDLIPICRSAVGMDVHLNMIEVCAIVEDASGEAQVHRRRFGGFRRDRLEMAQWIAGFAPETVVMESTGIFWKSPYAYLERLGIRALVVNAQHVKTVPGRKTDVGDAEWLAMLARAGLLRGSFIPPEPLRNLRQLSRHHQRVTAMLAAEKNRLVRVLGDAGIRLTAVVSDPHGVAARAMIDCLLDGGTPQQALAHAGRLRAPREELAAALEGEPSEEHLFVARMIRRHIDALEADLAEIERALIARLEPYQTALDILLTLPGVDLLAAAKLLVEIGEDMSAFGSAEKLAKWAGICPGNRESAGKRKSGKTAKGNRYLRALLCEIAWSAARTASQFKSRYQALAIRRGAKRAIIAIAHKLLKIVYVLLARRVPYRDSTVDYEALAVKRKAPRWIRQLKKFGLLPQTA

SEQ ID NO: 408785 - protein, 424 aa, unidentified
MNFKMQNKQNQLIERITDQHLVVGVDIAQHVHVARAVNFRGIVVGKPLSFENNEEGFTRLLNWIQELKKMKNLDSTIVGMEPTGHYWINLSKWLVKQNMDVVTVNPHHVKRNKENRDNTQSKSHKKDALVIADMVKNGYYAFVRSTSESFEKLRVLMANRDVIVKRLVSSINQINRWVDVVFPELRQVFKDVSCKGAIATLRLFPTPAELCSLQPQDIVTGWKSCMKRHSGHKKARSLLVLAKRSIGTKQALDAYKLHLGQLLEEYDLASSQLERVTQEVTNVLEQIPFVKQILAIKGISEISLAGILGEAGDLSGFAHGNALLRHAGLHLAEASSGKWKGQIVLSKRGRSRLRRYLFLATMSLVMNNPEFKALHSKNVKVKKIKKMKSIMKLCGKLARVLVGIARNGSAYKPEMIFPLEQLAA

SEQ ID NO: 408786 - protein, 363 aa, unidentified
MFTERTSVGLDVHARSVAAAAIDGVTGELFQSRLTPSFDHIGSWLSELPGPVAVTYEAGPTGFGLYRHLTEAGIRCEVAAPSKLQKPVGDRVKTDAKDAVHLARLLRLGEVTPMAIPTVDQEAARDLVRAREDCRGDLMRARHRLSKLLLRHGIVYSGGAAWTGKHDVWLRHDAAPQLITRATRLAFDSDYENVLTVKARRDRLDAAIAEMAADCEFTPLVRRLGCLRGVSTLTGFGLAVEIGDWHRFTGNTIGSFVGLVPSEYSSDSSRVQGAITKTGNAHVRRLLVEAAWHHRARYRIGKTMRDRWELAPAAARVRGDQGNRRLHRRWVKFIERRKKHTIANVAIARELAGWCWSLAMLEE

SEQ ID NO: 408787 - protein, 320 aa, unidentified
MNSTETFVGIDVSKAELDVYVRPDETHWTVHNDAEGHTRLICQLQSVAPTLVVLEATGGLERQASYALTEAGLPVVVVNPKRPRDFARSLGLLAKTDRLDAQALAHFADSVRPELRDLPDQEAQDLSAKLARRRQLTDMLTAERNRLHTALAAVKMSIEAHIAWLKEQIATLEQELDALIQANAQWRARVKRLAAVKGVGTITAYTLTADLPELGQLNRKQIAVLVGVAPLNKDSGKRRGRRFVQGGRAAVRTALYMAALSASRFNPTIKAFYVRLTDAGKPKKVALTACMRKLLTILNAMVKNGTDWDPDYARRATNVA

SEQ ID NO: 408788 - protein, 284 aa, unidentified
MAYAGLDPHKNFCRAIVCTHDGEVLKEGRIPTEKEDIEVFFSGLERLEIALEASTNYEYYYDLLESFGHHVVVAHPLKTRMIADAKIKTDKLDAKILAELLRGGLLPTSYVPPKELRELRHLVRHRIALGRLRSGLKTRIKTELRRKNIKYRGGTHCFTEKGKTELRLLENQTIDSFLTIYEAIEKELKKADRAIVEAGARHEEVRLLTSITGVGVYSALVIFSEIGDGSRFPTEDHIFSYAGLVPRVHQSGNEQYHGRITKGGLEVPAVDPGRSGASPRAAVP

SEQ ID NO: 408789 - protein, 313 aa, unidentified
MTAACAAGVDVGRDYLDVAIAPGGRGFRAANTAKGIEAIVGRLRRAGVRRVVMESIGSYGAGLVRALAQTDFQIGVVDPRRIKALRTAEGRRAKTDRLDAELIARFALIMPDVARPVPNRQALEIRALSARRRQLVEMAAMEKTRLRQVLDEAIAQSLRRTLAALAEERALVEARLQDLLNADDANLAKQALLRTVPGFGPAVTTTLMADLPELGGLDRKAIASLAGLAPHPNESGTRTGQAHIQGGRPCVRAALYMAALAAARSDKGFKAEYQALRQAGKPAKVALIAIARKLVVAANGMLKANRPWIAPGP

SEQ ID NO: 408790 - protein, 335 aa, unidentified
MSIVAETVEHVVGIDTHARTHTYCLVHTRTGAVVDTATFPTSKSGNARAISWIHRRSPGSVLAAVEGTSSYGAGITAALLEQGFDVAEVRPAARSAHAHAGKSDLLDAEAAARSAIGCDYNTLARPRQTGARAALRVLLASRSIIDQQRTANRNALTALLRSVDLDVDARKPLTDAQIRVIAAWRIGRGATAAAASGIARREARRLAVTVLEQTELLKDNHRQLHQLTEQLAPGLQDLPGLGPVTAAIIVCAYSHHGRVRSEAAFAALGGIAPLPASSGNTSRHRLSRSGDRQLNRAFDIAVRTRMSYDPATRAYITRRRTEGRTNREIRRCLIG

SEQ ID NO: 408791 - protein, 380 aa, unidentified
MSKHSEIFVAFDTSKLRNAVAIADSDRSGEVRFLGEIDNTEAATAKLVRKLTAKYERLTFCYEAGPTGYELYRQIKSLGYECLVVAPSLIPKKPGDRVKTNRRDAVSLVKLLRANELTAVWVPDRQHEAMRDLVRAREAAVMDLRQKRQQISAFLLRQGRHYSAGKKTWTKSHLNWLSSQKLEYPEQRIAFEEMMLAMRQASERLERLEQAIAVAVPDWSLAELVTALMAMRGIDLIAAATFVAEIGDLSRFQSPRELMAYLGLVPSENSTGDSIKRGPITKAGNRRARRILVECSWAYQHPPRVSLEKRQKIEAAPKAVREIAWKAQHRLNARYRALVRKSKLKTVAITAVAREFAGFIWAVGRAIGTAEAAVRSLAVR

SEQ ID NO: 408792 - protein, 319 aa, unidentified
MLSYCGVDVSKDRLDVAVLPQEQSWSVTNDAAGWITLIERLREFSIEAIGLEASGGYERGIARALCAAGMSVRHVNPYKLRQFARASGVLAKNDPLDARMIASFVAVMPTRPAQRAPEAEQLAEILAVRRQLSAEKIAAENASRLLEDAMLQRLSRRRIARLAADIALLDKRLIGIVANNPALDQRYRLLTSVPGVGVVLACTLIALLPELGQLGRREIAALVGVAPYAFDSGKLKGARCIWGGRAPVRGVLYMAAMSASNWNPVFKAFHDRLRATGKKPKVVIVAVMRKMLTILNAMVRDDLVWADSCNGRHSVPAAR

SEQ ID NO: 408793 - protein, 457 aa, unidentified
MTSRKRSRPRRDMAPVHSHAAAVDIGATLHVAAVSPRCDPEPVRSFGTFTTDLHRLADWLAQCRVKTVAMESTGVYWIPLYEILDQRGFEVVVVNARDAKNVPGRKTDVSDAAWLQRLHEYGLLRASFRPKGEIATLRSYLRQRERLLEGAAAHIQHMQKALTQMNLQLQHVVADITGQTGLRIIRAIVAGERDPDRLAALRDGRCKTPLATLRAALVGNDREEHIFALAQALELYEVYQTKVAACDERIAVVLERLQAQSPPPAVPLPPPRRAQPQANEPAVPVREALHAILGVDLTQIDGIGPYLALKLVSECGPDLAAWPSAQHFTSWLGLAPHNKISGGKVLASRTRRSGNRVAALLRLAAGAVGRTQTALGAFYRRLAARVGKAKAITATARKIAVLVYNTLSHGMAYADPGASYYEDRYRQRVLSNLRRRAKSLGYILEKAEPASTAVVVS

SEQ ID NO: 408794 - protein, 403 aa, unidentified
MKVREQIWVGIDVGKAHHHACAVDETGKVVFSKRLGNGQAEIEALIARAGKAAGHVRWAMDMTSGSAGLLLAVLHQAGAELVYVPGRLVNRMAGAFAGEGKSDAKDAFTIAETARLRHDLTPITEPHALVAELQVLTARREDLMGDWVRGVNRLRDLLASIFPALEAAFDYSTRSALVLLTGFQTPDGLREAGAHRIAAHLRTGGAWPKGIPAMVDKALAAAAAQTIALPTETAVAPLIARLAAQLLDLDREIKDLDKQITGTFSEHPHAASITSVNGFGPILGAHLLADTGGDLQTAFGSSARLAAYAGLAPVPRDSGRVRGNLHRPKRYHRGLRRVFYLAALSAIKPDGPSRTFYQRKRAEGKLHTQAVIALARRLIDVIWALLRDGREFHPSPPLTANAA

SEQ ID NO: 408795 - protein, 336 aa, unidentified
MSHYCGIDLHSNNHVVVVIDERDKRVFDKRLNNDLSATLNVLAPYRETLKGIAVESTFNWYWLVDGLQDNGFGVQLVNTAAVKQYDGLKFIGDHGDAFHLAHLMRLGILPTGYIYPKEQRAIRDLLRRRMSLVRSASTQLISVQSQIWRSTGIRIKSGDLRKPDFSPPHLDKYTLLAVGAGLKVYQAIQQEINVLEQSAHQAVKLTDAFIILQTVTGIGKILGLTIMLETGDIHRFAGAGNFASYCRTVDATRTSNGKKKGTGNAKAGNKYLSWAYSEAAHFAVRYEPLAQRFYERKKAKTNGIIAIRAVARKLARATWMMLKHQVPYDARLMFPN

SEQ ID NO: 408796 - protein, 451 aa, unidentified
MSKDRTRSKPSGLPIIHPFAAGIDIGSRFHVVAVSPDLCDEPVQTFQAFTGDLQRMADWLVATGTKTVVMESTGVYWVAAYEVLESRGLEVILVNAREARAVPGRKSDVNDAQWLQRLHACGLLRASFRPGRDIAELRAYLRCREKHTDYAAAHIQHMQKALTFMNIQLHHVIATITGVTGLRIIRAIVAGERDPGRLAAMRDVRCKESLETIRNALVGNYQPEHVFALKQALALYDFYQQCIDECDVEIERAVAILNIAHSFPEAPLPKAKHRNKMPSDPNFDVRTAMYQLAGTDLTQIHGIGPFLALRLIGECGTDLSRWPTAKHFTSWLTLAPGCKISGGKVLSSHTRKTSSRITVALRLAAVTVGRSNSALGAFYRRLAGRIGNAKAVTATARKIAVLFYNAMRYGMDYRDPGADHYEQQYRDRVIKQLHRRAAQFGYSLQPHDSPA

SEQ ID NO: 408797 - protein, 395 aa, unidentified
MKKIVHYIGLDVHKDSIAVAIAPQNSAEVRRYGIIGGTLQAVDNLLKKLAKPNLELRFVYEAGPCGFVLCRHLRSKSIHCDLVCPSLIPKKASDRVKTDRRDADQLARLYRASELTPIHVPDQEDEAIRDLIRARTAAVCDQRRARNRLKGFLLRLGFRYTGKTSWNDAHKRYLSGLLMPRPAQQIVFQEFIHAIDDAAERVARLNTAVADALPGWKWEPVVRALMSLRGMQELSAMTVIAEVGDLSRFENPRSLMHFFGLTPSEHTSANKRVQGPITKCGNAHCRRVLTEAAWHYRLKPLVSEAMQKRQEHQTKEVRMLAWKAQERLHKRFKHLAAHKKSVVAVTAIARELVGFVWAIACKVKPAQKPPAPEVIRTCQGKVYRLNPQKKMPKTK

SEQ ID NO: 408798 - protein, 430 aa, unidentified
MDEANRNRLEEFRQLRQEIRQSEEHLIVGIDIAKDRHHAFFGTATGKVLLRRLVFGNDGEGFRKLLDQAEALRVRHGLTKVVYGMEPTANYHKPLGEYLIHLGRTVVLVSGVMVKHNRDSLDGRWDKHDDKDSANVADLISQGKCLYYEHPSAKLRGLRGLLSLKRRLKRQEQSYRVRIRNHLIAQYFPEMDSDYGRSEALGLAIVRWCFPVSQITQIDVGPFIERVTSRRISMERRRRLEAIWEKAGESIGCDVVPGLDHEARVTVEGLKQIREMIKETEDKIEELCKEFPEYEYLLTMPGFGPDVSAKVLGAVGDPDRFLNGRQVLKLAGYDLSADRSGKSSDKAVPKISKRGKADLRYALYQAAFIASTKNRDFMLYYASKIRGREKEKGIHTKMLVKLSAKLLMIAWTLMKKKELFNPAYLKAELG

SEQ ID NO: 408799 - protein, 368 aa, unidentified
MGRYVGLDVHSKHSVYAIQDERGQLLGEGSVPTTIEGLQLLRARYELQEATRVALESGTMAFFVARRLTRLGFAPLVVDAHEVRQKALRPNQKSDRRDALELCEGLRRDLYRTTVHVPPEAIERLRETLGRRRHFVRLKTMEVNAVKRLLRATGLPISTRCLGTPVAWDRLVRALEVEPGLHAFCASHRAVWQCAHEQVAVLDASLREQGHAFQSDLTRLQTVPGVGPIVATTMLAALSDVSRFPSAKHVASYAGLVASTHDSGESVRHGHITRRGSSEMRAMLCEAAHHAGRPSSPFHPYFTSLCARRGHKMAVVAVAHRLCRIMFTMLRKGEDFDITKLGIERGHFEHTVVRQYRRKAAGTRKVSR

SEQ ID NO: 408800 - protein, 344 aa, unidentified
MTYYAALDVSLRLTHICVIDDDGEIVAEGKTDSEAADIVAFLDELKLEIARVGLEAGTLTQYLTYGLQFAGFDVVCMEARQVKNALSAMRNKTDKNDARGIAQLLRSGWYRKVHIKSMDSHHIRALLSSRKAVLDKCVDLENEIRGLFKVFGIKLPPRLGHGSFDAKVRPLIEADGAFRESLRPVLDARLVLYRTFRELDNRTRKAAHADPVCERLMTAPGVGFVTALTFKAAVDDPTRFKRSRTVAAHFGLTPRRFQSGELDLDGHISKCGDAGVRSTLYVAANAMMTRSSRWSALKAWGMRLAKTRGHRRAVIAVARKLAVILHRMWIDDAQFRWGTEPARS

SEQ ID NO: 408801 - protein, 371 aa, unidentified
MEHTRFVGLDIHKERISISVAESGRSGTVEYLGEIANDPGAISKLCERLRHSGKALAFCYEAGPCGYGVHRQITRLGHRCDVVAPSLIPKKPGDRVKTDRRDATMLARLHRAGELTAVWVPDADHEAMRDLVRLRSVVRQIVTRARQHLQGFLLRHGRKHGRGTAWRMAYRRWLSTLTFEHPAQQIAFQDYVDAVTDGERRLQHVEEQISRLLPEWNLRPVVDGLQSMRGISLINAVVLVTEVGDFTRFSNPRQLMAYFGLVPGEQSSGEIARRGGITKTGNSHVRRALIEGAWAYRMRARIGRHKVDRIEALPKAVRDIGWKAQVRLCARYRRLAARGKSANIVNVAIAREMVGFIWSIACTIQSGGKAG

SEQ ID NO: 408802 - protein, 449 aa, unidentified
MSTTPTPTLPVLDPLAAFVDVGSEEMYVSIAGGPPEVFGTFTTELHRLRDWLKERGVKSVAMEATGVYWLPLYGVLETAGFEVVMVNGKYTRNLPGRKTDMKDCQWGATLHAHGLLGAGFVPPAAIRRLQDYLRLRADHVTSAGASVQHQQKALERMNVKLHDVISSLAGTSGQNVIQAILAGERDPERLLALCDVQIQKKKAERVKESLRGTWAEEHLFALRQAVEDWQHFQRQIAACDRQLEAVLREISGPEEPPTGPKAKATGAKRPGVNAPEIEGLHGLLCRLCGGKDLTVLPAHTDYSLLQLLGEVGTDLTKWPTEKHFTAWLGRAPGSHQSGKRKKSVGRKRNRAGRLFCVMGRSLARSKHIALGGFYRRMAARRGGLVANIALARKLAEWFWRVMVKGVSYVEQGLAQYEKQVLETKRRALQRLAKQLGQVVMPNPTARKNA

SEQ ID NO: 408803 - protein, 293 aa, unidentified
MLIHYIDIAKRNFVIAVSSLSKTKTETNNPKGIAHTIEYLKKHKVALVVTESTGGLEIPAAKAIRRAGIAMIIANPRQTHQFAQSQPLTKTDAKDAKMPAFFAQMKAQKEDWQTMPYHPPTEAEEVLEALVNRRNQPADMRTAEKNRLHQVHETQVGSVKQLIAHFDRLIDELDKQIDNHTRTHFDGKAQVAEQIKGIGSITTATLMAMLPELGRLSHKRIASLVGIAPHPRESEETKFKAAALAEGLRCVRHCIWLPWQRHVLNRLFGISTNARCPRVSRIRLPLRHVCANC

SEQ ID NO: 408804 - protein, 413 aa, unidentified
MQVMYKRCAGLDVHKKSVVAHVRLWEGNELHEETRSFGTMWGDLWQLADWLRAEEVTHVAMESTGVYWQPIFNVLEGDFEVWVVNAKHIKHVKGRKSDVRDAEWIAQLMQYGLLAPSFIPEEPQRELRELVRYRTHLIEERTREVNRVHKALEDANIKLSSVATDIMGVSGRLMLQAIIAGKDDPAALAQLAKRRMRSKIDELERALTGRVKDSHRVLLRLHLEHIDELNAKLEQLEEEIEKLLPPFDQDDLIDRLDTIPGVDRRIAQIIIAEIGVDMSRFPSADHLTSWAGLAPGQNESAGKNRSSRTLKANRYLRPALVQAAHAAGRTRNTYLGAKYGSLSGRRGKKRAAVAIARKILVIVHHIIREGTVYKDLGADYLDQRRRETVTHYAVRRLEKLGYKVTLEPLQPAA

SEQ ID NO: 408805 - protein, 350 aa, unidentified
MQTYVGVDYHRKFSYLTVLDESGRVVREGQVNNTREAVEGFLARVQGNGSSAAVLEATRNWTVMYDWLEELVDEVHMAHPLKVKAIAEAKIKTDRIDAKVLAHLLRTDLLPEAHVASPQAREVRSVLRQRMFLIRVRTMVKNRIMGMLDRYPELMVARPCKEVFSQEGKEWLKQITLKETDRRMVEEDLKLLEELESHIEQSEELVEKLAEGDERVELLKTIPGIGKFFSLLIVYEVDDIGRFAHEKKFFSYMGLVPSTYASGGRTFHGRLTKQGNKYLRWALVEAVWPAIRTDGGLRAYYERIKKTKGANPAKVATARRLATIVYRVLSQRRPYLPHWQEGQRGGSRLP

SEQ ID NO: 408806 - protein, 406 aa, unidentified
MRSDTITAVGIDVSKGKSVVAIRRPGGKVVKPPFLVNHNAEDFRKLILLMHKVGGNIRIIMEHTGMYWRPIAIALQQAGFFVSVTNAILIHRFSDNSLRNVKTDKADALKIANYGLTFWSELREYSVEDETRQMLKTQSRLYERTSGVSVALRNGLISLLDQTFPDINKLLQPTYRNIRGHFKWVDFVKHFWHRDCVAGMSSNAFMAAYKRWCEKSGYRYSSVDAEKIRQYAKGTVATFPKSESTKVLIVQAVDSLNAVYDSLQILRDEMYRLASCLPEFHVVMAMQGAGEITGPMLMAEIGDVRRFTSKNALVAFAGVDAPPYQSGAFESKSRHVSKRGSPHLRRTLFQITTVVLRRADPQNAVYSFVDKKRSEGKHFYVYMVAGAAKFLRIYYARVKECLNNAD

SEQ ID NO: 408807 - protein, 416 aa, unidentified
MNAVGIDVSSRKSTVAVLRPLGEVVCLPFDVTHDIAGLASLAEKLKAIDGETRVVMEHTGRYYEAVAKALHEAGFFVCAVNPLLIKEYGANSLRRVKTDKADAVKIARYALDNWADLRDFTPMDAIRYDLKTLNRQFQLASKQRTASANNLIALLEQSFPGIRKCFDSPVRSDGTQKWVDFAHSFWHVDCVRKQPFPAFCERYRKWCKRHAYLFKQSNAEEVYALAKRAVVLTPKSKVVKVLVQEAANQLISISRSVEVYRAEMDRLAAMLPEYPVVMAMYGVGKSYGPQLMAEIGDVRRFERKQALVAFAGIDPMPNQSGDKNVRSNKSSKRGSPYLRKTLFNVIRTYLQCAPQDEPVFQFLNRKRAEGKPFYVYMLAAANKFLRRYYAKLRDYFASLDTLQPVAPIPTILKATL

SEQ ID NO: 408808 - protein, 325 aa, unidentified
METKKSCCGIDVSHTTLDVCYQNNLGELFHLQVGNNIKGFAKIIEHTGVNYHFVMEATGVYYIRLAFYLHQHGCCLSVVNALSIKRFIQMHLERNKSDKKDAKWICRYAIDQCPPYWEMPDSAYFECKQLYNTIREYTEQIKRFNNQLHSIKLLPVPSKDTIRSLEKMNKQLAQEIDHLEIKLEAILQQWQPEQLKNVSSIKGIGKRATAMLIVFTQGFKNTHNHRQLISFAGLSPTEYSSGSSIQGKSRIYKKCGKNLRDVLYMCSMNAMKTNPACKALYERLRANGKTGKQALIAVCNKLLKQVFAVVKNNTLYQPNYCSAKP

SEQ ID NO: 408809 - protein, 358 aa, unidentified
MNTSMLNSPKSNYKDNLDYYDHYIALDWSQANVALARMTQKSHRIKVVEWRESDLKALKEYLFSLKGKKILTIEETTSSHWLYVELTDVVDRIVICDPYCNHLLSDGPKTDKHDAIKLCNLLRGGFLKEVFHGCDKLYHLRHLLSAYEDLVKAGVRVQNQRSALYRARGMRYSKCNNTEQQERLDRTGHYKIIFNWQESMIEKYREDKAAFEAEIKKIVNGQSAVKNIMALPGIGYINAFKILAVVIQPQRFAKKGSYLSYCGLVWLEKSSGNKNYGKRRPRYNRLLKEVYKNAAYTAIQGGHNPVYEYYQTLIAKGLTDKQAHLMVSRYLAKVSLSMLKNGRKYEPYRWRKDEITAA

SEQ ID NO: 408810 - protein, 416 aa, unidentified
MNAAGIDVSSRKSTVAVLRPFGEVVKLPFDVRHSAEDLAALAAQLKSIDGETRVVMEHTGRYYESIAKVLHEAGLYVSAVNPLLIKEYGNNSLRKVKTDKADAMKIAKYALDNWTELRDYTPMDTIRYELKTLNRQFQLASKQKTATANNLIALQEQSFPGIRKLFDSPVRSDGTQKWVDFTHDFWHVDCVRSDSQNAFAERYRKWCKRNRYQFSMEKATEVYAVAKSAVVLVQKTSVTKTLVQEAANQLTAISRSVETYRSEMNKLASQLPEYPVVMEMYGVGESLGPQLMAEIGDVRRFERKQSLVAFAGIDPAPSESGDYCSRSNRTTKRGSPYLRKTLFNIMKVHLQRAPADEPVFQFLDKKRAEGKPYYVYMTAAGNKFLRRYYGKVMAYFSTLEGLPPVDMDSTGLHHAE

SEQ ID NO: 408811 - protein, 315 aa, unidentified
MRSTVAQSVGVDISKDTLDVAIHPGGESFRITNNPEGHRALIKRLKGFDIARIVFEATGAYHRLFQQAMVEVGLPWVKVNPCQARRFAQATGKLAKTDRCDALMLARMGAVLDLETRAPASKTVEAMRELVNARDALVKDRVAALNRQAIAVSPLIKRQLAQRLRQIDGQIEAIDRRLKTLRNADSDLCQRFDILTSIPGIGEVTANVLVVETPELGRLEHAQAASLVGLAPVPRDSGQTHGKRSIRGGRPRARQALYMPALNAIRLNPEFKAKYEAMVKAGKPAKVAIVAIMRKLLILANALIRDRRKWAPANP

SEQ ID NO: 408812 - protein, 404 aa, unidentified
MWYAGIDWADDHHDAIVVDDGGRVVLTLRVSHTPAGLARLTTALEQICGATAKEQLVCIVETNRGLLISALVEAGFPVYPVNPKTVDRRRNAAGVKTDQIDAYLLAKTGRSDLADLRRLRPDSPLIQELKALTRDQDSLIQSQTRLLNQLTACLKAYYPIALELFSKLHQRSTIAFLRAYPTPEDARAASVEAIAAILKAAGHTRAAQAAATLHQQLHQPHLVADAVTTRTKARLLLALLAQLQPVMDQIAEYDQEIERLFLSHADSALFASLPRAGKRLAPRLLAEIGDERTRYADAAHLQALAGTAPVCFESGKYAKAHRRYACLKPLRNAMQHFAWQSTLQEPWARAYYQRKRTEGKSHSVAIRTLANVWLRIIYAMWRDRTPYVSATFEAAQQQKLRQAA

SEQ ID NO: 408813 - protein, 300 aa, unidentified
MFVGIDVSKNHLDVCLAPARPASQRPNTPSDAESLVLELKGASLVVIEATGGYEQTIAQCLLKHQIPVSVVNPKRVRDFARATGKLAKTDKIDAQVLSLFASHFHKELPLYKTTPENIALKELVSLRSDLVQSLVQYKNRLKQACQAVRQHVKQMIKTLTEQLKALSKEIDTLLKSLPEAELLQSVTGIGSVTTATLIAQMPELGRLNGKEIAALAGLAPFNRDSGQYRGKQFCQGGRKPVRNILYMAVLCARRFDPKMKAFYESLIAKGKPFKVAMIACARKLLVILNAKLRDFYALTV

SEQ ID NO: 408814 - protein, 437 aa, unidentified
MFIRIAAGIDVGGSEHWVAVSPERDPEPVRSFGCFTADLRAMAEWLIERGVGSVALQSTGVYWMPVFEVLEQHGLEVFLVNAQHTKNVPGRKSDVQECQWLLKLHTFGLLNNSFQPTDEIRVARALWRQRGNLVADASSAIQRIQKVLIEMNVQLSNVLSDISGVSGMNIIQAILDGERDPWELAAWAAPGVKATAEEIVKSLEGNWRQELLFVLRQQVELYRTYQEKIRDCDLELRRHLESLGSKVDLEAQPLGPKPKGKKSGRNTPRFDLRTELYRITGIDWAQVNGMDVVTAQTVIAECGADLSAFPSEKQFTSWLGLVPTNEQSGGKILKRRTRKVVNRAAMAFRNAAMTLLRSQSYLGAQYRRLRTRLGAPKAITAMARKLACLFYRLIKHGQQYVDKGMEYYEARYREQQIRSLLKRAQKLGFQLVTTKAG

SEQ ID NO: 408815 - protein, 341 aa, unidentified
MSEITTIGLDIAKNVFHVMLCDSRGKVAKKRMLKRNEVLAFFARLGPCLIGMEACASAHYWARQLTALGHEVKLVPPQYVKAYLRGNKNDYNDALAISEAVTRPQMRFVAIKTPEQQDLQALHRLRERSVKMRTALCNQIRALAGEYGLVCAKGVATLRRQIPRWLEDSENGLSDFFRRLLSRSYQQLQALDEDIDFYTRELKRYSQQDDACQRLQTIPGFGPIVASAFHSHVGHGEAYRRGRDVSASIGLVPRQHSSGGKDTLLGISKRGNGQLRSLLVHGARAVVSRAEKKDDPLSRWINKIRAERGVNKATVALANKLARIGWAVLAHNTVYKAEARA

SEQ ID NO: 408816 - protein, 348 aa, unidentified
MKILALDLGKSKSAVCILDTAEMKERYTTVGTTPFELTILLERQRPDRVVFEVGTLSGWVHDLAVRQGCMVQVANPNHEGWRWRNVKHKSDRLDALKLAKLSVAGQLPTVHMPASAVREHRALIQYRSQLVGRRTRIKNTIRSLIARQGRGMASGAVGWTLVEIDKLRQWSRPWDQADGEELWRGQLHEELQALEQIEQQLRRVEHKLDALGRGDERIVRLQTIPCVGPRTAEMLVAVLDDPHRFKSLKDVGSYVGLTPRQYQSGQMDRSGGISKQGHRQLRRMLVEVSWLALRYNPPLRAVYERLCRGSPSRRKIAIVAVARKLLIIAWAMLRDGTAWRPRTVCNAA

SEQ ID NO: 408817 - protein, 321 aa, unidentified
MNKDKEIYGIDISKSVFDVYSESTGHVQLNNDEKGFKSLLKTLPKKALVVMEATGYYHYRLAQFLNKKGVAVSVVNPLSVKRFIQMKLAKVKTDKSDAKAICEYGTKNELPMYNALTDVQSECLQLFRLLDNYLKKRTQTKNKKHGEEVLGIPSNYVYRSLKRDLTHLDKEIKGIEERLLELVKQDQQHQLTLLKSIPGMGVKTALFLIVVTDGFKKFETASQLCSYVGITPTIRESGSSVRGRSRISKVGNKKLRNLLFLCAFSACKHNKACREIYERIVAKGKSKKLALIAVSNKLLKQAFAIAKSGLPYDEDFVSKLA

SEQ ID NO: 408818 - protein, 394 aa, unidentified
MLYLGIDLHKTQITINLRNENGDVIQTGQIRTDHDSINDFFAKLVKRAGKTRGFMAIFEVCGFHDWLYAKLKQCCCKEIVVIQPDNSARQKTDRRDANALCELLWNNRKRLRDGARPNGIQRIYLPEATDAQIRQLVNLRTFFIAQRTKIVNKVRGLLRKHNIEQDAPSQKRYGTQKNRCWLEKIVLPIADRIEVDIHLKLWKEYDEQILSVESQLAKYYEGHPALYRLLSVPGISAMGAITLLSRIVDITRFRTPDSLANYFGLTPGCHNSGEATQRLGSITKAGSRMARCVFNFAVNHVIRKCPQMKIWHKKIKMRRGAKTARVAVMRWLATIVWHILRWDKTYQFHYEPPKSTQKKDDLRSSREVLEGMGNKNHSIIKGKTPLNRRSKTKA

SEQ ID NO: 408819 - protein, 339 aa, unidentified
MQLYAGLDLHSRNTYIGIMDKEFKRVFNKRVANKLPLILATLKPFQNQLKGIVVESTFNWYWLIDGLMDAGYHCMHLANPAAMKQYEGIKHTDDQHDAFFLAQMLILGILPQGYIYPKEDRPVRDLARKRLFLVRHKTSHILSLQSLIARCSGQRVSANEIRKFTVEDLQQLLEQEYIVLSAQANLDTIVFLKQQIQQLEKAIKNKVKLSKAFQQLLTVPGIGLILAMTIMLEVGDIGRFHQVGNFASYSRCVSSQRLSDGKSKGHGNRKNGNRYLSWAFTEAAHLSRRYNERFRSYYNRKVAQANTSLATKALSNKLARICYYIMRDQVPFRENLLSQ

SEQ ID NO: 408820 - protein, 372 aa, unidentified
MNYNTVYVGMDVHKESFTLCSCKYEDEKASHYQRTPASYKNVLRYLAFLRTIYGEDTRFVCGYEAGCLGYSLYHQLENFNVECVILAPTTMLEQRSKRRIKTDKRDAEIIARSLAQHNYSPVHIPTETDNQTKEFIRMRDDHKAELKKIKQQILSFCLRQGYQYDGSGNWTAKHVKWLRSLKPAGLYKEILDEYLLTYTILTDKLNRLDQRIEELASKEEYKESVSKLTCFLGIKTHTALSVIVEVGDFQRFVSARKFAGYLGLVPGQHSSGDDRNGLGITKAGNTHVRRLLVESAQSYTRGKIGYKSRVLRSRQAGNSPQVINYADRANERLRRRYYQMVLKDGKKYNIAKIAVARELACFIWGMMTDNIY

SEQ ID NO: 408821 - protein, 386 aa, unidentified
MQKLNDLSRCLTPLEPDSTLIAVIEMSLSSWLVAGIVPGVERQPLKKLAVDESVLLKLLHRWREEAEKAGYMIKRITVAFEAGRDGFWLARWLRARDIEVHVIHASSVAVSREHRRAKTDRLDTELLKRAFLGWLRGERDHCKMVAIPTIIDEDGKRPNRERESLVGEQSRIINRIKATLVRLGIRGFNPKLKKAAERLEGLRTPEGEPIPPNTLSELYRDMERRRLVRDQIRQIESARLDRLEHAPGEGAHAMVRLLARVMGIGIETADMLVQEVLSRNLRDRRAVARYAGLTGSPDESGKKRREKGLARSGNPRVRRGMIQLAWRFLLFQKDSALAQWFRARTENARGTRKTMIVALARKLLIALWRLVREGVVPDGVILRPAQ

SEQ ID NO: 408822 - protein, 359 aa, unidentified
MNSVKYVGMDVDQATVVVVIEDSKGKFLMEAFVPCSSGDIREFFKTIKGTIHVAFEEGAQAAWLYDLIQPLVAKVVVCDPRQNKLIQSGKKSDRIDAGKLAKLLRLGELHEVYHGERTTRGLKELVRAYECLVEDTARTKNRLKGAFRGRGIRCRGKNVYHQAERKEWMGKVDIAAMGLRVMGLYEQLDFLSKLREEAKKAMLAEARKHSANKLLITVAGLGPVRSAQIIATVGTPHRFRTKRQFWPYCGLGVVSEASGEYEIVENKPRRRKKPAQTRGLNKNFNRRLKAVFKGAAKSAIVGEPFKQYHQRLVDNKIREELALLTVARKIAAITLAVWKKGEKFDSDRVNQAAQGTGNE

SEQ ID NO: 408823 - protein, 358 aa, unidentified
MRIIGCDLHARQQTIAMLDSDTGELEEKTLEHEGDTVREFYSALRGPILVGIEATGSMQWFLELMEELGIECRVGHPQKIRKAETRKQKHDRRDARLLLTLLAENRFPTIWMPSSEQRDLRTLLRHRHQWVRLRSRVQHTLQSMALNHGLRRGRSLWSQAGQDELRALPLAPHASERRKALMTLYPGLQESIDQLDQQVSQQVQQHPRARRLLTHPGVGPITALATEVFLGDPLRFSDGKALASYIGMIPSEHTSGRRQRLGAMSKQGNALLRYLWCEAAMHAVEGDPDLKRFYRRKLVQKGLGKARVAAARKLGIRLWIMMRDQIDYQEFCRRGKARQESGRVRAGMPDLDSGPAAQ

SEQ ID NO: 408824 - protein, 416 aa, unidentified
MEIEHTHCAGLDVHKKTVVAAIIVPDGQGGLRKEVRTFGTMTVDLLGLSDWLLSFRVTHVAMESTGEYWKPIYNILEENFEVLLVNARHIKQVPGRKTDVMDAEWIADLLRHGLLRSSFIPPVGQRELRELTRHRTNFVRERASLVNRIQKTLESANIKLASVASNVMGVSGRAMLEAIVAGTANANEMAGLAKGRLREKREQLDKALDGRVKPHHRFVLSELLCQVDSLDESIARFDAEIEKYCHPFEKEVELLDTIPGVAQRIAEVIVSEIGNDMSRFPTADHLAAWAGVAPGNNESAGKCYSGTTRHGDRALTSALVQAAHAAARTRNTYLSAQYHRLAGRRGKKRAIVAVAHSILVISYHIIQRKEPYRDLGGDYFDQRRPEATAKRLLIRLQHLGYDISRIEQTATLPTVA

SEQ ID NO: 408825 - protein, 359 aa, unidentified
MKCNPAFATIAIDLAKSVFQVLAVDAHGNVLESHRLSRSAFIAFWHNRAPVRVVMEACGSAHHFGRWLSSLGHQVTLLPAQYVRPYVRRSKTDAADCLAMIEAARAIDLKPVPIKTELQQTIQLLHRARQQWQETRTARINLARGLLREFGIVVPEGAERGRQAMRTALGHEALDQRIRDLVASLLDEIRALEQRIADVDRSLASTAKDDPVVAQLESLPGIGWVTATAVRASIGDIHRFKTGRVLSSWLGFTPKERSSGSTRQLGRMSKCGDVYCRTLLIQGARAVLAAAKRAQAAGKPLDRLRAWALALAERRGFNKAAVGLANKLVRILWATWHHARSFDGDYGKRFDQEIAMTNA

SEQ ID NO: 408826 - protein, 312 aa, unidentified
MTEIVCGVDVSKRRLDAHIEPLGRFQSFANDADGIAELAAFCRQHAVQLVAMEASGGCERRAFLLLWEAGIACALTNPKSVRRYAEAMGVLEKTDRLDAGAIARFAIAKGLKPTQPPSPAQQRLKALVVRLRQVTDDLTVQKQRRSSAASEEMLESLDEVIALLKRQARRLEGEIASLIDDDPLWSCLDAALRSTKGVANRTVARLLAELPELGVYSNKAVAKLAGLAPLADDSGARAGRRHIRGGRAGIRSILFLVAGVVARFDASMEAFRRKPTEAGKPKMVVRTALARKLLVRLNAKAREARQKYALAT

SEQ ID NO: 408827 - protein, 416 aa, unidentified
MAVTRWVGRAVGLDVHREFCELAICEDGRVRSGGRVASTPEGLGVLARSLLPSDRVALEVTGSCWEVARILEPRVDRVVVVSPDDTGIASARAKTDRLDARQLASLLWKGELEAVWVPDERCRILRRRLARRGQLMRARTRSKNEIHASLQRRLQAKPPCSDLFGVKGRAWLAALQLPAEERESVDAAMRHIEFLDRELAAVDRLIAQQALSWPEIRRLMSVPGVNLICAASFIAAVGNANRFLTSRKLVAYLGLDPRVKQSGEGPARSGRISKRGSPSARWALVETCWSVVLQPGPMRAFYQRTKARRGHGKAIVATARKLAVLCWCMLTRSEDYAHQQPTLTRKKLRRLEITAGAPKYTRRAVGSWSTNLLMRQAERELALQAEASYKRMVQDQRAGAPARKSGASVTPERAQV

SEQ ID NO: 408828 - protein, 360 aa, unidentified
MNRTTIAVDVAKTVFEVAVSEHPGQVRERHRLSRAGFRQFLAERPPATVILEACSSAHHWPRQAQSRGHEVVLVPPHAARPYVLRNKTDRTDAKGLLEAFRNDDLRPVPVRSETQQALAALHRLRSAWAAARTARLNTLREILREFGVLIPAGAHHVGPHVRALLEDVDAGVPGLLRVALGEAIREIGELEERIRAIERQLATAAEPALVVRQLRTIPGIRVLTATALVAAVGDVQRFPSARHFASYLGLTPREHSSGQRRHLGAISKQGDTYLRMLFIHGARSVLHHAKSKTAPTTDRLRTWALQVERLRGHNKAAVALANKLARIAWAVWRNGNDFAAVPAVSPASPASRTSSPEAAT

SEQ ID NO: 408829 - protein, 343 aa, unidentified
MEHFAGIDVSLEQSSVCVMDATGKIVREAKVASEPEALVRFFGGLGFPVVRIGLEAGPLSQWLHAGLSEAGLMTVLLETRHVKAALSAMVVKTDRKDARGIAQLLRMGWFRPVHCKSADAQEVRALLVGRKLLQAKLHDVELSIRGILRGFGLKVGKISKGQFAARVQELIAGQVMLETVIGAMLTARASLQSEFMRLHRKMLAIVREDAVCRRLMTVPGVGAVVALTFTSAIDDPARFSSSKAVGPHFGLTPKKYQSGETDVIGAISKTGDALVRGALYEAAQVMLTRTTSFSTLKRWALEVAKRRGMMRAKVALARKLACVLHRMWVDGTDFRFGKETATA

SEQ ID NO: 408830 - protein, 369 aa, unidentified
MPKLKVRYVGLDVHKDSIVIAVAEEGRGEPWEVGTFPSDWASLDKTLRRLAAGFVLKLCYEAGPTGFELHRRLVEAGYDNQVVAPSLIPTKPGDRVKTDRRDAANLARCHRSGNLTAVYVPDPDTEALRDLERAREAAKNAERTAKQQLGKFLLRQGRRWDGGKNWTLKHLDWIRRQVFEHEAHRRVLRDYLKALEDATERVNRLTDDIAELIAESALAPLVTSLQAMRGVATISSAVIAAELGDLRRFKSAAGFMKFVGLIPSESSTGPRIRRGPITKTGNRRVRRILVEAAWHYLRPPAMSRALRLRNANASDAVRKIAWKAQKRLHRKFRHLIYDKGKPSQVAVIAVARELAGFVWAIGREDRLTA

SEQ ID NO: 408831 - protein, 370 aa, unidentified
MQNTIYVGLDVHKATVSVAIAEDGRGGEVRAVGTLANNSDQIAKLADRLGKGGRRLHFCYEAGPCGYGLHRQLTGLGHDCMVVAPSLIPMKAGDRVKTDRRDAVMLAKLHRAGELTAVWVPDDAHEAMRDLVRARATSRQVLTKARQHLQGFLLRHGRVYSGKKGWTRMYRRWLSQVRFAHPAQQIVLQDYINTVTDAEERVRRLTGQIEALVPQWSMAPVVRAFQAMRGVALVTAVTVAAEVGDFSRFKNPRQLMAYLGLVPSEHSSGTKVRRGGITKAGSTLARRTLVEGAWTYRLPARVSNTLKGRIEPLPKAIRDIAWKAQVRLCARYRRLSAAGKLRTVVTTAIAREMVGFLWAIAREVQIGAVA

SEQ ID NO: 408832 - protein, 332 aa, unidentified
MNMHLQGGVAKGGVRPNAGIDVSKQHLDVCCAGDARRVVNDARGWDELTAMLRSARVDLVVVEATGGYERGLVCALQDAGLCVARVNPRQSRDFAKSMGVLAKTDQVDARTLRDFADVLARHANRSQYITPMVEPMRQQLEELMTRRRQLVEMRVAEHNRLEHAGPRASRSIRSVLKLLDKQIVAVDQHIDDHMDRHFGAQRDLLDSVKGVGPVTILTLTAALPELGRLDRRQIAKLVGVAPLADDSGHRQGKRRIWGGRAQVRAVVYMAAIVAMRHNPVIHAFYERLVAAGKPKKVAIVACMRKLLTILNAMLRDQAMWNATRHLQPSIGS

SEQ ID NO: 408833 - protein, 377 aa, unidentified
MRTGIHIDIEALRLTIKVLNVFAIINLIHKFMKTAENLFEIFVGIDVSKLTLDVTVLNPHTQKLSHRVFDNSDEGYLKLKNWLSVHHEVVFPRTLFCLEHTGLYTRSIDRFLRGQEAYVWMESSLHIKKSLGLTRGKNDKIDSQRIAEYAYRFSDKAVIRDHCPSGIQILRDLLTTRDRLNKSLKSIMVSINELKRVDIHQAINLETLQLAAIRGLKSSIKEVEEAMLETIENDNQLKVHCEMATSIPGVGKILAIKLMVYTQVFTRFESVRQLACYAGVAPFEHRSGTSINGKTGVSKFANMDLKSTLHLASLSAIQYNPDLKAYYHRKVNEGKSKMSVINAVRNKLLARIIAVINRQINYSPFSDHGLPNISFLY

SEQ ID NO: 408834 - protein, 430 aa, unidentified
MKSNTQNAKIEAITEKTLVLGIDVGSETHYARAFDYRGIEYSKKPFKFSNTEAGFATFKEWILDLKERHEKDKVVPGMEPTGHYWFNLGKFLQDNEMKPVLVNPHHVKKSKELDDNNPTKNDRKDPKVIAGLVREGRYMIPYLPDGVYADLRTASNIRFQLQAELTRIQNRISRWFNIYFPEYKTVYGKPDAKSGILILKAAPLPEDILTLGIDGVNQIWRDAKLRAVGKARAKTLIEAAEHSVGSKEGAVAARMEIRMLLEDYESRNIRLQEVMTLIEGLVKQIPMAEKLLEIKGVGIRTVSGFLAEVGDISRFNNPKELQKLAGLALVENSSGKHKGETTISRRGRKRLRYLLFEVAMSLVAKNPEFRELHNYYTTRRLNPLKKMQSLMAIAAKLIRVFYVMLTKGVNYDPKKMVNDIKRPAVYLQAA

SEQ ID NO: 408835 - protein, 350 aa, unidentified
MIIIGADYHPGFQQIAFVDMETGEFQERRLEHREEAEKFYRDLRTQGATVRVGMEASGHARWFERLLGELRFELWIGDAAEIRTKRVRKQKTDRQDAELILRLLVEDRFPQVWVPSWENRDLRQLLWHRHRMVQARTRIMNQLQAVALNEGLRCKKRLWRDAGREQLGSFQLAPWASRRRHDLLELLDRLTPTIAELTQAIEQAVERCPEARRLQTHPGVGALTALAFVLIIGRAERFQCGKQIASYLGLVPLEESSGQRRRLGHITKQGNSLLRLLLVEAAQVTVRSDQEWRSKYFHLAMRRGRKIAKVAMARRLAVRMYWMWRKGWDYEQLKKFGSHAGQPGNRDGVR

SEQ ID NO: 408836 - protein, 384 aa, unidentified
MNKHSMVFIGLDTHKEFHEVAYCEEQRGATPVHYGRIPSSKVSVKKLLRQFESKYPGATLHVVYEAGPCGYWIYRLVTSLGHCCYVVAPSLIPKKPGERIKTDRRDALKLVRSLKSEDLTPIYVPEPEDEAVRDLSRAREAAMKDLKEAKYQLKALLLRNNIRYEGTANWSKKHLRWLTELILPHPAQQIVLQEQLQTIEERIRRLERLDNELTHHVHQWRYYPVVKAVQAMRGVRLLVAVGVVAELGDLHRFDHPRKLMAYLGLVPSEQSSGGKRHLGAITKAGNGRARRLLIEGAHSYRYPANVSTELQLRQEGLPKDIVDIAWKAQLRLCKRYQRMSKKGKHYNLIITAIAREMAAYIWAIAKEVVLIPVNPKLRLSRVPA

SEQ ID NO: 408837 - protein, 327 aa, unidentified
MNKKKTCIVGIDVSKKTFNAHFGDKDGKYANNAKGWKKLAGEIPVNSLCAMESTGYYYYRLASYLHAKGFGVKVFNPLWVRRYMQSLGSKAKTDKKDARLIAQYADTKEVRERVGWEPLPPKLARMKMIVSLLARLTKMSTAAGNMNEAIGLVFSRQDGLLASMDNVSFVCQEQIEVLQKELYGLVTEVYPDQFRLLKTVPGIGEKIAAVVCVAAKGMENFGSCKQLASWVGLAPSVFESGTSVRGRAHIKKTGNSYLRALLYMGTLSAVRFCKPCGDLYDRLVAGGKSKMLSRVAVMHRIVKIAFGVVRSGEPYRGGKTAFVLAPT

SEQ ID NO: 408838 - protein, 347 aa, unidentified
MQFYTRQHRHYCGVDLHARTMYVCVLDQAGNVLVSKDIASAPEPFLELIAPYREDLAVAAECMFTWYWLADLCAREGLAFVLGHALYMRAIHGGKAKNDRIDAHKIAALLRGGMMPQAYVYPQGMRATRDLMRRRNYLMRQRAELLSHITNTNHQYNLSALGVRPARPAERSGLAEHFAEVPVRKSIEVDLSVIEHYDRELPRLERYLESNAQAHDPVALAIVRTIHGMGKVLGLSILYEIHDIGRFSRVQQFLSYCRLVKPTKESGGKILGHSGKKIGNAHLKWAFSEAAVCFLRANKPAQALRARLMAKHGKGKSLAIIAAKLARAVYFMLRRSEAFDAERFFAH

SEQ ID NO: 408839 - protein, 453 aa, unidentified
MEVIYERCAGLDVHKKTVVACRVHSKEHGRTVQETKTFETTTAKLLELLDWLNEWECSHVAMESTGEYWKPVYNILEGHVEILLVNARDIKAVPGRKTDVKDAEWIAELLRHGLLRASFVPPQPQRDLRDLTRQRSNLVRERSAVWNRLQKVLEGANIKLTSVTKASGVSVREMVEAMVEGESDPALLAEMAQGRLRSKRAELEEAMTGQMREHHRFLLNNHLRHIDFLNEQIERFSEQIEAQMSQLEVVSNGPAEPPSASSTPGGGSWTPQSDRREGQPPKLTAERALSLLVTIPGINRWQAEVILAEIGLDMSRFESAACLASWAGVAPGNNESAGKRHSGKTRPGSPTLRRTMTLVAHAAARTKNTYLAAQNHRLAARRGAKRAIIAVAHSIVVIIYHVLTNQEPYRELGGNYFDERKRHSVTNRLLRRLENLGYNVSLEPKVAGANMAA

SEQ ID NO: 408840 - protein, 403 aa, unidentified
MNKNSSRSYSIPLRLQRVAGIDCHQPTFKVAVCIEGKVPVINTFNTYTEDVYQLKDFLVSYHVKDVIIESTGIYWRFVYRVLSEAGIRVVVVNPFTVKQNPLLKTDKRDAVWLATLLMNGMVQPSIVVNESQEALRELTRQRLHYTQQLTRIKNKMIRTLESCNFKIMSVISNISTKTGMRLVDKLSKGITDIDELIACCHHSVIKRQGELLPKALAGRLTVNHQMQLDLFLEDILHVEAQKAKVDTAIKSLFTEKQKEQMKKLDEVEGIAMESAEVIMAEMGLSIASFTNEDSAVKYAGFAPGVHESSDKKVIVKCHPGNKYLRTAMVQVAWAAVKAKNGYWWAVYQNLKKSRGSKKAIIAVARRLVKVIYKILVHNHQYEKWEAAKYYENRTKVMAYKKVA

SEQ ID NO: 408841 - protein, 398 aa, unidentified
MSRIWAGIDSGKGHHHGLALDAEGKTLLSRRVANDEPELLKLIGDVLDVADGGEVTWAIDMTGGEPALLLALLVSHGQEVLYMPGRLVNRASDGYRGEGKTDARDAYVIADQSRMRRDLRPIRPGDEAAIELKLLTGRRSDLVEDRTRVVNRLRGTLLSMFPALERALEVTNTGPLRLLTGYQTPAAIRRAGTSRLTKWLANRKVRNARSLAEAAVEAAERQHTAVPGEKTIAKLVHTLAEEVMALNEQIAEMDKLIEGRFREHELADIILSVPGIGATLGAEFIAAVGGSLDDFDSPDALAAFAGVAPAPRDSGKVSGNLHRPIVYHRRLQRVFYTSALISVQFDPNSRKFYDRKRAEGKKHIQAVLALARRRVNVIWALIRDRRCYELTPPVTTAA

SEQ ID NO: 408842 - protein, 357 aa, unidentified
MGKINQIDFSGNDIFIGLDTHLKSWSVSIIVGETCFKTFTQDPRSGALKNYLEKNFPNANYYSAYEASFCGFCIHRELVSLGIKNIIVNPADIPTTDKQRKQKEDSRDSRKIAMELSAHHLTGIYVPDIEIEGDRSLIRYRKTLTKEISRTKNRIKSHLYYFGIAIPEQFSEKKYWSKKFTNWLKSIELTTESAKLTLEEHLETAQMLRKKQYLINKQIRKLAEKENYKENYTLLLSVPGIGSLTAMLILTELGDIKRFKNLDNLCSFIGLIPMTNSTGDDEKIGEITVRRNEILRTAIIESSWIAIKNDPALMLAYQKLVKRMKPQKAIIRIAKKLVNRIMYVLNNKQAYVQAVVK

SEQ ID NO: 408843 - protein, 355 aa, unidentified
MDVIKYVALDLHIASIWIVVMSAAGKVLMELGIATSAAEIRKFFAGLRGRLTVTFEESTLSQWAYEVIEPMVEKVVVCNPRRNKYLEEGSKSDEIDAHKLADLLRTGMLKAVYHGQKGFGAMKDVVRSYLCLSSDCSRVMNRLKAVFRSRGIRTVGRSIYYERNRQEWLNKLDRPEKRRRAEILYKQFDCLRELKKEAKREMLAAARKQEGYRSVISIPGLGPIFTAIILAVIVTPHRFRSKRQLWSYCGLSVITRSSSDYEFINGRRVKSRKFEVTRGLTVDFNHLLKWALKTATIEAIKKEPFHTFYSIRTEAGMSPEMARLTVARKIAALILVLWKKGDVFDEKVIMKSFAA

SEQ ID NO: 408844 - protein, 369 aa, unidentified
MKSIAHVSFDVHRDWIVAAVLPEGADKPICERRLRNDSVELKKFVRRWEQAYELRCCYEASSCGYVIHRWLADMGVSCDVIAPSLIPKRPGERVKTDRRDAVKLAKLHRSGELVSVHVPSQQDEAVRSLVRCRETMNKEVQQSRHYILKFLSCRGIKYTGKSNWTAGHWRFLRDLKFEEPEASVFAEYVALLEYKQFRLAELDRQIDEIAASEVYRDTVGILRCLRGIDTLSAMVLVTEIMDFKRFGTARQMMSYLGVVPSENSSGSTRRQGGITKTGNSRCRRILIQSSWHYARKPSLGGNLKQRQAGQHVEVIAHSWKAQHRLHKKFWGIALRKDKCTAVVAVARELAGFSWALINGGVVCRDLRAA

SEQ ID NO: 408845 - protein, 379 aa, unidentified
MSAAVGLPDGKLLDEFDISHNAGGFKEFFHHIERLEKRHQLPVAVVMEGYNGWARPLDGQILRHGYRLYSVNNLKLARYKEIFPAPAKTDAIDARRILELFRLSEHLPLAKNALHEVAPTPVENDRLKRTTRRRKQLVWERVRVINRLQSDLHAVCPGLMAITREADNIWFLNFLTCRDKLTKLANLRRSSLLAIPGVGKTYAAQIQAWQAQAQFAPDAEWVGEMILQDAHRILALGKDIKALDLKIAGIAAQSKLAQTIGNIPGFGKTSMAEIAGEVGTLARFKSETGLAMYMGMSVLDNSSGKKNGVKTPRHVNTRAKAAMMVAVARHIAYVPMSRAYYDKKRAEGKQHNQAIRALGRHLVRVIWSMVKQGRKYEVR

SEQ ID NO: 408846 - protein, 317 aa, unidentified
MAQVVFSVGIDVSKLWLDVHRHPDGRHARFSNDAAGWKALLRWLEDAPIARIGLEASGGYERAVAERLAEAGYAVQVLDPARVRYYARALGRWAKNDRIDARTIAEFTAHGDRPSKPLDKERDRLAELLNLREALSDNRTRLANVAEHLRDKAFARSTALHLAKLKRDIKRIERHLEDAIAANERFKRLARVLRSAKGVGLILAATLIARVPEIGTLNDRQIAALVGVAPFADDSGPRRGQRHIKGGRARVRRVLYMATMVGATRRNPALKAFYQHLLAAGKLRKVALVACMRKLLTILNTMVARDEIWRDTTKAAA

SEQ ID NO: 408847 - protein, 365 aa, unidentified
MEKLYIGVDFHARQQTLCYLKTETGELVITELKHTDKESVRAFYQQFPRPVVVGLEASGYSPWFEALLEQLGCEIWLGHATEIRRRARWRQKNDRRDAQLIWELMVHDEFPRLHRPVLPSREVLRMLRYRQKLTQLRTMAKNSLQAIALQAGLAKGPQLFTGAGQQQFRAVSLSPVLQWQREHWFALLQPLNQQLLETMVWFKAQSKDDPDVTRLRTHPGLGLLTALCLVHTLQPVRRFSNARKVAAYAGFDPVERSSAERQRFLGISKAGSRLLRYLLVEAAHTAVRYDEDLKRFYKRLAQRRGRPKAKVAAARKLLIRAYIMLRDEIDYAEFRRRAVAARLARNRQRPNVPEVLIGQPASSRH

SEQ ID NO: 408848 - protein, 363 aa, unidentified
MKAEERRYVGIDLGKRDYTMAIIEKNKKMNIHHGKTSIHGRQGLYRLLERRDKVAMEAGNLAFILAREMTEQVGCDVRVLNSAKLPVIWSAPTKTDREDAMKLAHLIEERRDEKLPLVPLPSKQELERRSRVASYRRAVYGKSRMINTLHAMFVHQGHTTVVRKDLSTTERRRQAIEVLRGEEREEAEHLLQHLDLYEKRIKVLKSKIQQEAKADENMLRLQSIAGVGPIVAYAYVSYVGDGSRFNKGPQVSNYLGFAPRLDYSGTIQRHGHISKRGNGYLRGLLVQAAWAAVRSKSGGALRERYKQITSFQGSSKKKTIVSIGRRMAELMYSVMKNRTEYKPQHWKGTGNKTALLAEQAIGA

SEQ ID NO: 408849 - protein, 366 aa, unidentified
MSDSPHFNVIDAAKMKMITDFITGEFEMKRTTVGVDIAKSVFQLHWVDADTGEIVNKQLKRAVFLEHFANREPCLIGMEACGGSQHWARRLTEMGHQIKLMPAKFVKAFVIGNKNDPADARAIWMATQMPSKAVAVKTEAQQAVLALHRLRQQKVKFRTMQMNSLRGLLSEYGEVMAKSRAALDKAIPGVLARLAERLPAMLIESLRELWNDLERLDKQIADIERRLQTWMKEDKACKAIAAIPGVGLLTATATVASMGDAKAFKSGREFAAWLGLVPRQTGTGGKVQLLGISRRGDTYVRTLLIHGARSVLSHAKHAGAWAEQMQKRRPVNVVTVALANKMARTIWAILAHDKPYKQDHVSTRPA

SEQ ID NO: 408850 - protein, 382 aa, unidentified
MQTIDTIKPTILLAIELSASTWLVAARVPGWEKPHLHRIDGGDTAALLALISSLQARAARGLDATIGVVCCFEAGRDGFWLHRLLTTHGVVCHVLEPTSILVNRRARRAKTDRLDAEGMLRVLAAYLRGDHQACSMVRVPTPEEEDAKRTHREREKLVQERQRIENRIEALLFTQGIRKRPSLRSWERDLAVLRTGDGREIPRHLRAELDRLRRRLVMTLELIREVEAERDQAAKTKPQDRACHKIAALSRIRGIGENFAAVLTREVFYRSFDNRRQIASYVGITPMPYQSGGMDRDRRISRAGNPRARTTMIQLAWLWLRYQPGSELAEWFRERVGTLAGRTRRIAIVAMARKLLIALWRYAETGVIPAGAEIRAETTVAA

SEQ ID NO: 408851 - protein, 357 aa, unidentified
MTTMTQPASTQVTVGVDTHLDVHVAVVKDQLGRRLATTSVAATPAGYAELLGWAEQVGPVEAWGIEGTGSFGAALTRFLRAHGQVVVEVNRPDRAARRRRGKSDSLDAEAAARTAQAHQGSMPKAGDGLVEMIRVLRVARASAMKARTQAINALKALVVTAPEELREQLRTLSTLRLVKTAAELESGAATDPSAAAKLAVRLLARRYQALTAEIMTLDAELDRLTATAAPKLLARFGIGSDSAGALLVAAGGNPARLRSDTAFAMLCGASPLEASSGKVRRHRLNRGGDRQANAALYRIVVARLRHDQQTRDYLARRIREGKSKKEAIRCLKRYVAREVFAVLRGNAQLQPAALPSP

SEQ ID NO: 408852 - protein, 342 aa, unidentified
MQMTTIGLDIAKNVFQVHGIDAAEKVVIRKQLRRSQVLAFFKALPPCLVGMEACATAHYWARELTKLGHRVRLMPAKDVKAYVKRNKNDAADAEAICEAVRRPTMRFVQVKSAEQQGGLMLHRTRDLLMRQRTQVINALRAHLAELGITAAQGREGLKELLQIIASDADERLPADAHASLVVLAAELQAMQTLIGSIEKRITAQHRGNEASKRLETIPGIGVIGATAIAATVTDPTVFRSGRDFAAWIGLVPRQDSTGGKQKLGPISKQGDRYLRRILVVGAIAVLRYAKQNPEKYPWLTQLLARRPFKVVAVALANKMARMAWALLAKGGTYRAPALAAAA

SEQ ID NO: 408853 - protein, 402 aa, unidentified
MRFFVGIDWASRAHAVCIIDQTGRVRWQGSVPHTAEGLTQLVGRLRRFRGRGGLRVALERPSGLLVDTLVDAGVEVVPIHPNALKATRPRYSAAGGKSDPGDAFILADLLRTDGHRFPPLRPPSDDTRALRALVRGRDDLVAQRIALANQLRALLERFWPGAAAIFADVDSPIALAFLARYPTPQSAARLGEKRLAQFLGQHAYCGRRPVAELLARLRTAPASQVGEAEAEASGDVVRALVAVLTPLVAQVQHLSAAVEAALAQHPDGPLVQSLPRSGAVNAAQILAELGDDRARFPSDEQFAAEGGLAPVTHASGQHHAVVFRWACNKRLRRALTTFADNSRHASRWAALVYQRARARGCRHQHAIRILARAWARILWRCWQDRAPYDVSRHRAAQALAAA

SEQ ID NO: 408854 - protein, 356 aa, unidentified
MPETNPAEVIIGVDTHKHTHAAVALTALGARLGTITVPASRRGYQELETWAGSFGAVRAYGVEGSGSYGAGLSRFLQAGGHTVLEVNRPNRQLRYQHGKSDPLDAEGAARAVLSGQADARAKPGTHAVEMIRHLKVARDTAVKSRTQAMITLKALIVSAPAALREQLEGLAGKMALIRHLAALRPGTLTSPTASAKAALRALAQRWLALDAEIKAHEAHLDALTAACTPTLRTAYGISTGTAAEMLILVGDQPDRIRSEAAFAKLCGACPIPASSGKIIRHRLNRGGNRQANAALYRVVIVRMRSHPPTLAYVRRRMGEGKTKLEIIRCLKRFVAREIFGYLCGAKTLPTAPMTAS

SEQ ID NO: 408855 - protein, 439 aa, unidentified
MPTPSLPVLDPTAAAIDVGSEQLHVSIAGGPPKVFGTTTGQLHQLRDWLLEQGAKTVAMEATGIYWLCPYEVLEGAGLEVVVVNGKYVKNLPGRKTDMKDCQWQATLHAHGLLKPGFVPPEHIRRLQDYLRLRTDHITMAGSHEQHMQKALDRMNLKIHDVLSDLTGVSGLKMIEAILAGERNPVALLALCDAQVQKRKADRMRAALEGTWKAEHVFALRQAYELWQSYQEKIAECDGAIEKILQELAGPEDPQDPPPPGTKRGGVNTPEIAGFHGLLWRLSGRKDLTTLPGVADYVWLQLLSEVGTDLERHWPTEKHFTAWCGLAPGSKQSGKRRGSQRRSRNRAGRLFCVIARSVGRSVDKALGGFYRRLKGRRGGLVANLALARKLAELFWRLMVHGVNYVEQGLKKYEEKVAQTEQRLLQKLARKYHMTLQPKSP

SEQ ID NO: 408856 - protein, 440 aa, unidentified
MNYKQNEKINQVKESTLVVGIDIGSTTQYARAFDWRGIELGKVFTFSNSREGLKPLKAWMQRLQDKYRKSDVIVGIEPTGHYWFDLGAYLEDEGILLVMVNPYAVKQTKELDDNSQSKNDRKDPKVIAKLVTEGRYSAPYTPDGVYADLRIMVTNRKRLIREMTQIKNRFARWFAIYFPEYTDVFGDYEAQSSMLLLKKVCTPEAIVELGAEKINQIWRDAKLRAVGMKRATTLCETAKRSIGLKKGSSAAQYEMKLLLEDYEYKKAQLDAVIEEIEKLCRKIPESEQMLAIKGIGVITVAGFLAEVGDVRRFESPRQIQKLAGLSLRENSSGKHKGQTTISKRGRSNLRAVLFNAAIPLIATNPEFKSLHEYYTTRANNPLKKKQSVIAISCKLIRVFYAILANGVTYDAQKMLSDIHSSRRQHKKIDCEIQETSAARC

SEQ ID NO: 408857 - protein, 354 aa, unidentified
MNAEPTPVSPSTHWVGVDVSKDTFDAGLVRHGQKWPAVALAAIPVRSFSRTREGVSEFVQWLDNLLADDGYPSGVRVVMEATGRYSSELAVWMLEQHPALAPAIAPPRQTAAFITSLGLRNKTDKLEARALGFYGMERQPPGYQPMTPLEAQLRELARYRDTLVRERTAASNRAGETPLCPAVRSMQHKRLRLLDRDIERIEEQMHQHVHQAPELDRDIQLLSTIYGVGFITAVTIRTELGDLRRFDRARQLTAYAGLNPSLRQSGSSIHGRAHMNKKGNPRVRQCLYLAAMVAIRGTNDLQRTYRQLREQGKSAMAALGAIMRKLLVLMRAILISGKPYDPLWKTRTKQTQNA

SEQ ID NO: 408858 - protein, 457 aa, unidentified
MSRKGKRTEGLEEAHPLTGMSQVNLNAAGVDIGAVEIVVCVAGDAHTQIVRAFGNYTVDLQAIGGWLKEYGVKSVAMESTGVYWIPLFEELERQGFECLLISSRSLRRVAGRKSDITDAQWIQTLHSYGLLESSFRPQAELIALRTLLRHRNQLVEHRSPHILHMQKALLQMNVQLSQAVTDITGVTGQTILRAILAGERDPQELAAMREPGCKKSVEEIGKALTGTWREEHLFILKQSLEMFDFYTRQIQACDEEIERVYGLIRPDWEAGEVKPLGQSKRNSHSKNRPHNPEAIRKHLKRISGVDLSVVDGFGVSLAQTVVVECGTDMSKFPSEKHFCSWLGLAPKHEISGGKVLKNKTLKTKNRAGQAFRMAAQSVKQADCVFGVTYRRLKARLGPAQATVATAHAIARVVYRMLKYKVEYETISVEEYEKKYQAQQLKYMQKKAAKLGYQLVPA

SEQ ID NO: 408859 - protein, 385 aa, unidentified
MQNTIVHHEGAASLEAARTKVKLSCTIIKIGLDVHARLYVAVVQYGHLLPKPARRLASSEFVPWVEQFLRAGHTVHVVYEACGFGFGLYRELKAAGAQCYVIAPRKLDEQGTRVKTDPRDATTLCQRLSRYLDGNTRELAVIRVPTEAEEQARHVSRQREQLVRLRQKLEAQGRSLLVSHSLPAPAHWWKNQTWSRLAKHLPAWICARLEVHRPALLTLQQQINALSAELEATAPADIPTGLGKLTTVVMTREICSWERFTNRRAISSYTGLCPGEHSSGSKRVPGSVTKRGNPRLRAALVECAWRMVRFQPNYPPVKKRLAILAKGAHATGAQRKKAIVAVARHLAVDLWRVHTDRCSAAQLGLKSAETLIVRGEQKAELNALA

SEQ ID NO: 408860 - protein, 388 aa, unidentified
METRTSCSSDKDQGEIVSTYFGIDLHKDQITWHAILVSSNGTIGRQNGMVPTDRILEDFIPLLSGSKSYAVVEASSSSFFFYGQIASHCEKAIIVNPSAFRELYMTGKKTDRIDARKLADRLKYHIEMGKEDSNFPEVYIPDAEALEVRRLVTMYEMLVKQGTQIKNRLKAVFTAKLISEYENVLEGTLDNVLTDTRLDRADKAIIKTLKNIHDTLQLEKKAIKDEILAIGSKRFRHEVELIIGVSGISSLGAIIFMSDVVTVDRFTSSKRITSYLASVGKVDASGNTIRNGGLNKRGRRSAYRFILQGLEHIVSNNPNFIQFKEHHARTRANKVRAAIVRKTFVTLYYMLKNNEPYRFRDERCYNRKLKEFEKLFSENSLNSSLIEG

SEQ ID NO: 408861 - protein, 354 aa, unidentified
MKLYVGLDVGLEETSVCIVDSEGLTIREVKASTEPEAIRSAVMDYADRLDRVGVEASSLGIWLYRELQPAGFPIIVVEARHMRVSLSTMRNKTDRNDARGIAQMMRLGWYRAVHVKNIEMQKMRSLLANRKLLKRKLIDLENHIRGTLRAYGLMVGAVGRGGYEARVRELIEHSDPVFSMMIEAMLDVRRAIFDGYERLHKVLLQVVQHDAICRRLMTVPGVGPVAALSFKVGVDDPLRFARSRTVGAHFGLTPRRHQSGTSIDYEGRITKQGDVAVREALCEAAASLLLRVRKWSALRAWGLRIAKRSSMLCAIVAVARKLAGILHRMWVNETDFHVGFGAKVTQRLRLKPAQ

SEQ ID NO: 408862 - protein, 447 aa, unidentified
MEILYERCAGLDVHKKNGKACFASPAEGGKRKKETRTYLTMTQDLLQMRDWLKEQGCTHIAMEATGVYWKPIYNLLEGDFEILVVNAHHIKTVPGRKTDVKDAEWIADLLSHGLLSASFIPSSPQRELRDLTRYRTKLVEERAREINRLQKTLEDTNLKLGDVVSDVMGKASRLILSALVEGETDPVKLASFALGRVRARQEDLERALTGKVTDHHRFLLGEHLRQIEHLDEAVRRVSEEIARRFTLPEPPPEEDGRSHAASEQTTEPSDTPPSSARLAPLSWQEAVRLVDEVTGISEQVAQGLLAEIGVKMEQFPSPKHLASWVGICPGNHESAGKRLSGKTRKGNLYARRLLIQAAHAAGKSKNTYLGAQYRRLASRKGSKKAAVAVGHSLLLIIYHLLRDHSSYHDLGGNYFDERDQQVVQKQLIRRLERMGYQVELQPLAQAG

SEQ ID NO: 408863 - protein, 435 aa, unidentified
MEEVEDEPLFCDRVAGIDIGKATVMVTIRVPSEARAKGRQQETREFGTTRRELLALADWLRCWQVERAGMEATSDYWKPVLFTLEQEGFDCLLYQASQVKALPGRPKTDKLDSVWLARITEQGSLAGSFMPPEEIRRLRTHTRYRRKLVQMRTAQKERCEKLLEDAHLKLSSVISDIHGVSGRDMLRAIAAGERNPKVLAQMARGVMRSKIARLEQALDCSFFTGEHAFILTMMLDSIDSLTAQAGVLDARIADMCQPYQRQLEQLDEIPGFGTTTAQDLIAEIGTDMNVFPTAGHLASYARQAPRVKESAGKRKGKNATGRGNPYIGGALGEASISAGRTQTFIGEKYRRLTRRMPKRKAQVAIMRSQLVIAHALLSDPDARYQDLGPDYYERKADIRRRARNHARALERLGYKVTLEAIDPGTGELHLVATAG

SEQ ID NO: 408864 - protein, 375 aa, unidentified
MSEVNAFIGLDVHKDTISVAVAEAGRGGEVRHLGAIENTPSAIIKLARRLKQKHGSVEFVYEAGPCGYVIDRQLTAAGFICHVCAPSRTPIKPGERIKNDTRDAVALARLFRADELTLVWVPNEIDEAMRDLVRARQSATNDVRRLRTRIQLFLLRHDLRYATKPWSYRHRVWLTDRRFSHPAQQIAFQSYLNALEQAESRKADLERQIAEVTTQWSLRPLVQALQGLRGVGLVIAATIVAEVGDFNRFASPRQLMAYLGLVPGERSSGRKIRPGAITKAGNTAARSLLFEAAWSYRSTPKVGQWMARYRPDEVSQAVKDVAWKAQLRLHGRYKKLLGRGKRPTVAITAVSRELVGFMWAIAKLITPPREETPAA

SEQ ID NO: 408865 - protein, 436 aa, unidentified
MRGCRCSMIMGFTKPIEHFNLQRKKVITMNTLYVGIDVSSKSNVVYLMLPNGDKHSNFSVANSHEGSTQLVKRILSVLTSHSLDTVLIGLEATSVYGDNLVYFLREDATLAPFNRKIHVLNPKQVKKFHDAYNDLPKNDYVDSFVIADCLRFGRINKEVYMGDYRYKALQNLTRARFFAVQNLVKEKQRFMNVLFKKYSTMTQEKVFSDTFSTTALAVYDEFESAEALANMDLHELTDFIMEKGKNRFPDPDAVAKAIQKAARSSYRLPKTVNDSVNQVLSISITSMKALESQIKEFDKAIKAQMELLPNVLISIPGIGPVYSAGIMAEIGDINRFNSQAALAKYAGLAWKQHQSGGFESEVTRLIPSGNRFLKYYLCEAAFSLVRCDKEYSDFYHLKYKEVNRCQHKRALALTARKFVRLVFTRLKDNRLYRPAE

SEQ ID NO: 408866 - protein, 316 aa, unidentified
MTEAGGFVGIDVAKAELEVVVRPSGARWTVTNNAAGLAQLQERLQASAPSLIVLEATGGYEVAVVAVLATAALPVVVLNARQVRDFARATGRLAKTDAIDAGVLAHFAEVVRPPVRPLPDAMTQSLQAWLMRRRQLVEMLLAEEQRRSRAPRPIQRQIDQHVRWLRAQLGAVEKDLAQTLRESPVWREKDDLLRSVPGVGPVLTTTLLGDVPELGQLNRKQIAALIGVAPLNRDSGTYRGRRAVWGGRAHVRATLYMATLTAARYNPVIRAFYERLVAAGKPKKVALTACMRKLLTILNAMIARRTAWKPPAAVSA

SEQ ID NO: 408867 - protein, 412 aa, unidentified
MKPILESCCGMDVHRDQVTACIASGPLDRAKEKLIVKEFSTMTYGLRELSSWLKEHNVKTVAMESTGVYWKPIFNILEDDFEVILANAARIKNVPGLKTDKKDARWIARLLRYGLVPASFIPPRNIRYLRDLTRTRKKLTEERTRHKNRIHKILQDANIKLSSVATDVFGVSGKAMIMALLEEDEPSPDEIKSMTKGKLRKKIGLLIKAMDGRVTDHHRFLLKMHFEHIESLSSQINELDEEISRKLEPYEKEFGLIRTHPAISEVTGASVIAEIGVDMSQFPDELHLSSWAAISPGNNETAGKRKSGRTRRGNNYLKTTLVEAAWVASRTKDTFLSARYYNIARRRGSKRAAVAIGHQILKDIYHILSTGEPYKEIGAEASRNRKSDARECSMIRELERLGYSVRKIEAST

SEQ ID NO: 408868 - protein, 351 aa, unidentified
MESQQTARPKLFIGIDIHKRSWKVHSATDLFGGKSFSMQPDPIRLQAYVLKHFSDHEVSTAYEAGCCGYSAHRSFESYGWRSLVVNPADIHRKGKERHTKTDRIDAQLIARELKDGRLDGIHVPGIDREELRSLFRRRNDLVKDFRRVKSYIKMQLLYFGIKEPEEFDNDHWSHKYRNWLDDMVFKNPTAKATLDSRMRFFRFVDQELRDVSTQLRRYCKVHYKKDYMLLRSIPGIGGIVACGILCELGDLRRFNSIKHLAGYVGLAPGVHQSGGNYRTLGITPRAHRLIRSYFVEASWQAIRADPVMQAYYRKHRGKNVKSIIIKVARKLLSRTLAVIKTEIPYTIGVIE

SEQ ID NO: 408869 - protein, 316 aa, unidentified
MTTSPIFVGVDVAKDRLDVAVRPSGETWCTANDEAGVTALVARLRPLGPALIVCEATGGFERAAIAALAAAGFPVVVANPRQVRDFARATGQLAKTDQLDAGILALFAERVRPTPRPLPDAAAQLLDAVLTRRRQLLEMLVAEKNRLGFAPKPLHRGIQAHIRWLERQLDDVTKELASQIEASPVWRAKDDLLQSVPGVGPIVSSTLLGELPELGTLSHKQIAALVGVAPLARDSGTLRGKRMVWGGRASVRTALFMAAMCGRRWNPVLKVFYERLKAAGKPTKVALIACARKLLIILNAMMRDQSRWASNVQYSC

SEQ ID NO: 408870 - protein, 350 aa, unidentified
MEQISRIGMDTSKHLFQLHGVDAAEKPVLRRTLRRRDMITFFERLAPTRVAIEACGASHHWARLLRGFGHEVQLIAPQLVKPYVKRGKNDAADAEALCEAMSRPTMRFVPVKTAEQQAALMLVKLRDRLIRNRTQLVNAIRGYAAEFGIAGAKGIAHVTTLLARLQADVTLPALARELFAMQAGEYAQMQAKIAAVEAKLLAWHRADPCSQRLAGVPGIGPIGATMLTMKTPAPEAFRSGRQFAAWIGLTPKDHSTAGKARPGVITRAGDEGLRSVLVVGATALIRRVREGRCRDGDRFAAWVGKLLERKPPKLVAVALANKLARVAWKLMITGEAYAVKPASTGAASAF

SEQ ID NO: 408871 - protein, 416 aa, unidentified
MFSIMEPILERCCGIDVHKKTIVACLMVGTAEEKPHKTIKTFSTMTRDLLACKDWLESEHCTTVAMESSGVYWKPVFNILEESMEVILANARHIKNVPGRKTDVKDCEWIAQLLRHGLITGSVIPPRPIRELRDLTRYRRKLIQAKSSELNRIHKVLEDANIKLSSVVSDINGLSSQEMIEHLIQEDMSPQQMAALARGRLRKKITELEKALEGSLREHHRLILRVSIQMIASYDTAIAKLDREIEQRMEPYRDQSERLQSIPGVKKTTAESIVAEIGVDMSRFPSHSHLSSWAGVSPGNNESAGKRRSGKTTPGNRWLKGTLTEAAWAASRAKGTYLKARYHRLAARRGNKRACLAIGHTILIMAYHIIKEQCTYRELGSDYFDRLNELHVVRRLTSRIQALGYHVSVERLPMAA

SEQ ID NO: 408872 - protein, 360 aa, unidentified
MNPTIVAVDLAKAVFQLAVADTNWRVIEQHRLSRTQFERWFLNRAISLVIMEACGSAHHWARWLNRMGIEVKLLPAAYIRAYVKRNKTDAADACALLEAARCADIVPVRIKSIEQQALQGLHRIRSLWMTTRTSRINALRGFCREFGLLIPQGARTGIEVIARALADPNTAVPMLIRGSMQLLVEEIRLLEARIGQLEKALTELAKQSPACTTLLSIPGIGLLTATALVAATSGDVTHFKDARHFASWFGLTPKEYSSGGTRYLGRISKRGDRYLRMLLTHGARSVLRAATVAARAGRTVDGIKQWALMVQGRTNHNKAACALANKLARICYATLRDAAPYGQPAPRQTSKLQRTAFVTA

SEQ ID NO: 408873 - protein, 348 aa, unidentified
MDRVCGLDVHKDSVFMCILTANGEKIEDVFGTLTPELDRLRDTLVSHGVGKVAMESTSIYWVPIWRILECDFDVKLVNPYFIRQLPGRKTDIKDAQWIATVLQKELIKGSYIPDSKIQELRQYSRRIFHLTRRKQQAESAIDLTLQRCNIRLSNYVSDIGCKSMRKVVNALICGETDSEVLALLVHKRIRNKHCHEVIKSSLTGIVSSSDRDMLKMSLEEVELYDRQLLECKEKMRIICEGHYAEELEILQTAPGIKEESAMRIIAEIGVDMKAFLTASALVGWAGLRPRNDQSAGKIKGRKTLHGNKYLRVMLTQCAWGACRTQTSKFYSRYHTCLLYTSPSPRDRG

SEQ ID NO: 408874 - protein, 408 aa, unidentified
MKTLHKRCAGLDVHKAEVVACVRLISKRKVEREVRRFPTTTQGLLALAEWLESAGCTHVAMEATGVYWKPVWHILEGRFALILANAAHVRNVPGRKSDVNDATWLADLLAHGLIRSSFVPPPAIQELRDLTRTRRQLTREIVQHVQRIQAVLEEANIKLCSVITDIMGASGRRMLKAMIAGETDAEKLAALGHERLGCTRAELVEVLTGRVREHHRFLLGQHLRTIEQLKDSVAAFDARIEAALSPFHDIVERLEAVPGLAATSTETVIAEIGTDMSLFPTAGHLLSWAGFAPRLDESAGKHRSTRIRKGAPWLKPVLVQAAWGAARKKNSYFQAQFLRLKARHGAKKAAIAVAASILTTVYHMLRDGTCYQDLGPEYFTRRNPAQAAARLANRIRNLGYHVEIRAAA

SEQ ID NO: 408875 - protein, 345 aa, unidentified
MKITTIGLDLAKNVFQVHGIDAAGEIVVRRALRRGQVLAFFSRLEPCLVGMEACGTSHYWARELGSLGHEVKLMPPAYVKPYVKRGKTDAGDAEAICEAVTRPTMRFVAVKSADQQSVVMLHRTRELLVRQRTQLVNMMRGQVAEFGITLAKGIQHALKFVRQLLDGQAPDVPELAVKVVMVLAEQLRQLQIRIGELEKELKRWFRADRVAQGLATIPGIGFITASALSSTVTDPNQFTSARQFAAWLGLTPRANSSGGKERQGRISKMGDQHIRRLLVSGMTSQLRWARRYPDAHPWVASLLARKPAKLVAVAMANKAARVAWVVMTRGEVYRARQPSAQQSAV

SEQ ID NO: 408876 - protein, 370 aa, unidentified
MHKPTTLFVGLDVHKDSISIAHACEDRDAEVTFVGPIGTRQCDIDKLVRRLHSKASRLVFAYEAGPCGYVLHRYLTGKGLDCLVVAPSLIPKKPGDRIKTDRRDAVELARLLRSGDLTPIYVPSVEDEAIRDLSRAREDAVKDLKAARLRLKSFLLRLGLTYEGRADWNDAHQRYLARVVCPTPAQQIVFQEYLHAVTEIADRLQRLESELREHSSSWRLSPLVEALQALRGVQDTVAITTVAELGDITHFDTPRQLAAFVGLIPSVHATGTSRRLGSITKAGNSHARRVLVEGAWAYRHPAKVSESIRKRLERLPKSIQDIAWKAQLRLCKRFRRLSARGKHPNIIVTAIARELVAFMWAIAREVRLSA

SEQ ID NO: 408877 - protein, 368 aa, unidentified
MEITTIGIDLAKSVFAVSGADRRGKVVMGRQLRRAQVLEFMGKLGPCVVGMEACGGAHHWARAIGKLGHEVRLLSAALVRPYRSGPNKHDRNDADAICEAVRRPQMRYVAVKSVAQQDQLALHRVRAQLQKQRIGQSNLIRALLHERGVVARLGAAGLRQALTQALQAENSELSGAMGELLLELSGGLRELERRIAVLTRRIERAAKDDERCARLMEVPGVGPLISSALVATVGNAREFKRGRELSAYLGLTPRQHSSGGKTVMLGISKHGDRYLRTLLIHGARALLYRQGRGRAHPRAAWAARLVARRGPNVAAVALANHNARVLWALLSRGDGYRPPTSSFPSRPSAGAVIKRAREGKLLLATKRA

SEQ ID NO: 408878 - protein, 464 aa, unidentified
MMAGKKLWRNRKERKEWARRLQSEDPGLEVVHAHAAGIDVGNSAHYVAVRPDRDPEPVRRFECFTADLHRLADWLKSCGVKTVAMQSTGVYWIPLYEILEERGLEVYLVNARHTKNLPGRKSDVQESQWLLKLHTYGLLNNSFQPVSEIRVLRTYWRQRGEHVRGAATCIQRMQKALTQMNLQLANVISDISGLTGQAIIRAIVAGERNPLKLAALSDPRVHASQEEIAKSLEGNWRPELLFVLQQEVDMYDTYQKRIAECDQRLQKHLASLTHPLQVQPSMQKPKTNKPAAKNAPRFDLSSELQRVTGVDLTRIDGIDVMVAQTLLSEVGLDMSRWKTESHFASWLGLCPDNRISGDKVLSRGTRRVVNRAATALRQAANTLMRSRSYLGAQYRRLRTKLGAPKAITAMAHRLARLVYRMLKYGQTYVDKGTDYYEERFRQQQIQLLRKRAAKLGLQVAEIHA

SEQ ID NO: 408879 - protein, 343 aa, unidentified
MKLSRVGIDLAKNVYQLHGVDRSGKTVWKRRLKRHQWFQVLLDTAGPECEIGMEACAGAHHWGRQLQSRGYTVKLIPPQFVKPYVKSNKSDAKDAEAICEAMGRPNMRFVTVKRVEQQDIQATHRVRAELMTQRTAKANQIRGLVAEYGLVAPKHLSSLRAAIPCWLEDAENGLTGDFRALLQGVWTDLLLLDDRVGEMDQKIKQLADNNEDCVRLQQLRGVGPMTSTAMIATVGDARQYPKSRQMAAAIGITPKQHSSGDRDRLLGISKRGDVYLRTLMIHGARAVVARAKHKDDRLSRWVTNIANKKHPNVAAVALANKTARMAWAMLRHGTDYDPDFAIR

SEQ ID NO: 408880 - protein, 465 aa, unidentified
MSLAALPVGRGLVAGSGMALLYSVRDDPRGVAAGVQWRPRFADRSLAPARRAVRSHRNVVASSRLAQTYPAADSTHTSTMGNTMPCYDVFLGIDVGKYFHYAYAMDACGNKLFATVTAQTNQALRRLFQRARHYGRVLAVVDQPNNIGKLVVTIARDMQIDIAYLPGLAMRNLARTYTGNCTTDKRDAYIIADAARTRPDALRPVDRDHEFFTQLKYLNGLDNDLRRHYTTHVNQLRSTLLSCYPELECALRGQKLHFTWVLSLLAHYQNPERLRRVEPSRLASFARRRGARSPESLIGAMCQSIRQPSVAMGATDQLSLGIGLHANYMLRLAEDRQAILAHVDALCGQLPHTEILLSIPGIGIRTAARILMCVGDLSAFATPAHLASYAGICPQQRLSGVSINSSGPNRGVSSRKCVPMWPLLLARGHKNTNNNAAGVIIGLPMVNTRTTRPPVVSGLLVYFPR

SEQ ID NO: 408881 - protein, 377 aa, unidentified
MKIANSKDGFQRLMEGVQRYGDPVHVAFEPTADYHRNLAYWLQNAGETCFLVSSLMSARARELLFKTWDKNNRKDAQVILYLMRQNMMKPFYDPLVEGTMDIQELSNTYHQISLARTRCQHSLINHYLTLYFPEMERFYHASRSEWFCRFLCKFPTPQSITRYKIATFVKRAWVIVGRKVAKQRFLEEVHETACRSIGLPVELQGQAVKTFRIQLQRIIDLNQLRHQLEKTSENIFNAREDYQQLRSVPGVGPICAMMIIAESGDLNRFGHYRQYLNFCGFNLCSSQSGQRQSKHKISKRGNSRLRYAYWLAATIAIRQRENSFREKYERHIKSSPNNPDLKRKAVVAIACKLARVCHSLVKQNTPYRGYYEFNHGT

SEQ ID NO: 408882 - protein, 418 aa, unidentified
MFRRDAHVYVGVDVHKSAHVGMMVDCFGDPMGKALKVANQVGAFPEWLEAIHKRAEGKGVIFGLEDVHGLGRALATYLLGRGYTVKFANAYLTKKERDSVNKTDRNDALAVARTTAKQYFTLPDADVDELQWALIQAVHYRKGLVEEQTRVKNRLHAFLSQSHPAYLTYFSEEFGKTALTFWERYPAASTLAGVTMEELGQFLREVSHFALGYKQAEKILSACQGAEARGFQAERDYLIRSAVRELRHLEEELSEGRKQLERLVNLTDYRLTDIPGIDVVMSAELIALVGDVTRFPKVDHFLAYAGIAPVVMGTGDHETRLRSQFGRRELMALFHRIASTQLVIHHKTKEPRNPEAKAYFDKCLGDQAKLPKEKQDRKVRKKALLSLMRAQARRFYSLMKRQKLGAKALGAQEGPGAA

SEQ ID NO: 408883 - protein, 343 aa, unidentified
MEYYVGLDVSLKRTSICVVNQTGSIVQEGVVDSDPEAIASFVRSRAPGAVRIGIETGPTTTWLWTELNRLGLPVICIDARHAKAVLKMQINKSDRNDAVGIARIMQTGWFKEVRVKDLDSHAVKALLASRALLVKIKRDLENQVRGLLKNLGLVIGRAKFNVFAVRAEGLIENRPELVNAIRPLLEARKAIEQQVDDLDRKVHKLARRDVQVRRFMTVPGVGPITALCFKATIDDPTRFKRSRSVGAYIGLTTRRHASGEMDWSGRISKCGDAMLRMYLFEAAGVLLTRVPKWSGLKAWGAKLTKRNGLRKAKVAVARKLAVILHRMWIDGTEFNWSTKKAAA

SEQ ID NO: 408884 - protein, 331 aa, unidentified
MNYSHFVGLDVGKKTFDASLMSAAEKELSHKSFDNTPEGIQSLLDWIAGYHLSLSKLLFCAENMGSYVTELSVSSVSMGFSLALVCPLTIKKSIGLQRGKNDRIDAKRIANYAVLHYRKLELYKLPNKDLVRLRGWIIIRDNLVKQKVSNIKLLETFSQMAKLADVTESISFLEEQLKSIKEKILEVEEDMEQLIAASTSLYTNYLLLRSIKGIGIINAIVLLCVTDNFQRFDNPRKFACYCGVAPFEHTSGISIRVKTQTSSLANKEVKVYLTRAAITAISWDPQMKAYYKRKIAEGKHKASVINAVRAKIIARSFAVIRRQTPFVTLAV

SEQ ID NO: 408885 - protein, 419 aa, unidentified
MDVAIGAVGRPGGNDQRTRVIDVSEIGAFLGLDVGKGEHHATAVTPAGKKAFDKRLPNSEPKLREVFGKLQAKHGTVLVVVDQPASIGALPLAVARDTGCRVAYLPGLTMRRIADLYPGEAKTDARDAFVIADAARSMPHTLRAIELADEAVAELEMIVGFDDDLAGEATRISNRLRGLLTQIHPSLERVLGPRVQHPAVLKLLDQFGSPAQIRKAGRRRLVSLMRPKAPRMAERLVEDIFTALDEQTVIVPGTDAAALIVPSLTNSLQAVLDQRKLLATRIEKLLEAHPLSKVLTSMPGIGVRTGARILIDVGDGSSFPSAAHLAAYAGLAPATRSSGSSIRGEQPSRRGNKQLKRAFFLSAFAALADPASRAYYDKKITQGKHHTQALLCLARRRADVLFAMLRDGTFYQPQPTPTG

SEQ ID NO: 408886 - protein, 351 aa, unidentified
MEIDTIGIDLGKTVFHLVGLDKQGEIVIRKKFARTQLLHLTANLRVRLIGMEACGGAHFLGRALREQGHDVRLMPAQYIKPYVKTNKSDYIDAEAIAEAVGRPRMRFVPIKSEAQLDLQSSHRVRDRWVRRRTSLINQIRGLLLERGITIRQGRQHVQTALPAILEDADTCLSGPLRTVLAQLQSELGHIQSQIEQIDEAIVKVAGEHEACRRLMTIPGVGSITATAVVAAIANGMEFNKGRAFATWLGLVPGQYSTGGKEKLLGISKRGNSYLRRLFVHGARSVLQRSENQAPALRAWLAKISARAHKNVVAVALANKLARIAWAVLTKGEVYRPELLGGEDLRSQLVCN

SEQ ID NO: 408887 - protein, 408 aa, unidentified
MRVYIGIDWSEDKHDVVFMNKAGADVAHLTIPHSLDGFVQLEAARRKLGLTPDECTLGLETAHNLIIEYLWSQAYQQVYVIPPSVVKSNRGRFRQSGARDDQSDGYLLADILRTDRGRLQPWHPDSLLTRQMRAKVSWIQHLTRASTRLSNRLRAVLLRYYPAALRIFPDLSTQIALEFIRVYPTPEAAARLTLAELVDFAHQQSYSHPKKLPRCYAHLKGDYPPASPETVMIYQDEAVQLASLLLQMTRTKLDALRELQALFQQHPDYPIFSSLPGAGELLEPALLVKFGDDRQRFPTPASVQALAGTCPVTDKSGKRKVIKFRKACDREWRSLSQAWAIALVNRAKSPLAIAYFEQIRPRCHNHRHAYRCVANRWLAIAWKLWQTPQPYDEAYHFQQRAARSKAKI

SEQ ID NO: 408888 - protein, 360 aa, unidentified
MEFFCGLDVAMDETAVCVVDDHGAVHLETTAVTDPDTLFAVLKPFLPRLRRVGHEAGSLSPWLHPELKKLGLPAVCLETQHVRAAMSAQRNKTDKADALGIAHIMRTGWFRQAHIKSQSCHRTKLLLTHRRNLAKFLDLENHTSFAEGVRYPPGQGGARGLRAGGAHRGGGRSTVVRVDGRHAVGARRAVEAVFRLHDLVVKMVARSELCRRFMAIPGVGPVTALSFMTAIDDPSRFRRSRDVAAYFGLTSRRWQSGTSIDVQGRISKAGDADERRSLYEAASGLMTRFKGRDKVKSWGQAIAKRSCHRKACVAVARKLAVIMHAMWSDGTFYVGDSAASQADAGRRAHDKARKLLGAHR

SEQ ID NO: 408889 - protein, 521 aa, unidentified
MTDSTVSIIGVGIDTARYGHHVSFLDQDKRSATKPFHFTENADGYRRLKNAFLKLQSKHPGLQLHIRIDAAGQYAENLIQWLHLLRMPTVISVGQPAMNKAYRNAHFNKRKADPVESLACARFAVVERPAATLHNPPEFSQLRDVVALMESSSKQRTRLVNQLHGLLARAFPEFATLAKDIAANWALKLLLKYPTAERIAAARLDSLLKIPHLDLDKAIRLQQAAKESTGSAAGPVVDQLIKQKVRAILDEQKEARQLEELVKTAFDALPNGPHQRLITIKGIGLQTAAALVAKIVSIERFNSASALIGYFAVFPEEVDVSGTDKNGKPKKGTEVRMCRKGNDLVRRLLYTAAQCAAKHNPAVRALFTRQIAAGKEYNVAIGHCMAKLLRQVFGIWKTNRDFDPDYETEQINDMAEADEQEPTVQEKVVGHKNRAVKPQQQVVTTTTSILPATRQPSKRRSPNRTTQSPAPAEAAIDPFSKSPRSSRDATVLPVQESDRLPAAGDKQSWPNDDPTQTPGVL

SEQ ID NO: 408890 - protein, 442 aa, unidentified
MSNSPVTTTPEPAWAAFVALDWGSQKHAWILQPADGSKREQGFLDNTPEAVAIWAAELGRRFPGRPLAVALEQKRGSVVNLLLCHPHLVLFPVPASMSASYRKTFVPSGAKNDPGDAAWILDLLLRHRDRLRRLQPDDPKTRLLLMLVEDRRQLVDDKTRLALRLQDCLKQYFPQLVQWFDVDTALVADLLKHWPDLQHLQRCHDGTLRTFFRRHHAGEDLTASRIEAIRAAVPATHDPALLEAGSMKARHLTESIATLRDQITRLEHRRDELVADHPDTAIFASFPGAGPATVPRLIAAFGTRRERYQSAFEVECDSGVAPVHVASGNTDRVSVRRACQKFTRQTFHEFAGQTIPRCAWAKAYYQAHCHKPQQHHAAVRALAFKWIRILFRCWKDRKPYDEQLYLTSLRRRSALIGPTLASATSVGWQTVAGFSKLSEKNS

SEQ ID NO: 408891 - protein, 356 aa, unidentified
MATRSMAHTTSHVTVGVDTHGEVHVAAAFSSDLGRPLGHFEIPTTPAGYRRLLRWARALGPVVTFGVEGTGSFGAGLTRFLQEQGCSVIEVVRPNRQIRRRRGKSDPVDAEAAARAVLAGEASSPAKSDHASVGMLRSLRVARRSAMKMRTQVWQQMQALLVSAPAELRERLRSLPPDHLVAVSTGLRPGPVTSPAAATKLALRGLAVRHQLLSGELQRLDLELARLTQEVAPALCALIGVGPDVAGALLVAAGDNPARLTSEASFANLCGAAPLPASSGKTNRHRLNRGGDRLANNALWHIVITRLRWHQPTRSYMARRTTEGLSKREIIRCLKRYVAREVYRCLLTTGALAPAT

SEQ ID NO: 408892 - protein, 344 aa, unidentified
MEYFAELDVSLEETSVCIVDGEGTIVAERKVASQPGAIAEALRGTGFALTRVGLEAGPLSPWLHAGLRAERFAVICIETRQAKAALRAMRNKTDRNDARGIAQIMRTGWFRIVHVKSDESHELRFLLTNRKTLQRKALDIENEIRGTLKAFGLKVGKVSRRRFEARVLELVADRAVLHHMVVPMLKARTVLLEEFARLHRMVLDVVRDDEVCRRLMTIPGVGAITALTFKTGVDMPGRFAKSKTVGAHFGLTPRKFNSGEINYQGRISKCGDAMVRSALYEAANVMLTRCTQWSALKAWAARIARKAGAKRARVALARKLAVIMHRMWIDGTDFQWGEQTKAAR

SEQ ID NO: 408893 - protein, 421 aa, unidentified
MHEERRWFVGIDWASREHVVSLCDGEGKKIGQREFIHGGTGISGMIAWLLKASGGEPGEIHVAIETPHGPIVEALLERGFNVYSINPKQLDRFRDRFTVSGAKDDSLDSYVLADSLRTDMPLYRQLSVAEPLIVELREWSRIDEELKVERIRLANRLRDQLWRYYPQMLELGELDEDWMLDLWEATPTPQKAARASKAAIARVLKKHRIRRFDAAQVLSELRKPALSVAQGTIGAAPVHIRMAIERLRVVNRQLADAELQLDRLCKKLAEPVAADDGENVPGQRQEHRDATILDSLPGVGRVVLATMLAESPDALQRRDYHALRSLYGTAPVTRRSGKSCIVTRRRACNRRLRNAVFNWGAVAVQHDPISKAKYQALRARGHGHARALRSVVDRLLYVACTMLENGTLFDHSFAEAKKAAA

SEQ ID NO: 408894 - protein, 337 aa, unidentified
MFNSEEGYLHKVVQLGIDVSKAKLDCTLLLDRDTLRSRSKIVPNTAAGFVQLVEWVQRQAQVAAAQVVAAMEPTGVYRQGLALALYEAGMTVVVVNPGQLRQFAEGLAVRTKTDAKDSVVLARYAGQPERIVWQPAPVEVRQLQALMGRLATVETELRRELNRREAAQLGHDPQLVQASIADAIAFWSAEQSKLQQAIDEHIDRHPGLKIERERLLTIPAVGPKTANRMLCVLSAHDFGRASQAAAFIGLTPVEHQSGSSVRGRPRLSKCGDARLRAALYMAAVVAIRHNPDVRALYQRLLKRGKAKLSALCAAMRKLVHICFGVLKNQQDYRPQCA

SEQ ID NO: 408895 - protein, 350 aa, unidentified
MSNNKNVATFGIDLAKSLFHVCGLDADGKRVVSKKLRRTQIVTFFANQPPCVVAMEACAGAHWLGRKLNGLGFQVRILPAQYVKPFVQNQKNDANDALAIAEASQRPSVKPVPIKTQSQLHLQALHRVRDRLVNQRTRLINQIRGFLLEEGIILRTGVGNFKSQLPAVLSDPSEEISPAMAALINELWDELLGLETRLKSINSQIEAWASQDQSARRLQSVPGIGALSATAIIAAIGNAAQFNKARDFSAWLRLVPKQHSTGGKTTLGRISKSGNPYIRRLLIHGARSCMLHLNREKDCLGAWITDLERRMPFNKVVVALANKLARIAWVILTRPAATYEQVQAARPASC

SEQ ID NO: 408896 - protein, 335 aa, unidentified
MATLVLGVDMSKASFAAAVWQEQQAQELAEYANESAGFVQFQEQVTTVAQRQGASTVHLIVEPTGGYELPLVGFAYAQGWQVSLPNPRQVRDWAKGSGKRAKTDRMDAKVLAQFGAEKHPPAQPPLATEVRELDNLLARRQDLEQMLRQEQNRLGELKGRPGVPTSVHQNLQQVIEALMQALREIEQAIAQHLQQHSYLQQAAERLQALPGIGPKTVLPLLVLLARWDTLTGGQGTAKGLTALVGLDPQPHESGRSVRKASTISHMGNAELRRLLYMGALGGVRGDNPLRLFYQRLVGRGKPKKLALVAASRKVLTWAIFSTNTDWNPALLATCC

SEQ ID NO: 408897 - protein, 353 aa, unidentified
MKRDKYMGLDVHQAMTVAVVMDAEGKVVLETMVATEAAAVLRLVKSLSGPLRVTFEESTQAEWLYELLRSHVTEVVVCDPRRNKLLSEGSKADKVDARKLADLLRSGMLRSVYHGHQATRKLKELVRAYETFSLDTQRTMNRIKAIYRGRGIATPGRGVYQARTRDQWLAKLAESGLRQRAAWLYQQLDQLKPLRKQAKQVMLAESRAHRAVSLLRTIPQLGPIRAAFIVATVDTPHRFRTKRQFWSYVGLAVVTHMSAEYEMKAGKVVRRRKPVATRGLNRDCNRRLKEVFISAATGGSRDESYKLYLDRLIDNGMRTEMARITLARKIAAVALIIWKKGMEFDRKQLNRTT

SEQ ID NO: 408898 - protein, 415 aa, unidentified
MEVLFSRCCGLDVHKSSITACVRIQEVGGKPRKIVRRFGAMTDDLRSLANWLIEQGVTHVAMESTGVYWKPVWNILEGQFTLVLANAQHVKNVPGRKTDTKDSEWLAELLQHGLLAGSFVPPRLIRDLRDLTRTRAVLTQESSRIASRIQKVLEDANIKLASVASDTLGKSGQAMLVALIAGEDNPEQLADLALGSLRGKIPQLRRALEGLTREHHRFLLKRLLVQWRFVESETELIDQRLEQIGKQEVPIAEAVARWDTVPGVDRFAAWGLVAEMGIDMEQFPSAKHAASWGGVCPGNHESAGKRLGGRTRKGNPWLRRILGQSAWAAARTKNTYVAVQFRRLAAKRGRKRAIVAVGHSLLVIGYHLLRKQSVYQDLGAGYFDRLNAEGLKRYLVKRLESLGQKVTLEPRESVA

SEQ ID NO: 408899 - protein, 363 aa, unidentified
MHSINNTELSSLEETRCQFNGGRCAIKMGIDVHQDFYVVVEQVGGTNPKPAQRFHKQAFLHWAAKLKQSGVEVYAVYEACGFGFSLQRQLSALGIVCYVVCPQKLDERNKRVKTDGLDAKALCLKLDRYVEGNRDALAVVRVPTEDEERSRAIHRQREQLVVARKRLEAQGRSLLVNHGLEPVQNWWKPRAFAALAVPQWMRELLLKSQPILLALQEKIAALTLQLQSAAAPNQPRGLGKMTSVIIDREIGDWHRFNNRRQIASYTGLCPGEYSSGNTRLQSCVTKHCNPRLRAALVELAWRLVRFQPNYKPVVKWRQILAKGALATGAARKKAIVAVARQLAVDLWRIKTGRLRAEQLGLTI

SEQ ID NO: 408900 - protein, 344 aa, unidentified
MSEYDGRQYVGIDLHRHRSVIVRLNAAGEQLDAVRIDNDPVALMAEIGKAGPCPEVVLEATYGWYWAADALAEAGARVHLAHPLGLKGWTTRRVKTDWRDAADLAEVLWRGRLAEGWIAPPQVRGLRELVRHRAKLVQLRTGVKAGVHAVLAKQGLRIPASDLFGQRGRALLAGAPLDAPFRARVNSQCRLIDALGFEIAVVTSLITRQVAADPGYPVLQQIPGIGPTLAAVLIAEIGDIHRFRSPRQLCSWAGLTPKHHESDRTVRRGRITKQGSRLVRWATVEAAQKLPTEAGWLVATRDGIRERRGRNIAIVAVARRLLTLVFYGLRDGHIRALHHPREAE

SEQ ID NO: 408901 - protein, 346 aa, unidentified
MKITTIGVDLAKEVFQIHGVDAHGKAVLRKQLRRNEMAKFFANLEPCLIGMEACGSAHYWARKLGEFGHTAKLMAPQFVKPYVKTNKNDMADAEAICEAVSRPNMRFVPIKNVEQQAILSVHRARQGFVKARTAQANQIRGLLSEFGIVIPQGIKSIAKRMPDILEDGENGLPGTMRNLLERLNDNLKEMDRQVTELELQIKQWHHGNEASRKLEAIPGIGPITASAIVATVGNATEFKNGRQLAAWLGLVPKQHSSGGKQTLLGISKRGDTYLRTLLIHGARAVIRFAENKAEPNQWLCNLMGRRNKNVAAVALANKNARIIWALLAKGKAYEQDYISAAKTAAA

SEQ ID NO: 408902 - protein, 332 aa, unidentified
MSSHEIVGIDVAARKLVAIGERVALAEYENTAAGRSKLAKALSQSPRPVRVVLEATGIYFLDLACELAAAGIAVMVVNPKATHHFAEAILQRRKNDPVDAAMLREFGRRMDFVPWQPPRHELFAFRALTREAQALSKAVAAAKNRLHAITATQLAPDTLIRALERQIAQNQALVDELVAAALAETKTNRELARLVARTDSAPGFAVKPGPGSEQGAAVLVVGELAVLPPMTARQWVAQAGLDVREECSGTSLARRPRLSKRGNKRLREALFYPALTAARCCPLAGAFVERLVAAGKTRLQAIVALMRKLLHGLHAMWRNDEDFDAEKLFAPA

SEQ ID NO: 408903 - protein, 400 aa, unidentified
MLSIGIDVSKGKSTVCGMKPGGEIVYTPFEVQHTREGMSELVSLLHNSGEEVRAVLESTGSYHCPVVAALLESGIFVSVVNSLRMKRFCSQSIRKVKTDRIDAMQIALYGLAYWQELQPTRLPEDTYRELQRLARQYYQMTSMLIKAKVDFNALCDQVLPGMQELMSDHAGRHKLSDFVLRYHHTTHILEMGETRFRKDYCKWAEKKGYRNCERMAAHIFATAQNGIPVLPNAPSTQIVITEAIRVLHTVEASRDAILTQMQALAKTLPEYSLVREMPCIGDTLAPRLIAEIGDVRRFHSKRALIAYAGIDAPPYQSGKFCANNRHISKRGNRYLRKTGYEVMQSYAMHKPANDPIFTFIEKKRSEGKCGKLAMVAGLNKFLRVYYGKVTELYRSLPAIE

SEQ ID NO: 408904 - protein, 318 aa, unidentified
MNTITKQKINVGVDTGKSQLDIYIRPLDIFFCVENNERGIKEAIVELKKYQPERIVVEATGRLEMPFAMACAEAKLPFVIAHPVHIKRFAGAIGRRAKTDKLDAKLIAHFSEVIKPDLTQLKPKAMRAMSDLVTRRNQLLSMQTMEKNRIQIMPKDLAMTIKPILTALGNQIKKVEEKILKIIELTPEFKAKDQLLQSMNGVGKVAAASIISNLPELGYMTNKQAAALVGVAPMSKESGRYKGHRKIQGGRHQVRTVLFMAVMSAIQSNPVFKSYYGKLVSAGKPKKVALIACVRKMVIVLNSMLRDGVMWEAPKDLN

SEQ ID NO: 408905 - protein, 392 aa, unidentified
MALKIVYKICCGIDVHKTFVVACIASTNDKGVTSYESHRFSTYTSGLKTLLQWLLDRNCKDVCMESTGKYWIPVYNILEKDCSIVLAHPKYVKAIRGKKTDKKDAKWIADLFKHDLVAGSFMPPAGIRQLRDLMRYRFKLTCFKSSEKNRLQNCLTVSNIQLGNVVSDTFGKSAQAILDKILENPADTSFDLEPLVFKSLKKKLPELRDAIDGYITPEQAGKLKVIKSHYENLEARKAELEELILALATPYQQELAILQTAPGISSDFTAIGITPTNNESAGKKKSVRVSKAGCYIKPLLVQCANAVVKSNKHPEIRNRYLRIKKRRGHKKAIIAIARMLLTALYYMLKNGENYNAELYRKSDLPPVDREITVEQALMIARNQGYKIKSATA

SEQ ID NO: 408906 - protein, 385 aa, unidentified
MQASNVCTPTVDHFGTILVAIELSRQSWLVTMHSPDRDRISRHKLCGGDHAGLLALIERAQERAARALGSVPAVVSCYEAGYDGFWLHRRLMAAGITNHVFDPASIAVEQRARRAKTDRIDGELLLRTLMAHWRGEPRVVRIVRVPSAEQEDARRDTRERQRLITEQTAHTNRIKALLRLLGMAVGNPRRRDWLIWLAAQRDWQGQPVPPRLAAELEREHARLMLVREQLEALSQAAVGADAPAAAAQMARRSALLLRLKGLGPVFAATLTNEVFYKDFRNRREVAGYCGLAPSPWRSGATNHEQGISKAGNPRARHKAIELAWLWLRHQPDSALSQWFRERTLNGSGRIKRIAIVALARKLIAALWRYLTTGLVPEHAVLKAKA

SEQ ID NO: 408907 - protein, 384 aa, unidentified
MEKSSTLYVELDVHKDIIDIATVDAGLEGEVRHVVSLGGDLVGLDKALRRLISKGHRLHVVYEAGPCGFVIWRHLRAQGIDCEVVAPSSIPKRSGDRVKTDRRDAMMLARLSRSGDLTAVRVPGAADEAVRDLARSREDAVRKCRNARHRLKALLLRNGIGYAGKSAWTAAHLRWLATLKLEHAAQQIALQEYLHAVTEATARIARLEQAMRDTLPEWGLAPVVQALQAMRGVQLVAAMTLVAELQDFLRFGNPRQLMAYVGLVPGEHSSGPKRRQGSITKAGNSAARRMLVEVAWHYQHSPRVSPIIAARHDQLPKAVTDIAWKAQLRLNAKFKRLVARRVMKNKAVVAVARELTGFVWAIGREVQTSGWQGIKAEPVRSAAD

SEQ ID NO: 408908 - protein, 343 aa, unidentified
MDHFAGLDVSVKETSVCILDDAGKIVKEVKVASEPQALLKVLGNPIYSFKRIGLEAGPLSQWLFSALAEAELPVICVETRHMQAVLKAQINKTDRNDARGIAQMMRVGMYRPVHVKTLRSQKLRMLLTHRKLLQSKAIAIENDLRGTLRNFGLKVGMVGTVRFEARIQELVETIPDLAVLVGPLLVVRRALREQIVVLHRRLLAIVRDDEVCRRLMTTPGVGPVVALTYRATVDVPARFRKSKSVGAVFGLTCSRYQSGEIDWSGRISRCGDEMMRVMLYEAAQSMLRSKKWSWLKAWAMQIARRRGMKKAIVALARRLAVILHRIWVDGTEFRWTREAVPAA

SEQ ID NO: 408909 - protein, 429 aa, unidentified
MSEVELVKLEPPYSAFVAIDWADKNHVWCLQVVGSEQRESGDLEHTPEAVEAWVVRLCQRFSPGPIAVAVEQSRGAVVFMLSKYEALHLFPVPPTMAAGMRAALYPSGVKDDPRDADLLLDLLLQHRDKLHRLQPDTEATRRMQNLVEERRKLVDERTEQSNRLTSYLKIYFPQILNWFEHLDTELVCAFLLRWPTLEELQRVPLPQLRTFFRKHHCRDQKLIERRIQEIRQAIPAIRDGAVIEAKSTVVKVTVRVMRNLLEGIAALDEKIEEAASAHPDFFIFDSLPGAGAVMAPRLLAAFGSQRERYGSAQEVQTYSGIAPVIEKSGKKKWVHCRLACPKFLRQSFHEWAGHSIAHSVWARSYYQQLRSRGKGHHAAVRALAFKWIRILFRCWKDRVAYDEVKYLAALARRGSPLAAVNVAFAGKAL

SEQ ID NO: 408910 - protein, 515 aa, unidentified
MITIPAVREHCAGIDVGKRGLAIAVMTGPADKEAAIQTRWVGTTVPELEALRAWLLQEQVTSVAMESTGSYWIPIKNILEKSLEVVLVCSKKHHPKKGEKTDFRDAIQLAHLHRHGMLTGSYLPERGVVELRDLTRRRKKLLGNLNSEKNRIQKILEVANVKIGNIITDVFGISGQEMLEALLSGREIAAEEIAEMAKSQLRTKIPQLTETLKEHQMNDHHRWLIQQSIDHIVLLDRQLEELEERIMVQIEPYRQQFDLLCTVPGFKEMNGAALLAEIGPDMSVFPDGDHLCSWAGRCSGNNRSAGKSKSGRVKKANKFLACALGQAAVCAVKMKDCIMRRKFQRWVKRMGGKKANVAVGHSLLKVIWCVLKTGNPYREPDAGVIHEMERKKLVRHHARRLRALGAEPDAVEAMVERLLGPAPTAEESQSSIAIEKARLSEETQVAVPGKHNKVASPPKGLGEVCRGKLGFRARHARRQSPAITQQPREKCSTGVAGTNNRKRSQRRKGSDNDSA

SEQ ID NO: 408911 - protein, 445 aa, unidentified
MTFRTIGIDLAIRGDHLAQIYDDGRPNGRAIRFRHDQPSLAAFVQTAVMGLRADDHIQAIMEPTGMSWFPVAHHLADAGVTVARVKGKRVKALRRYLSEHAKTDMADAQILAAIPSFGGPRLDPVHIPDPQSHALQRLTKQRSRFQNEIADARRRLLDLIRWASPRLEAVLPDLGTRLSLALLQKWFHPSDVLKARRTTLAKYVGAHAGGNHPRSGPFVETLITGLREAAQYAQNLHGTHIDFSELQFEIATEIENVLKKIQIVGNLEQHIADLYKHLDPQALLLSIPGVGRHLAPTLIGILQNIERFHSEKHLRGFCGLFPRRADSGGVERAGQTLTQGGNNRIKHALYLAADTARKTDPELAELYWRLMTAKGHHHKQALCAVANRIVNRIFSVLKRGKPYEVRDREGNGITMCEAKAIILERYTVGENIRAGRRSNRIEKNS

SEQ ID NO: 408912 - protein, 351 aa, unidentified
MVVVGADVHKRTHTFVAVDEVGRELGHKTFDADTAGHHKATAWARDRFGSELVWAIEDCRHLSARLERDLLTAGQSVVRVPPKMMAEQRRVARTRGKSDPIDALAVARAAQREPNLPVASHDEGSREVKLLVDRRDDLVKHRTATINRLLWRVHELEPGWAPMARSLDSAKHQQVLADRLAGVAGIVAELARDELADVIELTGRINQLERRIAGLVQQAAPTLLAMPGVGVLTAAKIVGEVAGVARFKSEAAFARHAGIAPIPVWSGNTAGRVRLTRSGNRQLNAAIHRIAVTQIRLDGLGKTYYQKKKAEGMSTPEATPLPQTTPGAHRLQPPDHRSSSRPDLHSDRGLT

SEQ ID NO: 408913 - protein, 315 aa, unidentified
MTNEVYVGVDVSKAYLDVFLSNGANASRFTHDPVGVDALARELNQAKPTLVVLEATGGLERTFVARLLAEGLPVAVVNPRQVRDFAKSTGQLAKTDALDARILARFAAAIRPAQRALPTATAVDFSDQLARRRQLVEMLSMETVRLKAAQSAGVRKSIKKHIDWLKQQLRASDEGLRRAVEESPAWQAKRDLLQGVKGVGEVTVLTIIACLPELGALDRKQIAALVGVAPLNRDSGTLRGRRTVWGGRATVRRVLYMATLTAIRWNPTLQAFYARLCLAGKAKKVAIVACMRKLLTILNAMLRDNKPFNPIPSGA

SEQ ID NO: 408914 - protein, 348 aa, unidentified
MALTIVEDRRAITGGVDTHADSHVAAALDPVGGLLGIEEFPVTPAGYARLLSWLGGYGTVALVGIEGTGSYGAGLARHVTAAGIRVVEADRSDRQDRRRQGKSDPLDAVSAARAAQSGRARGAPKGRGGAVEAIRALMVAKRSARAERTQTVNQARSLLVTGPDDLRARFAGYTVAALVSGMASLRPRPGSTVGYATRIALRELGRRAEFPGGQLGRLDELIIPLVTARAPALLALHGVGPDTAALLLIAAGDHPERLRSEAAWAHLCAAAPIPASSGRVTRHRLNPGGNREANHALWRIVITRMSSHPATRAYVERRTAEGLSKTEIIRCLKRYVAREVYRNLRPAA

SEQ ID NO: 408915 - protein, 317 aa, unidentified
MQTKNTVVYAGVDVAKATLQLHLQGQQIEFSNSPNGLKQLCTHLQKVPNVHVVCEATGGYERDLVKTMHQVPIPISVMNPALVRAATKAAGQRAKSDPIDARMLTDYGQRYQPKPTPPTSTTQDRLVALTGWLKQLIGGRALAKTQAEHHQDPFVLKQHAKLMTTLQSQIKAVEKQIEALLEQDADLKQRVSCLVEIQGVGSRTAWMVLAHMPELGRLNRHQVAALAGLAPWTRESGKMKGICCIGGGRPEVRLALYMAALSAARCNPVLRTLYKRLRAKGKVAKVALTAVMRRLLIYMNHCIKAISPETATAGAKE

SEQ ID NO: 408916 - protein, 392 aa, unidentified
MVKENFIYVGIDLHKETHTAVMIDCYNQKLGEITFPNRPADFPKLVTKVKKCNIDAKEVVYGLENAYGYGRPLAVWLIDKGYFVKDVNTAISHRQAKHRGAMYRKSDSDDAGAIALATLNMLDKLPDACPNDAYWSLGQLVHRRDNIMKQRTRLVNQLHEQLCIAYPSYKQFFNDISIPTALYFWEHYPSRKYLKGKSVEDLRAELVPVSHNKCSTRTCEKILDAIAGDKVKNNAYQDARDMVTLSIVSDLQHYDKQLAEVDKMLEQMYKMLGCTLTTIPGVNVITAVKILAEIGDIKRFSNANKLAQFAGIAPLHLSSSGKGKDVATKQGNRRLQVTIYFLAIQMVQLSSKGTPRNPVVRAYYEKRKAEGKTSQQALICISRRLISIIYGM

SEQ ID NO: 408917 - protein, 423 aa, unidentified
MEVMHERVAGLDVHKAMIVACIRIMAGAQITRECRTFETSTSGLRALLAWLVASGCTHVAMEATGVYWKPVWNILSDGEFDLIVANAAHIKNVPGRKTDINDAMWIADLVACGLIKASFVPNEQIQELRSLLRARKQLTREQTRHIQRLQKTLEEANIKLDSVITDIMGLSGRRMIEAIIAGETDPTRLAALAHRRIRSPRDMLVEALRGRVTDYHRFMLQLYLEQHDALAAAVAKIDQAVDAAIARMDEEVEAGQPTFLSLIILLCSIPGVSILSATTILAEIGTDMSRFPTAGHLLAWAGMCPAQNESAGKRKSSRLRKGAPWLKTMLVQCAWAASRKKDSYYKAQFNRLRSRRGPKKAICAVAASILTAIYHMLTDGTLHEDLGADHFDRRSTEVKAKRLVAQLAKLGFQVQLQPLARAA

SEQ ID NO: 408918 - protein, 391 aa, unidentified
MIFIGIDAAKDKHDCFIANSDGEVLCDVFTISNTLDGFNDLLSKIKSFSKDLSKTKVGLEATGHYSYNLLGFLLDTGLPTYVLNPLHTNLYRKSLSLRKTKTDKVDARTIASMLMSCQSLKPYTRALYHNEELKSLTRYRFDKVSERAKLKTSVSRLITILFPELEKLVSVVHCISIYALLSEFPSAKHIANANLTRLTNLLYSASKGHYNRDTAIRLREAARNSIGSVIPAKSLELKHTIKLIGELDDEISEIEAAIKQIVDSLGTTILTIPGIGYATAASILAEVGDFSNFETPDKILAFAGMSPSTYQSGQLSNCYAHMEKRGSKYLRFALYNATKYVCKWDSNFAAYLAKKRSEGKHYNVAISHAAKKLVRLIFALEKSRLPYMPVA

SEQ ID NO: 408919 - protein, 496 aa, unidentified
MKVAGHAPPRYEYATRSLDDRLKSFERGWALESTTYTQMLSFRRLHYKGYRRLQQACSPIFRKETKNMPSPIPDVVAWVGLDWADQEHQGRLQAVGSSQVESFVLPQRPEALQGWVSQLRTRFPFGRVAIAVEQSRGALVYALMTYDFLVLYPVPPKTSADYRKAFFSSGAKSDPEDADLLLELVRCHADRLRAWQPDDARTRQIQMLSEQRRKLVDDRTRLTNRLTTWLKASFPQALEWAGELGTARACEFLTRWPSLAALQQARRSQVRQFYLHHGGKVPSLESSLDKIHQARPLTSDPAVLQVSALMVRLLAQQLSALGSTLQELDQAIAPLFAQHPDQALWDSFPGAGPVLAPRLLAAFGADRQRYHEAREVQQFSGIAPVTAKSGKSCWVHWRWTCPKFLRQSFHEFAAHSRRWSPWARAYYEQQIEKGAEHHAAVRALAFKWIRILYRCWKDRTPYDEQRYVRALRRRGSPLVKRLQTQAALSAAPGGTL

SEQ ID NO: 408920 - protein, 317 aa, unidentified
MERILGVDVSKDYLDLDTLPATEKRRLTNDPAGIAELVEWARAFGPDRIVFESTGHYQKAAVGALLAASLPAVVVNARQVRDFAKALGILAKTDAIDAAVLARFGQVVPTIVRPLPTPEIQAFQELYDRRGQLVRMLAAEKNHRHATTSPKVIQNIDAHIRYLDKQIEALEDRMDHFVQNSAAFKARDEILQSIPGVGPQVSRTLLAYLPELGLGTRQQLSALVGLAPFNDDSGTQSHTRHIRGGRGKVRLGLYQAAVVAIRHCPPMKDFYIRLKERGKASKVALIAIARKLLALANALVRTMKPYNPANSVCLNYA

SEQ ID NO: 408921 - protein, 409 aa, unidentified
MLYVGIDWASDHHDVCLTNDSAQTLAAFRIAHGSQGFERLHCVIKEHQPEPQQVLVALETTRGLLIHDLLRSGYQVYAINPKAVSRYKDRYVVSKAKTDSLDASCLAHLLRTDRHRFKPLVLLPEAYRLLDRLCLDLRKLVDDRTRVVNQINDCLKEFYPQALGVFYKPACAISIAFLETFSDPNTLLATTKRRFRAFLKAQNYPYLEKTDELFGKIHAPAPQADPVIVQTGKLRLKALLDQFLAVQRHQKLYEQQIRAVLRKVPESKLIRTLPGLGKRLVPELVAVLGPRQSHRRFDSARALSNLAGCSPITQASGKWKTVRMRTACVKPLRRTFRHWSFASLTHSKWAWAYYRYRRSQNHVHETILRCLAQKWSKILFAVWAAGQAYDERLHIEKLKRHRVAWAVSF

SEQ ID NO: 408922 - protein, 334 aa, unidentified
MEQITTVGIDLAKNVFSLHGVDAAGKTLLRRTVRRDRLVETVAGLPPCLIGMEACSGAHEWGRRFQQHGHTVKLMAPKFVAPYRKSDKNDGNDAEAVCEAVTRPSMRFVPVKSAEQQALLTLHRVRQGFVVERTALINRLRGLMAEFGVVMPLRSVTVRRQAAQAAEALPELARRAIEDLLAQLRLLDERIDAYDAHIHAQAKLSEPARRLMQIRGIGATTALAIVATVGNAREFRNGRQFAAWIGLVPGQHSTGGRARLGHISKRGDAYLRNLLVQGARSVLHSAPAHQDRLSRWALELQQRRGYYRALVAIANKNARIAWALLARDQELRAV

SEQ ID NO: 408923 - protein, 338 aa, unidentified
MHYIGMDVHVKLTTVCILNEYGSITREFSHKGSWRVLLERLKRLRQELDGPVHVCYEASCGCGWLYDQLVALGMKVQVGHPGRLRLIFQSRRKNDRLDARKLAKLLYLGEVPLAYVPSQELRQWRSFVEFRRGFVQDQSRIKHRIRSLLKDNGVEAPRSLWTKKGLAWLSEAPLPEMAALERDILQLRLEQMAVQIREVEKVLAKKAASVPAVKLLMTIPGVGIRTAEAVVVYMADPHRFRRNRSVGCYFGMVPSEDSSVKSRFGHITKEGPSLVRWLVTEATWQSIRRDAGMRSYYERIRRDDPNRKKIALVATAHHMLRAMHAMLRTGESWRSEAA

SEQ ID NO: 408924 - protein, 324 aa, unidentified
MASNENTPVFVGIDVSKANLDVAIRPTGESWQMSNELEGIGRLVEQLGQVSPALIILEATGGYEAACASALAVAGLPVAVINPRQARDFAKSLGRLAKTDRIDAAVLAHFGEAVRPEVRKLADEQTVQLQALIVRRRQLIEMLVAEKNRVALAHRTVRPHLLEHVNWLEKELDQIDKGLREQLQKSPIWRENDDLLRSVPGVGLVTSTTLLAELPELGKLNRKKIAALVGVAPYNCDSGQMHGKRAIWGGRATVRSALYMATLSGIRYNPVIRAHYQHLRHLGKSAKVALVACMRKLLTILNAIIFSKSTWKETLAAPKSMNTP

SEQ ID NO: 408925 - protein, 436 aa, unidentified
MPMTFARLLDPTFEDDDDPFRFYDPSGEPLEDRLYLPCGIDPHSKVCGVVFVHPLPHRQDILAQRIIRNNNLQDVTWLMETGLRLAPQFGAHPIYVFETTGPFWRPYRHFLHRAGLATATVSARQSKSARSTGTRKTKNDLKDAYNIAKVFKQGESHATRIPPEPMASLREYTRLHLFFVEYSVAIQNRMYSIKYQIHPGFDAHFSKPVLPTALALMKEELVHPQRLKACELSYLTQVIREASHGRLGESLAHRLLESALTTFTIPYTPEALSFNLKLLAEAYEHIHRAILPQLRERIKDCLAQVPFEHHLDEIPYFGPIVIGTFLGELGHPGWFRTVDSVVAWFGLDPAVSESANKPAGTTHLTKRGTKYGRRIMWLVARNWAQYTPQGRSVFRKEFYKNKLSYDGAICVLAAKLVRIAFAMVRDGSHFDINKAF

SEQ ID NO: 408926 - protein, 346 aa, unidentified
MKYYAGIDVSLESASVCIVDERGLIVREGKVASEPGALIAWLGKPGAKVELIGLEAGPLSQWLHAGLSQAGLLVELLETRHVRAAFRAMSVKTDRKDARGIAQLMRLGWYRPVHCKSLPAQEMRALLVARKLLQEKLHAVEMSLRGILRNFGAKVGQTTARGFEGRVRTLVDGQPTLQAVADALLAARTTLARELATLEKRVRSTARHDDRVKLMMTAPGVGSIVGLTYVAAIDVPQRFRSSSSLGPHFGMTPKRYQSGQIDISGRISKIGDGTVRSALYEAAHIILTKPVKDAGALKRWALAIAKRAGKKKAKVALARKLAVILHRMWMDWKPFDPTKAVGSAAA

SEQ ID NO: 408927 - protein, 324 aa, unidentified
MIDGILGIDVCKNTLDVSISSYTKVRTKSVANSPDGWRHLLDWLIAQKIQRVHACLESTGRYSLGIACALYEAGHVVSIINPAQIRDFVRTKLGRNKTDGVDASHIREYCELFKPSPWAPPSEAHRRLGELQTIRSGIIAGLTEWKNRKNSGIVDAEAQALADATISHFTSQLRAVDKAIALTIDNDSDLRSKRDLLLSISGVGEILAGVVLAELPGPDVLRSSAEVVAYAGLNPRQHQSGTSIDRATRISKIGNAVLRAALYMPALSAMRYNSAIVALVTRLKSRGRLKPKQIVVAAMRKLLVLCFGVLKTGRPFDAAIAMGG

SEQ ID NO: 408928 - protein, 353 aa, unidentified
MRIVCALDVHRRQITYAIVDVRSGEMSRGRITPATRESVREWLARFDGVDEVGFALEGTTGWRFVVEEVERAGHRAHLADPAETAAKRGRKRRAKTDRADCDLLLRLLSARELPESWIPPAQILELRTRVRLRKTLIDERTAWQQRLQAQLFHQGVPRGLRPRTRAGREALAKVELSPAGLELVALALRMIETIDDELAPLDRALSLYARHQPGCRALIARLYGVGPVTATAIVAELGDARRFGRSDDAVRHCGLDVTVHQSDRKRAPGHLSHEGPELLRWALFEAAQQACRSASPDYEYYRQVARRIDHNRACLSVARKLCRRAYHILRELGDEALAPIETPDREEVIAAAA

SEQ ID NO: 408929 - protein, 350 aa, unidentified
MCTLPVFVGLDYHDASVRVCVLDTDGRELANADRCNDWKAIAEFADRFGRPVRTAIESCCGAADLAEELVSCAGWSVDLAHPGYVQRMKQNPDKTDYQDAQLVADLERIGYLPRVWLAPQHIRELRQVVRYRLQLTEQRRATKLRVRALLREQRCRAPQGVNAWTKAWDHWLRHTAELSAEGRWVANQHLQELACLVTRIRQVEKRLERLTANDVEVQRLQQQVGIGPVTAWTIRAEIGHFDRFRTGKQLARFCGLSPRNASSGQRQADAGLIRAANPALRAVLIEAAHRLVNYDRYWQKFAQRLRAAGKPGSVVAAAVANRWIRRLYHEMKTPSGELAVAVRSARSEDS

SEQ ID NO: 408930 - protein, 419 aa, unidentified
MSNPNVEHAAFIGLDWADQKHVLTLQEAGSDRRESSTLDQTPEALQTWTQQLRARFRGKPVAIAVEQVRGGLIYALMHVDFLHIYPVNPQTLAKMREAFYPSGAKDDPADADLLLEILMTHRQHLRVWIPDDVLTRSIQLLTEGRRHLVDERTALTNQLTAALKTYFPQAVDWFGDLHAQRACAFLQRWPSLQQLKRATPTSIRKLYQRQGYRGQDKLDQLLNNIKLAQPLTDDEAVLLASAMMVQALVTQIPPLTDSIERYDQQIASLFAQHDDSTLFGSFPGAGPVLSPRLLAAFGSDRNRFEFAADMQQLSGTAPVTEKSGKSCWIHWRLACSKFLRQTFHEFAGRSILESDWARAYYDQQRQRGKSHHAALRALAFKWIRIIFRCWKTRKPYDETIYCKSLQLRGSSLAVALTTK

SEQ ID NO: 408931 - protein, 335 aa, unidentified
METDYFLGIDVSKKKLDSALTIDGKNYQQDEMENTTNAIRVFFQNMKKMFGMKSSQMIVCMEHTGIYCLPLLDFLTKNKIKTCLESAVQIKKSQGIARGKSDRIDALRIAQYAYKNREELHYWEPQRGVVQQLKALLVTRDRLVKIRTQLEVPIKECEEFVVESIRKDMMKNCKRTLKAVGLDILAIEEAIDELIRTDPGLTEQVKIATSIPGIGTITATNMIIATGEFTRISVSKKFACYSGVAPFPHKSGTTIRGKTRVSNLANMNLKKLLHLAAMSAIQCSEELRTFYTRKVQEGKNKMSVINAVRNKLISRVFVCIKEKRMYQKTYRHELA

SEQ ID NO: 408932 - protein, 342 aa, unidentified
MSNLDSCGIEVSAKQLVIRLRRQGDWEPLRNFTNTPEGHEMVVRYLRQAGRIVRVCLESSGLYGLDLALALSAAEGMEVMVANPRAVRHFAQALMKRSKSDPIDATVLEEFAARMPFQVWKPPSPAALALHALARRLRELVEIQTAEKNRQHAAGLSETIPTPVRRDLARSLRAQQRAIERLTAHARKLIDKDAELKERFALIDTIPGVGETSAVQILGELAPLAPDLDARQWVAYAGLDPREYTSGSSVHKKPRISKSGNNNLRHSLFMPALVAVQHDAYLGGFYQHLLAKGKCKLQALVAVMRKLLHAIHAMFKTHQPYDGSKLYPAIRTQEVLCARVAS

SEQ ID NO: 408933 - protein, 349 aa, unidentified
MKATTIGFDLAKNEFQVHGVDAAGKPVVRKQLRRAQVLPFFARLSPCTIGIEACGSAHHWARKLTELGHTAKLMAPQFVKPYVKANKTDAADAEAICEAVARPNMRFVPVKSVEQQAILAVHRVRSGLVAERTAQLNRLRSLLAEFGLIAPRGRRALMERLPVLFADETLPGVARTLFERQSARIRQLETEISAEEAVILNWHRNNELSKRLDAVAGVGPITATALVASFGEGREFDNGRQMAACLGLVPRQHSSGGKTRLLGISKRGDTYLRMLLVHGARAVIRTLERRAKAAGNPTDRWLAKLLARRNPNVAAVALANKTARLIWALLAHGRTYDRNWSGHRAVAAA

SEQ ID NO: 408934 - protein, 362 aa, unidentified
MDTVHYIGFDIHKKTIAVCIKAADGQILEEENIEARREELDAWIQRHPTPWIGAMEATLFTGWIYDILKPAARSLKVGHPLMLKAITASKKKNDRVDARKLADLVRTNFLPECYIAPTPLRDLRRLLRYRNLLMHQTTRLKNRIAGLLMETGTEYVKQKLHRRGYFEELMTGLGKLDYMPPSVVNLLSISRTLMVTFAEVQGRLVRELLRHPDLKTRLDRLLTIPGVGDMTALTWALETCEVNRFSSIGKACSYCGLTSAEISSAGKDQRGPISKQRNAHLQTMLIEAAKLAPRHNPALALVYEKELQSGADRNCATLKVARKLVAFLMAVDKSGKDFELRLPLAATAADPPLPTTEALPHP

SEQ ID NO: 408935 - protein, 360 aa, unidentified
MTLHHLVPASHTAILIGVDTHKQTHVAVAINRLGARLADCSIAADGAGYAELVAWARALGTVEAFAIEGTGSYGAGLTSFVRRQAIRVVEVSHCDRRKRRKDGKTDTMDAESAARSVLAGIATAIPKAADGAAEMVRQIKIARDSAVKAKSAAIITLKTLLVNAPSELREALAPLTDRALLERCARLLPGAVVTPTASVKHAVRALANRWHALALEIREHDTVLDAITAAAVPTLRAAFGLGPDAASEMMIVAGDNPDRIRSESAFAKLCGVCPIPASSGVTNRHRLFRGGHRQANAALYRIVLVRMQWHQPTIDYVLRRTRQGLSKKDIMRCLKRYVAREVYAALLRDHVAAAQPSAAA

SEQ ID NO: 408936 - protein, 309 aa, unidentified
MAYKVAGIDVHKEVLMIVICEVDAPEAEPERRRFGTTTSELRRLSAWLREQGVQQAVMESTAPYGRPVWHELEPSLHLSLAQAFSNRAPRGRKHDFRDAERLARRLMAGELILSFVPEPEQRAWRTMTRMKVQLTRDKSRLQSQLECLLEEMRIKLSSVVSDLLGASGCRILRALAQGETDPRKLAALGDDRLQCTEEQRVDALTGNPQPFHRQLLALYLERHQLLTEQMDKLERLIAEAMKSHQEAVVRLAGVPGFGADSAQQVIAEGGPEASTFPSAAELTSWVGTCPGEETSAEENQSSRSAKGNR

SEQ ID NO: 408937 - protein, 407 aa, unidentified
MGKVFVGHDWAEAHHDVHVEDSEGRRLAKARLPEGVEGVARFHELLGSFVEDPSEVVIATETDRGLFVGALIAAGYGVIAVNPMSTSRYRERHSTSGAKSDPGDARVLAELARTDAHNHRPVAGDSIAAEALKALARAHQSMIWTRQRQTNQLRSTLREFYPGALRLSCFDDLDGTDAVAVLAVAPTPSLGRSLSQSKIASALRRGGRKRRVEERAAEIQASLRSAQLAAPDVVAKAMGASVAALVAVIAELNAQIARLESELTDRFDKHPDAEIIRSLPGLGTILGARVLAEFGDDPNRYCDAKSRKNYAGTSPITKASGKHRVVLARYARNRRLADACYLWAFASLTASSGARAFYDQRRAAGDTHHRALRALANRLVGILHGCLRHRALYNEDTAWAHRVEQAA

SEQ ID NO: 408938 - protein, 344 aa, unidentified
MNAVYYIGLDIHKKSISFVIKTHAGQLIRRGTVEATRPALTAWANQISQPWIGALEATMFSGWVYDLLQPHAHELQVAHPLLLKAITCAKKKNDRLDADKICDLLRCDLLPRCYMAPSPIRELRRVLRYRNLMMRQAVRMKNKIAGLLMEVGEPYVKEKLHRKKYFHTLLDELEARDEVPASVRDLLALSRAQMESCAQLERKLLAALEQHSKLAARVARLRTIDGVGAVVALTWALEIGEPERFGSIRQAVSYCGLCAAQKQSAGKDQRGPLSKQRNKHLQTTLIEAAKLAPRYNQALAALHERELKRGARNRATVAVARKLVAYLLAVDRRGDELQAKRQVA

SEQ ID NO: 408939 - protein, 353 aa, unidentified
MYIGVDTHKQTHVLLAIDEEGRTGGSRTLANTPEGWATALQWAREQQQQHRWGVENSGSLGKGFAQFLLAQGETDVREVVPHRTAQYRRRGRTQDKTDTADALAMARLLRAEGELLPAVQADDASTELRLLSDHRDNLVVDRTRLINQLHAQMLQLDPRYAERSGPLTCATGVRYCRDLCLPEGNGIEQTRLLVVRQLATRLLQLDADISAATKALEQRVKATATPLLQCRGVGAVVAARLLGELGCTPRVHSAAALAALAGIAPLAVASGGRHGHRVNPGGNRKLNRAIHIVALTQRRCEPLAQAYYEKKRAEGKTGRAAMRCLKRRLVDVLFRLWQPRGQALPAAPPALAA

SEQ ID NO: 408940 - protein, 348 aa, unidentified
MRQETKVYVGLDVHKEFCQACVMNKSGKVISNERFLSTRDELDKFLSRFNKAKFVLESTGIWEFIYEGIEKRGFEVVLAHPLKVRAISEAKVKTDKVDAETLAHLLRADLIPRSHVPPRDIRNLRQLVRHRAYLVRQCTSIKNRIHAELLRRGIRRPDDLKKTFTFKHVGWMRSLGILTVTSSLNCLEGIQEQIREVESFLLAEYNSRRDAQLIATIPGIGFYGALLILAEIDDVRRFPGPEKLCAYAGLVPTVHQSASRSYNGSITKNGSPHLRWILIEAVHVHTNYCPGSKLSKFHAKVAQRRGKQRATVATARKLLHTIYWMLLTKEKYHCQGFNLVEKAAPMNA

SEQ ID NO: 408941 - protein, 436 aa, unidentified
MIPAVLTHCAGIDIGKRGLAVCLMVGAAEAEPKVEVREFSTFTADIEAMKAWLVQAGCTHVVMESTGSYWKPVFNILEGSLVVCLANSEDVKGRKGHKTDRKDAKWLAHLLRHDMIRASFIPPRAIRELRDLTRRRKQLLGDATSERNRVQKTLEDANVKLGSVLSDVFGVSGQRMLEALLEGRGSAQEIADMARHKARQKIPQIIESLAGHRFSEHHRLMIRMSLEHLRMLEGQIIALDEEVVQRVQSLGLERMLNLLAAIPGLGHDSAATILAEVGPDMKQFPTAKQLSSWAGVCPGNKKSAGKNFSGHTTRGNRWLRSTLTECAWAVSRSKKSALRDKFWRWAAGGKKKAVVAVAHGLLLQVYQVLQTQQPLAQAPSPPMDEQRRKRIVRHHLRCLGRLGVSTGPKRISADGVAAKPGRPPSKVKTNKPEACS

SEQ ID NO: 408942 - protein, 402 aa, unidentified
MNSVGIDVSKGKSMIAVMRPFGEIVVTPYEVRHTDSELSELAKLLKSLDGETRIVMESTGNYHTPIAWVLYDAGFYVSVVNAMLVHDYKNNSLRKVKTDKKDSIKLANFGLDQWNDLPRYVPEEDTRLMLKNCHRQYQQYSKVQTMLKNNLISLLDTAFPEVNRLFSSPPRADGSEKWVDFVATFWHCECVCGLSEKVFVTKYQKWCKKHGYYFSQDKASDIYAEACGHISVMPKTDTAKLLVEQAVSQLQATSAALAALKKEMQALASSLPEYPVVMKMYGVGPTLGPQLIAEIGDVRRFHSKKALVAFAGLDSPPNDSGQVTNNHRRMTKRGSPALRRTLFVVMGIILQNSPVDEPVYRFMDKKRAEGKHYRVYMMAAANKFLRIYYASVKAYLDALEEA

SEQ ID NO: 408943 - protein, 412 aa, unidentified
MSEPDNTGFEVFCGLDVGKSVHHACALDRNGKRLHDKPLPNDEAALTEVFIHLAAHGRVLVVVDQPASIGALAVAVARSLNIEVAYLPGLVMRRIADLHPGQGKTDARDADVIAAQIRGAARTMPHTLRRVGTDDETLAELTVLAGYDDDLAAQSTRLTNRLRDALLHVHPALERLLGPRMDRGGVLDLLAAAPTPQALRDLGEAGIAATMRARSPRLAKTLPAQILAALDTQTVVVPGTVAFGRVIGGVAAQLREVRLERDTLATELETLLEAHPLAGVLTSMPGLGFRTALKILTIVGDGAAFPTAGHLAAYAGLAPVTRRSGTSIKGETRSQRGNHALKSALFLSAFASLADPTSRAYYDRKRAAGKRHNAALICLARRRTDVIYAMLRDRRPYAPPSVPTLPPVAAAA

SEQ ID NO: 408944 - protein, 407 aa, unidentified
MDIIIERACGMDVHKDNITACVITPEGKEIKTFSTKTSFLIQLIDWIKEHKCTHVAMESTGVYWKPIVNLLEAEDIEFLVVNAQHIKSVPGRKTDVKDAEWIAKLLRHGLLKASFIPDRNQRELRELVRYRRSIIEERARQHNRIQKVLEGANIKLGSVVSDVMGKSSRDMLRAIAEGEDDLEMLANFAKGRMKQKKDELKLALHGYINEHQRFMIKTVLNHIYFLTEQIDLLDQEVADRLSIYQEDIDRLDSIPGIARRMAEQMLAELGTNIKEQFPTAAQMCSWAGLVPGSNESAGKRKSSKTRNGNKYLKSALIETAHSIRGSKNYLGALYRRTAARKGKKRAAVVVAHAILRISYYLLTRKEMYVDLGEDYFDKQKQQSIVRHSLRRLESLGYTVRLIEPEAS

SEQ ID NO: 408945 - protein, 419 aa, unidentified
MSNVVYRRCCGMDVHKDTIVVCVLPPDGADGIPARKTYRTFRNDLTRMRVWLKQLKVTEIAMESTGVYWRPVWNILEDHGFRLLLVNPAQVKALQGRKSDRRDAKRIAEYLQDGRLDPSFVPPPEIRELRQLLRHRLSLLQQRGESHNQIRDLFETANIKLSSVASNLLGLTGRRIIEAMIAGEDSPELLAWKVKGKLRKKEKQVKEALKGCFHEFHRTMLKTHYALYQFLTRQVEELEAEIARRMQPYAEQVNALATIPGVEKIAAWHLIAELGADMSVFPDADHCASWAGVSPGSCESAGKQLSSRTKKGNKYLRRILTQSAWAASHCKQGYLRAFFHRVKARRGWARAVIAVAHKILVIAYCVLKTGAPYQDLGDDYFDKLHPERTAKRLVRRLERLGLTVCVTPSAALTPGLSES

SEQ ID NO: 408946 - protein, 364 aa, unidentified
MHSINNTELSSLEETRCQFNGGRCAIKLGIDVHQEFYVVVMQEGGANPKPPQRFQKQAFLHWAGRLKQKSGAEVYAVYEACGFGFTLQRNLSALSIHCYVICPQKLDEQNRRVKTDGLDAKALCLKLDRFVQGNRAALAIVRVPSEAEERSRAIHRQREQLVGARKRLEAQGRSLMVNHGFEPVQNWWKPRPFAALEVPQWMRELLSNSQPILVALQQKIAALSVQLQCAAAPEQPRGLGKMTSVVLDREIGDWNRFSNRRQIASYTGLCPGEYSSGNTRLQSCVTKHGNPRLRAALVELAWRLVRFQPNYKPVLKWRAILAKGALATGAARKKAIVAVARQLAVDLWRIKTGRLRPEELGLIN

SEQ ID NO: 408947 - protein, 389 aa, unidentified
MPIVADRPDAPTAIQSNLAAIFVSLELSRSIWLITSLSPGSGEKMSKHSVRAGDVAGLLARFSELKQKASARTRKSFPIVVIQEAGLDGFWLHRALEQEGVESHVVDPASIATSRRRRRAKTDRIDGEALLRTLLAYKRGEPRVCTMVRAPTPEDEDRRRLCRERKVLIAERVEHVNRVKGLLFSQGISSYEPLRRDRRQRLEDLTTGDGRTLPTHLKIQISRELDRLELLLAQIKLAEAERDGLLAEGQAAAPESPARMLLEFKGIGAESAATLWLEALFRHFDNRRQLASYAGLAPTPWQSGSVDREQGVSKAGNPRLRAILIELAWLWLRHQPQSALALWFKERVKRNGGRMKKTTIVALARKLLVALWKYVTAGIVIEGAVMKPA

SEQ ID NO: 408948 - protein, 423 aa, unidentified
MPYRIAGIDVHKKKLAVVVADVEVEDEYQFERRWYGSNPEQLRVLSEWLIEQQIEEVVMESTAQYWKPVWGALERYWKPMCQSREGAGRMSGTLHLAQALSNRGRRGRKKDFRDAERLVKRLVSQELVLSFVPDTEQRMWRTLTRTRYQRTRDKVRLQNQLEALLEEAHIKLSSLVSDLLGASARRMLKALAEGETDPAALAALADQRLRATPAQLQDALGACTELNPVYRRLVKMTLEGLQFVEQQIGQLDQEMASLLRQHQDAVERLAVVPGLGVDSAQQIIAEVGAKAATFPSGEKLSSWVGACPGEEESAGVNRSRHSPKGNRQMRRVLNQAANAAVKHKGSIFEIVYRRLVPRLGHNKTIGVIAHRLCHLIWIILHKGVRYEERGPAVSEKSRQRRTARMVRTLRILGYRVEPLANPT

SEQ ID NO: 408949 - protein, 352 aa, unidentified
MTDQRLVVAGVDAHTDEHHAAVVDVQGRSLGAAAFPTTGEGYGRLISWLRRQGTIDRVGVESTGAYAAGLVRALLAEGIRVVEVNQPHPHARQRLGKSDPIDAELAARAALSGTATAVPKRTSGIVEAIRQLAVVRAGALKARTAALQQLDDLIITTPEQLRSELRRGRTLKARAALCLRLRPDIERLAEPAQAAKLALRSLASRVDQLDQEIRELDQQLEKLVAAAAPRTLQLFGVGTQGASQLLVTAGHNIDRLKGEAAFAKICGAAPIPASSGRTTRHRLDYGGDRQANRALHMIAVCRLRHCERTRAYAAKRTADGLNRREILRCLKRYIARQTYHTLRADLEALNST

SEQ ID NO: 408950 - protein, 349 aa, unidentified
MTIVEDRPVITGGVDTHADLHVAAALDPLGGLLGVQEFPATATGYAQLLDWLGGFGPIILVGVEGTGSYGAGLARHLAAAGIRVVEVDRADRQDRHRQGKSDPLDAVSAARAAQSGRASGAPKGRDGAVEAIRALMVAKRSARAERTQAINQARALIVTGPDELRARFAGHTPAQLVEAIAALRPRPGDVPGYATRVALRELGRRAQFLDAQLDRLDELIVPLVTARAPGLLRLHGVGPDTAALLLIAAGDHPERLRSESSWAHLCGVAPIPASSGKVSRHRLNRGGDRQANHALWRIVITRLGSRPGHPATRAYVERRTKEGLSKKEIIRCLKRYVAREVYHQLRTGS

SEQ ID NO: 408951 - protein, 341 aa, unidentified
MRKTLYCGVDLHCNNAMYVVTDGRDKPLLRRRLPNQLPLILESLEPFHERLKVVAVESTYNWYWLVDGLMDHNYPVVLAHPSEMKQYKGIKAADDLTDAAFLARLARLEVLPTGYIYPREDRPVRDLLRRRMLLVRQRTGIVLSLQNLAMRQRGRSVGWRAFRQLSASERTELLGDHDCLTFVADQQVDLVEQFNKKIRRFEKKVLEHAQLKPAYECLLTMPGVGVILALTIMLETGAIERFETAGDYTSYCRCVRATHTSNGKNKDENNSKNGNAYLAWAFVEAVHHALRVCPKAKSFYEKKRAKRNGALATKALAAKWSKAAYYMMKRQEAFDLKRVFG

SEQ ID NO: 408952 - protein, 341 aa, unidentified
MKNKSFIGIDISKNVIDVSIFCEETPIKDFSHDVFNNSRKGFGEMCTWLKKNHVVLSNSLFGMEFTGSYSMELEKFLNTRNYQFCMLSTHVVKHYPMGPKDKSDKIDSAKIADFLYRYNGTECVKPYNMPDKTMQRLKALMNERKFLVEQRTCFMNRRQLCITKEDAQLYDGYIKKISRDIENIELEEQKLLATDDSLLSTYKNLLTIPGIGFVNAINVIVITRNFTAFETARQYASYVGVAPHFRTSGTSVKWRPRPSARCDGQAKADLSMAATVVVQYDAELQSFYNRKLGGKQDSDTKRKALNAVKFKLVLRMFAIGKQNRKWEPLDSKSSNEKLAIS

SEQ ID NO: 408953 - protein, 385 aa, unidentified
MPKLKDLSRSLITLEQDATLIAVIEMGQSSWLVAGIVPGIERQPLKKLGVDESSLLKLLHRWREEAEKAGHKIKRIAVAFEAGRDGFWLARWLNAHDIETRVIHASSVAVSREHRRAKTDRLDTELLKRSFLGWLRGERDHCKMVAIPTIKDEDAKRPNREHESLVGEQSRIINRMKATMARVGIRGFNPKLKKAAGRLDGLRTPEGEPIPPNTLAELRRDMVRRRLISDQIKQIEDARLGRLTQAPSDGPHTMVRLLARVIGVGVETADMLVQEILSRSMRDRRAVARYAGLTGSPDESGKKRREKGLARSGNARVRRGMIQLAWRFLIFQKDSALAQWFRARTENARGARKTMIVALARKLLIALWRFVREGVVPDGVVLRPA

SEQ ID NO: 408954 - protein, 391 aa, unidentified
MIYAGIDVAKDKHDCFITNSDGDVLFKAFTIQNNRDGFDEFYQKITSVTDDLTIVKVGLEATGHYSYNILGYLLDKGLATFVINPLHTNLYRKSLSLRKTKTDKVDAHTIATMLMSDVNLKSYSDTSYHNEELKSLTRYRFDKVKERAKLKSSVSRLVTILFPELEQLVPVLHMPSVYALLSEFPCASAIAHSHLTRLTHLLSTASKGHYGKDTAILFREAARTSIGSHMPAKSLELKHTITLIQEITSEIDEIEADIKSIMDSIHSPILTIPGISYRMGAMIIAEIGDFSRFDSPDKILAYAGMSPSTYQSGQLESSYSHMEKRGSRYLRYALYNATKYVCHWDTTFATYLEKKRSEGKHYNVALSHATKKLVRVIFQLEKSGQDYIKSA

SEQ ID NO: 408955 - protein, 343 aa, unidentified
MYFIGLDVHKKTISFCVKDAAGRVYQQGKVAATRRDLDGWVRTLPQPRTMAMEATMFTGWIYDYLLPHAEKVKVAHPLMLRAIAAAKKKNDKIDASKIADCLRCDFLPECHMASTEIRDRRRVLRYRNLVVKQMVQMKNRVSGLLMETGVSYNKQRLHKVGYFGDLMSTNADISDAVRPLLNLSRGMIRRSGKLEYDLVSSLERDPLLKERLRRLRTVPGVGPITALTWALEIGDYTRFSSNKQAISYCGLCADEKSSADKVMRMPLSSQRNKHIQRVLVEAAKLAPRESPELAMIRARELERGNPNRATLAVARKMVCYMMAVERRQQDFVPAGEIVPTAAA

SEQ ID NO: 408956 - protein, 389 aa, unidentified
MTKVFCGIDVAKYEHVASIYNPVTGEIILDSLHFDNNDKGFKSLLSNLSKLKKEYEVLVGFESTGHYHQTLFNCLTSNKYKCYLINPYMTSKFRSISLRDAKNDNIDSRAIARFLSLEYINLKDAEFLSNELKELSIQRDFLMTDSSKMKIKLKSYLDRTFPELETIVDINRAAIRAILKEYPSAEAISSVRIDKLKNIAKEASGNRYSLSKIETVKEKAKESIGIRSTGIELNIIQCIETLELKEKQIDKIEKEIKKHPLVFNSPLHQLTGINDVEIAYIMSAIISIARFDSPKKLVAFAGLDPKVKQSGTWQASTTRMSKRGNKLLRYALIWTAFNMSKKDGPIKDYYDLKKSQGKSHYNALGHCAAKLCRYIFWILNNPTKEFKYQ

SEQ ID NO: 408957 - protein, 340 aa, unidentified
MDNVTTIGLDIAKSVFQVHGVDAVGAVVMRRKLTRGRVLGFFEKLPRCLVGIEACSSSHYWARELTARGHDVRLLPAQYVKPYLKRQKNDAADAEAICEAVTRPTMRFVPVKTPEQQSVMMLHRVRLLLNRQRTQISNALRAHLSEFGVVAPIGRGGIEQLLVVINDENDTRIPADARLCLRMLEAQLSVVKAQILENDRRVRASARETELGRRLMEIPGVGPLLASAFVATVADAYAFKSGRCLSAWIGLVPKQNSSGGKEKLGSISKAGNRYLRQMLVVGAMAVIRYAERNGTRRPWLVQLMARRTTKVAAVALANKTARMVWALMTSGERYREPIIA

SEQ ID NO: 408958 - protein, 335 aa, unidentified
MEKIVVGIDISKDDIHACLKESVGDAGSKLKGTHKFPNSRLGFTELLYWVSRRSREAGSVWYVMEATGSYHENLAYFLYENHLKVSVVLANKIKYYARSQHLKTKTDKVDACLIADFGLSQKPALWQPLSCAYRQLRDLCRERISLQQARSRAKCQLDAMHHSHDKLACILRIKEEQIALYEKLLLEIEQEIQDKVSSDAELSRKVTQIREVKGLGLLTIVTVLCETNGFLLSGNIRQVVSYAGLDVKMSQSGHYQGRTRISKQGNTRIRGCLYMPALSAVRSNEPIRNLHLRICERNPSIRIKGIIAAMRKLLVLIFVLWKKDEPYDPNHVWQA

SEQ ID NO: 408959 - protein, 356 aa, unidentified
MKQVKTLSFAGQDIYCGIDVHKKDWSVCIRDDERELRSFSQPPQPAILTDFLGRNYPHANFHAVYEAGFCGYWIQQALSHQGIDCIVTHAADVPTSDKDRRQKTDAVDCRKLAKELSEGPLKGIYIPSQQIIEDRSLVRGREQLVQDQTRYKNRILSWLHFFGIIIPEGYKKNTHFSRRFISWLEQLQLNESTKLALQVKLGGLQCIRQQLLLANRNLRKLALSDRYQKQVELLRSIPGIGITNAMIFLTELDNITRFETFDHLCSYAGLKPDIYSSSDTTIIKGITHRCNSLVRESLVESAWKAVAKDPALLMAYKEYKKRMNYNNAIIRITKKMLSRIRYVLLHQTYYVTGVVR

SEQ ID NO: 408960 - protein, 429 aa, unidentified
MNYTQNEKIEQVTDSTIVVGVDIGSQIHYARAFDNRGRELTKRVFSFHNDLEGFNSFNLWAETLKSENKKTAVLIGCEPTGHYWFAFAKYVKDHQKRLVMVNPFSVKKIKELDDNSPKKTDSKDPKTIAKLVVDGRYSIPYVPEGIYAEIRDLVYSRDRIMKQHNISANRIQRWLAIHFPEYLGLYTRFDAASGLAVLEKAPTPKDVIALGVNGIRKIWHDKKMRGRGVTEDRAKTLVEAAHNRVGLDGGIGTKSELYMLLEEHRLWTSQLEAVNKVLEEMILKVPHVEKLLAIKGVGSITIAGFIAEVGDIRRFDSPKQIQKYAGLELVENSSGKHKGRTRISKRGRRKLRKILYQVMVPLLARNREFREIYDYYVTRVKNPLKRRQAMVAVSCKLIRVFYAVLTKGMEYDRFKMMSDIHRKSDIIAA

SEQ ID NO: 408961 - protein, 345 aa, unidentified
MIIGCDFHPSWQQIAWLDSETGETGERKLVHASGDAKAFYEQLGAPAWIGMEATGNSQWFIELVQDLGHELWIGDAAQIRASYVRKQKTDKRDAAHILKLVVEGRFPRLWTPDREQRDLRQLVLHRHKLVEIRSRVKNELQHLALNKGMQRKAKLWSQAGQKLLRELPLKPWAACRREDLLGLLAMLNQQIGTLDQAVQQAADEHPQAKLLMTQPGVGPNTALAYVLTMGDVSRFARGKQVASYLGLIPREESSGGRQKLGAISKQGNRLLRSLLVEAAQIAVRYDPGLRKQYLHRCHQKPKGVAKVAAARQLAVRLYWMLRTGKPYPEIVRIESSPRVALVGAS

SEQ ID NO: 408962 - protein, 321 aa, unidentified
MADHSMKVAGIDTGKAELHVCLLPDGTRFKVGNDAGGIAELVAKCVEAGIRRAGIEATSIYHRAAVKALRQAGIEVAELQPRQARGYAQALLQWSKSDTIDAAVIARLTRALDEVRPAPDPKIEAFAEVLTYVEQLEERIAWLKTSRERYANARLKTRIAADIKVLEKRRHAELKRLETAMRKEQILATRLDLLLSIPGVAERTAIGLLIRMPELGTLSREAAARLAGLAPCDDDSGQHKGERHIHGGRSRLRRTAFMAAFAAALNWNHDLNIFYKRLRQRGKAHTAAVVACARKLIILANAIIARGTPWEKQRGMPCPAS

SEQ ID NO: 408963 - protein, 430 aa, unidentified
MKSNTQNAKIEAITEKTLVLGIDVGSEMHYARAFDYRVIEYSKKPFKFSNTEAGFATFKEWVLDLKERHEKDKVVPGMEPTGHYWFNLGKFLQDNEMKPVLVNPHHVKKSKELDDNNPTKNDRKDTKVIAGLVREGRYMIPYLPEGVYADLRTASNIRFQLQAELTRIQNRISRWFNIYFPEYKTVYGKPDAKSGMLILKAAPLPEDILTLGIDGVNQIWRDAKLRAVGKARAKTLIEAAEHSVGSKEGAVSARMEIRMLLEDYESRNTRLQEVMVLIEELVRKIPMAEKLLEIKGVGIRTVSGFLAEVGDISRFNNPKELQKLAGLALVENSSGKHKGETTISRRGRKRLRYLLFEVAMSLVSKNQEFRELHNYYTTRRLNPLKKMQSLMAIAAKLIRVFYAMLTKGVDYDPKKMVSDIKRPAVYLQAA

SEQ ID NO: 408964 - protein, 341 aa, unidentified
MKRFIGVDLHKNSFTVCYMRRDGERDLKTFKVSPTDVEAFKKTLAKQDEVAVESTGNTGYFAREIKEAVSRVRIINPIQFKIISESVKKTDEHDAITIARYLSKGLIPEVRMRSKEEAKLASLIGTRDKFVKLRTTLKNKIHNILNASGIVTKKEMFSGDKSLDKLLSMGLDQADLFEIRIIVDQIKSLNKSIDEINNELTDRGKKLPGHKNLTSITGIGDLSATILLNTIGNVDDFSDDKKLAAYFGIVPRVYVSNETSQYGRITKRGNKIARTALVQSTLIAIRYNHYLRRFYFKLKAKKGSGKAIIATARKLLTIVYRTLKNDWVFEDFNKFKLAVSV

SEQ ID NO: 408965 - protein, 374 aa, unidentified
MADYSEVFVGIDTSKLRNAVAIAEGGRNGEVRYLGEIENTEAATSKLVKKLAAQHRRLTFCYEAGPTGYGLHRLIKTLGHECVVVAPSLIPKKPGDRVKTNRRDALNLAKQLRAGELTAVWVPDARHEAMRDLVRAREAAVDDLKSKRQQVLSLLLRLGRHFTGKRTWTRAHMNWLVSQKLAHREQRIAFEELLLAVRQADERVIRLERAIAAAVPDWSLAAVVSALMALRGLDLISATIFLAEIGDLSRFASPRQLMAYLGLVPGEQSTGDRVWRGGITKAGNHRARRILVECSWSYRHPPRVGKKKLAKVEAAPPAVQEIAWKAQARLTARYRALARRGKRPTLIVTAIARELSGFIWAVSHAVAAPATPAR

SEQ ID NO: 408966 - protein, 338 aa, unidentified
MEMIRQNAGIDIAKDSFVATLTILLKGQIVKHLGTKKFKNNKEGFEELYNWCKGLQKGVFEINFTMEATGVYYESLAYYLFDKEVTVHVLLPNKVKKFAESLNIKSKTDKIDSKILGQMGVERVLEKWNPGSKIYMHLRTLSRERQQLIKERTIVKNQLHAEEHTGFPMKTTMRRMKNRIKYLDKQIGGIERELEIIVSKDEYVSGKVKKITTTPGLAFKTVVAVIAETQGFVNISNIRQLNSYAGYDISIKESGKWKGKARISKKGNSYIRQAMYMPSLSSIQHSETYKTFYERINESKACGLIAGTAVQRKLLGLIYTLWKNDAEYIENYQIQKAG

SEQ ID NO: 408967 - protein, 336 aa, unidentified
MQITTIGLDLAKHIFQVHGVDANEAVVEKRRLRRGQVLSYFAKLPPCRIGMEACATAHFWARELRRLGHEVRLIPPQYVKAYLKRGKNDVADAAAICEAATRPSMRFVPIKSEEQQAVLVMHRARDLLVRQRTQLINALRGHLAEFGLIEAQGLSHVRRLLESMRTDLTVPELARDTLDLMATTLDAVDAQINAIEAKIAAWHKANATSQRLATIPGIGPLIASAITATVVDPTAFRSGREFAAWLGLTPRQKSTGGKQRLGRITRKGDQYLRRLLIIGAQTVLLRSKIAKASPWLQGLLARCARLKVAVALANKTARIAWAVMMRGDCYRAAAVA

SEQ ID NO: 408968 - protein, 364 aa, unidentified
MPSMPQPAQPDHNTTDEVILGVDTHKDIHVAAVITALGAVAASRSFPTTMVGYHQLLAWARTFGTLRRAGVECTGSYGAALTRHLQAAGITVIEVNQSDKATHRRRGKTDIIDAQAAARAVLSGRATATAKTGDGPVEMLRMFKLAKSSAIKSRTQAINQLKAVLVAADPTLREALSGLSTPILIRQCAQLPAGAPSDATSAATWTLRLLTRRIVELTGEIDDLNQQLARAVNRHTAKLLARPGVGPDCAAALLITAGDNPERLGSEASYAALCGASPVEMSSGKTARLRLNRGGDRQANAALYRIALSRLRWDPQTRAYLARRIAQGKTRREALRCLKRYIAREIYQIITKPRPPSTAASTAA

SEQ ID NO: 408969 - protein, 339 aa, unidentified
MKKVFIGIDFSKLKFDAAIYSVDTKAIMSTEVFNNEQSGYADFLQWVKENTRCQKSGILFCGEHTGYYSSSLSVFLYESGYDMWLVSGLEMKLTQGIKRNKTDRVDACKIAEHAYRYQDKVVLFQPVSKALEEIRELLSYRERLVETRKVLTTSAQEMKRVKDNASCDYIYQDSLEYIRSLNTSVRDCEKRIEVLVKQDISLKTNYKLVSSVVGIGLVNAALILVATANFTLFVNPRKFGCYCGVVPFEHSSGSSVRGKTRVSKMANRHLKTKLTLAAQNAARFDPELKEYYQRKRSEGKNNWLVLNNVKNKLIHRIFAVVRNGQMYEKQYVHPLKQAA

SEQ ID NO: 408970 - protein, 396 aa, unidentified
MCVLAADRAVLLDRSFAHTGQALHDMVDAVLEGSDPSRVAVAIETPRGPVVETLLERGVAVFSINPKQLDRFRDRHTTAGAKDDRRDAFVLADSLRTDPAAFHEVKASGALHVQLRELSRLHEELIAERVACGNRLIEQLRRYYPQPLPLDSIGDSPWLWAVLELAPTPAAAKRTSLAKFGSILKAHRIRRHSPEIIKTTLTTRPLSVGAGVAEAAEVRVRSLIARLRLVHDELKNCERRVSEIFEALEREPPVGVHSDAQIVRSIPGIGPVVGATLLVEAEASIRDRDYRAIRALAGVAPVTRATGKRSGKHAAIGMRRACNNRLRNAVHYWIHSAIGKDPRIKARYAEQRARGHSHGRAIRGVGDRMLGVLIAMLRKGTLYQLNAVPTGLEEKA

SEQ ID NO: 408971 - protein, 333 aa, unidentified
MRTAGIDVSHKTLALCLSKDGKLGKVREFANTAQGHQALLKVLREANVERICLEATGTYHLDLALALDSAGLALMVLNPKAAKRFAEALLTRNKTDGVDAGVLAQYAERMPFTAWQRPADEAVTLRAVTRQLAALRKTRTSERNRLHAMRQSALTPAVVIESVEQSIAQCDKQIDALRAWARAHIQDHPALHEGFELLISATGIGEASAIELLGELLVLPEDMAAKQWVAMAGLDPRQISSGTSVNKQPRLSKAGNRYLRQALYMPALSAARHDPHIRAFYLHLIEQRGLKKIQAVCAVMRKLLHGIHAMLKHQRPFDAARLCPPRLTPASAA

SEQ ID NO: 408972 - protein, 355 aa, unidentified
MTSTKYIGMDVHKESISIAVSNAAGKIVMECVIETKASMILQFIDGLRGDLQVTLEEGTSAAWLYDLLKPHVTKLVVCDPRKNASMREGHQSDNIDARRLAELLRLNHLSPVYHGEHGLRSLKELVRSYLTITKDLGRVMSRVKAIYRSWAIPCSGKQVYAPRHRAEWLGKITEPGVRRRAEFYYQQLDALRTVRQQVRRELLAEGKKHPAWKRLCQIPAIGPIRAAVLLGILQTPQRFRSKRQLWAYSGFGIETQSSADHRSVDGQLKRVKKQSSLRGLNRNCNHDLKNLFKGAAVVASSKPGPLQEFYTTLLSKGLRPEMARLTLARKIATIVLIVWKRGVCFEAQHLKPQTA

SEQ ID NO: 408973 - protein, 346 aa, unidentified
MDTIGVDLHKRESQLCMLAPDGTATEQRIVTSRDRFTAVLGQRPPARILLEASTESEWVARHLETLGHEVIVADPNFAPMYATRTRRVKTDKRDARTLAEACRLGAYRVAHRVSPARRHVRAELAVREALVRTRTRYIALAKALVRRDGLRVPRSASHLVMQRIAALDLSPTLRAELVPLVHVLAPLNAEIAAADRRLVALSTDDPVVARLATAPAVGPVTASAVVATADDIRRFRTAHQFAAFLGVVPGERSSGEKRRVGAITKTGNARVRSLLVEAGWGLLRTRAPEAAALRAWGLAIAARRGKRIAVVALARRLAGILYAMWRDGVAYDARHLRARGRLPATG

SEQ ID NO: 408974 - protein, 331 aa, unidentified
MYVGVDYHKRYTVATQMDPQGVILSQVRLKNDPDSLRTFASSLPPGSKIALEATEGWYYFYEMLENYCPEIYLAHPLKTRAIAEARIKTDKIDSTILAHLLRANLLPTSYIPPREIRDIREILRYRASLVSLRTAIKNKVHAILSKNGVVMTYSDVFGKKALRSLDELSLRACYRQELQGYLQCIETLKRLIAEVSETIKRLAEESPQAKLLITIPGISYYSSLLIISEIGDIGRFPSARKLCSYAGLVPRVHSSGGKTRYGSITKQGSKWLRWILVELSHHFIKGSPRLKCLYARIARSHGRNTARVAVAREMLKIMYVMLRDNRAFVIK

SEQ ID NO: 408975 - protein, 332 aa, unidentified
MDNFYFIGVDVSKKKLDFCVMFEGKVLHEEETANHQVAIMSLLRHLEEDYGMSNGQMLVCAEHTGQYTFPLACACKAVECRLWLENASEIKYSSGVQRGKNDKVDAKRIAIYASRFQDKVRYYERLTEDIEGLKQLESERTLYVTDLAKYKGQMKDQKEYMPKTLYERKMKRLQALMDDLEEAIQAITDEMDEVIAFCPVLFRQRELLMSIDGVGRVVATNMIIATEAFTRFDDPRKFNCYAGVAPFSYSSGSSQHSKARVSHRADKVMKRLLHLAAVAITHRIGGELKKYYERKVAEGKNKMSVINALRAKIVARMFAVIKRNEIYKPILS

SEQ ID NO: 408976 - protein, 410 aa, unidentified
MRRCIGLDVHREFAEVAIWEQGVVRLAGRIETTPEALSLFAESLCDQDEVALEATCNTHAIARLLERHVGRVVVSNPMKTRAIAEAKVKTDKVDAQVLAQLLAAGFLPSVWLADEETQALRRQVARRAHIVRQRTRLKNRVQAILHRNLVPRCPAADLFGLKGRRWLAEQQLPADERQAVEALLRQLDFHAEELKLIDAALAQVALARAEVKRLMTIPGVDATVALSIVAAVGDFDRFRSPDKLVSYLGLNPRVRQSGSHPAVHGRITKQGRAHARGMLVEAAFAAARVPGPLRAFYERVRGRRGMQIAIVATARKLAVLCWQLISKGEDYAYQRPSLTAKKLRALELRAGTPSRRGRKGAAGAYSLREVRARENALAEQGELVYRHLVADWQAKRPAKAGAGAATGERL

SEQ ID NO: 408977 - protein, 323 aa, unidentified
MTRTICGVDVSSQSLDARIGNQGAYAQFPNTAAGIDSLASFCHTHLVDLVAMEATGGYEQRALALLSKQGLPVAILNPRAVRQFAQSMGQFEKTDRLDAGMIALFAETKNSQPVCLSSASQQQLRALVTRLRQLTEFRTAQKNQSRLVADPAVVGLFKQFLDVVNRQIDELEIAIAAIIAADPLWHQFDQAFRTIKGVADRTVTRLMAEMPEIGSLSNKTVSKLAGVAPLASDSGKHQGKRAVRGGRASVREILFIVASVVGRYEPDFIAFQKRLSAAGKPRKVIRIALAHKLLVRLNAKARDVRRQLALAQACEPGKECVAV

SEQ ID NO: 408978 - protein, 421 aa, unidentified
MEKAAPAVFNELRRNVAGIDLAGRADHYVCGPRRDDGGYDIEAFGTTTPELYRMLEWLQERKVESVALESTSVYWIPVVDLLEAAGIETVLVDPREVRMVPGRKSDVKDCQWLQKLHSCGLLHGAFRPPEAVAAVRTILREKDTLVAMRVQAIQQMQKSLDQMNIRVHHAVSDIDGKTGTAIIKAIVEGERDPVKLAALRDSRCKKSEKEIADHLTGTWREEHLFTLSQAFKTLQFLDERIAAYEVKASQMFAALAATTDKSETPPPATEGDKKLTAKERANAEEKAILERFMGIDLTTIPGIGYGTARIIISEIGTKFDSFPDEHHFVSYIGLAPSLGKSAGKNVKQKKFCKNTSRVGAVLRMGATSLLHSDTELGAYMRSVARHTDKKTAVKATARRMAQMIYRGVVYGQEYIRLVRQP

SEQ ID NO: 408979 - protein, 316 aa, unidentified
MSLESSPVLGIDISKEWINARLLPGEQSWKVSTVSDQLQHWIDHLPHGITLAVMEASGGLEMPIAAALSNAGIPVAIVNPKQIRAFATALGQHAKTDALDAHVIARFGELIRPTPRPLPSETRVLLDELVTRRRQLIQTSVAEQNRLSTMRSILARQSIETHLLWLKSQVKEIEKQLEELIKKSPSWMVDTKLLTSVPGVGPITSSIMLAALPELGRLSHREITSLVGLAPVPRESGKWHGKRFIRGGRADVRSAIYMCILSAIRFNPIIKVFYIRLLAAGKDKKVAMVACMHKLLIILNAIIRDRKPWNTIPFPS

SEQ ID NO: 408980 - protein, 307 aa, unidentified
MVDTEGLVAKASVSNDPSGHESLLSWLEDRGAAPETTGVCLEASGGFEEEVARLLHEEGYAVSVVNPRRIKGYADSQLRRSKTDSADAALIARFGQREDPRLWTPLSASESRLRELTRARQTLKKEKTRTRNRLDETSEEAVREAYQDLLDEIDKKIEALENEIEEHVGEKEDLGEQCSLLGTIPGVGLQTAAIVVSELRSPDRFESARQAAAYAGLVPSHFQSGTSVRGRPRMSKVGNARLRSAMYFPAMTALRCNAAIKAFGDRLKERGKEKMVVIGAAMRKLLHICYGVLKSGRPFDASLHPGV

SEQ ID NO: 408981 - protein, 470 aa, unidentified
MKENHRRCCGIDVHKNSVTVCVLAPLGQRHIETKKRKFRTFTRDLKQLRAWLKNCQVTEIAMESTGQYWRPLWNLLEGEFAKLVLVNPQHIKGLNGYKTDPKDAQWIADLLEGGKLKGSWVPERSIRELRDLTRQRVHVLEDLNRAKNRIEQLCQAGNIKVSSVATDLFGVSGRKMLQAIIEGKRDAGWMADYAQGKLRGKRRELELALEGTFTDEQRWLLAKELRQIEWLEAQAGAMEQEIERRVAVFEEPIQRLLTIPGIDRKTAWTIIAEIGVDLSAFADAKHLASWSGLCPGNRESGGKRFSGRTRKANRYVKRAMCQTAWAASHTHNTYLSAFYRRMSIRKGAPKAIIALAHHMITVVHQVLSRKEEYVELGGDYYDQRNKPKTAARLMARLEKLGYQVEVKVIRDTPLAESTPQAADAEADSGAKALREEPEPPKRRKGRRCKCIERGIICKHGTSFGLTPLIQ

SEQ ID NO: 408982 - protein, 375 aa, unidentified
MKNSITYVAMDTHKKDHQVAVHFPEQEEILQFTIKNTARDVTKMVKKILKQAPGEVRFCYEAGVCGFDLKRRIEAQDICSCAVIAPSLVPRKPGERVKTDRRDALKLLSLFKAGLLTEVHAPNPQQEAARELTRCRQAAQEDLKRARHQLQKFLTRHGYVYTNGSHWTGKHLKWLRSLAIEDILLQDVFDSYFTQMQHCLQRLESLDKQVQKLADSEPYQKVVGLLRCFHGIDTLSAITVITEIFAFGRFASPGELMSYLGLTCSEFSSGDSEKRGPITKSGNKRVRRILVEAGWHYRHPCNVSHALKARRNGQPQWAIDIADQAGQRLRKRYRYLSHRGKMPCKVVVAVARELAGFIWALMQEYEVRKNSVKAA

SEQ ID NO: 408983 - protein, 414 aa, unidentified
MAEEETISWFAGVDWGSEKHQVCLLDAQGTTAGEREFPHSGEGLTELGDWLLSMASVASTVAVAIEVPHGPVVDALIDRGFVVYAINPKQLDRLRDRFSVAGAKDDRRDAYVQADGLRTDRRLFRRLQVADPRLIELRAWSRLAEELRAERVRLSNRVRHQLWRYYPQMQKLTDDLAAPWFLELWTIASTPAKAVRLRKSTVERLLKQHRIRRIDAETALRILREPAIKVAEGVAEAASIHMRSLVARLRIVNRELREAERKLDELCTVISEIEQTSGEGLQRRDVEILRSMPGIGRINLGTLLSEASGPLSRRDYEGLRTLSGAAPVTKRSGKSVIVVRRYAAHVRLRDTVYHWARVATQRDPKCRARYTAMRKRGHSHGRAVRGVADRLLALACVLLQRQTLFDPYFGRLTK

SEQ ID NO: 408984 - protein, 388 aa, unidentified
MTQAPGALPTPTVLDYERTLILAIELSNTSWVLAAQIPGLRGVKAKRSIEPTPEALMAAIEDYRARAVKAGRNVARVITVYEAGWSGFWLARWLAQYSIETHVIQPSSVPVDRRARRAKSDGIDAELLLRTLLAWLRGEPRVCSMVPIPAEADEDARRRIREREELLAERVGFVNRIGAILATLGVGEYNPIRRDRRQRLDELRTAIGGSLPTHARAKIIRMLDRLELLLTQIAELEKSRDAVLAEENPDKAASMIQQLAKLRGVGVQSATVLVREGFVREFANGKALGSYAGLTSTPYNSGGIEREQGIGKAGNARLRTLMVELAWLWQRYQPNSAQVGWFRERVGGTGRRMRKVMVVALARKLLIALWRFATQGVVPEGAVMKPAT

SEQ ID NO: 408985 - protein, 348 aa, unidentified
MVTIGVDLHKRTHTLVVVDQAGRQLATRTVPATVAGHLEALKWALGWAERSWALEDCRHLSRRFEADLVRAGEAVVRVPPKMMAGVRRAARTRGKSDPIDALAVAQAALREPNLPTAQLDGVAREIQLLLDHRDALVAERTRHQNRLRWHLHELDPGNEPAPRSLSRAHVLLALETQLAPLSDVVARLACDLVARCRSLTAQIKELDAEIKVRATALAPTLLALQGCGVVTTAKLIGEAAGIRRFRSRAAFAMYNGTAPIPAWSGHERYRLNRGGNRQINTALHRIALTQMRDPGPGRDYFLRRRAAGDTKLEAIRALKRRISDEVYRRLWQDELRIRSAQPDHEAAA

SEQ ID NO: 408986 - protein, 348 aa, unidentified
MALTIVEDTRAVTGGVDTHADMHVAAALDPVGGLLGVGEFPATAAGYARLLGWLGGFGTVCLAGIGGTGSYGAGLARHVTAAGIRVVEVDRSDRQDRRRQGKSDPLDAVSAARAAQSGRARGAPKSRDGAVEAIRALMVAKRSARSERTQTISQARALIVTGPDDLRARFARHTAAGLVSELAALRPRPGATVGYATRIALRELGRRAEFLDGQLGRLDELIVPLVTARAPALLALHGVGPDTAALLLIAAGDHPHRLRSEAAWAHLCAVAPIPASSGKRTRHRLNPGGNREASHALWRIVITRMSSHAPTRAYVERRTKEGLSKKEIIRCLKRYAARQVYRHLRPAG

SEQ ID NO: 408987 - protein, 406 aa, unidentified
MQSVIAFDVSMGKSYMVIYNAARSCIFEGEILHNRPHFEQLNKRIIDLVQKDGQVPAIVFEATGVYSRPLERFMNDHGFPYCLLNPLESKIQTATIRIHKTDKSDAHRLAQTHFTTERRIKKPQDHYFDQMRALSRYYHELDEELAMLRSRMHTLLQLTFPEMELLFTQKSELFLNILQLFPHPDYVKNLSKTVVRNRLLANTDKKLAPKTAEKKAIQLIGAAQDSYPAVDQDDIRCEQLKDYAKRSLAILRKREELIQQMVVLSEERNEYQILISIPGIGKNTAVRLIGEIGDMTRFENHKQLNAYAGIDIRRFQSGTLFYKDKINKRGNSHLRKILYFTIQNMIRQRRFGHNHFVEYYDKLKTQPYNKCHKVASIACVNKLLKCLFHLITHNLTYNYEIASVSS

SEQ ID NO: 408988 - protein, 363 aa, unidentified
MFESTTVAVGLDVHARSVRLAAVRADELLEERTLPYDEEAVERVLRRWPAVRCCYEAGPTGFGLYRYLVERGIDCRVVAPGLVPQRPGDRVKTDSRDARKLARLLAGGLLEPIHVPSRELEAARDLVRAREDARLDRMRDRHRLSKFCLRHGRTLPTNSWTVVRRKWLGEQRFEFVAQQQTFDTYVHTVDLVDARIEALERAIRETAEQGPWCQLVARLRCLRGIDSLTAFALAAEIGDFNRFKSAEEVMAFVGLVPSERSSGEQRRQGSITKVGNSHVRRLLVESAWHARRHPKVGYELARRQRGHDAVVIERSWRCQQRLYQRWQRMAGRGKPQQKIVVACARELAGFVWAIATEQPLRNT

SEQ ID NO: 408989 - protein, 355 aa, unidentified
MKYYTSTTQFNCGIDLHARQMYVCLMDRDGKKLVHTNIKNNDFDFFLKLIAPYRHDLTVCCECMFGWYWLADACQAAGLHFVLAHALYLKAIHGGKNKNDRIDSEKIAHLLRSNLIPPAYVYPADKRSLRALLRQRLFFVWRRSELLSRIHSHQLAHNRIPQKQTRANRDPWEQQLLAAENDPLRQLALKNDLAMIRHFDQQIAQLEAELQRQAKKTAARDYALLQTVPGIGENLGMTILCEIGDIARFPTVKNFLSYSRLVKGTVASAGKIKGLRGAKLGNPYLRWAFGEAAVIAKRDHAVIGPLAQRLEARMHGNKFKANTVVAIKLARAVYFMLKGKTVFDPDRLVAALSRN

SEQ ID NO: 408990 - protein, 361 aa, unidentified
MKKVSKESPKMKAGIAKPEITVGLDLGDRYSHYCLLNGDGEVMEEGRVQSTEAALRRHFEGEDCLRIALECGTHSPWVSRLLNALGHQVIVANARQIPAITGSESKNDRNDAEKLARFAAFDPKLLSPLEHRSEERQVDLNLIHARSTLVRARTMIVNALRGLVKSAGGRLPACSTDSLPACARAAIPLALSAVATPLLEQIGLLNAQVDGMDKQIEKLSAKYPEIVLLRTAPGVGPIVAAAYVLTLGQPDAASNRSAGAFLGLRPAQNQSGAADPQRRISKAGDSFLRSLLVQSAQYVLGPFGPDSELRRWGLKLAATGGKRGKKRAIVAVARKLAVVLHAVWRSGQRFQPFPQQTAVAA

SEQ ID NO: 408991 - protein, 347 aa, unidentified
MNITQVGIDLAKAVFQVHGIDVRGKITVRKQLKRSQVVAFFARLTPCLIGMEACGGAHFWARKLMQCGHTVKLIAPQFVKPYVKTNKNDVADAEAICEAVGRPNMRFVPIKNTEQQALLGLHRVRQGFVIERTAQANQIRGLLAEFGLVMPAGIGCIERKLPEFLEDAENGLSEVSRALFSRLLEHFRALDRQVQELEREINAWHREDTASQRLQAIPGIGPLTASALVASVGNANAFHNARQFAAWLGLVPRQNSSGGKTKLLGISKRGDTYLRTLLIHGARSVLLSAKRHPDRASGWLARVASRRNPNIAAVALANKNARVVWAMLAHGRDYQVGYRSANRIVAA

SEQ ID NO: 408992 - protein, 413 aa, unidentified
MDAIVERCAGLDVHLDTVVACVLYGKLDIKPKKEVKTFSTTTKGLLELLDFINQKECTHVAMESTGIYWKPVWNILESGAFDLIVANAKKIKNVPGRKTDVKDAEWIASLLRCGLIEKSFVPPERIRDLRDLTRLRKELLGEVNRNKNRIHKVLQDANIKISSVLSDVFGETGKSILNQIIGNQCITEEFIYSLYEGRGKSKLKSTLMEMYEALNGKIRGHHVILLGMHNSNIVFLEKQINELEKEIDILLQKERDSLELLETIPGISKISASSIIAEIGTSMDVFKTEKHISSWAGLCPKNNESAGKKKRSGIKSWNNWLRSMLCECAWSATKKKDSRFKNKYWSMVPRMGRKKALIAIANMMLRLIYHLLKTKSTYKELEIQYFIDKDKRREDRIIKELKSKGYLVEKDSL

SEQ ID NO: 408993 - protein, 409 aa, unidentified
MDVFHERCAGLDVHKEKIFVCVLIGRGSGFQKITFQYGTFHHQLVEMRQKLVELGVTHVLMESTGVYWMPVYDVLEGFVEVVVGNAQHIMNVPGRKTDESDAEWLAKLLRFGLVKPSFVPAREFRELRQLTRYRRAVVQTRASEQNRVEKHLQISGVKLSSVASRVFGVSGTDMLNRIAEGTTDPGELAGLARGRLRKKMPQLRDAFAGSISEHTQHLISLQMEQMNRLESTIAQAELKIDEKVKPYEELLARLDDMPGLNLRSSIDVLAEIGTDMSPWATHRQIAAMAGLCPGNYISAGKRLKNRSRQGNPYLKSILVQAACSAINVDGSYYQAKFKGLKKRRGHKRALVAIAHAMLVAIYHMIKKGEPYRELGAKVVSDHELSRKKEYLVKQFQNLGFAVSLTPLTA

SEQ ID NO: 408994 - protein, 329 aa, unidentified
MRFYQQTHSFYCGVDLHARTMHVCVVDAEGRTREHVDLPCDPGRFLKLIEPYREQLVVSCECLFAWYWLADLCREEGITFVLGHALYMKAIHGGKSKSDKIDSEKIARLLRGGNLPQAYVYPKQMRATRDLLRRRMKLVRLRGQAIAHVTNTFTQYNVAAPEKKLSYHANRIGVAERFADESVQRAVRSDLAFAEHLDEQLRGIELYLTQHAKIDDPQAFARLQTVPGIGPILAMVILYEVHDIGRFGSVQQFVSYSRLVKCSHESAGTKTAGHGNQLGNAHLRWAFSEAALLMLREHPAAKKLVARLEKKHGKAKAISILSARLGRTV

SEQ ID NO: 408995 - protein, 371 aa, unidentified
MNTIVYVGMDVHKESYTLCCYCYDTDLVEYRQTIPADYRLVLKYMERVRDRYEGDITFVCGYEAGCVGYSLYHQLTDHAVDCKILAPTTMAITNTNRVKTDRKDAANIARCLAFHTYSEVYVPDEQDNQVKEYIRMRDDQKLALKKVKQQILAFVLRQGKRFEGGKTYWTIRHMKWLYGLELAPLDKETLSEYLITYEYLVEKIERLDRRIEELASEERYREKVKKLGCFMGLQTHTALSMLVEIGDFERFAKAQKFAGFLGLVPSEDSSADDINRYGITKAGNRHLRRLMVEAAQCYTRGTVGHKSVALKKRQEGCSPEVIAYADKANERLRRRFYRLTLHNGVNRNKAATAIARELSCFIWGMMTDNVA

SEQ ID NO: 408996 - protein, 404 aa, unidentified
MLIVSLYVKGFGVAAVQELIKAAKKNFADYIILKNLVMKQQTSATTETGIKGSNIIDFTGKTLYVGIDVHQKDYQAAKVLNGICLGNHRMESNKEKLIEHLQHPYPGATFKCVYESGAWGFTLQRTLQAAGMECIVVHAADAGTTDKERRRKTDKADALKLAHGYASGDLKGIHVPEEDRQKDRSLMRYRKQLTGDITRSKNRLKSLLKYQGIDLPPKYAGNNWSRNFLNWVEQQAEKDALLKNTLLLMLEQIRLLRQLLLETERKLRQMRKTKYADKAELACSVPGIGPTTAMLFLLETGDINRFKGFDSLNDFAGLCPDTDSSGDVHKDTGITTRRHKQLRSALIEAAWQAIKSDPALMDSYQALCKRMKGTQAIIRIARKLLRRLRTVLLNDIPYQKGMVA

SEQ ID NO: 408997 - protein, 373 aa, unidentified
MENSMTYVAMDTHKKQHRVALVYPNNVLIIEFSVKNTPAEIRKMVRKIKRNAPGKVKFCYEAGVCGFTLQRRIEALGCKCSVIAPSLTPRKPGERKKTDRRDAKKLLGLFMADMLTEVYPPDEQQEAARELTRCRGAAQENLKRIRHQLQKMLVRHGYVFIDGQHWTQKHLRWLEAVEFDQPLLQEVFDCYFTEMRHCLQRVKTLDRELEKLAQSEDYREVVGILRCFYGIETLTAISIITEVFDFGRFASARAFMSYLGLTPSESSSGEKEHKGPITKTGNKRVRRLLTEAAWHHRHGHTVSTALRKRREGQPQWAIDIADRAWVRLRKRYRRLVHRGKLPCKATTAVARELAGFIWSALVEYEARKKRKVA

SEQ ID NO: 408998 - protein, 360 aa, unidentified
MEVGQEVVLHPVVGGVDTHKDLHVAAVVDELDRVLGTRCFATTRQGYRQMLAWMRSFGQLRCVGIEATGTYGAGLLRSMQNAGVDVLEVTAPDKPDRRKRGKNDDLDAQNAAHAAFAGKRTVTPRSRDGMIESLRVLKACRKTAVVARRIALQMIQNTIVCAPDGLREALRQMTRMQLVRTLAAWRPDLTDYRNVDSAYRISLKSLGRRYVELHDEIADLDVMIAAIVDELAPNLVARNSIGHAGAAQLLLTAGDNPERLHSEAGFAALCGVSPVPASSGKTTRHRLNRGGDRAANSALHIIAIGRLRTDPRTKAYMAKRVAEGHSKLEVIRCLKRYIAREVFTLISQRQKEINQARITA

SEQ ID NO: 408999 - protein, 452 aa, unidentified
MQKRQSKNQVLSTECIEANAAGIDVGATEIYVAVPPDRDQRPVRSFATFTEDLRAMAAWLAQCRITTVAMESTGVYWIPPYEILEAAGLRVCLVNSKHVKHVPGRKTDVQDCQWLQYLHSVGLLDPSFRPDAEICAIRSLSRHRASLVETAAMHVQHMHKALTQMNLQIHNVLSDITGLSGLCILDAILEGERSPTRLAELCHGSVRSSREIVVKSLVGNYRSEHLFTLKQSLAAYRSYQKLMAECDLEIERLMRQLNSKIDPDRKLPASAPRLRSLKRRKNQFHFEMGPELNRIFGVDLTQIPGISALTAHTLLAEIGPNLSRFHNPGAFASWLGLCPINKKSGGKVLSSSTRRTNSRANRALRIAAQTLARSQSHLGSFYRRVRGRIGAPQAITATAHKLARIVYHLITTGKPYDETVFRNEEQKQVQRHENRIRKQAKTLGFKLVPLTA

SEQ ID NO: 409000 - protein, 412 aa, unidentified
MSKRYVGIDVHKNYLVAAAVGTNQELVMKPVKIASIDFETWLDKHLTAEDEVVIEAMGGAWVIHDLLVKRVARVVVAHPYHVKLIASSMIKTDKRDAITLARLLAANIVPEVWVPPVHVRELRSLIYHRNNLVHRRAAAKNRLHGICLQFRIIVPEGVTTFSPGYWNNLNLPAVEKLRARHITDEIHLLTQNIQDAEELISQMSAQSPWVEDVPYLLQLPGIGILTAMTILSSIGEIGRFPSSKHLASYAGLCSRIHFSGNTFKTGGITKQGLGELRYAMIEAAWNAIKYSPFWSRRYEQLARRMDNQKAATAIARMLLVVIWNVLTKREVDRAADFNTVGKSILIWGWKNRLATSLGMKPAEFAGKHLASLGIKLERIKYCSRVYPLPVPGVSIEIRQNVMAPKLNYVPSK

SEQ ID NO: 409001 - protein, 336 aa, unidentified
MYSGIDLHSNNSVVAIIDGADRIVAQKRLPNDITKIVGFLARWQDDLAGVVVESTYNWYWLVDGLQDAGLHVHLANTAAIKQYDGLKHSGDETDAQHLAHLLRLGILPTGTILPREHRVVRDLARKRMQLVNCRTTHILAVENIMARQLGERMTSNQIKCLTANAIDSLPLAADVGLAIKANVAVIATLQSQIEVLEKRLQERVKPRPQYGLLTSVPGIGQTLATVIFLETGPIDRFADVGNFASYARCVDSVHTSNRKKKGEGNVKNGNRYLAWAFVEAANFARRFCPEAKRFYERKKARTNNIVATKALAHKLARASYHILKEGKPFDATRCFA

SEQ ID NO: 409002 - protein, 387 aa, unidentified
MQSVTSATAVATTVRAKDITLFASLELSKSKWVVTINSPGSEKFSKHVIEGGDGACLLDLLSRSRAKAEQRYGVGVKATVIQEAGLDGFWIHRLLLADGIESHVVDPASIAVARRHRRAKTDAIDGETLLRTLMAWARGERRVCSMVRAPSPEDEDRRRLTRERGTLLKERIQHTNRIKGLLGGQGVRDYNPLRRDRFERLEALRTGDGRELPAMLKAEIRRELDRIALATTQLAAVERARDALIRTDAEEPNNPAALLLKLKGLGPEFASLLWLESLFRSFGNRRQVAAYAGLAPSPWQSGGVERDQGISKSGNRRLRKTMIELAWFWLRHQPDSALSRWFQVRVGAAKGRIRRIAIVALARKLLVALWRYVTQGVVPEGVVFKAA

SEQ ID NO: 409003 - protein, 408 aa, unidentified
MRIIGLDIHRAFAEAVAWKDGKLSRLGRVIMRREALKEFAKQLSNSDVVVIEATGNAASVAAVIGPHVSRVVIANPKQVRLIAHAKIKTDKIDAGVLAQLYGSGFLPEVWIADEATQALRRQVTRRNQIVRQRSRLKNIIQSILHAHLIPSCPHQDLCGPMGRAWLCEQILPGDERLAVERHLREFDRLTDDLKVIERDLAQSALADDRATRLMTIPGINMVVALALIAAIGDIKRFAKPEQLVGYLGLNPSVRQSGPGPAYHGRITKQGRGHARGMLVEAGWVAARCPGLLRSFFLRVQSRRGQHVAAVATARKLAILIWHLLTKNENYLWSRPALHARKLRDLELKAGHKSARGQKGTAHAYNLKSQRDQERRWVEQGETAYARFVAGWNARGPKARTGAAKEERQ

SEQ ID NO: 409004 - protein, 334 aa, unidentified
MNYIGLDIHKKNTQACMKNEAGKVLLTGRFPSRPKDLNNFIQKVEEAGGPASFVIESTGFCIPIYDVIAGHGHQIKVAHPLKVKALTAGRAKTDKNDAEMLAELLRLDAIPESYIPPAELRGLREQTRFRQSLVRNSTEIKNQIHALLASRGIETPSEHRSPFSKKHQEWLRSLHLSQIDDLLDILDTLRQKVEKVESEMERSGQYKDDIELLKTIPGVGDAIAHTLAAEICDIKRFSSPENLYSYAGMVSSIHQSGEKGWAGPITKQGNARIRFIAVEAAYSHVRYSKDSDLTRFFERKKLEKGTKKAIVATARKLLGIVYQMLKKREVYHAH

SEQ ID NO: 409005 - protein, 400 aa, unidentified
MRAVFGIDVSKVSSEVAILVNGEKVHGYTISNDAIGFSRLLGDLKTVHKPEIIFEATGVYSRRLQSFLDEHGYAYTRLNPLEAKKQLDSLRVRKTDQIDAEKLAQSQCVLNRKPTYVQEEDYQNLRDLSRFYQNLTEDIVRAKNCLHKVLQVTFTELENILSTPSGEQYWNLVIAFPCKDFVLDLSKNELSKSIRQSTSKRISDKRVAYLAEKLTVLANQSYCAVKKNSPMLEEVRYYTKELLRLSEQRQAVLDEMVELAQPLPEYDILLSIPGIAETTATSIIGELGDIRRFQSANQINAFIGIDLRHYESGNFLAKEHITKRGNPYARKILFKCIHNIASASHTNPCHIADFYEKRKRQSQTTSTKPHTIASIHRLIRTMYYLITHNKLYDYTSTQNR

SEQ ID NO: 409006 - protein, 321 aa, unidentified
MTYVGIDVSKATFVVAYSSAKSSETKTFKNTTKGIREFIRTISPEENHCVLEATGNYSMLLVYLLSKAGFTVSMENPLKIKNFARVMLSVVKTDEIDARLIALYGERMQPAPFKLRSDSLLLLKQKRTVLRQLKKQLTANRNLEGSLKILPFIDSKCKKVLEKTIKFLEKQIEEMEEELTSLAEIEYKKQMDLLTSIKGIGATLAAALIIATGGFTYFDNAKQLTRYLGLSPTYQQSGTSVNVKGHINRNGDAYLRSQLYIGAMASLRCNTECKACFERLRSNGKPGKVAIVAVANKLIRQAFAVVAHEKKYIDGYKSVKP

SEQ ID NO: 409007 - protein, 368 aa, unidentified
MNRKSSKLYVGMDVHKESIDIALAEVGGEVRHHGRIGGDMNALTRTVRKLESLGQPLVFVYEAGPCGFGIYRMLTTRRHACWVVAPSNTPRRVRDRIKTDRRDCLKLAGLARAGELEPIYVPDPVDEAMRDLVRAREDAVIAQRQVRQRLGALLLRNDVRYAGKTPWTEAHRRWIARLALPNPAQRIAFEEYVQAVAESSERVRRLTASIEGELQGWRWQPLVSALQACRGIQLIHGARIVAELGDLSRFTHPRQLMAYLGLVPSEDSSGERRHQGAITKAGNSSARRALVEAAHAYRYRPAVTPVIARRQSRLPKAVTDIAWKAQLRLCARFRQLSARGVNRNKIVVAIARELAGFVWAIAQQVKPK

SEQ ID NO: 409008 - protein, 342 aa, unidentified
MLIIGCDYHPSVQQIAWWDQETGACGERRLEHGRGEAERFYRELSQQGKAVLVGMEACGHTRWFEQLLSELGIELWLGNPSKIAKQRVRSQKTDRRDAQLLLELLEQNRFPRLWVPSAENRDLRHLLWHRHRLVQMRSRVKNQLQAIALNQGVQRKHRLWSRQGRAELESWALSPWAAQRRHDLLQLLDQLTPRIRELDVAVEREALQRPEVRRLMRHPGVGPITALAFVLVLGTPERFKSGKQVGSYLGLIPCEDSSGEKHRWGHLSKQGNGLLRYLLIEAVQTAVRCDAQWRRRFLHLAMRRQRNVAIAALARKLAVSLYWLWRNGSNTEPAPQPGSHVG

SEQ ID NO: 409009 - protein, 345 aa, unidentified
MQPMYYIGLDVHKQKISYCVKEGGGKVFAEGWIPATRFDLDRWRKTLPQPWSAALEATMFSGWIYDQLRPHAAELKVAHPLMLRAIAAAKKKNDRIDANKICDCLRCDFLPESYMAPTAIRERRRTLRYRNLLVRQMVQMKIKISTLLMEAGVSYNKSKLHKAGYFRELLATNPDINESLRSLLRQCRETVVRLSKMESALIHSLQQDQLLVERVERLMSIPGIGPITALTWALEIGEVQRFSSIKKAISYCGLCGDEQRSANSVQRTPISKQRNKHLQTTLIEAAKMAPRYSPTLAMLYEREEQKGNANRATLAVARKLVAYLMAVDRGKTHFLVIDQETRTAA

SEQ ID NO: 409010 - protein, 348 aa, unidentified
MVTDQLDYVVGVDPHRDQHAVAVVDVRSGVVVFETAVAADSGGYAEAVRVAVQHAPGQRAFAVEGSGSYGAGLTRFLGGSGEQVFEVGRLPRGRRGGGKTDALDAVRAARSVLAQERPATPRSNGEREALRALMAAREGAAAAKRAGLCQLRALLVTAPEPARAELRSLTRARLLACLTAMRPERRTDPELRGSSLALRSVARRVQQLTAEERELAREIKTLTQKLAPQLLDQPGVGPLLAAQLVLSWSHKGRLTSEAAFARLAGVAPIPASSGQTIRYRLDRSGDRQLNRALHMIIVTRRRAHPATIAYIERRTSEGKTRREATRCLKRYLARSLYRLLENGAAPDA

SEQ ID NO: 409011 - protein, 326 aa, unidentified
MKYTPVGVDIAKHVIQIHFINEHTGEVVDKQLRRQDFLTFFGNREPCMIDMEACGGSQHWARELTKPGHKVRLLRARFVKAFIMGNKNDVMDARAIWMAVQQPGKEIAVKAEEQQSVLVLHRTRMQLVKFRTAQINALHGTLLEFGETIHKGRAAMEREFPEALERMKERLPPYLIMVLENQYNRLNELDSLIEDIEKQLTSVERRNETCKRLLDIPGVGPLIATAAVATTGEASAFKSGREFAAYVGLVPKQAGSGGKVRLLGISKRGDTYLRTLFIHGARAVALVAKEPGPCNRTKKTSSSQCGNRRHGKQAGTNSMGDNRTWS

SEQ ID NO: 409012 - protein, 420 aa, unidentified
MKIFVPVAGVDVSKRFSDLCVLSPDNNVLLRQKIYHDMVSMKLAEKKLHELELEYGTRPVVVMESTSHYHLILFQFFTDAGFEVVVVNPIQSGALKNINVRKVKNDRVDAYRIAMLYRLKVLRPSQIPTSSLRGLRLLTRQRSELKGDVARFKNRLTAYLDQIFPGYGEVFSDVGGSASRAVLHMCPTPEKLLNADGSLLAKVICEAGNKGPKFGAEKAAKLREAAGSAQVIGVRSASNASLIKNVLDIIEGLLAAIQRIEGEIKELVTQDTRLDEDVKLLCSIPGIGFSSAVVIAAEMGNISLFRKPKQLAAYFGLDPGERQSGTFKGRKNKLSKRGSPQVRAALHMAAVSSVSRSRDGTYRNPVLAEYYERKCAEKPCKVARVAVMRKLSNIIYAVLRDRRPFELRTPQEHMALLAAA

SEQ ID NO: 409013 - protein, 341 aa, unidentified
MKPEMRVLGIDIAKRLFHAIGMDERGTIVFRKRLSRHDLIPFIAKLPPVRIGIEACGGAHYWARRFREYGHEVKLMAPQFVKPYVKSNKNDSRDAEAIAAAVTRPTMRFVPIKDVAQQDIQALHRVRERLMGERTALVNEVHGLLHEYGIVIPKGVAKFRQAVVSKLESAKDKLSALSQEMFWQLVEEFAALEKQLAYYQEKLEALATTHPECQRLMTIPGIGPLTATALVAAVSDASAFKNGRQFAAWLGLVPRQHSTGGKERLLGISKRGDSYLRKLLVHGARATIRWVGRKTDRRSQWMRQLIERRGKNRTAVAVANKNARIVWALLTSHQAYDLAKG

SEQ ID NO: 409014 - protein, 347 aa, unidentified
MKYYKSTTKYNCGIDLHTKQMYICVMDREGNKLVHKNIKGNDFAFFLKLIEPYRHDLTVVSECCYNWYWLADACMDADIEFVLAHALYLKHIHGGKNKNDRLDSEKLAHLLRTNLIPPSYVYPRERRSMRGLLRQRMSYVWERATLMGHLQMNQQSEGIQPVPKGGHNRDVWEERILEQYTDPLHRLAVQSDMELIRSYDRRIEVIEQQLIRQAKKVHGRDYELIKTVPGVGRILALSILFEIDTIERFPSVKDFVSYCRLVKGSVASAGKLKGLCGGKMGNPYLRWAFGQAAALGKRTHPLIAPYSEKLVSKHGKYKGNAILANKIGRAVYFMLRNGTAFDAELMV

SEQ ID NO: 409015 - protein, 363 aa, unidentified
MYDSTTVTVGLDVHARSIRLAAVRADELLEERTLAYDEEAVERALRRWPTVRCCYEAGPTGFGLQRHLVERGIDCAVVAPGLVPQRPGARIKTDSRDARKLARLLAGGLLQPIHVPTPELEAARDLVRAREDARLDRMRDRQRLSKFCLRHGLRMPTSSWTVVRRKWLSEQRFEFPARQQTFDTYVHAVDLVDARIEALERSIRETAEQEPWRALVGRLRCLRGIDTLTALALVAEIGDFDRFKCAEELMAFVGLVPSEHSSGEKRRQGSITKVGNSHVRRLLVESAWHARRRPKVGYELARRHRGQDAVVIERAWRCQQRLYSRWQRMAGRGKPHQKIVVACARELAGFVWAIATEQPLRNS

SEQ ID NO: 409016 - protein, 417 aa, unidentified
MESSYGSVAGLDVHKKSVVVVVLRGDQPGEDQATGIFGTTRFGLNELITFLRQHGVRDVAMESTAQYWRPVWIALEGQFALTLAQARSTRAPRGRKWDKADARRIAKRLLSGDLTISYVPSPEQRDWRLLSRTEVAMHESVVRVRNQIEVLLEQAQIKLSSMVTDLLGKSGRRMLDALVRGVSDPAELAGLGDRRLHASQQELTDALSGHLTEAQRLVLKLYLEQIDILERHLADLDKRLAKALMPHQEAIERLCEIPGISVRTAQYIIAETGPRAEAFAVAGKLASWAGMCPGQQESAGVSVSSRSAKGNWMLRRTLCQTAWAAIATKGSEAQRRFQRWRPGLGTQKAAWASAHYQIRIVWKVLHDAVRYRSPDTEVMAQRALVARAKRALNDLRKLGYAVSITPPASQTARPSVS

SEQ ID NO: 409017 - protein, 346 aa, unidentified
MTYSTTVGVDLAKNVIQISVVSGRGKELSNRSLTRTKFAEFLGKQKPSLVAFESCASAHYWARAAKRHGHEARIIPAKAVMPFRQGHKTDSNDALAVAEAARRPNIKEAPMKTAEQQGLQAIQRSRELLIGDCTALSNHLRGILLEFGVAIPQGFASLLRALPEILEDGDNELPDLYRPTLHRMHQRLLELREDIESMTKEVDILVKQHPVCKRLTAIEGIGPIGALPLYAVMGSGKAFTKSREFSAYLGLTPRQYSSGGKTNIVGISKKVGNRRLRSILIQGARAYVYRMKEPRSLKDRWLKDLIERAGPNRAAVALANKNVRTAWAMVTQGTEYQRRLQLEMAA

SEQ ID NO: 409018 - protein, 402 aa, unidentified
MNCVGIDVSKGKSMIAVMRPFGEVVVSPFEVRHTASELSELARLLKNLDGETRVVMESTGNYHAPVAWLLHGAGVYVSVVNAMLVHDYGNNSLRRGKTDKKDAVKLANYGLDHWLTLPRYVPEEDTRLMLKTCYRQYQQYSKVQTMLKNNLISLLDTAFPDANRLFTSPPRADGSEKWVDFVATFWHCECVCGLSKKAFTAKYQKWCRKHGYNFSQDKALDIYASACGRFGVMPKTNTAKLLVEQAISQLQTTSAALAALKQEMQSLAASLPEYPVVMEMFGVGPTLGPQLIAEIGDVRRFHSKKALVAFAGIDAPPYQSGQIDVRSRSISKRGSASLRRTLFLVMGVLLQCAPMDEPVYQFMNKKRSEGKPYRVYMMASANKFLRIYYASVKAYLDSLEHD

SEQ ID NO: 409019 - protein, 400 aa, unidentified
MLSIGIDVSKGKSTVCGMKPGGEIVYAPFEVQHTRKEMSELVLLLHNSGEEVRVVLESTGSYHCPVVAALLENGIFVSVINSLRMKRFCSQSIRKVKTDRIDAMQIALYGLAYWQELQPARLPENTYRELQLLARQYYQMTSLLIKAKVDFNAICDQVLPGMQELMSDHAGRHKLSDFVLRYRHTTHILEMGETRFRKDYCKWAEKKGYRNCERMAAHIFATAQNGIPVLPNAPSTQIVITEAIRVLHTVEASRDAILTQMQALAKTLPEYSLVREMPCIGDTLAPRLIAEIGDVRRFHSKRALIAYAGIDAPPYQSGKFCANNRHISKRGNRYLRKTGYEVMQSYVMHKPANDPIFTFIEKKRSEGKCGKLAMVAGLNKFLRVYYGKVTELYRSSSAIE

SEQ ID NO: 409020 - protein, 340 aa, unidentified
MNKYVGIDMAKADFWACFNEASEPRKFLNNNQGIGNFLTVLKKNNYQKQETLLGVESTGGYHLRLCFDCKKSGYKINVMNPLIVKKQSQTSLRSVKTDKKDALLIRYCLTTGTGYEFSETTDSVVLKSLVRQRDNLSAIKLKLRLQQNEIVNKEECLKRKINSVYQEVNETLTQKIKELEKKLKEYRKEEQALLRTIPGVGPITAISFISELGSIDRFKKAKKLTAYVGIDPRVHESGTSVKGKSYITKRGNKILRTRLYNAASVAVQRPNLFQDFFQKKISEGKPYRVALVATMNKMAHVIHAVWTRGTPLSKKRKLAQSLELVVHGKGVDGDIVSCTM

SEQ ID NO: 409021 - protein, 402 aa, unidentified
MNCVGIDVSKGKSMIAVMRPFGEVVISPFEVQHTASELSELAKLLKSLDGETRVVMESTGNYHTPVAWLLYDAGLYVSVVNAMLVHDYGNNSLRRAKTDKKDAVKLANYGLDHWLTLPRYVPEEDTRLLLKNCYRQYQQYSKVQTMLKNNLISLLDAVFPEVNRLFNSSPRADGSEKWVDFVSTFWHCQCVSTLSLKSFSARYLKWCRKHGYYFSQEKAFEIHSKAQSCISVMPRNETTKLLVQQAIAQLKATSAALAALKQEMQSLAAALPEYPVVMEMFGVGSTLGPQLMAEIGDVRRFHSKKALVAFAGIDAPPCQSGQMDIHSRSISKRGSAALRRTLFLVMGIYLQSAPLDEPVYQFMDKKRSEGKPYKVYMMASANKFLRIYYASVTAYLNTLARI

SEQ ID NO: 409022 - protein, 423 aa, unidentified
MPGTVNTMEMEREVVCGADIHKQFLLATILTKDGQKFQDRFDSNFEGLLNFRQWLLDHDCQRLAVESTANYWQPIYFVVGKDVEFVLANAYQIKHIPGRKTDVLDSEWIAELCLKDLISPSRIFSEDDRDLRSMTRTRENYVKMRSQIKNRIHQELESACIKLSSVLSDIFGKSGIHIIRGILNGLSIDDILDRIPSKKLKAKRGEIQDAIQANISPVQIDLISLLLDSVDFLNREIESIDKQIQSLISTRQEDLKIAMSIPGMGFTSASTILAEIGNLKDFNNGEKLAAYCGLVPSVYQSAGKLITGHITKHGSPHVRRMLIEVAHAISRTKADSKLKRFYFRIKSRHGAKVAVVALARKVLCILHHLIVNREMFEDGISSKSKREKTGRSSSSTEMIIEDAIQILVRAGYLVQKRSEKEGG

SEQ ID NO: 409023 - protein, 403 aa, unidentified
MNAVGIDVSKGKSMVTILRPFGEIVSSPFEIKHTSSDIHSLIKLIHSIEGESRVVMEHTGRYYEALAHQLSAADLFVSAVNPKLVKDFNNDSLRKIKSDKADSVKIARYALDKWQSLEPYSITDELRAQLKVMNRQFHFYVKQKTAMKNNLINLIDQTYPNANTYFNSPPRSDGSQKWVDFVYTYWHVDCVRKMSLNSFVKHYQNWCKQKKYIFNKSKAEEIYTKATELVPVFPKNEITKRIIRQAIAQLNSTSATVETIRILMNETASKLPEYPIVMQFKGIGPSFGPQLMAEIGDITRFTHKGALTAFAGVDPGVNESGSYAQKSVPTSKRGSSNLRKTLFQVMDVLIKTMPQDDPVYQFMDRKRAQGKPYYVYMTAGANKFLRIYYGRVKEYLCILSESS

SEQ ID NO: 409024 - protein, 377 aa, unidentified
MEKDSRFVGLDVHAETIAVAVAESGGEVRSLGTIPNTPEAVRRLAKKLGPPETLRVCYEAGPTGYVLYRQLTALGVPCAVIAPTLVPVKAGERVKTDRRDAEKLARSYRSGDLTPVWVPAPGHEALRDLVRAREAAKKDQLRARHRLGKFLLRQGRRAPTGSKAWGVKHRAWLQTIRFAHAAQDATLLDYLTEIDHAADRIVRLERAIATAADVAPAPVRAVIAGLQALRGIAKLSAVSIVTEVGALSRFAKPRQLMGYSGAVASEHSSGPHLRRGGITKTGNAHLRRIVIEAAWAYRHRPAIGGTLRTRQQGLSEEVKALAWKAQHRLHGRYTRLLAKGKAPTQVVTAIARELLGFIWAIGVHIEQHTAGGAPAAA

SEQ ID NO: 409025 - protein, 329 aa, unidentified
MKNYEEVVGIDVSKKTLDAYCHQAQVHKVFINDVVGYKRLLKWVLKVTKDSKVFYCFENTGYYSLKLALYLASQSVVYVEESPLKIKRCSGIIKEKTDRIDAILIARYAWLYREELTPSTVKSMSHLELGRLLALRDQLVRNNAGLKGTLKEMKVLLSSSSTDVGCLSLKRSIDYLEKQVKSIETRVKDILASDASMNKNYELLTSLKGVGLVVACQLIYHTGNFTRFASWRAFSSYCGTAPFKHESGTSIHRRKQCHYLGDRKMKSLLSMASVSAIHDSELRLYYKRKLAEGKDKMLAINNVRNKLIARAFAVVKRGTPYVVLQQHAA

SEQ ID NO: 409026 - protein, 323 aa, unidentified
MEQAILGIDISKDSFDTALLINGAYKFNTFTNEPDGFHRMTKWLNKLKCGHLHCCMEATGRYADHVAEYLYVSGHSVSVVNPARIKFYANSKLKRNKTDKADAQLIAEYCLREKPSLWSPPPANFKNLQALIRHLDGLMKSRQQERNRLKSGVSTPGVITSLQDCISFYDQQINNIQSQIQNLINNDPELLRRQTLLISIPGIGKLTAAKLLGEVRDISAFQSARQLAAYAGLTPKNMLSGSSVRKKTVISKTGNAHLRKLLFMPGITARNWNPIIGPFCDRLSQNGLSPMEVICASMRKLLHLVYGILKSGKPFDPNYLENA

SEQ ID NO: 409027 - protein, 343 aa, unidentified
MQAITTVGLDIAKSVFQVHGVDVTGTVLIRRQLKRRHVLPFFQGLPACVVGMEACATSHHWSRQLRALGHTVRLMPPAYVKPYVKRQKNDAADAEAICEAVTRANMRFVETKTPEQQACLMLHRTRHLFIRQQTSVINAIRAHMAEFGIVARVGRTGVAELLAVAGDPRDRRLPEVARTCVAALGVQLRMLKAQILEFDRRIGTWHRSNQTSQQLDQIPGIGPALATALVASVPDPKAFRSGRNFSAWIGLVPKQHSSGGKDRLGSISKQGDRYLRGLFTAGALAVIRYAKLHGTEHRPWLTALLARRPTKVAAIALANKLARMAWAVMAKGERYKEPAALAA

SEQ ID NO: 409028 - protein, 392 aa, unidentified
MLFVGIDIAKRNHEASVIAQDGHVVRKAMRFANSQAGYNKFMDMVRSLSEPVVFGMETTGHYWLTLYTHLRNDGFTVHVINPTQSDALRGMYIRKTKTDSVDSVIIADVIRFGRYCETSVDPGDLQAMRELCRQRFYIIDMASDLKRKVIALLDQVFPEYEKLFSDSFGLSSMELLSQYITPEEMLSVSSQQLAEVLKKASRGRLGAEKAVEIQDAAKNSFGIVMASSSFSLIIRQYIEQIRSLESSVDIFDTEIARLLSGFDTQLTTITGIGSTLAAVILSEIGGDIRRFSSPAKLAAYAGVDPTVKQSGDFSGTRIKMSKRGSPYLRRAIWLASTVAAFKDPVIHALYERKRAEGKDHMTVIGHVCRKMISIIFAVLRDNTPYVPAGISD

SEQ ID NO: 409029 - protein, 366 aa, unidentified
MDTIYIGVDFHARQQTICYLKTETGELVTCELKHQDKQKVLAFYAQFRGSVIVGLEASGYSPWFERMLEELGCEVWLGHATEIRRRARWRQKNDRRDAELILDLMLHDEFPRLHRPAVQSREVLRMLRYRQKLIKIRTMSKNSLQAIALQSGLAQGSRLFTKDGQQQLGATEMSPVMRWQRDHWLQLMAPLNQQLLETMVWFKAQSKGDVYITRLRTHPGIGLLTSLCLVHTLQPVSRFRNTRKVAAYAGFDPVERSSAERKCFLGISKAGSRLLRYLLVEAAQTAVRKDEDLKRFYQRLADRRGRPKAKVAAARKLLIRAYIMLRDEIDYAEFRHRAVAARLARRGQGPSKVPEVLIGQPASPEP

SEQ ID NO: 409030 - protein, 420 aa, unidentified
MDVAIGAVDEAGQKHDRRMHVIETGDIDVYLGLDIGKGEHHATAVTPAGKKAFDKRLPNIEPKLRELFSTLQAKHGTVLVMVDQPASIGALPLAVARDMGCPVAYLPGLTMRRIADLYPGEAKTDARDAFIIADAARAMPHTLRSVDLEDETIAELEMIVGFDDDLTGEATRVANRLHGLLAQIHPSLERVLGPRLQHPAVLTLLERFGSPAQIRKAGRRRLVTLLRPRAPRMAERLVEDIFTALDEQAVVVPGTEAAALIVPSLAGSLTAVLDQRKLLAGRIEELLKAHPLSQVLISMPGVGIRTGARILIEVGDGSSFPSAAHLAAYAGLAQATRNSGSSIRGEQPSRRGNKQLKRAFFLSAFAALGDPASRAYYDKKIGQGKHHTQALLCLARRRADVLFAMLRDGTFYEPQPATAR

SEQ ID NO: 409031 - protein, 332 aa, unidentified
MDYFAGLDISMDETHVCVLDREGVVVRERKTESTAEAIAGELAKAPTCRRILFETGRMAPILFHGLSQLGLPVVCVESRQAYQALKSLATHKTDRNDARGLAHLARTGFFKPVHVKSLSAHAVRSLIIARKKLVGQRVTLENQIRGLAVVFGVRLPRALTVAFIDNALKASEGIAGLSVAMRGLIAARTAVVTAVAAIDADMRRMTGASAACRRLMTIPGAGQLTALAFVAAIDDPSRIRRSRDIGAYLGLVPRRYQSGEVDYVGGISKCGDRRVRTLLYEATNVMLTRYKGQLKLKDWAFAIAKQSAASQAFGRPMWTLIPGGPDWALTHF

SEQ ID NO: 409032 - protein, 428 aa, unidentified
MTQASVPRTSGEEGVMEWIACVGIDWGDREHAYVVQTRGGERQKGKVGSAPEELHGWVRSLREQLPEGNIVVAVEQGRGGLIDALLEHDFITLVPINPRASKAYRDSRRLSGASTDPADAELICEFALKHLDELRVWRADDAITRKLRTLTETRRQLVDQRTALAQQLTAVLKGYFPQALQWFSNVSARVLWSVLHLWPTLSDLQQAEPEQLTGIMKAHRLRRVPGRVEQLTAKLREAVSLTTDSAIIEPASMHAQALAKMLEVLDEQIDRYERAIEQAWAAHPDRHIFDSLPGAGPALAPRLAVAFGSDRSRYQSAFELQCYSGIAPVTEQSGQSKRIHARWQYPKFLHQSFHEFAASSLPHCEWANASYRLQRKRGASHHTAIRTVAFQWIRIIFRLWKDECPYDDAVYLQALRSKNSPLCSGLAA

SEQ ID NO: 409033 - protein, 416 aa, unidentified
MLRALVFIGDDWAEDHHDIEIEDETGRRLAKARVPEGLEGITRLHELLAEHAPADWSDLPSEEVAGRVFVGIETDRGPWVTALRAAGFQVFAINPLSSARYRERYSTSGAKSDAGDAHVLAEIVRLDRDHHRKIAGDTDLVDAVKLLARAHQTAIWERTRQVLRLRSTLREYFPAAVEAFSDLAAKDSLLLLGRAPSPVRAAKLTRSQVVSALRAARRHHAEAKADALLAVLRTPGLRQPATTDAAYAAVVIGQVGIITALNEQIAQLQEVVAEHFGRHPDADIYLSQPGFGVVLAARALGEFGDDKKRFSDSRARKNYSGQSPITRASGKKTVVLARYATNRRLGDALHLQAFSALVASPGARVYYDALRARKIGHHAALRQLANRLVGILHGCLKTGTKYDETTAWQHQIVTAA

SEQ ID NO: 409034 - protein, 359 aa, unidentified
MKNTLNHASKTTTLPNIETQARIQQLKLGVDWHADHFRVVRMCDGQSPQPAQRFTPASFLPFVQKQLTLADQVFVVYEAGPGGFHLHRQLTALGVTAFVVHPQKLDPQHKGVVTDKTDARELTLNLDRYLRGNVRAMSVVRVPSPAEEQRRALSRQREQLRRERQRLAAQGRSLCLTQGIRLRGSWWKNSLTLPDWLEQRLAVWRQLIVAVEGQLAALTQQVETLAPKERPKGLGPLTLGMLIAELCDWSRFRNRKQIGSYTGLCGGVSSSGQSHCDLSITKAGNARVRWLLVELAWRMVLYQPQCRAVQRWRHVLLHPQAALRQRKRALIALARQLAVDIWRWQTGKVTPQQLGWVMV

SEQ ID NO: 409035 - protein, 370 aa, unidentified
MSVRRILAKTINTDLEYEAIGIDLAKNCVSVALLTTDGEVVCIDRLDYSELEKSAQVLCPTTFAMEPCTEMNYLVQKLEAWGHRCLVIGGKNVQNYVENHYSGQKTDLNDAQALAFLAQDKQLRTIKAKDIEQQKYASLTTLREQYIKQYRQTIVSLKGICQAWGLNISKGISGKARLKDLIENHAAFPEELKESLVDMVTHAQAAQKALNKITKTLELLAKNDKVCQLIQTIPGLGPICSCRLRATIGDIQRFKNPKDFPAYYGLVPRSIATGHNEKKGRITHRGDKTMRSLMVQGAGSVVNMATKGKLKSKQLTKWILKKQKEKRPWGKLVCAVAAKLLRIVRAVLISRKPYNPKIAGVAKCSLPKGT

SEQ ID NO: 409036 - protein, 343 aa, unidentified
MQTVSTIGLDIAKSVFQVHGVDAKGLVVVRRQLKRRYVLAFFEKLAPCLVGIEACASSHYWSRQLQALGHNVRLMPPAYVKPYVKRQKNDMADAEAICEAVTRANMRFVPTKTPEQQSGLVLHRTRHLFIRQQTSLINAIRGHLAEFGVTAPVGRKGIEELLRVIADPSDKRVPDVVRACLAALGSQLLSLKKQILDFDRMIMAWHRSNQTSKRLNCIPGVGPLLATALVASVADPKVFRSGRNFSAWIGLVPKQHSSGGRARLGSISKQGDRYLRGLFVAGALAVIRYAKLHGTKYRPWVAALLARRPTKVAAIALANKLARMAWAMMARGERYNYPAALRV

SEQ ID NO: 409037 - protein, 339 aa, unidentified
MNSMHFVGMDVHKKVIAYCVKTRAGHKRGEGVIAATREALDGWLAERQQPFTLAMEATLFTGWIYDYLVPHARQIKVAHPLMLKAIIAGKRKSDRIDAEKIADLLRVNLLPECYMAPSAIRDLRRVLRYRTLLVREAVRMKNKTAGLLMEVGASFDKKRLHGKRYFDDYWAGVEAVPPSVEAMARHSHAFVHAFTDLQKQLVAGLREAPLIRERVARLMTIEGVGEILALTWTLEIADPWRFSNRRKAISYCGLCGEQEESADKIKRTPISKQRNKHLQSVLIEAAKLAPRWNARLAQVHARELERGNRNRATLEVARRLVSLMLAVDKSGELYDPERN

SEQ ID NO: 409038 - protein, 406 aa, unidentified
MVDYIYAFDVSKGKATQVLYKNNKCIEESDLEFTRKGFEALLQDIQRIPGQVTLAFETTGIYSKPLERFCQENHLTYHNLNPLEVYNRTNGLTLRRNKTDPADAHKLAQIMSIFNFQPSVMKDPLYEEMKRMNACYLEIQEAIDRLYVKFLEAIYLCFPGIEQAFSQLKNCFALTIIEKYPHPDYVLKVSRTVIKNFIKKSTAKNISKQRAFQKADQIIECAVDAYPSVSKDSFYCQVLSFYATQLKNLLNQKCSIQDKMITLSSQFDEFPIYSSVPGIGELSACQLIAELGDLSRFKNHKQLNAYVGIDIRRYQSGKYTGQDHINKRGNRKARKILYVIITNMIRAQRHAPNHIVEYYYTKKQPPFNKCHKVAVIACMNKLLKCLYALFNHHTKYDYELNASHRK

SEQ ID NO: 409039 - protein, 346 aa, unidentified
MPETEVDTFAGIDVSARELSVALRREKGEDKPAMAKFSNHPSGHKALIAHLLRGGRRVRVCLEASGNYSLDLALTLQAHRQVEISVINPRRARRFAESLGQRSKTDPVDARVLCEYVARMPWVAWQPPSSVALHLRAVARAIADLGVIHTQQNNRAHASAASQALPVLVVKEMQRHQKYLEQRMTRLRREALRLIAGDSELDRRFRLMLTTTGIAETSALQILGELAVLPDMLDARQWVAFSGLDPRLFKSGKSVEKRPRISRGGSRHLRRALYMPALVALRRDPCLRRFYQNLLARGKARLQAVVAVMRKLLHALFAMFRTNQPYDGSKLCCAVDMAGNAIAACA

SEQ ID NO: 409040 - protein, 350 aa, unidentified
MFIIGCDFHSRFQQIAMLDPTTGEVIERRLEHENGEAQTFYSTLPSSARIGMEATCDAPWFGRVLREHHHELWIGDAAAIRAAVVRKQKTDSRDALHILDLLLTNRFPRIWVPSLAERDLRQLLRHRHKLVCFRTSVMNQLHALAMGQGLCRRKKLWAKVGRMELEGLVLDPWASLRRQELLQLLDQFDPWIDKLDKAVIQAAESRPSAVCLMQQAGVGPVTALAFVLIMGPVSRFANSKKVVSYLGLNPSEESTGGRQRLGAISKQGNPMMRYLLVEAAQTASRLDPELRRDYQRLKFRRGSAVAKVAIARKLAVRLYWKLREAAQAAPSARMQGSPASPVVGESLSPY

SEQ ID NO: 409041 - protein, 412 aa, unidentified
MKVVHEICCGIDVHAKMLVACLISANGKKEIRTFSTMTDDLLRLRDWLIAAQCTHVAIESTGVYWKPVFNIVEDALQVILINPDHARTLRGRKTDVKDAEWLGDLLRHGLLRPSFIPPPEIRELRELTRYRESLVREQTAVANRIQKVIESANIKLSQVASDALGTSGRAILWALARGETDPVRLAGLAQRKLKEKRPQLERALQGRLTPNQQFVLREFLRRWEELGAADQRVTKEIDQYLQAHPKLAQARDNLDTIPGLGPRAAEIIVAEIGIEMTANFESDAHLASWAGICPGNKNSGGKRLSGRTRKGNTYLRAALVQAAWGATMKKNCYLSSQYLRLVRRLGRKKALVAVAHSLLVIIYHVLDGEQNYTELGGDYFDRHHTEQQRDYFMRRLQMLGLKVTVEPLPLAA

SEQ ID NO: 409042 - protein, 345 aa, unidentified
MEPMYYIGLDVHKQKISYCVKEGGGKVFAEGWIPATRFDLDRWMKTLPQPWSAALEATMFSGWIYDHLKPHAAELKVAHPLMLRAIAAAKKKNDRIDANKICDCLRCDFLPECYMAPTAIRERRRTLRYRNLLVRQMVQMKIKISTLLMEAGVSYNKQKLHKAGYFRELLASNPDIDESLRSLLRQCREMVVRLGKMETALIHSLQQDPLLVERVERLMSIPAIGPITALTWALEIGEVQRFSSIKKAISYCGLCGDEQRSANSVQRTPISKQRNKHLQTTLIEAAKMAPRYSPTLAQLYDREMQKGNANRATLAVARKLVAYLMAVDRGQTHFLVIDQETRTAA

SEQ ID NO: 409043 - protein, 325 aa, unidentified
MTYIGIDISKATFVAAFLHGKSYRTETFPNDAKGIRRFISKLDPAIHHCVMEATGNYCFLLLYLLDKSGIRASLINPKKIKNYARVMMSVTKTDSKDACLIADFGERFKPEPYKFPSEQIMILKQKKTVLRQLQKQLTATKNLLSSLEPLPVKDKKCVNSLKQTITFLEKQIKYMQQEMEAVVTEVFDRQLKLLTSIKGIGVTLATALIIATGGFTYFDNAKQLSRFIGICPTIEQSGTSINIRGHINRNGDETLRSMLYVAAWSASQHNKACKECYQRLRGNGKSGKVAMIAVANKLVRQAFAVVTSNNSYIDGFVSTKPDTTV

SEQ ID NO: 409044 - protein, 428 aa, unidentified
MKNRNVQKLEAITPGTLVVGVDIAKETQWAQFVDYRGLELREALKFKNHKNGFDSILAGIEAICKNRRLDNIMVGMEPTGHYWKPLANYLLKNKVNVVMVNPYHTKRAKELDDNSQTKSDKKDALTIARLVRDGRYYEVYMPQDIFAELRVLSNSRISLMKRSNALKNTIMAVMDEYFPEIVTVFKYPLKGKAAMHILKSCPFPSLILELGIDGVLFEIKKAVKKTVGRKKAQQLVETAKSSIGVGYGLVSAKLKLGLMIEELELLTKQLEQLEKAMEKALADTGYGEIILGIHGIGVVTAASFLGEIGDPMRFDHPRQICKMAGYNLIEDSSGKNKSRTVISKRGRKNLRSILYQMAMTMVAVNDEMKKLYKYLKTRPNNSLKKKQALVVISKKIVTVIYNLIKKQTEYQAELVLGEFRKNQIKQAA

SEQ ID NO: 409045 - protein, 317 aa, unidentified
METAYDGRQVVGMDLHRRRSVLVRMTEDGRRLGMARIANSPQELRAEIARAGKSPRVVLEATYGWYWAADTLAAAGAEVHLAHPLGVKAFSYRRVKNDEKDAADLADLLRMGRLPQAWIAPAEIRELRELTRYRIKLVRARSSYKEQVHAVLAKLGIPVTCADLFGTWGNTWLDGLSLGQPYAGKVASLRTLISELTAEITLLDAVIADLLARHDGYHAIQALPGIGPVLAAVIVAEIGDIRRFSRPSRLSSWAGLTPRHRESDAKVTGGTSPNRAPRCCAGPWPGRSSTSRPAVRSATSRTASPPAAAPQRGTSPK

SEQ ID NO: 409046 - protein, 319 aa, unidentified
MNVAYPIVGIDISSTTLDGAVLDTNGKFAAVSCDNTKAAAKKLAKMLAKKNVALVVVEATGGYEIGIMAALAAEGIAFARVNPRQVRDFAKGIGKLAKTDPIDARVLALFGERARPRITTLPSAEEARLKALSLRRRQLVDARVAEKNHRGKIVERDIKASVERVIETLDDEIEQIENAIAEHIAACEPMRKRQELLESIPCIAAATSATVIAELHELGQRSTSVLKALVGVAPFNSDSGGIKGERHIQGGRAPLRQALYMAAQTGYRCNPILKPFYQRLRAKGKSHKQAIVACIGKLVSIMNAIIKTGEPFNLKFATA

SEQ ID NO: 409047 - protein, 358 aa, unidentified
MLKVTTIGIDLAKDVFGLHGVDGEGRVAFKKRLVRRRLLEFMSQLPPCLVGLEACSSAHYWARKIERLGHRVKLMSPRFVKPYRKSDKNDANDAEAICEAVTRASMRFVPIKSEAQHEVQALHRVREQLLKSRTALVNQVRGLLAEHGIVAPLGIARARRLLLEILADPERHGLSGLFRETLQEMAERLRFFDERVGAYDDRIERRFKEDERCRRLAKIEGVGPLVATAVVAAVGNASEFKSGRELSAWLGLVPRQHSSGNRSQLLGISKRGDRYLRTILIHGARAALRRADHKSDQRSRWAMRIKLARGYNKAAVALANKNARIIWALLTRGENYRPPAIAMASPTADRISLIRVQA

SEQ ID NO: 409048 - protein, 483 aa, unidentified
MKKKNIYVNQSQELLRLFEEAGNGANVMCVPIDYAKKDHVAMFCDGYGHILRKPFPVKNSPEGIEYLIEQVTRSCQHRQIETKHVFFGGEDVGSYAENFIHTLRSGGWIVAGVNAQDAKKQRANLQASTDRLDLMGIASMLLNRRANCSPAQSGVYHNLRTVVRHRRKLVAMSTEEKNRIHTLVDRLFPSFLDEKKSGIPPFSNSSLYLMENRFSPRQIRRRRRPRLIEVLHRYGTEEPENAAAKLQEYAARVLLPPDEYISTLQVSLAHHVKLFRCLQDGIHQLEHELAVWLAQTQGAFLTTMRGIGIVLAAGVCAEIGDPDAQKPLNNLVSYSGIIPRVKQTGGPEGKTHTGKVAKRCNRILKDYVVQSANHLGLHGPEDLMADYKRREAAGQHADFGIGRRYLRTAMHLMRTSQIYLPPRLRSNAEPTPEERAGYYLMTWPVLRQKWNKADALDAAFHKDRPLGRWRNMVQELYGIKLKL

SEQ ID NO: 409049 - protein, 402 aa, unidentified
MIYAGIDIAKNEHVVGATDERGRDAAKPMPFANSTEGFGRCVAYLEGLAESKGDLLVGMEATGHYWLPLFCRLQDEGYAVAVVNPIRTDAMRRFKGSSRVKTDMIDCVLVAETLRCGDFEPSKLGDEAMIELRQLTRLHQELKESVADLKRQVVVALDQVFPEYGSIFSDTFGESSKAFLKRCPTPEECLGVRADSLAKTLERASRGNLGRDKADEIKGIARTSCGISVAASVFSFQIKLLIEQIDSIEGQIAEVGARVRSGIEAVEPLILTIPGIGHVLGARIVSEIGDIRRFRSAPAVVKYAGINPSVSQSGKFSSNENHITKQGSPYLRRALYLAAMAQLKLKTPFYDYYAKKRSEGKAHREALIAVSRKLVHVIYAVLSRQEPYDPEVARNPLASRSE

SEQ ID NO: 409050 - protein, 467 aa, unidentified
MERTGAIGIDPDAQGFVCALVNGQEPKVLRRTFLVTDRDLGEFLQWLKGQPDTIVAIEGSGGLSRPIERLLRDAGRIFYSFKPADTDKFRKAVLGQNKNNQRDAESVARYALALQAQGKLDRYRRVWFADPQLQPLTRSYERLSQQMTAEINRLWKLLRQAAPELYLALGDSHPEVKLGANVLKNSGFLTLLATTPDPGQWKTLSEVELLETMGGLSSSSRRQLVQGLHLLSERLPSCSASLAMLIQTSAQRLSMFKAHLAAMTAMLDTITQDNRAVAALRKTRGIATVTASTLVAEIIDIRRFASEDSLACYAGLGRREHSTGQNSRMVSSSLFNHRLKDAFMTAARNLVRFNPDSHLAGYCRNLIKAGMSPLEAYKRVARAWVRVLYRTLNGLLPHDTREDANSDEAGSDMASGQARSDECHQSNMPLPARRHGTTPGVEKIKRDSAKARVSRRPRKVAVAHRRA

SEQ ID NO: 409051 - protein, 339 aa, unidentified
MKVTHIGLDIAKNVFEVHGIDQRGRVSVQRRLRRAELLRFFERLEPCTVGIEACGSAHYWARELAGIGHEVRLMAPRFVKAYRKSDKNDRNDAEAICEALTRPNMRFVAIKTPDQQAVLTLHRARELLSTQRKALINQIRGLLGEYGIVLAQGGTVVRRRLPAILEDADKALPALAGEVFAELYERLVDIDARLVHYDRRIARLSREMSGARTVMDVVGVGPQTATAVLATVGDVRQFANGRQFSAWLGLVPRQYSSGNQTRYGRITKRGDAYLRTLLVQGALAALRTAHRRDDRLSRWACAVRERRGHNKAAVALAAKHARIIWVLLAHDDTYQPQAA

SEQ ID NO: 409052 - protein, 376 aa, unidentified
MTAKTDPQPSSVCEAALYVAFDLGKTSWTVAMTTGLGVAPWVRAVRAGAWEEVGSVVVRARARFGVAATAPVISCYEAGRDGFWIHRALVAHGWANRVVDSASIEVNRRARRTKTDRIDACKLVVLLVRVCLGDRGAWREVHVPPVEAEAARHATRERMALQKEHTALLNQMRGWLTTWGTALPSRRRDAWWERLRDWRGAALPVAVQARLARASARLALVREQLRALTRAEQRAVQAAAPTSAAGRLMRLRAVGVKGTTTLLGEGLVWRGFTNRRQVGGMLGFAPTHASSGEQHRDQGISHAGNWRWQGTLIQLAWSWVRLQPTSALTQWYLARFGTGKRARRIGIVALARKLLIALWRYATTGLVPAGAVLKTV

SEQ ID NO: 409053 - protein, 349 aa, unidentified
MNEKYVAMDVHKASIAIGVRDAEGKYIMESIVETKAITLLEFVKGLSGTIHLTFEEGTQSAWLYDLLKPHVAECVVCNPRKNELLKEGNKGDRIDVQKLSQLLQAGMLRPVYHGDHGTRALKELVHGYESLVGDRTRVKNRLKAIYRGRGISCEGEQVYHPQKREQWLAQLAERGVQQRAVSLYSQLESLNNQVGEVQRQMLAESRKHKATSILRSLSTLGPISVAMIIATCDTPHRFRTKRQFWTYCGFAVVTRSSSDHYFEKGELRKRRKPALTRGLNRNYNRRLKRVFKSAATSGSHRGPFKPFYEQLLAKGLKPDLAKLTLARRISAIALSMWKKGERFDPKKLK

SEQ ID NO: 409054 - protein, 368 aa, unidentified
MKQQTSAATETKIKGRNIIDFTGKTIYVGIDVHEKDYQVAKVFDGICLGNHRKAANHQMLIDHLNSRYPGATFKCVYESCAWGFTLQRALNSAGIECIVVHAADVSSSDKENKRKTDKVDALKLARNLASGDLTGIHVPDEDLQKERNLIRFRKKLVGDLNRSKNRLKSLLKYQGIKIPEHLGKKNNWSYNFMNWVEQEANKDVLLKDTLLLMLEEIKLLRQLLLKTERALRKLMKERHNEKATLLMTAPGIGRTIAMQFVLEVGDIKRFHSFDALNDLIGFCPDTDSSGDMQRDRGITSRRHKQLRSALIEAAWTAIRIDPALMDAYQKLTKRMQGKYAIIRIARKLLRRMRTMLLTGQPYQIGVAA

SEQ ID NO: 409055 - protein, 343 aa, unidentified
MAHFAGLDVSVKETSVCIVDDTGKIVREVRVASEPEALLQVLTNTIYRFKRIGLEAGPLSQWLYSVLAEAGLPVICVETRHMSAMLKAQINKTDRNDARGIAQMMRVGLYRAVHVKTLRSQKLRVLLTHRKLLQSKTIAIENDLRATLRNFGLKVGMVGTVKFEVRIRELVENLPDLAVLVEPLLIVRRVLREQLGILHRRVLAVVRDDDVCRRLMTIPGVGPVVALTYRVTVDVPARFRNSKAVGAVFGLTPAKYQSGENDRTGAISRCGDEMMRMMLYEAAQSMLVRSAKWSWLKGWAMKIVRHRGMKKAIVALARRLAVIMHRVWVDGTAFRWTREITPA

SEQ ID NO: 409056 - protein, 340 aa, unidentified
MNEITTIGLDLAKHVFQVHGVDAAGATVLRKQLRRAQVLAFFSRLPRCLVGMEACATAHYWARELSALGHEVRLMPAQYVKAYVKRNKNDAADAEAICEAVLRPTMRFVPAKTAEQQAAVLLHRGRERLVRQRTMLVNALRAHLAEFGVIAPQGLRNVGKLIAIIRDEEDARLPGLARQVLQVLATQIEQIEAAVTVLEKQLMAWHKSNPVSQRLATIPGIGPIIATAVAAMVAEPSGFRSGREFAAWLGLVPRQNSTGGKNRLGGISKRGNQYLRRLLINGASANLLRSKATNADPWVIGLRRRRPSLVVAVALANKTARIAWAVMHRQENYQRMATAA

SEQ ID NO: 409057 - protein, 409 aa, unidentified
MRLFAGLDVSSFDIKVCILNGEGEKLDSFSVNNDLPGAKALKERLLKHIANQKVEIFKIGLESTSVYSFHPSMFLHYDEDFQSFGAQVFLMNPKQIANFKKSYSDMDKTDEIDAFVIADYLRFGRNQMSIVKESQYVALQQLTRSRYQLVRMLTKEKQHFLQHLSYKCNTFSQEVDSSIFGNAMMELFLEKFSLEELTDMPLEELVEFLQVKGKNRFGDPTCVASTIQKAVRSSYRLDKVVEDSIDVLLGTSIAVIRTYQQQIKELEKSIKRIMAGLPQTLESIPGVGPVFAAGILAEIGQIERFDDETKVAKYAGLYWRTHQSGRFTAENTSLSRNGNHYLRYYLVEAANSVRRHVSDYQEYYVKKYNEVPKHQHKRALVLTARKLVRLVDALLRSRQLFTPERCVKV

SEQ ID NO: 409058 - protein, 354 aa, unidentified
MMIIGCDYHPAFQQIAFVDTDTGELQERRLQHREEAEKFYRDLAAQGMKVRVGMEASGHARWFERLLAELNFELWIGDAAEIRTKRVRKQKTDRQDAQLILKLMLKDDFPRIWVPSWENRDLRQLLWHRHRMVQARTRIMNQLQAVALNEGLRCKKRLWREAGREQLEAFRLAPWASRRRRDLLELLDRLNPTITDLTRTIEQEVEKCPEAQRLMTHPGVGALTALAFVLIIGTAERFQCGKQIASYLGLVPLEESSGNRRRLGHITKQGNALLRFLLVEAAQVSARSIPEWRNKYFHLAMRRGRKIAKVAMARRLAVQMFWMWRKGWDYEQVRKFGSHAGQPGNRDGVQSNTE

SEQ ID NO: 409059 - protein, 348 aa, unidentified
MNITRVGVDIAKSVFHVHAVDRHDKTQWQAKLNRDQWVEALCGHIAPGAEVGMEACASAHYWGRELQKRGYRVKLIAAQFVKPYVKSNKNDRADAEAICEAMSRPGMRFVTLKSVEQQDTQAAHRIREELVSQRTAKVNQIRGLVGEYGIVAPVGIQKLRKALPQWLEDAENGLTDEFRGLLADLAEDLRYLDGRINGLDERVAQCVKNDPVARRLLELRGVGPLTASALAGALGDGKGFRKGRDFAASLGLTPRQHSTGGKDRLLGISKRGDSYLRKLLVHGARAVLRHAKNRDDELSRWLNELVVRKHVNVVTVALANKTARIAWAVVHNETAYDPMLAAGCKPAS

SEQ ID NO: 409060 - protein, 377 aa, unidentified
MKRIIRIGMDVHSTNYTLCAMEPILGEDDRIFATVDVTPDYKNILMFIENLKMKLGADNQYDIQCGYEAGCLGYSLYNQLTAANVKCVILAPTTMLTPQGVRVKTDARDARMIAQCLSYGGYHAVYVPTEDDDSVKEYIRMRDDHKTALKKIKQQISAFCLRHGHHYAQSKWTVAHWKWLKQLELPALYREVLNEYMTSYEEQNAKIERFDQRIEELASQEKYAEKVKKLGCFLGIQTHTALSLIVETGDFARFVKGNIYAAYLGLAPGEDSSGPKANRTGLSKAGNSHLRQMLIESAGGICKGTIGHKSKALKARQNGNTVEVIAYADKANTRLRSRYYKFIRHGKVRNVAVAAIARELACFVWGMMTDNISVKAV

SEQ ID NO: 409061 - protein, 386 aa, unidentified
MPKPNDLSRSLTAFEQDSTLLVVIEMSQASWLVAGIVPGVDREPLKKLEPDGDALLRLLQRWRDEATRAGRTLKRVVVAYEAGRDGFWLARWLWERGVEAYVIHPTSVAVSREHRRAKTDRLDTALLKRVFLGWLRGEPQHCSMVAIPTLAEEDAKRPNREHESLVGERTRLVNRIKSGLVRLGIRTFKPMLRRAPEHLDALRTPEGAPVPVNTLAELRRDLARLHLIRAQIKAIEAARLEQLQQGPDQGPHAMVRLLARVIGIGVETADMLVQEVLSRNLRDRRAVARYAGLTGAPDESGAKRREKGLARAGNARVRRGMIQLAWRFLMFQSESALAQGFRSRTAQAPKMRKTLIVALARKLLIALWRLVRTGDLPEGLALRPAI

SEQ ID NO: 409062 - protein, 406 aa, unidentified
MNAVGIDVSKGKSTVAILRPGGEVVASPFEVSHNPKELNELVTLIKSLDGDSKILMEYTGNYYLPVALFLQKSGLFVSVVNPILVKDYNNKSLSVRKGKTDKNDSLKLAAFALDRWNELPLFSSKSDTRTLLKSFNRQYNQYIKLKVMLKNNLISILDQTFPGANALFTTPARKADGHEKWIDFVLKFPHCECISRKIYSAFSKCYLLWCKKCGYKFSGAKAKEIYEFACNCTPSLADSEAAHALVSAAILQLNTLNETLVSLQKEMDLLASSLPEYDTVMSLFGVGAVLGSQLIAEIGDVSRFSNKKALVGFAGIDPPPFQSGNFNPQSRSISKRGSAALRKTLFQVMAVILQNAPANEPVFLFMDKKRSEGKHFYVYMMAGANKFLRIYYARVMEHLNSLQKAA

SEQ ID NO: 409063 - protein, 313 aa, unidentified
MENQKHNWVAVDIAKDELDLLDDRRGWKGRNESGAINRLVAGFKKRSDVWVICEATGGYEREFVAALHAAQIKVCVVSPNRVRAFARSEGVLAKTDKIDAAMILKFAKNKNLRPTQPPPKEQVEVAALMDRRTQLNDFLTQEKNRVQNSPSAIHGLIKKMIRTIERQIETVEKQIRAIVESTQTMRERHKLFCSVSGIGEVTSWSLIAYLDELGKLKRSEVVALVGLAPFNRDSGKKKGKRYIQGGRAKLRSSLYMAAKTAARFNPVIKPYVQRLLEKEKPYNCVMVAAMRKLIIHLHCLTKNPQLILASKTQ

SEQ ID NO: 409064 - protein, 356 aa, unidentified
MEQLTTVGIDLAKDVFAVCVLDVTGSVVERRVLRRDAFMRWAEQLSPCRVAMEACGSSHHWGRWFAARGHTTRLIAAEFVKPFRLGGKNDAADAEAIAVAARQPTMRFVAIKSIDQQAILAWHSVRAGWHEERTALLNRTRGLLAEFGVVIARSADRFLGALPTLIEDARLPDPVRAMLLEVREQLAALNLRLARCDQQIATHARSSDVARRAGELLGIGPITSSALAATVPDAKVFSNGRQFGAWLGLTPRQHSSGGRTRLGHISLRGNVYLRTLLVQGARSTLQSALRADPTHASRLQRWIRQLHERKGYHKTLIAIANKHARMLWAMLAKGERYDADAWQRHPLHPPLPPAAA

SEQ ID NO: 409065 - protein, 447 aa, unidentified
MKHKKGAAGIEEIPDAEYELVIERVAAVDVAKASGVVCVRMPGPARRVSKVWEVAATTGAVAELAAKLAGWGIEKLTIESTSDYWRIWYYLAEAAGLDVQLVNACEVKNVPGRPKTDKLDAVWLAKLTEKGLLRPSFVPPAPIRQLRDYTRLRVDLTRERARYWQRLEKLLEDALIKVSAVASRLDTVSVRAMVEALIAGERDPRQLADLARGRMAAKRSELINALNGRFDDHHAELARMLLDQIDTLDAQIATLTERIEQRLALTGPDEHDQGRPGGGLVASTELSASQRLCEIPGIGPTTAQIILAEIGMDMTRFPTAGHLVSWAKLCPRTIQSGPVTRAGRTGTGNPYLKGALGEAAATVAKTDTFLGERYRRIVKRRGKLKALVAVARSILTIVWQLLADPTARFHDLGADYYTRRVNIERRMRNHIAQLTAMGYRVSVEPAA

SEQ ID NO: 409066 - protein, 372 aa, unidentified
METENEVVCGADIHRDFLVATIVSRGGLKLQERFSMNQDGLLAFKSWILDHSCQRVAVESTGNYWYPIFGILEGHVGFILANAYQIRNIDGKKTDRLDSERIAIYCLNDLIKPSRIYPKDYRDLRAVTRSREALVNVRSKFKNQIHQLLATCCIKLSSVISDSFGKSGRYIIESLLEGKTIDQIISGIPSKRVRKKADELREAIRNGIDPVQVFLIKTDLEVIDAISEKIKLLDAEISIKVKPFEEDLKIVLSVPGTGLISAATILAEMGNIRNFPSADKMAMYFGIVPSVYQSAGKLRTGRITKRGSKHMRRILVEVAKAISKTKKDSKLKRFFMRVSAKSGRNVAAVALARKVLCILYHLTYESRGLSRA

SEQ ID NO: 409067 - protein, 322 aa, unidentified
MNKYKETFGVDISKDVFDVHGSSQGHNRYKNYEPGFKKFLKELPDGSLMVMEATGYYHYRLAQFLYKNGVMLSVVNPLSIKRFIQMKLAKVKTDKSDAKAICEYALINEVPLYNALTDTQSECLQLFRLLDTYLKQRTATKNKIHGEAVLGIPSKFVYRSLIRNKKQLNKEVAAIESKILSLVKVDQQEQLTLLTSIPGIGQKTALFLIVVTDGFSKFETASQLCSYVGITPTIRESGSSVRGRARISKVGNRKLRNLLFLCSFNACKHNKACKEVYERIVNKGKSKKLALIAVANKLLKQSFAIVKSGRPYDETYVSILPR

SEQ ID NO: 409068 - protein, 391 aa, unidentified
MSMYFIGIDISKYKHDCCIISAADQKVVSKVTIKNNKAGFNELLTIIHSLANPADIRIGFESTAHYALNLELFLENAHHSFMEVNPVLIKEYKKSTTLRRTKTDSVDCESIARWLMTVEYKPHSKGFYHAYSLKSLTRLRDRLIRQRSFYLVKITNVLDHTFPEFKPFFNERLSKTALYLLENYGSAEKMARMNSVSYEKLRSISRGKFSPQQFIALKELASNTVGVNNSIFDVELNSLLTLYKTLVTEINTLEKEINLLIEEVHPHYLSVPGIGPISAAIIYSEYGDISNFDNPGQMLAFAGIEPGINESGTESHGGRMVKRGSSQLRYALINCCLPLIRFDMTFATYYAKKRAEGKPHRVAITHVAKKLIRVIYALERQDTDFCVQKLR

SEQ ID NO: 409069 - protein, 438 aa, unidentified
MPQDPNDEPASVLLERLRGSNRQTTTRRLRARTKEPFSHPSLPGLMGWMAPERHLCAKLGMQLQQRGPSMAQVTTIGLDLAKRVFQVHGVDATGTVVVRRSLRRRQVLAFFAKLPSCLVGIEACATAHCWAREITKLGHDVRLIPPAYAKAYVRRNKNDPADAAAIWEAVSRPSMRFVAIKTEAQQAAAGIHKVRAMLVKQRTMLINTLRGLMAEFGIVVADGRQHVEELIAVLTDPAEARIAAPLHDGLMAIVDSLRSLEQRIERIEKQILGWGRSNPTCRHLTTIPGYGPILSSAMAAMVVEPTAFASARHFAASLGLVPRQDGTGGKVKLGPISKRGNGYLRRLLVNGAMSVLCSKRAKEDPWLMKLLASKPRKVAACALANKLARIGWGVMMRQEDFRSRRMISRTPDPSQPDAVLTALKTASRAPLAVTCGQS

SEQ ID NO: 409070 - protein, 355 aa, unidentified
MTSTKYIGMDVHKESISIAVRNAVGKVVMECVIETKASMILQFIDGLRGEVQVTFEEGTSAAWLYDLLKPHVSKLVVCDPRKNKSMREGNQSDKIDARQLAELLRLDHLTPVYHGEHGLRTLKELVRSYLTVTKDLGRVMTRVKAIYRSWAIPCSGKQVYASRHRAEWLGKINERGVRRRAEFYYQQLDALRVLRQQVRRDLLAESKKHKAWKLLCQIPAIGPIRAAVLLGILQTPHRFRTKRQLWNYGGLAIEMHSSADHRSIDGHLQRSRKNVLVRGLNRNCNHDLKNLFKGAAVVASSKPGPFAEFYAALVGKGMRPEMARLTLARKIATIVLIVWKKGVRFDAQHLKPQTA

SEQ ID NO: 409071 - protein, 343 aa, unidentified
MKLRTITIDLAKTVFQVCGVNEHMKPQFNTRLKRDQLLDFMRQQEPTMVVMEACYSSHYWGREMAKLGHDVKLIPAQHVTPFVRGNKNDHNDAFAIAEASQRPFIRFVPIKTEHQQEICCLHLIRERLGKNKVALSNQSRGLLSEFGVVFPCGHAVFLHGLTSIIDNPQYSHRLQDMVIDMLSEYKTTINRLKRIEKQLTEFVDGCESGRILLSIPGIGVINASAFLASIDKGQAFSSSKELAVWLGLTPKQHASGNISKMGAITKRGDRYLRKQLIHGARALVSRAPKSNDPLALWAMKLRVTKPINKVAVAMAHRLARLIWVLLTRQEHYRAMPASLEVSA

SEQ ID NO: 409072 - protein, 453 aa, unidentified
MARKAEKEKTKDGLKLKIVNPNAAGIDIAYGEMQVCVPEDRDGENNRCFGSFTCDYEEIASWLKACGITTVAMESTGSYWVGLFFFLEEKGFDVLLANAKDVKNVSGKKTDEADAEWIMLMHSYGLLKPSFHPDAAARSIRELARHRDNMLRSASKEVQHMQKSLVLMNIKVDTVISDILGKSGKAIIEAILNGNHDPKSLVQLVDPRCKASKETIEKSLEGTWDVVHLFELKQSYDLYKYIHTQIADCEAEMDRLLGEYTDGCGTDMQGYTATKKRVSKKNAISFDAEKHAFSMWGVNVMEIPGMGLGALAVLMGELGRGFTEKFTSAKSFCKWCNLVPNNKISGGKLLSSKVPKQKNRVGQMFRQCANSVKSVKTGLGIYFRRQKSKGGHLQAIVATANKIARIFYTMVVSKNHYDESKVGLDEKQLLERKIILAQITLDRLNRKLSVTQG

SEQ ID NO: 409073 - protein, 386 aa, unidentified
MPSNDLSKSLVVLEQDSTLIAVIEMSRSSWLVAGMVPGLSRRPCKKLEPDADALLRLLYGWREEALKAGRTITRMTVAYEAGRDGFWLARWLRERGIEAHVMHPTSIAVSREHRRAKSDRLDTELLLRSFLGWLRGEARHCSMAAVPGREAEDAKRPNREHQSLVGERTRLINQMKATLMRHGIRDFNPALVKAAKQLADLVTAEGMPLPANTLAELRRAMARLDLIRSQIKAIEDERRTRLAAAPQVDQHATMRLLARVIGLGVETADMLVHEMLLRPLRDRRAVARYGGLTGAPDESGSRRREKGLARSGNVRVRRGMIQFAWRFLQFQKDSPLAQWYRARSQDGRKDVRKVMIVALARKLLVALWRLATQGVVSDAIAMRPAA

SEQ ID NO: 409074 - protein, 338 aa, unidentified
MRYIGLDVHKENTTACVISAGGKAVKNFEVTSDADGLAAIRETMGDKEYCVMMESSTYSYPVYRYFDDLGIEAYVVHAKSLKVVTQSVKKTDKHDAETIGIFLRLWKKKEIKGLSMSFIPTREQCELKDICRYCEELSRKIGTEKRKIGAHLSRNCRVVPSEFENLETKKTRKYIRETWTGDITLQRRLNHLETLMKESKEVKKEVVSRLRGDNNVKLLETIPGIAGLTAVQLMSMMIDIGRFPDAEKFCAYFGLVPRVHDSGGKKYHGRMTKNGDRMMRAIVERVTSSHVQHCESHITEYYRCKKKEMGVKKALITASRKMLTMIYAILRDQRPFRA

SEQ ID NO: 409075 - protein, 370 aa, unidentified
MTSLTDRGVIHLGLDVHKNTISVGVLEPDDEVPRTDKISSDPDAVQHLIDRFVDPGMLRACYEAGPTGYELARQLRELGVRCEVIAPSLIPTAPGDRVKTDKRDCRRLARLHRAGELVAIRVPTVAEEAVRDLCRARADMVIDQTRARHRLGKFLLRHGRVWRGGDNWTLKHQAWIAGQLFEDPALATTYEHYRATLAAREAAVAAIEADLVGWFTRSPFADAVARLSAYRGITQMGALTLASEVCDWRRFPTAGAFMGFCGLVPSEYSSGERTRRGHITHAGNQHLRTQLVESAWAYKSRPQVGATIARRQIGLDPAVVARAWKAQLRLTGRFRRLDARKTSRNVVVTAIARELAGFVWAEMTTGQPQD

SEQ ID NO: 409076 - protein, 355 aa, unidentified
MNSEKYIGLDVHQATISVAVLDSTGKLVMESILETKAATILEFFAGLRGTLSVTFEEGTWAAWLYDVLHPHVANLIVCNPRKNALVKDGSKSDRIDAHKLAELLYLNKLSSVYHGENGVRMLRELARSYLTMVKDLTRVMSRLKAVYRSWAIPCAGRDVYYTRHRAEWLGKIKEAGVRRRAERLYQQLDMLQHLRQQARRELLAESRKHPITARLRQVPSLGPIRSALAVALIQTPHRFRTKRQLWAYSGLALETRTSAEYRYVKGQLHRAKKQISIRGLNKDHNHDLKGLFKGAATRASVLPGPFQDFYQRSLAKGIKPTMARLTLARKIAAITLTLWKKGENFDADKLKSQAA

SEQ ID NO: 409077 - protein, 343 aa, unidentified
MQTITTIGFDIAKSVFQVHGVDASGEVVIRRQLKRRYVLAFFQKLPPCLIGIEACASSHYWSRELQALGHTVRLMPPAYVKPYVKRQKNDAADAEAICEAVTRATMRFVPTKTPEQQSCLMLHRTRHLFIRQQTAVINSIRAHLAEFGIVAPVGRKGVTELLHVVADPSDKRVPEVARACLAALGTQLLHLKQQILEFDRMIMAWHRSNQTSKRLHYIPGVGPMLATALVASVADPRTFRSGRNFSAWIGLVPKQHSSGGKDRLGSISKQGDRYLRSLFVAGALAVIRYAKIHGTKHRPWLTALLGRRPTKVAAIALANKIARMAWAMMAKGERYKQPVALAA

SEQ ID NO: 409078 - protein, 330 aa, unidentified
MDDVVVGLDLHLKNTQGTIMKVNGEVLRQEKFRTGKEDLRKFLDGVPQGSKVALESVGFCWPWIDFLEELGYTPLLPNPVKVKMRAEDVKTDRVDSELLANLTRMDWLPTCYVPSAELRWLRSFVRHRAFRVKMSTAVKNRSWSEFRKRDIRLRADLDTRKGRDLAASLGVFEVVENMELLEVIERQSYEIEKMLRRRYQKVKPVQLLMSIPGIGFITALTLYAEICDVRRFSKPDKLAHYCGLVPRVHQSGEHRAMGKEVKANRWLKWILIETAWSHLRYCPDGRLAKMYQDACRRKKDKRKAIKIVARKLVNVVWAVWTYEKEFMVME

SEQ ID NO: 409079 - protein, 412 aa, unidentified
METVVERPAALDVHKEQVTACVRVPGEGRRREQHVAEFPTTVAGLLTLRDWLAAFRVQQVVMEATGVFWKPVWAILEDEFECLLVNARHVKQVPGRKTDVKDAEWLCQLAEAGLLKASFVPPKPIRALRNLTRYRKTQIQERSREANRLHKALEDTGIKLDCVATDILGKSGRAMLDALVQGTTDPEVLAELAKGRLRAKIPALKEALEGRFDHLHAVWIGAILAHLDFLDEQIANLTEAIGEQIAPFESAVRLLCTIHGVQRRTAEVIIAEIGVDMSIFPTAKQLASWAGQCPGNDQSAGRRRSGKTRKGSKWLDWALEEAAMAAVRTKDSYLAAQYARLRPRRGHKKALGAVKHSLICIIWHMLTTGELYTDLGGHYFRKRDPERITKRLIAQLESLGHKVTLEELPQAA

SEQ ID NO: 409080 - protein, 335 aa, unidentified
MEQKYFIGIDVSKEKLDLAMINSNLELVTEKIIPNSLTKINTFFTALFRKLKISKEQVLVCCENTGIYGRPLEICCVKLGINLWVEHPLKIKKASTDMRGKSDQKDAYRIAEYVFRYSDKVVLFKESTDLIKELKTLLHVREDMIEKRAMFKNQLGEAKSHNKEQYNVLQACYTPLIKALNKQLIVVEKRIDVLTDQETSVKKNIQLITSIKGIGKQNALQFIIHTDNFQKFTSANQLACYSGVVPFPNQSGTIFKRERISKQANKKLKKLLHMAAMAAIRFNQELKEYYIRKVKEGKNKMCVINAVRNKLVHRIFSVIKRQTKFVASREEFLSI

SEQ ID NO: 409081 - protein, 355 aa, unidentified
MKYYTSTTQFNCGIDLHARQMYVCLMDRDGKKLVHTNIKNNDFDYFLKLVAPYRHDLTVCAECMFGWYWLADACQAGGLPFVLAHALYLKAIHGGKNKNDRIDSEKIAHLLRSNLIPTAYVYPAEKRPLRALLRQRLFFVWRRSELLARIHSHQLAHNRIPKKQTRSNRDPWEAQLLAAENDPLRQLALQNDLAMIRHFDHQIAQLEEELQRQAKKLAARDYALLQTTPGIGENLGMTILCEIGDIARFPTVKNFLSYCRLVKGTVASAGKIKGLRGAKLGNPYLRWAFGEAAVIAKRDHAVIGPLAQRLEAKMNGNKFKANTVVAIKLARAVYYMLKSKTVFDPDRLVAALSRN

SEQ ID NO: 409082 - protein, 365 aa, unidentified
MNSITYVGLDVHKATVAVAVAEGGRGGEVRQLGVFENRPEVLSKLAARLSNNKNCRISFCYEAGPCGYGLHRLLTSYGHDCVVVAPSLIPMKAGDRVKTDRRDALMLAKLHRAGELTPIWIPDAGHEAMRDLVRARATAGRVLSKARQHLQSFLLRHDRIYRGLRAWTSAYRRWLTTPAQIVLQDYIHAVQDAEARRDRLTRQINELLPSWSMAPVAMALQAMRGVALVVAVTVVAEVGDFRRFANPRQLMAYLGLVPSEHSSGGSIRRGAITKAGNALARRVLIEGAWTYRMPARVSRKLHDRLEPLPAAIRDIAWKAQIRLCARYRRLAAAGKPKVVVTTAIAREMVGFIWAIAQIAQPPLSA

SEQ ID NO: 409083 - protein, 409 aa, unidentified
MRVMSERCAGLDVHQKTVVACALLGPAGSDPELERRTWATTTSQLLALGDWLRERGITHVAMESTGTYWKPVWAVLEGQFDLTLCNAAHVKQVPGRKTDQKDAEWIADLLRHGLLKKSFVPPQPQQDLRELTRYRAQVSADRSAVANRIRKLLEGANIKLGSVASDVMGVSGRRMLEAMIAGETDACALADLALGQLKHKREQLIEALRGRLREHHRTMLRLELAQWKFLDALVAELEGAVEEALRPFAAAAERVKTIPGFSEVSAAATVAEIGARMEQFADAAHLASWAGLCPGNHESAGKHYSGKTRGGNVWLKRILCQVAWAASHTRHTYFTALFRRIAAKRGKKRAILAVAHSLLVTIYALLKNQQNFQDLGSDYFDRKNADGLKRFCLRKLAALGHKVTLEAAA

SEQ ID NO: 409084 - protein, 351 aa, unidentified
MESRVTALPKLFIGIDIHKRSWKIHCSTDLFAGKSFTMPPEPEKLREYVQKHFPDHEVSTAYEAGCCGYAAHRSFVNFGWRSLVVNPADIQRKGKERYTKTDRIDAQLISRELKDGRLESIIVPDIEREELRSLFRRRNELVKDFRRVKSVIKMQLLYYGVKVPPEFDNDHWSHDFRHWVDSQKFIFGTARECMASKMRNFRFIDKELRDVSSQLRAYCRKHFKQDFYLLRSIPGIGGIVAVGIIAELGDLRRFSSLKHLAGYVGLAPSIYQSGVNSKSMGMNPRCHRLIRSYFVEAAWQAIRTDPVMQAYYRQHLGKDVKKIIVKVAHKLLSRTLAVIKTKTPYEIGVIS

SEQ ID NO: 409085 - protein, 435 aa, unidentified
MSIDKIERFVCCGMDVHKDILVATIGITDHFTLITQYVQETFNSFNSDLYRLCDWLASHHCSEVCMESTGKYWIPVYNVLEERGFTVCLAHPKYTKAIKGKKTDKKDSKWICDLYKHDLVRGSFIPPKEIRELRDIARYYYKLIGMNSSESKRYQNCLTVSNLGIGSIFTDVNGKSATRVMEAVLAADNPNDISDEDLLKLVHKSCKKKDQLLDAVRGCRIESDQRFKMREIQKHKEELDQHLTTCFAEMIKRATPFFHQFLHIVEIVGISLLSAILIISEIGVDMAVWEDARHLCSWAGLTPGNNESANKKKSTRITKAGQYLKPLLVQCALAAIKNPNGYFGIKYRRIKKRRGHKKAIIAIARMMLICIYHMILTGESFHPSDYDELMNPKPRKPRELTIESAVDFLKSSGADIDAIIASLKEAPPDQITVQS

SEQ ID NO: 409086 - protein, 394 aa, unidentified
MCQHYQTEASMIKHNILFIGLDTHKTFTEVAYIEDQRGAKSTHLGKILSNKAAFKKLARQLQSKYPDATLHFVYEAGPCGYWIYRFLTSLNHCCYVIAPSLIPKKPGDKIKTDKRDALKLAKLLKSEDLTSIYVPEPEDEAVRDLSRARETGMKDLKDAKYQLKALLLRNNINSKIKDNWSLQHLRWLAELVLPHPCQQIVLQEAVLTINERLKRLKRLDNELTHQVKNWRFYPVVKAIQALRGVRLLVATGVIAELGDLSRFDHPRKLMSYLGLVPSEHSSGDKRHLGAITKCGNSRARRLLVEGAHSYKHNANISKEMQLRQEGLSKEIIDMAWQAQLRLCRRYQRLMHKGKHRNVVVTAIAREMIAYIWAISREVVLPKIDVKLRISTVPA

SEQ ID NO: 409087 - protein, 370 aa, unidentified
MENSSTIYAGLDQHKESITVAYVGADRSLEPLCLGAIGTRTSEIDAMVRRLQSKGKKLVFAYEAGPCGYGLYRHLTRKGHTCLVVAPAKIPRKPGDRVKNDRRDALNLCRLLRSGDLKPIYVPQIADEAIRDLCRAREDAVSDLRAAKHRLKSFLLRHEIRFNGRADWKSAHLRWLGEVKCATPAQQVVFQEYVRAMAQCFERVGRLELELAEHVKTWRLSPVVEALQALRGVRFTVAVTAIAELGDLTRFEKPRQLMSFLGLHPSEHTSGPRRRLGGIAKTGNGHARRALVEGAWAYRFPARVSKQIQARQENLPEAVRDIAWRAQVRLCKRFQKMVGRGKNVNLVVTAIARELAAFMWAIARQVPVEA

SEQ ID NO: 409088 - protein, 379 aa, unidentified
MKAAVQRRLGKNGGTVFMNYVGVDIHKRYSVLCAVDEQGCRLREGRVEGNAADGFARFFSGLSGPSKAVVEASWNWGVIHDKLEELEQVEEVVLAHPYKTRLIADAQIKTDRLDAYALSTLLRGNLVARAHIPRRLTRARKNQLRQRLYWARLRTMLRNKIHALLDRQRDLELPQCSDIFGVRGLGFLRRLKLSEPDATLLQEQLALHDLIGQQMKAQEKRIAAEFGSEAMHRRLMSVPGIGATLAAVIACEIDAIERFTNADRLCAYAGVVPTTHNSGGKVAHGRLLPFCNKWLRWALVEASWVAIGCSPYFGALYKAHRARGKKANHVILIVARRMCRIIWQLLHDQRDYEKRSLSSRVNFPGCSALALTVNPATAP

SEQ ID NO: 409089 - protein, 389 aa, unidentified
MLLDHPTDGLTAIRTQFAAIFMSLELSRSNWLVTSLSPGKGEKMSKYSLTAGDVAGLMRLLADLRRKAEVRTGQSYPIITIQEAGLDGFWLHRVLQQQGVESHVVDPASIAVPRRRRRAKTDKIDGETLLRTLLAYKRGEPRVCAMVVAPSPEEEDRRRLCRERRTLIEERVRHGNRIKGLLFAQGISDYAPLRRDRRARLEALRTGDGRELPSHLKAQIGREFDRIELLLEQIKSVEAAQQALLAAARKPASEKAAPDPVTMLLALKGMGANFTTVLWSEAFYRSFSNRRQVAAYAGLAATPGQSGGIRHEQGVSKAGNPRLRTTMIQIAWLWIRHQPQSALTRWFKERSPQGRKRAIVALARKLLVALWKYVTQGVVIEGAVMKPAA

SEQ ID NO: 409090 - protein, 331 aa, unidentified
MVVYAGVDLHKSYCQAIVCTEKGEVIKEGRIRTEKEDIEEFFASLENQEVAIEATTNYEYFYDLLEGLGHRVVVAHPLKTRMIAEAKITTDKISAKTLVELLRGDLLPTSYVPPKEIRELRHLVRHRIALGRLRSRLKTQVKTELRRKNLKYREGSKIFTGRGMKELRMLKNPVIDSYLAIYEAVERELKKAEQEIEQVAERYEEVKLLTGIKGIGRYSALIIYSELGDCSRFPTEEKVFAYAGLIPRVHRSGNESYYGRITREGSKYLRWILVEVARVHVQWCPESRITKHYEKLKRKRGEKIAITAAARKLLQVSYHMLKNKEAFRIEG

SEQ ID NO: 409091 - protein, 409 aa, unidentified
MQSDFQYFVGIDWGSQQHRVCLMDRDGTIIEERWIEHRGSSLAELADWLRRQTLESPQALAASIEVPRGAIVETLLEHGFAVFSINPKQLDRFRDRYSPAGAKDDKRDAFVLADSLRTDMHCFHAVRVDEPGRIRLRELSRLEDEVGEELTRSINRLREQFHRFFPQLLELSESAGEPWLWTLFESAPSPARAARLTEAKIARILQQHRIRRFDARQVRAILKTKPLTLAPGAAEAASEHALLLLPRLRLLYQQRAHIARRVDALLQELASGGDGSSCEHRDEAILLSLPGLGRKVAATMLSEASQAIAERDYHALRCYSGAAPITRQSGKKKVVMMRYGCNQRLRNALYHWSRTSIVWDPGSKKTYAQLRARGKSHGSALRTMADRWLRVLFSMLRHNTVYNAQLKTA

SEQ ID NO: 409092 - protein, 355 aa, unidentified
MYGLKHQKEKRSMDHFAGLDVSVKKTSVCIVDDTGKIVREVKVASEPEALLAVLKNPAYQFKRIGLEAGPLSQWLYSALAEAGLPVICVETRHMRAVLKAQINKTDRNDARGMAQMMRVGLYRPVHVKTLRSQKLRMLLTHRQLLLSKAIAIENDLRGTLRNFGLKVGMVGKVKFEARIRELVEALPDLAVLVEPMLIVRRVLREQIVILHRRLLAVVRDDEVCQRLMTTPGVGPVVSLTYRATVDIPARFRKSKSVGAVFGLTCAKYQSGEVDWDGRISRCGDEMMRTMLYEAAQAMMRSKKWSWLKAWAMQIARRRGIKKAIVALARRLAVILHRIWVDGTEFRWTREQAVAA

SEQ ID NO: 409093 - protein, 438 aa, unidentified
MSNKVIFNLDDLFISVGIDVGADFSWMSIALPNQQFVGKPYKILHSSIDSLTTAVSKIKEAEELYSLESRIFLESTGIYHYPLFCYLRDKGFNCSVINPIITKNSTNINIRKVHNDRFDSKKAALVGLKPDLKVSLMPSDLALNCRNLCREYYDLMDNRSAYVNKLQGELRMAFPQYLGIFSKVTINTSLTLLETYTSPSAFLEADKQEIIDIIKSTARFGLTYAQNKYNAIIQAATDANQFGYIIDSNIKRIRLYISFIRKYDEEINNILESLHELVDANEDADFVKQIHLIETFKGAGFLSAVSIMGEIGDFSAFSKPKQLFAYFGLDPAVKQSGKFEGTKVQMSKRGSSIARRVIHTLTLQSISISRNGEAKNPVLREYYLKKCDSKPKLVAMGAVSHKVCNMIFAILRDNKSFEIITPQEHIKQYNASKCDMAA

SEQ ID NO: 409094 - protein, 355 aa, unidentified
MDGEKYIGMDVHKESISIAVMNAAGKIVMECVIETKANMILDFIHGLRGDLHVTFEEGTWAAWLYDLLKPHVTKLVVCDPRKNRSMREGNQNDKIDARRLAELLRVDHLNPVYHREHGLRTLKELVRSYLTITKDLGRVMSRVKAIYRSWAIPCTGKQVYSSRHRAAWLGKISEPGVRRRAEFYYQQLDALRLLRQEVRRDLLAESKKHQAWKRLCQIPSIGPIRSAELLGILQTPHRFRTKRQLWTYCGLGIEMHSSADHRVVEGQLQRAKKQVEVRGLNENCNHELKNLFKGAAIVAATKPGPFEEFYAKLLAKGMRSEMARLTLARKIATIVLIVWKREVCFDAQHLKPQTA

SEQ ID NO: 409095 - protein, 526 aa, unidentified
MNNVAGVDVSKGKSMVSVLRLFGEVVTKPFSVGHTGSELKELANYLKSLDGETRVVMEHTGRYYEPVARFLHEEGIFVSAVNPKLIKDYGNNSLRKVKTDKADARKIARYGLDNWVELRQHTPMDTIRIQLKTLNRQQGLYSKTKTMMKNNLIALLDQTYPGVNALFDSPVREDGSQKWVDFATAFWHVDCVRNMSLTAFTERYRKWCKRHGYNFSQSRAIDVHTKAQDLIAMLPKDALTKTMVQQAIDALNAVSASLERLKTEMRTLAAQLPEYPIVMAMRGVGDSLGPQLMAEIGDVTRFTHRNAITAFAGVDPGADQSGTHEAKSARASKSGPPELRKALFLVMDCLLKTMPQDDPVYRFMDKKRAEGKPYLVYMTAGANKFLRIYYGRVKEYLASTEKNEAGTSAKYDDQQGSGNTALEKIITQKYIAGLPDLAQEAWNDKRRLNLPRLDVAVYRDQAVYNNSDTNILNPQNFIKRMKYPMKEQLVNAAEYEKGKSMLGGKGDVVSTPIWWDKNSNYCTSSK

SEQ ID NO: 409096 - protein, 354 aa, unidentified
MSEKLNTAIAVIGIDIGKNSFHVVGHDQRGAIVLHQKWSRGQVAARFANMPPCLIGMEACVGAHHLSRKLKAFGHDARLMPAKYVRPYSKGQKNDFRDAEAIAEAVQRPTMKFVATKTADQLDLQALHRVRERFVSQRTGIINQIRAFLLERGIAVRQGQRFLRAELPRILAAPSDVLSPRMVHLIENLAGDWRRLDERIESLSSEIEAIARQDAGCERLMSVPGIGPIISSAMVAAIGSGEVFTKGRDFAAWLGLVPRQMSTGGRTILGRISKRGNRYLRVLFVQAAWVVLIKPKSWERHGLKSWIEAAKKRLHPNVLAIALANKLARIAWGVLAHGRDFEVRKISEAAAQSA

SEQ ID NO: 409097 - protein, 347 aa, unidentified
MEKVTRIGVDTSKNVFQLHGVNAEEKPVLRKKLTRPKMISFFKDLAPTVIAIEACGSAHHWARQLSSFGHEVKLIAPQLAKPYVKRGKNDAADAEALCEAMSRPTMRFVPVKTADQQAALMLVGMRDRLVRSRTQLANSIRGYAAEFGLTAAKGICRVEVLLTDIACDDTLPELARDLFAIHRREYELLQVEIEKVEARLMEWHRKDECSQRLSRIPGVGPIGASLLMMKTPDPRLFKSGRDFAAWMGLTPKDHSTAGRARPGGITRAGDELLRSVLVNGATAVLKQVRAGRGRNASPWLHNLLEHKKPKLVAVALANRTARIAWKMMVSGESYRATPAQPVLAKAA

SEQ ID NO: 409098 - protein, 358 aa, unidentified
MRRYIGLDAHAASCTLAIIAETGKRLRDFPVETNGAALVEAIRAIPGPRHLIFEEGTHSAWLYETLAPHVEEIVVIGVSTSRGPKSDARDAYALAEKLRIHAVDQSVFKAPKEFAVLRELARVHRMLVRDVVRVQARLKSIYRSRAIATAGAAVYGPRQRHEWESRLPAATRHTTSKLYAHYDWLLELKKQAESELIAEAKRHPIARVLQTAPGLGPIRVARLLPIVVTPHRFRTKRQFWSYCGLGIVMRSSSDWVRGRDGGWQWAQVAKTRGLSRQHNHTLKETFKGAATSVVQQGKKVPIYADYERLVTAGTKPNLATLTLARKIAAIVLRMWKDEEVYRPDKLASTPTPAARSPT

SEQ ID NO: 409099 - protein, 341 aa, unidentified
MYYTGCDAHKKNCTLQHIDDDGALGLSMNVATNSEALDTFLNKLDAPTVVTFEASRSYWWLHQYFSKHPKVSRVVVVDPFRSRKIAEELSVQRGYGRAKNDRIDSEMLAEQTRLGLAPGIRIPTAEQLEMRTACRHRFELVHRRTVSSNLIHSTLSMHGHAISLQELINNQDSKKRLYEQLPEYVKLIIEDFIAQIDLVNKQISECERLIAKLLPQSHPQIKLLRTAPGFGPVCSTIVYTEIFDIAYFKAPKYLISYSGLAPVEQESAGKKGKVKLNRHCNYYLKYAFMTAGHAARTHPRYRRKYEQDVKKHGKIIAKINLARRLAKAVYWMLNRQQPFKF

SEQ ID NO: 409100 - protein, 349 aa, unidentified
MVVLGIDAHKRSHTVVVVDDTGRKLGERTIATTTADHLDLLSWAEQFGADRLWAIEDCRQLSRSLERDLLSIGQRIVRVPPKLMAHVRDSARSYGKSDPIDALAVARAALREPDLPTARLDGPAREVRLLVSHREDLVAERTRIINRLRWHLHELDPSWQPPARSLWRPKHLAATTARLQGIDGMVARLARALLERCRMLSEEIAELDHELEPLVARLAPALIELCGCATLTAAKILGETAGVERFRSRHAYARHNGTAPVPVWSGNRERHRLSRTGNRQLNTALHRIAITQARYHPPAREFLQRRRAGGDTKAESIRALKRRLSDVVYRALLADAARSAPPAAITMAA

SEQ ID NO: 409101 - protein, 445 aa, unidentified
MHYKRLLTLIDSVSSYLSVGLDVGADFTWMSIALPNGSFIGKPFKIVHSDPRSRDLAVAKIKEAQETYSLKSRCFLESTGIYHIPLLCFLRDKGFDCSVINPIITKNSTNINIRKLHNDKFDSKKAALVGLNVSLKTSILPDDSVVDLRNLVRDYYYFKDLQSAVSLKLTAELKVSFPAYAKVFSKVTTQSSLKLLTAYPLAADMLAASKDDIVKIIHSTARFGESYALRKYDAIIAAAQDAAVFGRALPSNAVRIRLYIDTYQEYQKHLDALLKALHETVERLQDTLIYDQICLLQSLRGIGFLSAVVLIAEMGDFKLFSSPKKLYAYFGLDPAVKQSGKLNGDKVHMSKRGSSLARRVLHMVALNNVKVDKGSGTPVNPVVYDYYTRKCSGKKKTVAMGAVMHKICNIIFAMLRDNKPFEVITPEEHCRRFAAEHPDNIRKAA

SEQ ID NO: 409102 - protein, 463 aa, unidentified
MSQFFLGIDISKGYADFVMIDAVKSNVGTSFQLDDTFQGHVCLFNYLSEFKEQHAGCTIFAGLESTGGYENNWYQMLLNCQELLPVRVARLNPAGVFAYKKANLNRINTDPISARAVAEYLITHSDKVSYHEAVNSNNPSCSMRSLRKHWGFIQMLTKQKTQLLNQLEMLLYEANPDLLHFCKNHTPQWVLTLLLHYPTAKRLARAHADSLAKIPYISKKRAASLIEQAQNSVASSSDAYTEQLIISTVKEIMHLKTQIRNETNVLARHCSFADVELITTFPGISVLSAVGLFIHIQSVARFATTKQIASFFGLNPVFSASGDSLKGSRMSKKGNKQVRQILFMIALSAIQSNPVIRNTYARQRSKGMSNMAAIGACMHKILRIVYGMLKNRQAFDPNIDRYNRLNQRKTVATENADNRRLQEYDETAPVSQRQIKKRWERKQTQNGFAIESGFRSPSPPHIV

SEQ ID NO: 409103 - protein, 434 aa, unidentified
MKKIRLNVGGIDIGAKKVFTAIEGQPVVSHLTFTEDFYKLRDYLLGHKVESIAMEATGVYWVILYEILSEAGIDVWLVDGRQTKQVPGRKTDVKDCQWIQELHSHGLLNRCVVINGDIKELRSYLRIREDHINSAAKHVNQMQKSLTLMNIRLKEVLSQIHGASGMAIIEAILQGERDKYVLLNLCHSSIKKNKKDLVLKALNGKYSQEGLFALQQAYNGYQFFQSQISECDDKINVVINRIGSSGEGQPDQRRKPIRHHKPKVKNLGPNLLNIFNDRDATVISGITDYTWLQLLSETGSDLLRWPSEKHYTSWLGLSPGQNNSGKSRKRSRKKGNPKAGQIFRVAAQGLINSKDVAIGAFGRRLRGRKGPSVAIKAMARKLAVTYWRVMVKGIDYAEQGVKNYEDQIILNKIRTVNKLAKELNMQVTGFQSIE

SEQ ID NO: 409104 - protein, 349 aa, unidentified
MRFYTKQHQFYCGIDLHARLLAICILDQAGAVVLQTQIAADKQLLLKTLAPFRPDVVVAVECLFAWYWVADLCREEKIPFVLGHALYMKAIHGGKAKNDDIDAEKIARLLKGGNIPVAYVYPKGLRETRDLLRRRMYFVHHRAALITHVQIVNAQYNLPEFSKKLIYARNRAELKIAERFDNPQLRKSVEVDLALIDALDERIAEVELHLERTAKVEDPQTFHLLKTIGGVGKILGLTLLYEIHDIGRFPDVGEFLSYARLVRCRHESAGKKLGSGGHKIGNANLKWAFSEAVCLLVRHFPAVKIWQARHEKKHGKKKTLGILAARLGRTVYHMLRKREAFDVKRFLGQ

SEQ ID NO: 409105 - protein, 319 aa, unidentified
MQSKLTIGMDIGKAQVVVACHESAFAVLKMANAVPVLRRWLATLPAGSRLGLEATGGYHEPVAQLAHSLGFTVYILNPKDVHHYARALGARGKTDRLDAQVIAAYVAEHNARLHAFVPLSADEKLLRELARRRATLVNAKSMLQQSLRVLPGFEREGRELLRAMGSFADRLERKLAEIAARSSERAALVKRLQTIDGVGTLTSIRCATLFTRVPLHGSDAAVAFFGLDPRPHDSGQHRGRRRLSKRGPSEDRRLLYNAAMSAIRTPTWRPLYQHLRNRGLASTEAIIIIARRMVRIAFAMYQNHSDFNPRLVPRPSCPA

SEQ ID NO: 409106 - protein, 358 aa, unidentified
MAKRSISYWDGIVEESANGVDIWVGVDVHKHSYSVAILSANGVRHSFRCPSDNQALLNQFSSRGVKIKQLVYEAGPTGFVLARVCQGSGVPVMVVAPNRIPRPASAKAKTDAIDCIELASLASKNMLRSIAIPIEEDEAKRGLTRRRTQLVRSIRCAKNRIKSFLLCHGLGEPKGLQHWSKDSREQLSEQVMLAPLRLRLDSFLRELNFLEEEKAQLEASIRSSLLPEDDVLQSVPGVGPTISAVFRSEIFTGQRFSNGEQLSSYLGLAPCVRQSGESRERSSIMPAGQSILRSLLVEACWVLKRTEKWAFDFYNRIRQRTGKPQQAIVALARKLAILLWRLLIDNRSYQSDYQRSCA

SEQ ID NO: 409107 - protein, 334 aa, unidentified
MFLGIDVSKKTLDVALLGVHPKPQHKVFPNDAAGHAQMLNWLKHQQRDSNAPAVGHPVDHPVHACLEATGTWAQDAAIALHQAGHIVSLVNPAQIHAFARTGLKRTKTDKADALLIARFCEMHQPPAWTPVSPQVQQLQGLVRRLEHLEEMLTIENNRLGAGGIAGLVRESLEEHIAYLTQQIEKTRRQIKEHIDGKPDLKQQARLLESIPGIGATTAALLMAELGEITHFESARQVAAFAGLVPRIRESGTSVRGRSRLSKMGSSRLRKALYFPAITALRFNPLIKAFGLRLSAQGKSKMLIIGAAMRKLLHLAYGVLKSQRPFDPNFCVSNP

SEQ ID NO: 409108 - protein, 399 aa, unidentified
MKNNACLELRVSVDIGCSSHNVAIGLSSGEVLDEFSIAHEPEGFQYFFSRIEKQERRFGCPVAVAMEGYNGYARPLDTLVRAHDYRLFNINNLKLARFKEIFPGAAKTDEIDARKGLELFQICDHLPMAKDVLQEVRKTPQENEILKRLSRRRRRLVGERVRVLNNLQADLQAVCPGLLEITGEAGNLWFLRFLTSTDDLRKLARIREASIRKIRGIGKVYVAAIVKWQKQAQFSHDVEWVGDMILEDAARVLELHEKIQALESRMEDVAHCSAIAQTLLTIPGFGAICSSELAGEIGTIDRFDNEASLALYIGMANLDNSSGKQKGSKPPKQVNCRAKAAMMIAIDRHRKQGLQSQRYYEKKRAEGKKHNQAVRALGRHVCRVIFKMLKENRGYILSQ

SEQ ID NO: 409109 - protein, 400 aa, unidentified
MRAVFGIDVSKASSEVAILVNGEKVHGYTISNDALGFARLLGDLKTVHKPEIIFEATGVYSRRLQSFLDEHGYAYTRLNPLEAKKQLDSLRVRKTDQIDAEKLAQSQFVLNRKTTYVQEEIYQNLRDLSRFYQNLTEDIVRAKNRLHKALQVTFPELENILSTPSGEQYWNLVIAFPCKDFVLDLSKDELSESIRQSTSKRISDKRVAYLAEKLIALANQSYCAVKKTSPMLEEVRYYAKELFRLSEQRQTILDQMVELAQPLPEYDILLSIPGIAETTATSIIGELGDIRRFQSANQINAFIGIDLRHYESGNFLAKEHITKHGNPYARKILFKCIHNIASASHTNPCHIADFYEKRKKQSQTTSTKPHTIASIHRLIRTMYYLIMHNKLYDYASTQNR

SEQ ID NO: 409110 - protein, 352 aa, unidentified
MDRYIGLDAHSQTCTAAVMGPSGRRLQEQVLETNGKVLVSFLKSIAGDRYLCFEEGALSEWLYEMLEPFTKETMVVQASEHQGPKDDSHDAWNLANEYRTGHLQKVVFKAPKCFTGLRQAVRAYQTATQDLVRAKSRFKAVFRSRGVLVDNSVYQPGLRPKWLRRLSGAYRKLAELRAAQLDAVAELHAQAEEWLSEEAAKIDAVKRVSTVPGIGTIRAAQIVAIVVTPNRFRTKRQFRNYCGFGVVTRSSSDYVRGLDGHWKRQAVQQTRGLNRNRNATLKAVFTGAATTVIQQGKDQPLHRDYERMLASNVKPSLARLTLARRIAGATLAIWKNKENYDPAKHESPRPTP

SEQ ID NO: 409111 - protein, 353 aa, unidentified
MKYVGLDWAYRSAQWCALGLGGEVAGESRIAADRDGLARLVFELGDDVKACLEMMSGALWVRDQLVACGWQVQVADARKVKTVAPLAAKTDKVDARLLAELSRRDLVPALWLPSLDDRALRERLRRRMHLVRLRASAKARIAGLQTQWGVRVSLQRLRRADGMALLERAGMPGVWRRSVGECLAVIDFLDARVEPLDRELRPFAHADPRAVLLDTIPGVAELLALTIAVEIGDVSRFASPEKLVSYGRLAPRVHQSGQGRPRSGPLSKSGSRMLAWSAVEAAQQAWRESNPWHELYREVSARSGNNNSGKAAVARKILIAAWHMLSRNEPFNPAARSAGGLPVPASSRVALAA

SEQ ID NO: 409112 - protein, 343 aa, unidentified
MKYIGLDLHKKSIFATVLGGDGKILSRTKIGSNSRDIIYYLKSQGSSNELSVAMEASYNWQYFYRAVEEAADNIVLAHPLKTRIIGEAKIKTDKIDSEVLAHMLKADMLPAAYVPKRSTMQSKMLLRSRISLVRIRTQIKNKIHAIIDKNRDSYTGLENLSDIFGKMGTQILRDTKIGPIDYHILSGYLDLIEEINKKIKDLESRIDKRSLNDKEIELLKTIPGIGTFSAFLIKTEIDDIARFLSKEKLCCYAGLVPSTHGSADKLYHGRIVKQGNKFLRWALTEAAQVSIRYSEYFRYYYNKVRSKKNGNSATIAVARRMLEVIYAMLKEGRAYIEKPVDIK

SEQ ID NO: 409113 - protein, 350 aa, unidentified
MIIIGCDFHTRYQQIAMMDTETGELVERRLEHENGEARAFYASLPKPVVVGMEATGYAQWFERMLAEFGHELWIGHASEIRAGVVRKQKTDARDALHLLHLLLEKRFPRIWIPSPAERDTRQLLRHRHKLVCFRVSVKNQLHALAMSQGVCRKKKLFTARGREVLEKLSLGPWARRRCQELLGMLDQLNTVIEELDRAVQQQAESHAEAARLMRHPGVGPVTALAFVLTLGPVTRFRRSKHVVSYLGLNPKERSSGGKQRTSTISKQGNTMMRWLLVEAAQTAARYDPELLRLYQRLKFHRGANVAKVAIARKLAVKLYWMLRATASCAQLAPMQGSSRGTLVPQAGSSF

SEQ ID NO: 409114 - protein, 428 aa, unidentified
MVVRSVALDVHLDFCEVALVEDGELRSAGRIATTPEQIELFAGSLGPDDRVALEVTGNAWEIARIIEPHVARVLVVSPSDTGIRQARAKTDRLDARTLARLLAAGSLDAVWMPDRAIWMMRRRLSRRGQLVRARSRAKNEIHAVLMRQLVGRPPVSDLFGVKGRRWLAGLALALEERETVDAAMRQIEFLEAEIAAVERLIAQDALDSEQIRRLMSVPGVNVIVAASFLAAIGDIRRFENPRKLVGYLGLDPRVRQSGPGPATHGHISKQGSVRARHALVEACWTAVRQPGPLRAFYERVRARRGHSVAVVAAARKLACLFWCLLTREQDYAYAQPSLTRKKLRRLEITAGHPRYTPEAAGIWHANEAVRQAERELARQAETAYARTVRDYHATQANKAGASATPGRASQGRQCGKQRGKASVPDPAL

SEQ ID NO: 409115 - protein, 427 aa, unidentified
MRVMNCACAGLDVHQKTVVACALAGEAGGNPVMEKRTFATTTTELLALSDWLRQQKITHVAMESTGTYWKPVWAVLQGEFDLTLCNAAHIKQVPGRKTDPKDAEWIADLLRHGLVKKSFVPPQPQQDLRELTGYRAQVSADRSAVSNRIRKLLEGANIKLGSVASDVMGVSGRRMLHAIVEGKSDPYQLADLALGQLKDKRDQLVEALRGRIRDHHRTMLRLELAQWEFLDALIAELEKAIAEALVPFGPAAELVKTIPGFSEVSVAAVVAEVGPAMEQFADAGHLASWAGLCPGNNESAGKHYSGRTRSGNIWLKRMLCQVAWAASHTRGTYFGALFRRVAARRGKKRAILAVGHAVLVTIYAMLKNQQTFRELGANYFDKLHEDGLKRFGGDGSPCNPRTRRMSFQGSLDTAVRVRAAWRLLKPK

SEQ ID NO: 409116 - protein, 341 aa, unidentified
MDHYAGIDVSLECSSICVVDATGKIVREDKVASEPEVLIAWLRSLGLSLARIGLEAGPLSQWLYAAMREAGLAVELLETRHVRDAFKAMPVKSDRNDARGIAQLMRLGWFRAVHCKSMGAQETRAVLTARKLLQKKLGDVEASLRGTLRGFGLKVGKTTPKRFAERVKELVIGHASLEAIAEALLAVHAVLLREFNGFERRVRTMARHDVKAQLLMSAPGVGAIVGLTFAAAIDDPARFKSSKRVGAHFGMTPKKYQSGETDYTGRISKNGDKGVRTALFEAAHIILTKPVKGSALKSWAMRLAKRAGMKKAKVALARKLAVIMHRMLVDGTTFDFAAAAA

SEQ ID NO: 409117 - protein, 350 aa, unidentified
MIAINKDIIATIGIDLGKNTFHICAMNDKGTIVLRERLTRAALPKRLANIPPCLIGMEACAGAHHIGRQLAMLGHDVRLMPAKYVKPFLKGHKNDYRDAEAIAEAVQRPTMRFVPFKSDEQLDLQALHRVRSRLVGQRTAVINQIRAFLLEHGVAVRQGPGALRQALPSILARRTDVLSPRIIHLIEDLADDWRRFDQRIADVTREIEQLAKQDEHCKGLIGVPGIGPMTASAMVAAIGDGAAFSKGRDFAAWLGLVPKQISTGDRTILGGISRRGNRYLRTLFIQGARSVLQRSDGWEKKSFGRWLIAASKRLHKNVLATALANKLARIAWAVLNHAREYDAAFAPKAA

SEQ ID NO: 409118 - protein, 303 aa, unidentified
MTVVIGLDPHKATHTAVAVDRAEEELDRIRVRATRRRLGQLRRWAEPCGDRVWAIESAAGLGDLLAQQLFGVGERVVDVPVTLAARARLLGTRRSDKNDANDARSVAVAALRAPRLSEVTPADHVAVLRLVAKRNLDLGRERNRAANRLHVMLTELVPGGIPKELTVSKALALLERAQPQTAVDHARYAMALELLDDVRRLDAQKNAMKRRIAAAVVASGTTVTDVFCVGPIVAYLVLGYTGDATRFADCHHFSAYNGTAPVEMSSAGRRVHRLSRRGNRTLNYAIHMAAVGQIRQLHSEGRA

SEQ ID NO: 409119 - protein, 382 aa, unidentified
MEAVQLLRLFACDVDRAPALHTHSYSSNGILGPSLARARIRKVGQSAVMIEKLINGETVMSNFVGVDIAKNTFDIATHLPNGKHKTKAKLANDSKGFKEFDAWLNKQVEPTALIVMEATSVYHLELAEFVYNKGYRVCVVNPATTHAYADSELRRIKTDKSDAKLIADFAREKAEKLQLWAPEPLKYRQLKAMVRRLDDLQEMEQMELNRLDVSDEKVKGSINSVLRHIEKEIVETHKAIKKHIDDDPDMRQMRDLIVTIDGIGQKTLERLLAELGDLRKYDDPRKLVAAAGLNPQLQDSGKFKGRTVISRIGSARVRAGLYMPGLVALKHNKAIIAMKDRLKANGKAPKQIICAAMRKLLHFVYAVLKSGQPFDPKIALAR

SEQ ID NO: 409120 - protein, 479 aa, unidentified
MSIKTQQQEVRGRRGPVSAKGQRSKQPNRSGQPGGSMFEPNAAGIDIGAREIFVAVPPERDSDPVRRCGTFTGDLQQMADWLVICGITSAAMESTGVYWIPVYDVLEQHGIKPCLVNPRNMKNVPGKRTDFHECQWIQHLHSLGLLRSAFRPDGEVCAVRSLMRHRNDLVQMASQHVQHMQKSLTQMNVQFQHVINDITGLTGLAILDAILAGERDPAVLAKLRDPRVKANEETIRNSLEGNWRAEHILALKQRLSLYRSHRNLINECDQEIEKLVAAFEPRVDSEEKPMPADRKQKQRKRKNQSGSPDFNLRAEAYRLFGVDLTQIPGLMTLVFMLFSEVGRDMSRWPTAAHFASWLGLCPDNDIRGGRVLWRGARRTKNRAGTLFRLAAHSLHRDQTPMGHYLRPMKAKLGPAAATTATAHKIAIIFYTMVSKQVEYDASLWAQRDQLREKRLEATLRKQAAERGYKLVPIDANKAA

SEQ ID NO: 409121 - protein, 315 aa, unidentified
MTTRSGGFVGIDVAKEKLDLAVLGETQASQTTNDQVGILPLVAQMQERQPELIVVEATGGYQRALVLSLYEAGLPVAVVNPQRVRQYARACGKLAKTDKIDAFMLAEFGKHVQPRRFEAQSEAGRYLEALLVRRKQLEEMLKAEKNRLRSVHETLRASLENIIGFLKAELKQIDGKVRQFMDEHADFKAQEELLRSAPAVGVVTAATLLAELPELGKLDRKQIAALVGVAPMNSDSGKKRGYRKTKGGRAEVRSVLYMATLVGMRYNPVIKAQYEHLVVRGKLKKVALTACMRKFLTILNAMMRDQQPFRAGLAS

SEQ ID NO: 409122 - protein, 450 aa, unidentified
MWRKRKIKKTGTPTFQCMNPNAAGVDVGAMEIYIAVPADRDPQPVRCFSTFTEDLHAAADWLKASKIETVAMESTGVYWIPLFQILEDRGFTVLLVNARHVKNVPGRKSDVSDCQWLQYLHSVALLRGSFRPDQEVCTVRSILRHRDSLVQMAATHVQHMQKALDQMNLQLHHVIADITGFTGLAIIEAILAGERDPHALAALRDGRIKASADTIAKSLVGDYRREHLFTLGQSLTAFRHYQELIGACDREIEKSLETFESKVDPESPLPKSLTDVKRLKGDPRFELRTHLYRVFGVDLTQIPGVNVLTAQTLLAEIGPDLSRFASAPTFTSWLGLCPDNRVSGGKVLSVRTRKVKNRAATALRIAAAGLYRSQSYLGHYFRRMRAKLGAPKAITAAAHKIARIVYHMLTTRRPYEETIWVKNEAANRVRVEARIRKQARDLGFQLVAAS

SEQ ID NO: 409123 - protein, 418 aa, unidentified
MNQIRDSLIVGIDVSLSNNVATFMRDDGQEFARYFKFPNDLPGAIEFVKRLNSLIVTHNFTHLKIGIESTSLYWWHLVEFLNSDNTGLLLKPEVYLLNPNRVDAFRKGFPNLPKTDSIDSWLIAEIVRIGRLSPNRPPDMEYAPLQRLTRFRCQLVESLITEKNRALSLIFLKFSSYSDKSQNPFSDIFGKTSLNLIENFTPEEIANTRVEDLIKFISYSSKNHFSEEETIKYVEELNKLTRRAYKLNPKLLDTVSVTLTMTLENVRYFESQIKKINKVIEREFSAFPQKQMLSLVRGLGPVLSAGIVAEIGDINRFRSERNLASYAGLVWRKHQSGEYEGDDTPLTRSGNEYLRYYLVEGANCLRMHNAEYSKYYNRKYQEARTHHHKRALVLTARKLVRLVFALLSKNQNLLGRSR

SEQ ID NO: 409124 - protein, 419 aa, unidentified
MKNGNTKKGKRINEETLLVTIDMGKVKHTGYYRFPDGAEGKIFEFSNSRNGFEDMWQRVCDAKRSRNLTDIVVGFESTGPYAEPLLHFLRKRNVRLVQVNPFHTKRLKELQGNSPSKTDQKDPKVIADIIELGHALTVIIPEGTAAELRRLTQARERGIQRRSMLMSQVQDLVFLIFPEFMPVMKDMTIKSTQYLLKHYPRPQDVVETGVTLLTQILKKVSRGKLGKQRAEALYQAAEASVGLREGQESIMMEIKEMISAIENIESYVKELEKHMSKHLKDIPYSRFILSIKGIGEITAAGLIGEVGDFRGYRTISEVIKHAGLDLFEISSGKHKGKRRISKRGRPLLRKLLFFASINVVRKGGILHKQYLQHLNKGMPKIKALIAISRKLLSIIFALVRDHSVYIAQYSEIQQLKEAA

SEQ ID NO: 409125 - protein, 350 aa, unidentified
MNILAMDLGKNNTVICNYDSETGTHKFTKVKTLPQEIHDMLVENEPDRVVFEIGALTGWVYDIATTLKFEVQVANTSHQAWRWKNIKKKNDRTDALKLAQLSAMNQLSLVHIPKPEVRQKRALIQYRQSLIKRRTQIKNNIRSILERQGCHKLLPSGKKGWSQNSVEMLNKMSIDFSLCEMDQLWKGELNLELMQLEVIEKCINETEKRLNELAENDENIKVLQSIKGVGPRLSEALAAFVDEPERFKTGKQVGSYIGLTPRQYQSGQMDRQGRISGAGNRVLRSLLVEVCWLGLRHNKWMNETYHRILRGSKSRKKIAITAVARKLLVRCWAMMRDKKNWCDVEIKKVA

SEQ ID NO: 409126 - protein, 339 aa, unidentified
MSTLYGGIDLHSTNSYCGVIDEKGQWISHRRIRNNIDEITHFFSTYKEQLAGIVVEATYNGYWLMDGLKEAGYIVKLGNTSRMGNYAGLKDQNDKTDTKWLAEMFRLGILPESYKYPKEERPMRDLMRKRMLFINARTKILNSIGNQFQASLCTKIGKRQLLELSSEELYQLFEDNNLCIAARSGIEIIKTIDEQIKIVEKKVYEQVKESAIVVQLRTLPGIDKILGMTIALEIGEIDRFASDKHYLSYCRLVEAKRISNEKMKGKGNGKCGNTMLRWAYAEAAIGALRYPRIKAYYERLKKKKPAPKALAIIASKIARVSYKAMKDSDFCYQEERLFQ

SEQ ID NO: 409127 - protein, 339 aa, unidentified
MDKLYGGIDLHANNSVVVVLDEEDQVLYRKRLPNELEKILHGLTPFRAQLQGVVVESTYNWYWLVDGLMEAGYGVLLANPAAMQQYAGLKYTNDDTDARWLAHLLRLGLLPTGYIYPKADRAIRDLLRKRSQLVRQKTANLLSIQNLLTRNTGHAMTGNQIKQLTPATVSELVPLPEQALALQVTVAVMQHLTEQITCVERAVHTRVKRRPTFQALLTVPGIGQTLALTIMLETGEISRFSTVGQFASYCRCVGSTKLSNGKRKGQGNTKNGNKYLAWAFVEAAHFAIRYEPQIGQFYQRKRAKTKVVIALKAVAHKLARACYYIMRDTVPFDVTRAFA

SEQ ID NO: 409128 - protein, 400 aa, unidentified
MRVVFGIDVSKASSEVAILVNGEKVHGYTIPNDAIGFNRLLGDLKTVHQPEIVFEATGVYSRRLQAFFEDNSYTYTRLNPLESKKQLDSLRVRKTDKIDAEKLAMSQFILNRKPSYVQEALYQELRDLSRFYQNLTEDIVCAKNRLHKVLQITFPELENILSAPTGEQYWNLVITFPCNSFVLESDDATLTAIIRQSTAKRISEKRVTYLVDKLTKLANQSYCEVKKTSPMMEEIKYYAGELLRLSEHRQGVVEEMVTLAQSLPEYEILLSIPGIAETTATSIIGELGDIRQFHSANQINALISIDLSHYESGDFLAKEHITKRGNPYAIKVLFKCIHNIASASHTNPCHIADFYEKRKRQSQVTSTKPHTIASTHRLIRTMYYLITHNKLYDYTSTQNR

SEQ ID NO: 409129 - protein, 345 aa, unidentified
MTVYIGVDFHARAQTISYLTTEDGEIQRLQLDHGQPQEVRRFYQQFGGQQVVVGFESSGYAAWFEEMLEELGCEIWIGHATAIRLFARRRQKNDRRDADLILDLLVRGDFPRIHRYSAASREVLQQLRYRQRLVKMRTMIVNSLLFMASSRGLSLRTQLKSRRGLERLQQLALPQPLTDQRDELCQLLLELKTKVDKVEDWLAAKAESDVRVKRLRTHYGIGPLTGLCLVHTLECPERFANPRKVTAYVGFDPVEDSSGERRRIGSISKQGSRLLRFYLVEAGQIAIRQDQDLARVYQRVLVRRGHAKAKVAVGRRLLVRAFIMLRDEIDYAEFQRRGVAARSSR

SEQ ID NO: 409130 - protein, 350 aa, unidentified
MIVGVDVHKRTHAVALIDERGGLVDALSIANGPKGYRQLIDWLVDQRAAQAVIGIESPGSYGRCLVAALAGAGFEVLQVPAWRTHRERHRRGPGKTDPGDALSIAKVVLLHRDELGPAEEPEIVRALGMLELQRRRFVRDRTQAIQRLRSDWTQLDPVAEAGTLRCDRARELRKLKRIDLGDSLTQRTAARCIRELARDIDDLNQRITELDQEIAVLLAAHGDPLQELQGVGSNLAATIIAQAGDVRRFRDASAFARFCGTAPIPCGSGQTSGRHRLHRGGNRQLNAALYRIAIVQQRHHPQAKAFLARKIAEGKTAREARRALKRHLANVLYRQLSAWASSTPAMNDLT

SEQ ID NO: 409131 - protein, 363 aa, unidentified
MSASIIPYERNTLHEYGLDVHQATISVAVLDSTGKLVMESILETKAATLLEFLAGLRGTLSVTFEEGTWAAWLYDLLRLHVAKLVVCNPRKNALLKDGNKSDRIDAHKLEELLYLNKLSSVYHGETGVRMLRELARSYLTIVKDLTRVMCRLKAVYRRWAIPCTGRDVNYTRHRAEWLSKKEAGVRRRAERLYQQLDMLQYLRQQARRELLAESRKHAITVKLRQIPSMGPIRSALAVALIQTPHRFRTKRQLWAYSGLALETRTSAENCYIQGGLRRSKKQISIRGLNKDHNHDLKNLFKGAATRASVLPGPFQDFYQRSLARGIKPTMARLTLARKIAAITLTLWKKGENFDAEKLKSQAP

SEQ ID NO: 409132 - protein, 360 aa, unidentified
MTATMTWVGLDVHARSTHAAALDRESGELTRARFGAGADPVVEWLRELPQPIHGCYEAGPTGYALYRAAAAAGLRVDVVAPSKTPRAAADRVKTDRKDAELLVRLLLAGSLVAVAVPSAGFEAARDLARAREQVRGDLARLRHRVSKLLLRYGRVYDGGSTWTQAHQRWLAAQRFEHVPTELAYIDALAAIDGLLARRAALDERLSLLAREPEHWPTVARLRCFRGIETLSALVLHLEVGDFARFQRPGQLAAWLGLVPSLHQSGESETRGSITKTGSGFARRILVEAAWHYLREPRIGVTLHNRQAGQPDHVLQIAWRAQQRLYRLHRRLRGRGKPGNLATVAVARELACFLWAAAVAA

SEQ ID NO: 409133 - protein, 362 aa, unidentified
MTINAGVDLHKTQFTVFVKQSGNQFEQYSTEEDGYKRFLARIQRWKKNGMTVRVGVESTGNTRYFKNRMEQVGVEVVVINTLKFKVVNESVKKTDRHDAATIAEFLEKDMLPESRLCSEESEQIRRLLKVRTTLVRTMVTVKNQIHALLTGLGMKDSRATLQSKRGRQKILDTLRKADSELVVQPLFETIEQLEKSVKSIEAELEKLTEGDRTVELLLTIPGCGKIGAWTIRAFTDDISRFSSAKKYSAYAGLVPWVQNSNETVHHGKITKRGPEELRTALVQLVMGMRRCRATTSWRLMEQYAEMKRNKGSGKSIVATARKLSKIIWCMLSENKEFNPALMIDKRIVRKAESMRNAASKSA

SEQ ID NO: 409134 - protein, 375 aa, unidentified
MKEKLRFLGLDVHAETIAVAVADPDGEVRSLGTIPNRGESIRKMIKKLGPAEKLRACYEAGPTGYVVYWQLAELGIQCEVVAPTLVPVKVGDRVKTDRRDAEKLARCYRSGDLTAVWVPDEGSEALRDLVRAREAAKQDQMRARHRLSKFLLRSGQRPPTGVRPWTRPYLIWVAQLRFTQVAQEATRQDYLHEVEHMRERVARLEQAIMEAVKLASPALQQVINDLQALRGIADISAVTIAAELGQVSRFGSARQLMGYCGAVPSEDSSGKRIRRGSITKTGNAHLRRIVGEAAWSYRRPPGIWYGLRRRQESISEEVKEIAWKAQHRLHKRYMKLGAAGKPQGKIITAVARELLGFIWAIGTRAETTVSQRTAA

SEQ ID NO: 409135 - protein, 415 aa, unidentified
MDVLHDRCAGLDIGKKDLKACVRTPSPTGRRSRRQEIRTFATTTNALLELRDWLVDQQVTLVVLEATGDYWRGVYYLLEDTLNVILVNAAHAKGLPGRKTDVSDSAWLAQLGECGLLKASFVPPEPVRHLRDLTRYRTALTVERSREAQRLEKELEDAGIKISSVATDILGVSGRAMLTALIEGEDDAQVMADMARGRMRSKIPALVQALTGNFGEHHSFLCRMHLTRIDELSATIEELSARIDQEMRPFVPQIERLVTIPGVKKTTAEVIIAETGADMTRFRTPANLASWAGVCPGHHESAGIQRSGKRRHGNRWLGGALGTAAMSVGRTRERTYLGARYARLVPRLGKQKTIVAVEHSILTAVWHMLTDNVDYHDLGGDYFTKQDPERAMRRIIRQANALGLTVRLDPIPDVA

SEQ ID NO: 409136 - protein, 367 aa, unidentified
MKEQENKRNKITIGLDLGDRRHRFCVLGEKGEVLEEGSVGNNRAALSELGGRYPEALVVMEAGCHSPWVSRHLEQAGCEVVVSNPRKTRAIYQHERKSDQRDALMLARIARMEPALLYPVRHGSEEAQQDLLRIKLRDSLVRARVALINSLRFTLKSLGYSIANPSTERFHKVIQSALPQSVAQVIAPSVQALEELTLRIKLLEREISDQARSKYPDTAWLEQIPGVGPITALYFVLKIEDPARFKRARDVGAFLGLCPRRDQSGENDPQLRISKRGDAYLRRLLVSSAQYILGPFAPPSALRQYGLALASGATARAKKRAVVAVARKLAVLLLTLWKNKSSYQTFPQHSSREKMRTNDLERLRCIA

SEQ ID NO: 409137 - protein, 346 aa, unidentified
MPIVGGLDIHRKQITFDYLDTATGQVQRGQIVPADRVHLRAWLARFAGREDVAFAVEACTGWRYIAEELAGAGIAVHLAEPADTAFARGRKRHAKTDKTDSRHLRQLLAEARLPECWIPPGHILEARALLELYHDLRAEHTAWVQRIHAVLFHHGTPALGQGTLRTERGLAALRAAAAGCLSPAGQLQVATALEVLEALETRMHVVRHQLLAVARHLTGAKVLAARLYGVGPVTGLAMTCWLGGEGRFSSSRKAVRFAGLDVTVWSSDRKGPPGRLSRQGPPVLRWAVYEAGKTHARPSAPVHGYYATVKDREGGKRAALSEARKILRQACHILAELGDDALAPTA

SEQ ID NO: 409138 - protein, 402 aa, unidentified
MKDVYENVAAVGLDVHYKFSTVTMRDGRAKVVRRERLEHGDRTKLRERLSRWPRGVPVVMEASFGWGWLADLMKEEGLRPELSNCFKVEKMRKARGQVKTNQRDADLLSLLPGEATDWWKVWMVPPEVRDQRETMRYRSSVVAVQTETKNRISGLLQRHGVVHDLSDLFGVRGWRFLAALSQEGRWDQGVLWPGALAGLRGLLELLEHLRGQLARIARVLHGHLEASPLVRRLDGIPGFGMILAHTLRAEIGEIDRFRDSRALASYSLLAPRAEDTGEATEGRAPLGRHLGHCGNRTLKWVFIEAAHAAVKKGGKWRRIFDAATEAGRKNRNRGYIQVARELVKVVYVVWKKNVEYTDTPPARPGSGRKLAASGPSRESAREFFGSTRSGTGQPSRPMAVVQ

SEQ ID NO: 409139 - protein, 345 aa, unidentified
MKKNIIGIDFSKETFDATLLDCRNSELSEAVQSAVHEKFTNNKEGFQAFVKWIKSSVKKITPDELLLCGEKTGKYSLPLSNFLYAKGYSIWLDSGLRIKRSLGISRGKSDKADSLKIALYAYRYQDMAVCYVPLSKNVSRLKELFLYRQHLVSQVKAMAVRKNVTDDFKKELGDVKFIVDSAAKIIQQIKATIKKCEEKMQELIEEDDELKTTHDSITSIKGISLINATAFIAYTNNFKDFGGNAKKIATYWGVAAFAQESGTSVHKVARVSKIASKMLKSLLTQAARITVRWEPKFRQYFEQLISRGKHQGVALNNVKNKLIHVITALAVSKEKYNREYKYIKR

SEQ ID NO: 409140 - protein, 455 aa, unidentified
MNKVKVKKAKEKNVVEMPVVNPYSAGIDISDKEHVVAVPEGMATDRVRKFGTMTCDLTEILDWLEHCGIETVAMESTGVYWKPLFSMLIKEGFEVCLVNARHVKNVTGRKTDEGDAMWIQKLHSCGLLNSSYLPDDEQESLRTLVRYRRTLVQDSSRFINRMQKSLELMNIKFHTVIADITGKSGRRVIEAILKGEREGKNFLPFIDKRVKADRQTIVKSLQGNWRAEHLFTLGESYKMFLIYKDQIASCDQEIEKQLQQYEAIRNDGIIQTDQKPKMKPIQKRKDKNHPQFNLRGYLKTIHGVDVLNIYGLSETCGLELLAETGTDLSKWENDNHFVSWLNLCPNNKISGGKLISSTLLKKKSNPASQAFRQAANAVQKSNNWLGDYFRRMKAKGGQKYAIVATANKIARIYYKMVRYREEFNPVELELYQQKYKQAKISYLERKLSQLKSDAA

SEQ ID NO: 409141 - protein, 331 aa, unidentified
MGLDMAKATFWASICVLTLRGEVECRGSREFSNSKKGFKELEKWIKEHDANRAELHFTMEATGVYHENMAHYLYGKQHHVHIVLPNKAKKFAESLDNKSKTDKLDAKALGQLGAERTLVGWSPASPTFKVLKSLTRERASLIAIRTQLKNSLHALKHSHEPNAGTLKRTKSMIQELNTNIKSIEKEIASIVKGDEALRDQLAYLTSIPGVSLLTAVIVAAETDGFSLIGNVRQLCSYAGLDVKIVESGKWKGRSKISKKGNSHIRAALYMPSLSTARYCNQHKVFYNRIVERKKKPMIGVTAVSRKLLILMYTLWKSETLYQEDYPLKKAS

SEQ ID NO: 409142 - protein, 409 aa, unidentified
MLYYLGVDWADQTHAVWVVDEGGTKITARTVPHTAAGFSEWGRELDEWRAQGIERWAAIERPDGRVVDFLLDHGVVVYPINPKALDRARDRFRQSGAKSDPFDARVLADFLRTDHLHLQALQPSSDAAQELKLLTEDYQRHIRQQTRLVNQLTTTLKGYYPRALEVAELTTAVAREFLRAYPTPEALTALTARQWQRWARGRRLSEARIGALWAVLQQPQLPVPAHVVRAKARLMHSLVEQLTPVVTAVAQYREAIDDFFARMPAAQWARTLPIGKHGITAPTLWARLGDAPGRWQSFRHLQAQAGAVPVTKRSGKQRIVHFRFACDKSLRHVVDQVAFLSLLSSAWARAYYDQQRARGHAHHQALRALGAKWLKIIFVMWHRQVPYDEQYHLATMTRQQLRQRQPQIA

SEQ ID NO: 409143 - protein, 418 aa, unidentified
MTEGGQAPGVYAGVDVAAATLVVTVLDARGQPLAPARTVANTPAGWTTLRQWLERQRARAGGGPGICGLEATGAFHRGVAAALAAAGWAVRVLNPRAVKAFGQARLQPAKTDRLDSALLADYVRCVRPPARPGLDPAVEQLRRLTRQRRRLVEARTAALNTLRAHLRECSPGGGPRRLGPRRVAALAAEGLRALGPTPAPTALPEVADYLVRQAARAVQTQTAELQALERVLRAVGQRCFPAEVLAALTSIPGVGFLSAVTILAEVGDFQRFPSARAFVGYCGLYPTVWQSGRRERRGRLTRQGNRMLKLTFLLAAVSARVHNPVLAAFAARLRAQGKGPRAIGGAVARKLAVYVYTLGSRRQRWAPARAARPEDPPRLTGVAAPPPLPAVSRSREIPLPLLSPPAPPSQPPLPAPDP

SEQ ID NO: 409144 - protein, 425 aa, unidentified
MNLLILKGVPMALKIVYKICCGIDVHKTFVVACIASTNDKGVTSYESHRFSTYTSGLKTLLQWLLNRNCKDVCMESTGKYWIPVYNILENDCSIVLAHPKYVKAIRGKKTDKKDAKWIADLFKHDLVVGSFMPPADIRQLRDLMRYRFKLTCFQSSEKNRLQNCLTVSNIQLGNVVSDTFGKSAQAILDKLLENPADTSFDLEPLVYKSLKKKLPELRDAIDGYITPEQVGKLKVIKAHYESLESRKAELEELILALAAPYQQELAILQTAPGIRSDFTAIGIISEIGTNMEAFPSAKHLCSWAGLTPTNNESAGKKKSVRVSKAGCYIKPLLVQCANAVVTSKKHPEIRNRYLRLKKRRGHKKAIIAIARMLLTALYHMLKNGENYNAELYRKSDLPPADWEITVEQAIIIARNQGYKIKSATA

SEQ ID NO: 409145 - protein, 347 aa, unidentified
MIIVSSTRPVTGGVDTHLDVHVAAVVDANGGVLGVESFATTPAGHLALHAWLGSFGVVERVGVEGTGAYGAGLARHLADQGLVVIEVDRRNRQERRRNGKSDELDAVEAARGALSGRVAGLAKTGTGNVEALRVLLVAKRSARSMRISAVVRLRHLMFTAPDELRQRLAGLSVNALVNEAARLRPRADGDAVLRATKTAAVSLARRVQALDAELELLDTQIEPLVKATAPALLNVYGVGFDTAAVLLTAAGDNAARIRSEAAWAKLCGVAPIPAMSGKSNGRYRLNPGGNRHANNALWRIVLTRLGQREPRTVAYMTRRLAEGKTKPEIMRCLKRYVAREVYRALPR

SEQ ID NO: 409146 - protein, 352 aa, unidentified
MQSTTTIGLDLAKDVFQVHGVDGAQKVTIKRQLRRKDVLEFFTKLPPCLVGMEACAGAHYWARELRKLGHTVKVMAPRYVKGYAKRAKTDAADAAAICEAVTRTHVEQVAVKSEAQQCLLMLHKARELLIATRLSLANALRAHLAEIGLVAATGHPGFALLRAKLLDEADGDIPPAARVALLPLEAAIGAAERGIAALEGKIRIAHKVDETSRRLEAVPTVGMFGATAFAAVAADIKAYRSGRCYAASLGLTPKIFGTGGEVTLGSITKQGNGYLRRLLYLGALSQLRVARAAPHKADPKLLRLLAEKPFKVAAIALANRTARTIWALIVRGGEYVANHVPAVPVAAKMGLQ

SEQ ID NO: 409147 - protein, 464 aa, unidentified
MKDSKWRRRLKQKRISAHLERVNLFAAGMDIGSQSHYVAVPAELNDEPVREFSCFTGDLNRMADWLVEIGIKTVAMESTGVYWIPAFEILEERGLEVLLVNARHVKNVPGRKSDVQDCQWLQQLHTYGLLEGAFRPPEETVALRTYMRQRETLVQSASDKIRHMQKALRQMNLLLENVVSDINGHTGMKIIRAILAGERDPAVLAKFRDKRCRRSEKIIAASLEGHYQEEHLFTLKQSVELYDVYQQQIVCCDAAIQAQLDRMESKGNKDTLPPRKKPKTKGGPDFDVRGELYRMTDVDLTQIDGLNETSVLKILAETGISTSPWPTEKHFASWMGLSPGNKITGGKILTGKTKPSANRAAAAFRMAAYGLSNSKSALGAFYRRQRARLGSPKAITATAHKLARIFYSMLKNGVAYVDQGQDYYEKQYRDRVTRNMRKKAASLGFDIVPRTADRDSQNKALSMS

SEQ ID NO: 409148 - protein, 395 aa, unidentified
MFIVGIDIAKRSHEAIIIAEDGQVVRKAFSFRNNCTGYNLLLEQVRKLTLVKSQIVFAMESTAHYWLALYARLLKDGYAVMVLNPIQSHSLRELYIRKAKTDARDSLVIADLVRFGRCKASNVPQDKILALRELCRSRAYLVDMAADLKRKLIALLDRIFPEYESLFDSVFSKASIAVLSKYSTPQKVKNANLGKLTDLLMESSNGHFGEWKAHQLKEAACSSFGIDDSGGVYSTLLGMFLEQILSLTAQADSLEKQISVFFQEFNNPLTSIPGVGTVLAATILSEIGDITRFSSADKLLAYAGLDPSVKQSGEFKSNQNRMSKRGSPYLRRAIWLASTVAVHRDPMFQTYYEKKISEGLHYMNVIGHVSRKMTAVIFAVLRDGQPYQPILQSAG

SEQ ID NO: 409149 - protein, 370 aa, unidentified
MGKRSMFVGLDVHKESIDVSLAEEGRDGEVRHYGVIPGDLEALAKVMRAVQGPDRRLRFVYEAGPCGFGIHRYLTTHGEDCVVVNPSSMPKRSGDRIKTDRRDSQALARLHRAGELTAIYIPTADDEALRDLVRAREDAVGLSTQAKHRLKAFLLRQGRRYPGRAGWTQPYRRWLADLSFPLAPQHIALQEYRDTIDETERRVARLTDQLRQITPTWRWAPVVDAVQALRGVSFVTAVGLVAEIGDIRRFDHPRQLMAFLGLVPSEYSSGPSVRRGGITKAGNPHARRLLAEAAWAYHGVPRLGRQMLYRQEALPKKICDIAWKAQLRLTSRFRRLVARGKAKPKVATAIARELTGFLWAIAREVPPPPA

SEQ ID NO: 409150 - protein, 456 aa, unidentified
MAHNVARKLISSKVDSILPDDQSLSVLNLQNYQEVILLSFKILKNNCCGLDVHKTWIYACIGITDSNGRTEYKQARFSSFTKGLQELCDWLVKYNCNDVCMESTGKYWIPVFNILEKNNLWVTLSHPKYTKPQKGNKTDRKDAKWICDLYMCGMVKPSFIPPADIRQLRDLVRYRFKLTCMITGEKNRAQNCLTVSNFKLDDVFSDVFGKSSRSITEQILQHPGETFDVTPFVDGRCKTPIEEIQAAVDGAISMEQAVKLRQCLNHIDELEKHQAEIEREIFRLSDKYESILNLIRTVPGFDKNPLTAIQVLSEIGGDISVFPTAKNLVSWAGCCPRNDQSNHKIKSTRISRAGSYFKPVLVQVANALIKSKKHTEFTTRYRRIKARRGHKKAIIAICRMILTAIWHILTDLKPYTPEGFLESRPVNDSKVLTTSQALNLLKQRGYVIKDDTVPVT

SEQ ID NO: 409151 - protein, 367 aa, unidentified
MTENTLYVGLDTDKKHIDVGLAEPLPDGEVRYWGKLANEPASVDRLVKRLQKADRRLVVCYEAGPCGYGLYRQLNGKPGVTCQVVAPSMIPRRPGDRVKTNRRDCLSLARLLRSQELTAVWAPSVPHEAMRDLIRARSSALGDMNRCRQRIGSFLLRQGVSYGGKPWTRKHRRWLARLEFAEAAHRLMFGELLEAFDRAQARCDQLTDHIAELVPHWSLAWLVEAIQTMRGYKLINAATVVAEIGDPRRFASPRQLMGFLGMVPSEHSTGETVRRGGITKTGNTRARKALIEAAWTYTRPAVAKRTHPSAEVRAIADKARHRLSRRYRRLTARGKLGVVAATAIARESLGFIWAIAHAAAPADPGNR

SEQ ID NO: 409152 - protein, 425 aa, unidentified
MTYRIAGIDVHKKMLAVVVADVAGEGEFQFQRLLFSTTPEQLKALAQWCVDHEVQEVVMESTAQYWKPVWETLERYWQPVGRKQTGASPMTGSLHLAQAQSNRARGGRKNDFVDAERLVRRYVAQELVLSFVPSADQRLWRTVTRQKQQRVGARVRLRNQMEAFLEEAHIKLSSLVSDLLGQSGQRILEALGEGKTDPQEIALQADRRLRATQAQLCDALSAARELNPVYRKLLKQSLEELGLLDRQIQELDREIARLLAQHEDAVQRLAEVPGLGPDSAQQIIAEVGPAAAVFPTAKNLASWVGVCPGDNISAGESHSTKSPKGNRNMRRILNQAAHAAVKAKGSIFEVMFQRLRRSLCYKEAIWAIAHRLCRLIWVLLHKTVRYEERGPTVSAASKRVRTSRMMRELRRMGYRVDPPTELQDA

SEQ ID NO: 409153 - protein, 342 aa, unidentified
MEIHVVGIDLGKTLFHLVGLDASGRVVIRKRCSRTQLLAFTANVRTQRIGMEACSGAHFLARALQQQGHEVRLMPAQYVKPYVKTNKSDYIDAEAIAEAVQRPSMRFVPLKTEEQLDLQAVHRVRERWVMRRTAVVNQIRGLLLERGITLPKGRSHLEEGLPGILAEAHTRFSESIFVLLAQLRIELDQLSTRIEEMDALIARTAKEHDACQRLTTIPGIGPVTATALVAAIGNGSAFRKGRDLAAWVGLVPREYSTGGKQRLLGISKQGNSYLRRLFVQCARSILRFRERQGAPFGAWLSQLMSRSHQNVVVVALANKLLRTAWAVLFKNEIYRTPALTPE

SEQ ID NO: 409154 - protein, 284 aa, unidentified
MPMLAETLDGVIGVDTHRDTLTAAAVTAIGGLLDHATVTTNHGGYQDLLAFATARLPGRRCWAIEGAGSFGAGLATFLLDQGEQVIEVPRRRRSTRRTAAKSDALDATHIARDALITQHPAIVRRRGDREALRVLLTTRRNAVTAWTQTVSRLKALIVSAPEELRAELRGRGTKAQITYCAALRERPTRSLEHQMTARALHATARRCQLLRAEINQHQHDLHTLVVAIAPWLLELPGVGPITAAQILISWSHAGRWRSEAAFAAQAGTSPIPASSGQSRRYRLM

SEQ ID NO: 409155 - protein, 341 aa, unidentified
MKQFIRIGVDLAKNYFQVHALANEGGPAVTRKLKRSKMHEFFSRIEPCVIGMEACGSAHYWGRELKAMGHEVLLMPPAYTKPYVKRGKNDAVDADAICEAMSRPGMRFVPIKSPEQQAMLMLHKTRELLTKQRTMSVNALRGHLSEFGIVAAKGIGRVDELLDLADSDATLPVAAKAGVNVLAQALEGLDTAINALENEIANADAQNEMVMLLDKVPGVGKLIASVIAASVPDPSVFKSGRDFAAWLGLTPRQNSSGGKQTLGSITKQGNRYIRKMLVLGATSLLNVVGKRKGALHDWIVGLLAKKPARLVTVALANKLARILWAMMKTGECFRTEMFAKA

SEQ ID NO: 409156 - protein, 362 aa, unidentified
MMEYPNKFLSKEVFMRFYSKQHKYYCGVDLHAQTMYVCIIDQEARIVKQKNIKSTPPAFLKAIDKYRDDIVVSAECMFTWYWLADLCCKEGIPFVLGHALYMKAIHGGKAKNDRIDAYKIAYLLRGGNIPMAYVYPSEMRATRDLMRRRNHLMRKRAELLAHIQNTMHQYNLPLFGRNIRYKGNREGLIEHFKDECVQKSMEANLSTIDHYSSLLFKLEYYITKKAKVHDGDSLFRIRTIPGIGETLSLIILYEIHTIKRFPRVQDFVSYSRLVKPSKESAGKIYGHSGRKIGNAHLKWAFSEAAVLMLREIPEVKKYKEKLERKHGKAKALSILAHKIGRAVYYMLKRKEVFDVKKFLNKK

SEQ ID NO: 409157 - protein, 404 aa, unidentified
MNMNAVGIDVSKGKSMVAIMRPFGETVSPPFEIKHTASDIHSLVELINSVEGESRIVMEHTGRYYEVLAHQLSEANLFVSAINPKLIKDFDNDSLRKVKSDKADAVKIARYALDKWHNLKQYSVMDELRNQLKTMNRQFGFYIKHKTAMKNNLIGILDQTYPGVNAYFDSPARSDGSQKWVDFASTYWHVDCVRKMSLNAFTCHYQNWCKRKKYNFSQSKAEEIYGKAKELVPVLPKDDLTKLIIRQAVDQLNSASTTVESLRTLMNETASKLPEYPIVMDMKGVGKSLGPQLMAEIGDVSRFTHKGAITAFAGVDPGVNESGSYEQKSVPTSKRGSGTLRKTLFQVMDALIKTKPQDDPVYLFMDKKRSQGKPYYVYMTAGANKFLRIYYGRVKEYLSSLPES

SEQ ID NO: 409158 - protein, 327 aa, unidentified
MIYLGIDISKARLDCTLLDPATDKRKTKAASNDPKGFEALSAWLDKQGFAPGDVHGVMEATGVYHEQAALWLTDAGMRVSVVNPAQARDFARGLAMRTKTDGTDSVALARYGALIQPQPWEAPPPEIRELKALITRLEALETDARRELNRREKALVAQAPALVRESLDNHLAALKQEIARLQQAIDDHVNRHPGLKADRERLLSIPAVGDKTANRMLAVLHSRKFRSADQVAAFLGLVPVEHQSGSSIQKRPRLAKNGDARTRAVLYMAAIVAAQYNPHVKALYTRLCAKGKTKMAALGAAMRKLVHLCFGVVKHQTVYQPNWLPGS

SEQ ID NO: 409159 - protein, 364 aa, unidentified
MCILNENGILFQDKIGVLTPDLERLVDVLHEHNATEVCMESTSIYWMPVWRILEPYFSLKLVNPYFIKQLPGKKSDVKDAEWIATCLLKDLIRGSYVPEDRIQQLRQYDRRIFDLNKDIVYKLTKLDAALQRCNIRISNYVSTTDGKSYQKVVEKISEGTTDPKVLTGLIHGRTLNRVGKDVIAASLTGVITQTDIDVIRQIRDEVTLAQKHRKECLDKMEELCNKWFPDQMKNLQTVPGVSLRSATSVIAELGTDMSSFEDAAHLVSWSGLKPRNDESAGKIKSRKITHGNKFLRKTLIECTWAASKTRGCFYNKFSYHQTVVRRKNKMKVQVAIARKMLTAIWFILHDNVPYRDYTPDIAAE

SEQ ID NO: 409160 - protein, 313 aa, unidentified
MNPHIPYLGLDVAKLTLDLSLQPGVTQRTVSNSASGHRKLIKAVRALPGPVHLICEATGGYEHDLLVALHQAQIPFTRINPRQARDFARASGLLAKTDRLDAAVLAEYGRIFQPAPTVARTQIQERLSALVTRRQELIGLLTQEQLRAEHHHDAFVCRHALGLKRTLQKHLDQIEAQIAALEQSDATLRARVERLSSIQGVGRRTAWLLLAALPELGTLARGQAAALSGWAPYNHDSGPCRGPRHIAHGRPLARTALYMAALVAARCNPVLRPLYQRLRIAGKPAKVALVALMRKLVELANLLLKNPQLALSK

SEQ ID NO: 409161 - protein, 409 aa, unidentified
MNAVGIDVSKGRSTVAIIRPFGEVVRNPFDVYHSRSGLEDLANLILSLEGESRVVLEHTGKYSQPVIKALCEAGIFVTAVNAKLLHDFGGDTIRRDKNDKLDAKKIAGYCMMKWENLKRHLPEEESRRLLKTYNRQLGEFMKIRTAQKNNLISLTDQVFPGVNRLFSSVARESDGHEKWADFLMRFWHVERVSKISYALFAEKYRGWCHKHSYHYSESKAETIYRAAKNAVATLPMNNFTKMLIRNTISQLNSLYETVAKFKAQMTMLAKELPEYEVVMAMHGVGKTLAPQLMAEIGDIRRYPKRASLARFAGIEPPENQSGAYSQYSRRISKQGSPHLRRALFQVMRCVLQNSNPEEDTFRFIALKRSQNKPFKVYMIAGANKFLRIYYARVKELFDSLYPQELPLAA

SEQ ID NO: 409162 - protein, 408 aa, unidentified
MEVIHERCAGLDVHKETVVGCLRVRERGQVRREVRRWATTTAELLKLGDWLRQAGCTHVAMEATGVYWKPVWHMLEGEFELLLANPAHIRNVPGRKSDVNDATWIADLLAHGLIRASLVPPGPIQELRDLTRTRKQLMREIAQHKQRIQKVLEDANVKLASVVSDVFGESGRRMLKALSAGQTDPRQLAALRDGRLSASRETLAAALQGKVTAHHRFLLSQHLRMIDYLEQTIRDFEGQIEVVIAPFRAAVACLVTIPGISATAAHVIIAEIGVDMSRFATVAHLRSWAGLCPQLNESAGKIMSRRLRHGAPWLKTVLVQCAWAATRNKHNYLHAQFVRLRARRGPQKAIIAVAASILSIAYYLLRNQAPYRDLGALYFVRADQERIAQRLARRIKDLGYEVQIRKAA

SEQ ID NO: 409163 - protein, 398 aa, unidentified
MICVGIDIAKGKSTVCFLKPGGEVLKTPYDMEHTAEGITKLIRDIRSYDEEVRVVLEATGHYHLPVVAQLLEANVFVCVVNALRMKKFCSQDIRKAKTDKIDAAKIAAFGLTYWQDLQAAKPTDEVYRELRLLSRQYFQLTSMLVKAKISLGNLLDNVMPGITDLLYDREPNHKLTDFVLRYLHFDKISAMGERKFTTDYCNRAKKQGYRMYERQAEEIFALVQNSIPALPMTPSTTIVVKEAIKVVRELENSRASILAQMQTFAKSLPEYSLIREMACVGDTLTPLVIAEIGDVRDFHSKHALIAYAGIDAPPYQSGGFYGTERHISKRGNGYLRHVGFEIMQCKLRLKPEGDAVYEFIQKKRSEGKCGKEAMVAGINKFLRIYYGKVTELYREIEA

SEQ ID NO: 409164 - protein, 486 aa, unidentified
MVLKERLEPDAGRPARPVLRGRRCSDAPLLPDKESITVAYAVDAGEVESLGKIGTTKIDIDRLCERLRSKARHVLVVYEAGPCGYGLYRQLVQKGFDCMVCAPSLIPRKPGERVKTDRRDAIKLVRALRAGDLSAVYVPGTEDEASRDLTPAWASARDDLRQARPRLKSFLLAHGVRYTGSANWGPAHRRWLSEYSFGNEWQQLAFDEHRRTIEDRLAQCDRLEAALREAVVNWRFYPAVLGLQAMRGVQFVTAVGMLSELGDLSLFEHPRQLMAWLGVTPSEHSSGSKRRLGCITKTGNSYARKLLIEAAWSYRHPARVSRDIQCRHEGIPKALIDRAWDAQIRLPQAPAEQPVERVDQLDVTRRESRLASRDPACVRPRIDEMRLRIAAGKIQADHAALFSDSGYTLAHWSPGSLSSRACAARLVSVWLCTALSDLLSYDRAVLPEPRLLRKTAFLTKPIITASVRLPDRPGDPNVFNARLSRS

SEQ ID NO: 409165 - protein, 433 aa, unidentified
MYENQSWIRPYLGGYLRSQSNIDKPSMQDPAGTLHAGVDLALEKNVVVVVNERAERLDHFGFPQDRDDYFLRRLEGLRQKHQAAKLVVAMEPTNYFWKLLARDLEEKQQTYRLVNAYTVKKHREGDQLDRSKDDRRDAVQIAELSRNGKTTQTQLQKGAYEDLRQYATLYHQLMQSIRREKTILWGLVGQVFPEMVLTFKDLEGETYQALLMTCAAAANIRQISMDAFLAQVREAYTGKRLCVSKLKHVYQMTTRSIGVTEGLQAIQLAFQVHLTQLQVFETQLEQVTGAMTARLFSLPEVLYLLSRSCLKPTSATLFLAEVGDPQRYQKAAQWVKLAGIQPVPNTSGRKQRSRTPMSHQGRPRLRTLLYFSCLRMIQSDPRFSKLYSDLQRRKDNPLTKMQALGVLMNKLLHIWWALIQNQTFYNPSFGQST

SEQ ID NO: 409166 - protein, 370 aa, unidentified
MLDTTTFVGLDVHARSIKAVSLDVMTGEVRCATFGYDAGAVAEWVRSVDPKARCVYESGVTGFDLQKRLSGLGVGCAVGAVSKMIKPSADRRRKNDRNDAEFLARMLSVGNVVEVWVPDDECEAARDLTRALEDARDDLSRAKQRLSKFLLRHGLAFDERTPAGRRKGNWTRAHWSWIESIRFAEGADNDVLAYYVDAARRAAEEKARLEGLVEAEARKPRWRRRVDSLRCLKGVDTATAADLVFEAGEFSRFRNARSFAAWVGLTPSEHSSGESDRRGAITKAGNKHLRKALVEAAWHYLTCSGRPKDLAKGQAPDRVARRHAAKGVRRLVERREALLARGVHNNKANVATARELACWVWAVGLMAEGA

SEQ ID NO: 409167 - protein, 338 aa, unidentified
MKLYGAIDLHSNNAICGAIDSHDRVKLRKKSPCEPEAILDAFAPFKQDILGIAVESTFNWYWLVDGLMDAGYRVHLVNTSAVKQYEGLKYTDDNTDTFWLAHLLRLGILPTGYIYPKELRPVRDLLRKRHQLVELRTTNILSIQNLWIRNTGVRLTSNSTKKLTHEQIEKRFDDPNLVLAIDSNRLVMQALDDQIKRVEGTVLKQSKLDPRYRYLLSIDGVGKILALTIMLETGDISRFEKVGNFASYCRCVGSTKLSNGKKKGTGNAKNGNKYLSWSFVEAANFAIRFYEPARRYYQRKMAKTKRVIAIKALACVFHAKPATDSSASLPPIPDEGCH

SEQ ID NO: 409168 - protein, 370 aa, unidentified
MKRKILYVGLDVHKKTTDVAIANGRSNGKVRSYGKIDSSLDALNKLIKKLEDGDKQLRFVYEAGPCGYQIYRHLGAKGIDCSVVAPSLIPRRSGDRIKTDRRDAVNLARLFRAGELTSIYVPTPEDEAIRDLLRCRDDMKRFERKARQRLLSFLLRHGHQYSGKKNWTKGFYNWLATVKFSHSAQQVTLQEYIDLTNECSERIKRITEQIQVHVEEWSRAPFVKAYQALRGVSHIVATTVVSEIGDMRRFPTPKQLMAYLGLIPSEHSSGKTVRRGPITKTGNSHVRRALIEAAWTYKMQARVSTILLKRQQGLPKSVCDISWKAQTRLCARYRRLFARGKSKQTVVTAIARELSAFIWAIDKEMQVTHE

SEQ ID NO: 409169 - protein, 320 aa, unidentified
MKQELTFIGIDVAKTRLDVAIRPTDRQWQVAYSEKGIQELVEQITELKPTLVLLEASGGLELPMVAALAVSNLPVVVVNPRQVRDFARATGKLAKTDALDAQVLAHFAEAIRPLPRSLPDTETQSLTALVARRNQVMGMLVAEKNRLRTSRPPVSQRIQLHIDWLEQELDEIDRGLKEMLRNSPVWREKENLLRTVPGVGPQLAVSILAYLPELGTLNRKRIAALVGVAPFNRDSGTLRGKRAVWGGRSRIRAALYMAALVASRHNPVISAFYQRLLAAGKAKKVALTACMRKLLVILNAMLKHHSSWQSLNPQLLGPCS

SEQ ID NO: 409170 - protein, 453 aa, unidentified
MQVVHERCCGLDVHKKVVVACLILLAANGQRHKEIRTFGTMTRDLLALGDWLRAAGCTHVAFESTGVYWKPIFNLLEGEMTVLLVNAQHIKAVPGRKTDVKDAEWIADLLQHGLLRPSFIPPAPQRELRELTRYRSSLVADRARVINRLQKALEDTNVKLASVVTDVTGVSAHAILRAYLSGEETDPWELANLARGSLRGKQVQLAQAMAGTVKDHHRFLLLHQMTLIEVLEQQIADFDQEIATRIARDDEEPDADQQQTSASSVPTVVSEGEREPSSFPIARQGLAGYAKALERLDGIPGVNRRVAEIVLAEIGINMEQFPSDGHLASWAGICPGSKVSAGKRLSGKTTKGSPWLRAALLEAAHGVSHSKKTYLGEQYRRLARRIGKKKALVAVAHSILVIIYHMLKEEKTFHELGSTYFEEREHDAVKRRALRSLERLGYDVSLQEKGAVA

SEQ ID NO: 409171 - protein, 331 aa, unidentified
MIDGVLGIDVSKNTLDASMSSCNKVRARSFANSPDGWRHLLDWLITQRVRRVHACLESTGRYSLGIAGALNEAGHVVSIVNPAQIRDFARTKLGRNKTDGVDASHIREYCELFKPHPWAPPSEAHRRLGELQTIRAGIIAGLTEWKNRKNSCMIDAVAQSLADVTISHFTSQLSAVDEAITQTIDHDSVLRRKRDLLLSISGVGETLAGVVLAELPGPDVLHSSAEVVAYVGLNPRQHQSGTSIDRVTRISKIGNAVLRAALYMPAMSAMRYNPAIVALVARLKSRGRLKPKQIVVAAMRKLLVLCFGVLKTGKPLCAAENYGGRSDDLTT

SEQ ID NO: 409172 - protein, 422 aa, unidentified
MKKRTYRGVEVKKVNRERLAEAVAGKDLVVGVDVGKEVCFGSLRGTGQEVEMTVKWKSPWENREAIEFLQGLGCRSITVVMEPSGSYGDPLRSLLWEAGIAVYRVSAKRSHDAAEVYDGVPSRHDAKSAAIIAKLHKDGASELWPFRSEQERDLRAVVKTMDRVDQQFHENVNRLEGQMARHWPEVGAWLSFSRVTFLELIVGFGGPEQIAAKAEEARATMRRVGGSLLSQEKIDAVIASSRKTIGVPMTGQEVEELRKLADHTLDLYRRLKQAKRDVERMSQDRGSIQAMSRAVGKGTAAILVAEGGDPEQYGSSSEWLKTFGLNLKEHSSGKYMGKRKITKRGSGRARRWLYFAALRLIQKDLIVKTWYKRKVVRDGGVKKRAIIAVMRKLVKALWYVGRGEALETRKMFDVKRLGLSCV

SEQ ID NO: 409173 - protein, 341 aa, unidentified
MTSAKYIGLDVHKESISIAVLNSVGKVAMECVIETKASVILQFLNGLSGDLHVTFEEGTASAWLYDLLKPHVTRLVVCNPRRNALLKVGNKSARIDSLKLAELLRGNQLQPVYHGEHGLRVLKELVRSYLTISKDLVRVMTRVKALYLSWGIPCSGTQVYSRLYRVTWLSKITEPGVRMRAAFYFQKLDALRTLRQEVRQELLAESKKHKVWKRLCGIPWIGPIRAAVALGILQTPHRFRTKRQLWSISGFAIETRSSADHHQESQSRSEESVQRSGGSCLNQAWPVPRVLRSIAGQGPAAGDGAIDLGNAARTKTPMGYYGNTSRRKQTCPTIPSRNSTK

SEQ ID NO: 409174 - protein, 384 aa, unidentified
MPRPMKELTEVEHRVATLFASLELSQTSWLVTSLSPGSVTMSKHSISAGDGAGLLGLLARMRARAESAAGVPVEIVVIQEAGLDGFWVHRLLEANRIKSHVVDAASIAVPRRRRRAKTDAIDGETLLRTLRAWKRGEPRVCAMVAPPSPDQEDQRRISRERAILLRERVRHVNRIKGLLSSQGITDFEPLHKDRRIRLDALRTGDGRPLPPRLKAELLREIELIELLLLQIAAVETERDSAAEFDTAQNPSPIALLTRLRGIGSQIASVLYFEGLYRHFGNRREVAAYAGLAPTPWRSGTIDREQGISKAGNPRLRHIMVELAWLWVRHQPDSALARGFRARVGTETGRVRRIAIVALARKLLIALWRYVNLGEVPEGAVLKSA

SEQ ID NO: 409175 - protein, 342 aa, unidentified
MFNYNVCKVMKDLSTKKHFIGCDVSKDTLDFALYERGKDYREFAHIQVTNNLEGFQAMRKWLRVLKVKLSEAVVAMEHTGSYSTPLAEWCYKKGYTFVFLHPLDVKNAGARGRNKTDKIDAQFIADYVYTMREKLEPSTPESPVIKKLRMLRNERRLAINARMAFIVQNKCMDDAQAAKRASKIITELNKQITAIEAQILNVIQSEKSIKSNYELLLSIKGVGMINALVTIIATGNFTRFQTARQYAKFCCVAPLSRQSGTSIRNGDHISKAGHNEIKALLTEAARSAIQHDAQLKQYYERKRAQGKAHGCVMNAVKFKLICRMFSVQKRNTPYVDTDKYRS

SEQ ID NO: 409176 - protein, 398 aa, unidentified
MQPAGEVFVGVDMGKEAHYAQVIGPDGRAVFDRPVPNEEGAIRLLIADAAQYGSPVLVTDQPSSMALLLLTVAEQQQVPVAYVTGLQMRRAADLYAGQAKTDPRDAWVLADYARRNADRLTMLDLGDQLLAELRILNGRDVDLAHDANRVSNRLRDALTSISPSLERVVGERLGQAGIRDLLKRYPTPTLLRRAGKTRISGVIARRSPRIADTLTTRIWKALDAQTVTLPAEARWGQIISDLASDLERIHTQRKALEADIEEVFLKHPLGKVLVSLCGFGTRTGARTLAEIGNPHRFADGGRLAAYAGLTPIDRQSGTSIRGASKNRAGNHRLKDAMFLAAFVASQHDPTAKAYYQKKRAEGKNHTAAMICLTRRRCDLILDMLKTGTPYNPTRLQAA

SEQ ID NO: 409177 - protein, 381 aa, unidentified
MEAVYECCCGLDVHAKTVGACVITKGRKEIRTFATMTDELLQLGDWLSSVGCTHVAIESTGVYWKPVFNILEGVLTVILVNARHIKAVPGRKTDVRDCEWLADLLRHGLLKASFIPPPEIRELRELVRYRQTVVIEHTAVANRITKLIESANIKLGQVASEVLGRSGRLRLRALAAGETNAETRAEFAQGKLKNKKAALRRALTGSLTPVQRWVLTELLTRAEELEAARGRVETRINEEVATCTDPFVPEAVELLESIPGIGQRTAQTIVAEIGVDMSPFPSANHLASWAGVCPGNHESAGKRKSGQPTKGNKSVRTILTEAAWTATRAKETVLHAKYHRLVKRMSKQKALGGYCAPLVSDLLSSAETSGAVCRTGHGSAG

SEQ ID NO: 409178 - protein, 348 aa, unidentified
MDHIGIDLGKRESQIAILTEDGELIDMRVRTERRRLTEVLGSRGRARILLEASTESEWVARGLEELGHEVIVADPNFAPMYAQRTRRVKTDLRDARALAHACKLGAYRPAHRTSDGRRQLRTVLAVREALVRTRTAWISRIQPVLRREGYRIRSGQAETFAARVEELAVPASLKAAIAPLLQLLLPLNEQIAALDEHLATIVAADDLTGRLITVPGVGPVTAVAFVVTVDDVARFRGAHQVESYVGLVPREWSSSETQRRGQITKAGNSRMRWLLVQAAWCILRRRKKPETAALRDWADRIALRRGRRVAAVALARRLAGILYALWRDEAVYSPAKLQARITAGMATV

SEQ ID NO: 409179 - protein, 381 aa, unidentified
MKKISTVQVFGNEIFKEQISTVQVFGNEIFKEQKLTIGVDLGDRWSCYCVLDEAGRIILEQKVSTTPEALKQAFAMIPRSLIALETGTHSPWVSRLLTGLGYKVIVAHAQKVQLITKSNRKDDRHDARTLARLARIDPELLGPVRHRSAQAQIHLTVIRARAELVRARTALVNAARGLVKSYGQRLPKCGTRQVSRELGAGLHAELREVLEPLLQEIESLNERIQEYEVRVEKIAKESYPQVELLKQVKGVGTQIALTYVLTLDDPQRFPKSREAGCFLGLRPGRRDSGESQPQMRISKEGDRYLRTMLVQGAHYILGPFGEDSDLRRWGLKLAGRGGKSAKKRAVVAVARKLAVLLHRLWVSGEVYEPLRNSQKAIRAAA

SEQ ID NO: 409180 - protein, 403 aa, unidentified
MNSVGIDISKGRSTIAVMRPFGEVVISPFEVRHTGSELSKLAKQLKSLDGETRVVMEATGNYHASVAKLLHDAGLYVSVVNAKLVHGYGNNDLRRVKTDRKDAMKLANYGLDRWLTLPRYVPEEDTRLLLKNCYRQYRQYSKVQTVLKNNLISLLDTVFPNVNRLFSSPIREDGSEKWVDFVAEFWHCRCVSEKSQKAFTNKYQRWCRKHGYNFSEEKAHTIHAEASGHIGIMPKSETTKLLVEQAVAQLRATSAALTALKHEMQSLASMLPEYPVVMDMFGVGPTLGPQLIAEIGDVRRFYSKKALVAYAGLDAPPNDSGDVTGRHKSMSKIGASSLRRTLFLVMSVYLQTAPLDEPVYQFMDRKRAEGKPYRVYMMASANKFLRIYYATVKAYLESLEHTA

SEQ ID NO: 409181 - protein, 403 aa, unidentified
MDNYLLAYDVYAGFDVGKFSHHVVAILTTNQQSILSKRISQDETDIRSVLSELAAFGRVLVAVDQKGSFGRLLVATAKDMGFDVGFLTPSDFHSFSKGYTEVKSDAKDAYIIADVAMRLTARLHPVNDFDERIEALRAKTTQRTALVRDSTQTKNRIRSLLVQTHPAFEASLGSGDLDKLIYLRILARYGGPGGIQKAGKRDLKAFISKQPYYKNKADYITNRIIAVLALQTVSLAGALEREEIVASMAANLILRKQDIEDLEKKIEVSYRRFPESLVLNSIPGVADVLGPLLLAEIGDINQYKNAGHLAAYAGVAPSKRQSGKSLDGAKKKIKCNRQLRNSLYESARISISCDEWSRWYYDKKRAEGKKTRQAILALARHRTDIIYAMLKTGSLYEPKTMTR

SEQ ID NO: 409182 - protein, 359 aa, unidentified
MRIYKVRAKEERHHERIRSHLYVGIDLHRVTWHVTMRTENDEVFSGGIPGNWEALKKLFQRYRNHQISVVYEAGYFGFWLHDRIVAYGGECIVTPPSLIPQEYGNHVKTDRRDSRKLAYFLAKGLLKRVWVPTEEERYHRQVVRRRRQLVGDRVRVQNRIKAELRFYGINLPDVEGKWTRAYVENLRRLRFNNRWMQESFQRLIEEYDFISAEVVKQTKVLHELAEDEMYRDRVKILRSVPGIGLIAAMEYLLELQDVERFRRSEQLAAYVGLTPSQYSSADKVRMGRITCIGKNTLRGTLVEVAWRVIAKDQAMRQKYDTLKLRCGSKRAIVAIARIMLLRTRRMLIDRKPYVLGLAA

SEQ ID NO: 409183 - protein, 351 aa, unidentified
MSQKSSSAIAVIGIDIGKNSFHVVGHDQRGAIVLRQKWSRGQVEARFANMPPCLVGMEACVGAHHLSRRLKALGHDARLMPAKYVRPYSKGQKNDFRDAEAIAEAVQRPTMKFVATKSAEQLDLQSLHRVRERLVSQRTGVINQIRAFLLERGIAVRQGQRFLRTELPQILVTPPEVLSPRMVRMIEELAADWRQLDARIGRVSDEIEELAKQDAACERLMSVPGIGPIISSAMVAAIGTGDGFGNGRDFAAWLGLVPRQISTGDRTILGKISKRGNRYLRVLFVQAAWVVLVKVRPDRWAGHGLRPWIEAAKKRLHHNVLAVALANKLARIAWSVLARGRVFEASKLKAT

SEQ ID NO: 409184 - protein, 465 aa, unidentified
MGAQSTKPALTENRDDPDPVGAQVYVGVDVGRRTHRVAAISRQRMEDGSWERAAVRRFSTSGAGFQSLTDWLAGLAAEPGAVRIGCEPTGGWYARTVVAWLEQHHYRVEWLQNWAIHDRRQLLIGKQAKTDALDARLIARLLFEQEWLGRVGGFLHRPPRTADGLRLLVRNRLKLLGVRNRYRLQLTGLEDVLFPEFKEFFRTSTTGLVARLVLESFPTPAQLAAADPAQLAAVVVKQGHAGRLARRLAELREKAAHSAGLTEDIEQLVRSQRWLLQQLRLVDQEIELVESAVLDALQAWPAEERSILESFPGMSPWRQAALLASIGDLASFRNDRQLRKLLGWYPEVIESGTSVARHRLGTRGSRIGRRELWLWALQLVSPNLPPTPFRAYYRRLRARGMVGQVAIGHLAGKLISVLFYCLRTGQPYDPARHARALDLDDVYARSEAMTSTDDAARRGQAKDSA

SEQ ID NO: 409185 - protein, 341 aa, unidentified
MSKRLVPNCAVLHCGIDVSAAMLAVAVQPEGSDGFELREFANSTAGRRQLVAWLDRWQAPVRVSLEATGIYSLDVALALDRAAGIEVAVLNPRTVHRFAESLRRSKTDAADAVALAEYSRRMPFVAWVRPPEAALELRAISRHSATLTEEHARLKNRLHAACGSTSTPRCVREDLRRSMAGLEKRLLRLRREALAAIAKDAGLEQKFQHLTGITGIGEASAVQLLGELAGLDPEMTVGQWVAHSGLDPVHEISGTSVHKPSRISRRGSRHLRRALYMPALSATRFDPYMKAFYTQLQARHKTKLQALTAIARKLLHAIFGIFKTGTPYHPEKLFPQLLLIS

SEQ ID NO: 409186 - protein, 347 aa, unidentified
MDQQCHYVGLDVSLETTSICVIDDAGAIIWRGKCRSDPDTITAIVRQHAPGAVRVGLETGQLSNWLTLSLRRRGVPVVCMDARHAKAALSLQINKTDANDAFGLAQVVRTGWYREVAVKSMDAHTLRMLLVARSRLVSQRQATANTIRGLLKTFGLVVARGSKGLFPVRVREQIAGNPAVIAIIEPLLAVWHAIRDQVAMLDRQMLARARNDQVARRLMTIPGVGVVIALAYTAVIDDPARFRRSVSVGAYLGLTPRRYQSGEVDTTGHISKCGDSLLRGYLYEAAAVLLCRDARASILKSWGLGLAKRIGMRRAKVAVARKLAVIMHRIWSDHSEYRWTAIPPTAA

SEQ ID NO: 409187 - protein, 417 aa, unidentified
MTSVGRSIGLDVHRDFCEVAIAQDGGVRSSGRVDTTPEQLELFGASLHPRDRVALEVSGGAWEVARILERHVARVVVVSPSDTGIRQARAKTDRLDARTLARLLAAGELDAVWSPDERCPVMRRRLSRREQLVRARSRSKNEIHAALVRRLVGRPSVSDLFGVKGRQWLAELDLPLEESETIEACMRHIEFLDSEIATVERQIASEALASAEIRRLMTVPGVNVICAASFMAAVGEIRRFQNPRALTGYLGLDPRVYQSGSAPAQGGRISKQGSASTRWALVEAAWSVVRQPGPLHAFYQRVRARRGHGIAVVAAARKLACLFWFLLTRGEDYAHQQPSLTAKKLRLLEIRAGARTLKGTPTGTWATRQAMREGERKLAEQAEASYKQMVRDWQAAAPRKLGASVTPGRASQEPSRG

SEQ ID NO: 409188 - protein, 372 aa, unidentified
MGHHSEAFIGIDTSKSRNAVAIAEGGRGGEVRYLGEFPATEAATRKLVAKLTTKYRHLTFCYEAGPTGYGLYRLITSLDHECQVVAPSLTPKKPGDHVKTNRRDGVSLARLARAGELTAVWVPDERHEAMRDLSRSRQAAKKDLQGKRQQISSLMLRLGRYYPGKKTWGPAHMKWLMSQKLEYREQRMVLEELLQGIRQEGERVERLEQAIREAVPEWSLAEVVTALQAMRGIDLIAAVVILAEIGDLSRFQNPRELMGYLGLVPSESSTGDKVKRGGITKAGNSRARRILVEAAWSYRYPPRVGRQKQPKVAAAPRRVREIAWKAQTRLCRRFRSLERKGKLRTVVATAVARELLAFIWAINREVMGTRQA

SEQ ID NO: 409189 - protein, 344 aa, unidentified
MEISTIGLDLAKNVFQVHGIDADGNVAVRRTLRRAQLLAFFASLPPCLVGMEACGTAHHWARELIKLGHNVRQMPAAYVKPYVKRGKTDAADAEAICEAVTRPTMRFVPVKSPEQQAALSMHRARDLLVKQRTQLVNMVRALLAEFGINIPQGVRLALEMARKIVDGEAPPVPREAAKIAGRLSQQALDTHAQLREIDLDLLAWQRTNDTARRLMSIPGIGPIGATALAASVTDANQFRSGREFAAWLGLTPRQHSSGGKERLGRISKMGDKYLRTLLVVGMTSLIKGVKRKPETADPRLVALLARKPVRVATVAMANHTARVAWAIMARGETYRAGHQPRLAA

SEQ ID NO: 409190 - protein, 430 aa, unidentified
MKSNTQNTKIEAITETTLVLGIDVGSETHYARAFDYRGIEYSKKPLKFSNDEAGFVTFKAWILDIKEKHGKDKVVPGMEPTGHYWFNLGKFLQDNEMKPVLVNPHHVKKSKELDDNNPTKNDRKDPKVIAGLVREGRYMIPYLPEGVYADLRTASNMRFQLQAELTRIQNRISRWFNIYFPEYKTVYGQPDAKSGMLILKVAPLPEDILTLGIDGVNQIWRDAKVRAVGKARAKTLIEAAEHSVGSKEGEISARMEIRMLLEDYESRNTRLQEVVALIEELVKKIPMAEKLLEIKGVGIKTVSGFLAEVGDISRFNNPKELQKLAGLALVENSSGKHKGETTISRRGRKRLRYLLFEVAMSLVSKNPEFRELHSYYTTRKLNPLKKMQSLMAVAAKLLRVFFAMLTKGVDYDPKKLVGDIKRPAVYLQVA

SEQ ID NO: 409191 - protein, 355 aa, unidentified
MSQEKYIGMDVHQATISVAVMDGDGKLIMECLLETKAATILEFIQGLRGTLSLTFEEGTSASWLHDLLKPHVSRLVVCDPRKAALLKQGNKSDRIDARKLAELLRTNQLKPVYHGEHGIRTLKELGRSYLTVSKDVTRTMNRIKSLYRSWAIPCPGTTVYAPSHRLEWLAKIVQPGVRVRAQHLYEQLDNLQPIRQQARRELLLESHKHPAVKLLRQIPSIGPIRAALLVALLQTPHRFRSKRQLWAYSGFAVETHDSGEYRYVRGKVQRNRERITVRGLNDNHNPDLKNLFKGAAISASTRPGPLHDFYVARVAKGMRPTMARLTLARKVAAITLTMWKKGVSFDPQQLSRQSV

SEQ ID NO: 409192 - protein, 412 aa, unidentified
MGRSIGLDVHRDFCEVAIADGGRARSAGRVATTPEELALFAASLAADDRVVLEATGNALAIAKLIAPHVDEVVLAHAKQVRAISHARIKTDKFDARVLAELLAADLIPRVWIGDERVRALRRLVSRRRGLVKRRTQVKNEISAVLQRNLRGRPPMSDLFGRQGRAWLAVQELPADERLTVEGSLRQLDFLGEELAQIDRLVAAEAQGDEDVRRLLTIPGIDVTTAVTLIAVIGDVSRFPSARHLVGYLGLHPRIRQSGNEPARHGRLSKEGSAAARHVLVEAAWVAARSPGPLHAFAARTAARRGRNVATVAVARKLCVLSWCLLTRGEDYAFQRPSLVRRKLRRLELRAGAPRAKSGPHPDPVWNTDADAFERHLAEQAERAYERLVADWTASRRKAGAGATPGRASYGPL

SEQ ID NO: 409193 - protein, 419 aa, unidentified
MRSEFKSGKQEPQFAALVSIDWGDKKHAWCLQAAGSEQRESGELEHTPEAVEAWVGQLCQRFSHRPIAVALEQSRGALVFMLSKYAPLHLFPVPSTMSASMRKALYPSGSKDDPRDADLLLELLLKHRDNLRRLSPDTEATRRVQNLVEERRKLVDEKTAQTNRLTSDLKIYFPQVLDWFERLDTELVCDLLERWPTLEELQKVPLAKLRTFFRKHYCRYEELIERRLLRAVIEAKSMVVRVMVQVIVSLLEGIADLDKKIEEAAAAHPDFFIFDSLPGAGAVMAPRLLAAFGSQRERYGSAGEVQTYTGIAPVMEKSGKKKWVHFRWACPKFLRQSFHEWAGHSIAQSVWARSYYQQLRSRGKGHHAAVRALAFKWIRILFRCWKDRVAYDENKYLAALARRGSPLAIVNVAIAGKGQ

SEQ ID NO: 409194 - protein, 382 aa, unidentified
METATARDVNYTTNSQVLYLAFELSNNKWKLGFTIGLGQRPRERVVAARDLPRVLEEISAAKQRFKLPEATRVVSCYEAGRDGFWLHRALVAAGVESLVVDSSSIEVNRRARRAKTDRLDLGKLVTMLIRYHSGETKVWSVVQVPEVKDEDQRQLHRELADLKTERTRETNRIKGLLIGQGISLTTRGQAKIDLDAVRLWDQSSLPEGIRGRIQRAQERVEFLSRQIRELETQRDQELENLTCVGTKRVRQLMVLKGIGPVTAWVLVMEFFGWRRFRNRRQVGALSGLAPSPYQSGDSAREQGISKSGNRRVRARAIEMAWLWVRYQPGSALSRWFQKRFGAGGSRQRRIGIVALARKLLVGLWRYVETGAVPDGAKQKVPC

SEQ ID NO: 409195 - protein, 469 aa, unidentified
MTYKSTSCRAEFFFFSRSLVATLLGMTLAPLVCVQRNASTIIDGARVSIIGNRIEVASFRGVKRRGTYASKNSPPCPLSHASLERPYVKRPHGPTVVGCSCNKQTKTEEPCGTELKIQLTNQENMIYMGIDVHKRHINVAVMSEHVVLGQNHVEIRDVDAYMVRLKKKYPDRRLRAAYEAGFSGFALYHQLESLGIETIVVNAADVPTTDKERTTKSDRADSLKICHALKCGQLRKIWVPPDELSGDRDLVRYRLVLRQHLAKTKTRIKMFLYKQGVQIPPELESSHWTKAFQAWLKEQTMTTASSQTTLMLMLEELQHADQVYKKHLRRINELALTQRYSHNVDLLYTIPGIGRLTAITILTELGPIARFAKADQLASYVGLIPMQHQSGSSDRNMPIQRRAHQELRTLLVQCSWMAIKGSNHFNMVYEHKRKNKTSQVAIIAVARRLLNTIYAVLKKSQPFMESGTN

SEQ ID NO: 409196 - protein, 408 aa, unidentified
MNQLFVGIDVGSRGNTAYLMRPDGEKHSNFTVQNNRGGAKILIDKIVSALTAMGLEQVVIGMEATGIYGDNLVYALREDGALGRFQRKIHVLNPKQVSKFKESYSDLPKNDDVDAFVIADKLRFGRVTKEVYMDDYRYKALQTLTRARFYAVQDLTREKQRFANYLFLKCSGLAQDKDIANSSATTIALMERFETVDELAYADLDELAAFVNTAGHGRFSDPQATAKAVQAAARSSYRLPKTVNDSVNQAMAVCTATMRALEKQIKVLDKQIEQIFAVIPNTLTSVPGIGKVYSAGIIAEIGDVNRFQSQASVAKYAGLVWKQHQSGEFEAQNTRLIKSGNRFLRYYLLEAANSVRRCDSEFKRYYDLKYKQVNKYQHKRALALTARKLVRLVFRLLKDGRNYIPPKG

SEQ ID NO: 409197 - protein, 321 aa, unidentified
MVGNYKNDFENLTNKVEEMKGTLSPFFGLEDVRGYGERLAGFLYEKYPVYHVPSILVDRQRQNATHPEKSDSLDALGVAKVMIQSIDTLLPYTISKESEKAKQIKEISIDREDLVLERTRLKNQVHTLLYRIYNTEYEQKFKDPFSIKALRFWSKAKPKCDPYLLKTMKRKIRRLLDIHTEVVDLEKDMDKLLTEGEYTIQTASGCGVVIASTIIGEIGDITRFTSPGALSKYAGCSPRERSSGKKTRHVKSRSGNRRLNCAFHRMALSQISRMGNDRARAYFKRKISEGKSKSQALVCLRRQMVNIIWMMLKHKTIYKNA

SEQ ID NO: 409198 - protein, 402 aa, unidentified
MNCVGIDVSKGKSMIAVMRPFGEVVVSPFEVRHTANELSELAGLLKSLDGETRVVMESTGNYHAPVAWLLHDAGLYVSVVNAMLVHDYGNNSLRRAKTDKKDAVKLANYGLDHWLTLPRYIPEEDTRLMLKICYRQYQQYSKVQTMLKNNLISLLDTAFPDANRLFTSPPRADGSEKWVDFVATFWHCECVCGLSKKAFTAKYQKWCRKHGYNFSEDKALDIYASACRHFGVIPKTDTAKLLVEQAISQLQTTSSALAALKQEMQSLAASLPEYPVVMGMFGVGPTLGPQLLAEIGDVRRFHSKKALVAFAGIDAPPYQSGQIDVRSRSISKRGSASLRRTLFLVMSVILQCAPIDEPVYQFMDKKRSEGKPYRVYMMASANKFLRIYYASVKAYLESLEHD

SEQ ID NO: 409199 - protein, 344 aa, unidentified
MQHYVGLDVSVKETSVCIVDKAGKVIREVKVATKPVPILAVLIGGALAIERIGLEAGPLSQWLYSALAEAGLPVICVETRHMKAALSAQINKSDRNDARGIAQMMRVGLYRPVHVKTLASQKRRMLLTSRQLLQAKALDIENDLRGTLRNFGLKVGMVGTVKFEARIRELVADHPDLAAIVEPLLIARRVLREQLGVLHRQLLEIVRQDEVCRRLMTTPGVGPVVALTFRATVDVPSRFKNSKAVGAALGLTPRRQQSGEIDRMGGISKSGDAMMREMLFEAALVLMTHSRKWSWLKAWGMKIARHRGMKRAIVAVARRLAVIMHRMWVDGTEFRWSRKEAAAA

SEQ ID NO: 409200 - protein, 356 aa, unidentified
MSGAYEGRQIVGMDLHRRRSVLVRMTDTGEQLETVRISNDPEYLRQVMARAGEAPEVVLEAAYGWYWAADTLAELGAQVHLAHPLGVKMFSYRRVKNDQRDAADLADLLRMGRLPEAWIAPPPTRELRGWVRHRAKLVGLRSSLKCQVHGVLANAGVWVPMTDLFGVAGQQLLADLSGGERLSVESRSRLDSTLRVIAALEFEIELFAKLVNGRLRTDPGYRTIQQIPGIGPVLAGVFVAEIGDITRFTRPQQLASWAGLTPKHHESDTTVHRGRITKQGSRLVRWAAVEAVQRVGGHTRLGQHRDRVAARRGRNIGVVAAARELLTLVFYGLRDHHIRALTTPAATSTPAPASVA

SEQ ID NO: 409201 - protein, 407 aa, unidentified
MDVIIERACGMDVHKDNITACIITPEGKEIETFSTKTLFLIQLVDWVKKHRCTHVAMESTSVYWKPIVNLLEAEDVEFLIVNAQHIKSVPGRKTDVKDAEWIAKLLRHGLLRASFIPDRNQRELRELVRYRRSIIEERARQHNRIQKVLEGANIKLGSVVSDVMGVSARDMLRAIAEGEDDPEKLANFARRSMKKKKDELILALQGYISDHQRLMIKTILTHIDFLSEQIEMLDQEVANRVSIYQEEVERLDSIPGIATRMAEQMLAELGTDIKNQFPSASQMCSWSGLVPGNNESAGKRKSSKTKNGNKYLKSALIEAAHSVRGSKNYLGALYRRTAARKGKKRAGIVVAHAILRISYYLLTRKEMYVDLGEDYFDKQKQQSIVRHSLRRLESLGYTVSIVEPEAS

SEQ ID NO: 409202 - protein, 311 aa, unidentified
MTILTSQTVVGIDIAKAEVVVYRADLETIESVKNDRASLKRWLKTLPARSAIAVEATNIYHLETVDLAHTMGHQVYVVDAYRVSHYRRGVGQRAKNDPCDARVLARYLTNEQSKLRLWNPPPKAYTVLKSLLHRRATLIQNHTGLMLSWADEPLLKKERTAQQKAFERSDQVIQKLLRKVSKEAGIEDNIDRCKAIEGVGELTATGLATTYMRGDFANSDAFIAFLGMDLTVDDSGKKNGPRFLTKKGDPEIRRLTYNAAMAASRSAKWKPFYESYLARGFSKTQALVALARKLCRVAFALMKSQGEYRLA

SEQ ID NO: 409203 - protein, 334 aa, unidentified
MKIYGIDLSKEKFDVSYVITGEEKKRIVKNDFKGICSFLKQVEDNCILVAEHTGTYGDLLVHLCYQSQVKIALVSGYNIKHSLGLQRGKSDSKDAYRIRKYGERFTEELHLTEPKPESVKELKELYSLREQLSKNRTSLLLGMKTRKHGPSQSIVAHRSYQRAIMNVEIEIGSIEKEIEKIVQSDSDLKDNYKLITSIKGIGPVIANNLIIKTENFKRITTAKKAAAFAGVCPYPNSSGKTSMKSKTSHLADKKLKSLLFLAAKTAVAHNKEYSLYAQRKKLEGKPYFLIMNNVSNKILRTVYGVVQNRKPYDINHICMDPRNIARPYLSFKDN

SEQ ID NO: 409204 - protein, 417 aa, unidentified
MEAIVERCCGLDVHQATVVACLLVGRPEQKPRKVIRTFGTMTVDLIALRDWLRDEGCTHVGMESTGVYWMPVYTILEGQFDLTIGNATHIKQVPGRKTDVKDSEWIADLLRHGLIRRSFVPPKPLRDLRDLLRYRRKLVESAMSERNRTLKLLETANIKLATVASDVFGVSGRCMLRALLAGRLTVAEMANLAKGSLRKKLPQLQTALDGRVEEHHRFLLEMQLERLEQVEASIDRLDQRIDEKLVPYAEPHTRLMQIPGVDRVGAAVLIAELGVDMSVFPSVHHAAAWAGVSPGNNESAGKRKGQPGRKGNIHLTTALVQAATSAARTKGTYLKQKYWRLKARRGPMRAALAIAHKILIAAYHMLAEGVGYKDLGDSYLDRASAVATKRTLVKRLEKLGYHVVLEPIAPQPTAAAG

SEQ ID NO: 409205 - protein, 355 aa, unidentified
MNDEKYIGLDVHQATIVVAVMDSTGKLVMESILETEAATILQFFAGLRGTLSVTFEEGTWSVWLYDLLNPHVDKLVVCNPRKNALLKDGNKSDRIDARKLAELLRGNQLKPVYHGETGVRMLRELSRSYLTIVKDLSRVMNRLKAVYRSWAIPCAGRDVYYTRHRAQWLDKIREAGVRRRAERLYEQLDMLQHLRQQARRELLAESRKHAITAKLRQIPYLGPIRSALAVALMQTPHRFRTKRQLWAYSGLALETRISAEYRLVEGQVRRSKKLLSIRGLNKDHNHDLKGLFKGAATMASVRPGPFQDFYQAALAKGIQPTMARLTLARKIAAITLTLWKKGENFDAEKLKSQAA

SEQ ID NO: 409206 - protein, 319 aa, unidentified
MNTTINASSRKTERNVGIDVGKDTLDIYIYELERHWQAANTLVGIKQLIKQLNRYQLTRVLVEATGGYERRLVEACAEKGLPVIIVQPIQVRQFAKAQGLFAKTDKIDARLIAEFGVLMQPEPRALPSKKVRLVRDLLARKRQLNETRTQELNRQHKAEKVLLPSHRRMIKLIDKDIAWINEKLAKEVSAITEWQRVYEVLSSVPGIGDGVAYTLLGELPELGQLTHRQIAALTGLAPFNRDSGYMKGRRRIKGGRAPIRTVLYMAMMCAIQHNPVMKQFYQKLVAQGKHKKVALTACMRKMITILNAMVRDDKEWQMT

SEQ ID NO: 409207 - protein, 355 aa, unidentified
MKRTTKYVGLDVHQATIVAVVRDETGRVIARTILPTEAAALTAFVGPWRGRVEVAYEEGTQAQWLHDLLRPLVARVVVCDRRAVRRQGNKSDWRDAEELAAMLQRGAIRSVYHGGGPQQAELKELTRTYVTLVQDATRVMTRVKALYRARAIPTRGRGVYHAGERATWLAKLPAGGVGFRATTLYRQLEVLLALRASAKAALLGAARRDPAWALLQTIPFLGPVRVALLLGIVQTPWRFRTKRHLWAYAGLAVVTRTTAEYTLEGRTPVHRRRAPLTRGLNRNHHRLVKALFKGAATAATARPGALQDWYQQRLARGMRDELARLTLARKLAALTLHVWKTGEAYDPAKLTRPAG

SEQ ID NO: 409208 - protein, 344 aa, unidentified
MPSIVGGLDIHRKQLTFDYMDTVTGEVSCGQIVPADRAHFRSWLTRFENPAEVAFAAEACTGWRYVAGELQRAGMEAHLAEPADTAAARGRKRRAKTDRADARLQRDLLMQGRLPECWIPPEHILECRALLELYHGLRTEHTAWVQRIHAVLFHQGAPAFHDLSRADAPAQLAELARGHLSPAGQVQIGIYLRMLAVLEAELAAVRHRLLAAARQLRGAKVLAESIYGVGPMTGLALTCWLGGAGRFSSARKAVRFAGLDITVYSSDGKRSPGHLSRQGPPVLRWAAYEAGKTHARLVAPDHGYYAAVKDRKDGKRAALSEARKIIRRACHILSELGDDALAAA

SEQ ID NO: 409209 - protein, 431 aa, unidentified
MPEGESNVRCFGAFTADLDKLVEWLQACGVTTVAMESTGVFWIALAQKLEAAKIEVVLVNARHLKYVPGRKTDVKDCQWLQQLHSYGLLNGSFRPAQDICRVRSLMRHRQNLIESCGREVQHMQKALQLMNVHLHHAVSDLVGATGLRILDAVLAGEQDPKKLVELRDSQCSKTTSEELEKALKGDWREEHLFVLKQALETYRHLVAQVAECDAQVERALATVVIPKRIEPEGPIPKNPKAKEPDQSKKKRFHHRKTGTSVKQDLREELKRICGVDLTQVIGLNVLSVLIILSEIGLDMSRWRSAKAFCSWLGLCPGNKISGGRVLNSRTAHVVNRVAILLRTLAPSIGKTDTWLGIFHRRMRARLGPAGANTATARKLAYLIYHLLKYKEEYIDVDHLLLLERIRRQRIGRLHKQAQELGLEVVETQMAA

SEQ ID NO: 409210 - protein, 401 aa, unidentified
MNAVGIDVSKGKSMVCVMRPFGEVVLEPFEVLHTAQNLHDLAEKLKALDGETRVVLEATGNYHKPVAFVLHDAGLFVSVVNPVLIHDYDNNSLRRVKTDRKDAVKIANYTLDKWTRLRQYLPEDDTRLALKNCYRQYQQAVAIRTMLKNNLISSLDLTFPDANKLFSSPVKNNGCEKWVDFIGDFWHSECVSSLSANAFAKKYLKWCQKHGYVFTRSKSDEIYACAVNSASLPKSPTSKLLIQQQVAQLKAVSQSVAAFRQEMLRLSQQLPEFDTVMEMYGVGPSLGPQLMAEIGDVRRFSSKKSLIAFAGIEPQPNDSGKVVGNDKGISKVGSAVLRRTLFLIMTVILQTQPQDEPVFQFMNKKRSEGKPYKVYMMASANKFLRIYYARVKAVMDSERSQ

SEQ ID NO: 409211 - protein, 338 aa, unidentified
MTVYAGLDVSDKSTHVCVVDENGSLRWRGLCATDPETIAATLAKHAVGVDRVVLETGALSAFLYHGLVERAVPVVCICARHAKGVLSVRTNKSDVHDAEGLAQLARTGWFKAVHIKDSATHLDRAELKVREQLIKAHHAMLGQLRGLLKLFGLRLGKVTTPGKRTERLVALFAQKPELKSVLAPLVAGLAALEAQIAASIRSLKVRAAADPVAARLMSVPGVGPITALTFKSSIEDPGRFARSQDAGAYAGLVPRRFQSGERDTKGHISKAGDPMLRSALYEAANNLLARVKRPSPLQTWGKTLAATKGAKRARVAVARKLAILLHTLWQTGTSFQWA

SEQ ID NO: 409212 - protein, 339 aa, unidentified
MQVTKIGLDLAKNVFQVNGVTDEGEVAFNRSLRRAQVMKFFMSAPPCLVGIEACGTSHYWAREIAKLGHEVRLIPPAYVKPYVKRGKSDAIDAAAICEAVTRPSMRFVAAKSPEQQAILALHRVRDLIVRQWTQIVNILRGVLAEFGIVVRQGAGHAIAVAKRCLERTEDDLPDLARDVVSNLSHQLVALHRRVLWYGRQLNRAASLDARVTRLRTIPGVGPITASAIVTSIGDGHQFSNGRSFAAWLGLTPLNRSSGGKERLGRISKMGDRYIRRLLVLGMTSRIKQIQQRPDQFDPWFEDILGRKPPKLAAVAMANKTARIVWAVLTREQDYRVRTA

SEQ ID NO: 409213 - protein, 459 aa, unidentified
MSRKSKRTKGIEEARPFAGMSRVNEDAAGVDIGAIEIVACVAGDENTQIVKAFGNYTVDLQAIGQWLQEHKVKSVAMESTGVYWIPLFEVLESMGFQCLLISSRSLRRVSGRKSDIIDAQWIQTLHSYGLLESSFRPQADVVALRTLLRHRAQMLEHRAPHILHMQKSMLQMNVQLSQALSDITGETGMAIMRAIVAGERDPEKLAVYRDRNCKKSREEIGQALTGTWREEHLFVLKQSLEMYDVYTRQVEACDAEIEHLYALTRPDWDMGELRPLSQKQRNSHSKNGPKNKEEIRQHLKRISGVDISAVDGIGVGVAQTVIVECGTDLSQFPKEGNFCSWLGLAPKHEISGGKILKNKTLKTKNRAGQAFRMAAQSVKNSDCVFGMMFRRFRARMDNRQATVATAHAIARVVYRMLKYKVEYESIDVTEYEKKYEEQQIKYVTKKAAKLGFQLVPVGA

SEQ ID NO: 409214 - protein, 356 aa, unidentified
MQVLYPRCAGLDVHKDVIVACVRCVSTPVHQEVRSFPTTTSGLQSLDEWLSSHACTHVAMEATGVYWKPVWHILEADFELVLANAQHIRNVPGRKTDVNDATWIADLLAHGLIRSSFVPPAPIQELRDLTRTRKQLVREISQHSSRIQKILEDANLKLGSVLSNVLGKSGRAILHALIAGETNPETLAELAEGTARKKRAELIEALRGRIRDHHRGLLKVHLELIAALEQALSDIDATVGKTLAPIRSSARLLTTLPGVSDLTAQVMVAEIGVDMSRFPTAAHLISWTGLCPRSDESAGKRRSSRVRKGAPWLKTALVTAAWAAVRVKDSYLQAQFHRLRSRRGAKKPSSPSPLRC

SEQ ID NO: 409215 - protein, 389 aa, unidentified
MYSYFVGIDIAKNTHWASCLSFDGEIILEPFSFSNDNSGFQKFISKLESLDKTKILIGLESTAHYGENIISYLFNLDYNIGLINPIQTANLRRSNIRKTKNDKVDTKIIIKALTLGNYSLITSRDINNLKLKGLCRSRRNLVTMRSKAKIQLVSYLDQIFPELAQFFKGNLHLNVSYQLLKEYSSPKQISSLHLTKLSNILHDNSHGRYNKQDAIRLRELAKNSVGIDNPSLSLQIKHSILQIELYNEQIAEVEALYKQILDKMNTPILSIPGMSYNQAAVIIGCIGDINRFKHSCQLLAYAGLDPSVIQSGSFQAKSTRMSKRGSGMLRYSLVYSAHNVVKNIKTFRDYYELKRSQGKSHYCALGHVAHKLVRIIFKMLKDNVAFNLD

SEQ ID NO: 409216 - protein, 296 aa, unidentified
MQAVTTIGLDIAKSVFQIHGVDAAGNVIVRRRLKRRYVLPFFQKLPPCLVGIEACASSHHWSRELQALGHTVRLMPPAYVKPYVKRQKNDAADAEAICEAVTRANMRFVATKTPEQQSCLMLHRTRHLFIRQQTSVINAIRAHLAELGIVAPVGRNGVEELLGVVADPSDKRVPEIARACLAALGAQLRVLKAQILEFDRMINAWHRSNETSKRLDEIPGVGPALATALVASVADPKAFRSGRNFSAWIGLVPKQHSSGGKDRLGSISKQGDRYLRSLFTAGALAVIREVGRANST

SEQ ID NO: 409217 - protein, 336 aa, unidentified
MDIAKQVFHALGADSTGRAVFSRRLTRGKLLDFFAAHPRCLVALEACGGAHHWARKLRAMGHEVRLIPPAYVKPFVKRHKNDAVDAEAICKAAQRPSMRFVAVKSEEPQAAALVFRTRDLAVKQRTKIANAIRGHLAQYGWVAPKGAFHLTKLADLLEDGEIGETLPGAARPMFAMMVDMLGDLDKRIAVLDKEITRRAREDEVARRLMTIPGIGPITATAIAAIAPPAETFAKGRDFAASLGLVPKQASTGGKQKLGAITRMGERTLRRLLIIGSSAVVLHASKRGAPAGSWLEGMLARKPRMLVTVALANKMARTVRALLVKQEDYRAPVAVAA

SEQ ID NO: 409218 - protein, 411 aa, unidentified
MCKEIEGFPLTKIRKGVYTMFYLGIDIAKVNHVASLIGEDGSVLVKAIKFTNSNEGLQKLIDSISEYDQSQIYCAMEATGTYWLSLFSALTDKDFNVSVFNPYQIKSFRGAYSNRKQKNDVIDSIIIAEFLRFNGIEQTCLPNDDLLALKNLTRYRSNLVDNISKAKIQIKGILNKVFPEYSDVFSDTFGDASKQILLNCPTPSEVANFNTRKLANLLKKASRGRHGTDTVRKVKELAKNSFGIKFTGDACSFEIKQLVSQIIFLENQVDELNLKIKELYSKLDSHLESIPGIGKAIAPVILAEIGDINNFSTSSKLTAFAGIDPSENQSGNKKSTDEKTSKRGSPYLRHAIYQAAFIASNNDPVMHDYYVKKRAEGKHHYVALAGVERKLLGIIFHVLKENRDYRPSKFS

SEQ ID NO: 409219 - protein, 385 aa, unidentified
MRRQSRIRKESVMDEGITYVGMDSHKKTIQVAMLLPGVDKPVEWRVANEPKAIRRMVKKVSRQAPGEVRSCYEAGPCGYSLQRTIHAAGPMVCEVIAPSLIPRKPGERIKTDRRDARKLAELLRANLLTEVRPPTPEEESVRDLCRCREAAKTDLMRARHRLAKMLLRRAIIYGKGKAWTVAHRRWLKTIKWDHEADQVVFDDYMRAIELLEERKATLTAKIEEFSQQEPWAEPVGLLRCFRGLDTVSAMTLCTELHDFSRFPSPRGTMSFLGLVPSEQSSGDKTHRGGITKTGNSHARRILIEAAWHYRHKPSLGAKLQKRREGQPTNVIAIADRAQQRLHRRYWYLTMNKNKPSNKAVVAVARELVGFIWAALHPWAVEHAHG

SEQ ID NO: 409220 - protein, 326 aa, unidentified
MNAIIGIDVSKAKIDVAWLRDPTTNKVKTKVFENSNKGFAALRDWLSANIKQPLTECHCVMEATGIYHEPLALWLFDEGAQVSVCNPAHVKGFAKGLGTQHKTDKIDSITLARYGALVKPELWQPEPICIRELKALLSRLDALETDLMREKNRMEKAEFSSASTRVIESLNTMIQHLEHELNRLNDEIDDHIDGHPELKKDQELLLSIPGIGRVTSRLMLSVIRGKQFNNAGECAAFLGVIPKIQESGIFRGRSALSKKGNPMIRAKLYMAAIVATQHNPTIKAMALRLIGNGKNKMQALGAAMRKLVHICFGVLKNQEKYIPQIA

SEQ ID NO: 409221 - protein, 355 aa, unidentified
MTSTKYIGMDVHKESISIQVMNSVGKVVMECVIETKASMILQFIDGLRGDLRVTFEEGTWAAWLYDLLKPHVTEVVVCNPRKAALLKDGSKGDRIDAHKLAELLYMNKIKSVYHGEHGLRTMKELARSYLTITKDLTRVMNRLKALYRSWAIPCGGKEVYAPGYRAEWLGKISEAGVRRRAEHYYQQLDVLRLLRQEVRWDLWVEAKKHKPWKLLRQIPGIGPIRAALLVALMQTPHRFRTKRQLWTYCGLGLETHDSAQYHAVEGQLQRSRKPATVRGLNRNHNHDLKDIFKGAATRVSSSRGPLHDFYEALLAKGRKPTMARLTLARKIAAITLIVWKKEVGFDANYLKQQAA

SEQ ID NO: 409222 - protein, 373 aa, unidentified
MKKRTSSQKSPTRTVKTKRPQEVITIGMDLGDRTSRYCILSGEGEILREGQAATTKAGMVEAFGCLGRARIAIEVGTHSPWVSRLLQKLGHEMVVANPKQVKLITESSRKDDRLDAQTLARLARIDPQLLRPIQHRSEKAQSALMVIRVRAALMAVRTSLVNSARGLAKSMGERLPKCDADQMGVLQAMSLPPKLRQVLEPLLKEVESLTEKIKDSDREIEQIARKEYPETALLQQVGGVGPLIALTFILTVEDKGRFEKSRDIGCYVGLRPRRSDSGQSQPQLRITKEGDPYLRTMLVQGAHYIISRRGPDTDLKRWGLHLAKHGGKRGKKRAVVAVARKLGILLHRLWVTGEVYEPLRNHNARQEQRKAAA

SEQ ID NO: 409223 - protein, 350 aa, unidentified
MPQRNVPRPAAVYGIDLGKNIFHVVALGSDGTVVQRVRFRRDTLLQFFQRAAPAIVGMESCAGSQWVARKIQTLGHKVRLIPAQFVKPYVKSNKSDIIDAEAIAEAATRPTMRFAALKTEEQTDLQALHRVRDQMIGTRTRLINQMRAFCLEYGVALRQGAGLFKLDLPEALKDPTNDLSPAMRKLLSELFADLRQLETRIADVTREIEANADREDAARRLMTIPGIGALGATALLAAVGNGRQFQKARDLAAWLGLVPREYSTGGKQKLLGISKRGNRYVRKLLVHGARSCFRHLDRTKDRLGSWLDGLQARMHPNKAVVALAAKMARIVWVVLTKPGALYERRDPAFT

SEQ ID NO: 409224 - protein, 343 aa, unidentified
MQTVSTIGLDIAKSVFQVHGVDADGLVVIRRQLKRRYVLAFFEKLPPCLVGIEACASSHHWSRELQALGHTVRLMPPAYVKPYVKRQKNDMADAEAICEAVTRANMRFVPTKTPEQQSGLVLHRTRYLFIRQQTSVINAIRAHLAEFGVTAPVGRNGVEELLNVVGNPNDKRVPEIARRCLLALGAQLRRLKEQILEFDRLIRAWHRSSEMSMRLDDCPGVGPALASALVATVADAKAFRSGRNFSAWIGIVPKQHSSGGKDRLGSISKQGDRYLRSLFVAGALAVIRYAKIHGTKHRPWLAALLARRPTKVAAIALANKIARMAWAIMAKGERYKEPVALAA

SEQ ID NO: 409225 - protein, 439 aa, unidentified
MTTTMIRYVGLDVHKRVVEACIVDATGKIVERQRFALNRQTLKLFATQILQPGDHVALEATTNCWAVADMLRPHVARVLVSNPMATKAIAQAKVKTDKVDAHVLAQLLRCDFLPEVWQPDEATRQLRELTGRRSTLVGQRTMMRNRIHSVLAMRLVEAPLRLFNAEGLAWLATVELDAQGRTLVDSDLRQLEFLAQEIDTLDAELARRGHANAEVKLLMTLPGVDVATAEAVLAAWGDVKRFPDGDHAASYLGLVPSTKQSANHCYHGPITKRGNSNARWILIQAAQHLDKHPGPLGHFFRRLCRKKNRNVAVVAAARKLAMIGWQMLVKNEPYRYAMPQSTESKLLKLRVKATGQRRRGGAAKGTKSVAKLPGGSRTIKSLAAACASEGLPAPQPLSPGEQRTVKASECEAFVAQIATAHLVPRAPSRRKTQKEAAHG

SEQ ID NO: 409226 - protein, 367 aa, unidentified
MKIVFPVCCGVDVHKNVIVATIAITDKSNITHYIVESFSTINADLYRFRTWLLEHRCFNVCMESTGKYWIPVFNILEEANIKVLLTHPKYVRAIKGKKTDKKDSKWISDLFKFDMVRSSFIPPKDIRALCELGRYRYKLVCMLSSEKNRYQNCMTVSNIGLASVLSDPFGKSATDIMRYVLSSDVFNEEHCKTLIHKTAKKKTELILASIRGSRIESDQRFKMNEASAHMDYLEQAILRTEVELYTRIQPHYHLVEHLSNQLPGISQLSAALIISEIGVDMSVFESDKHLASWAGLAPVNNESAGKKKSVRISKAGQFLKPLLVQCALAAVKSTKQPYFATKYQKLKKRRGHKKAIIAIARMMLTCI

SEQ ID NO: 409227 - protein, 341 aa, unidentified
MKNKSFIGIDISKNVIDASIFCEGTPIKDFPHAVFNNSRKGFGEMCTWLKKNHVVLSNCLFGMEFTGSYSMELEKFLYARNYQFCMLSTHVVKHYPMGPKDKSDKIDSAKIADFLYRYNGTECVKPYNMPDKTMQRLKALMNERKFLVEQRTCFMNRRQLCITKEDAQLYDGYIKKFSRDIENIELEEQKLLATDDSLLSTYKNLLTIPGIGFVNAINVIVITRNFTAFETARQYASYVGVAPHFRTSGTSVKWRPRPSARCDGQAKADLSMAATVVVQYDAELQSFYNRKLGGKQDSDTKRKALNAVKFKLVLRMFAIGKQNRKWEPLDSKSSNEKLAIS

SEQ ID NO: 409228 - protein, 387 aa, unidentified
MFFCGIDVAKHKHVVLVVDDGGQIVLPAFSFDNNRAGFEQLAEALTALSEPVSVGLEATGHYWLALYDYLTRQGHSVTVINPLRVAAYRRSGIRKVKTDKTDAFWIADFLRIANLRPTNQDVPVILQLRELSRFRFWLTDQIGDCKRKVLCILDRVFPEYETLFSSVFLKSSRALLKKAASAQEIADFDLAELTDLLRHASRGRFGRPKAEAIQNTARQSVGVSFLADAARVQMDCLLQQMDLLQEQVAQLDHAMAQLMDQIPQHITSIPGIGPVTGAAILGEIGDIHRFQSVEKLVAYAGIDPTVYQTGQFQASQAHMSKRGSPYLRHALWLAATIAVRHDPELQAFYETKRKEGKHYGTVIGAVCRKLLARIYVILKEQRPYVIR

SEQ ID NO: 409229 - protein, 410 aa, unidentified
MNNALFVGIDVSSKNNVAYIMKPDGDKHSSFSIPNNRPGAEILVDRIVEVLQRLFIPKVVIGMESTSVYGDNLMYFLRETGKFSGFEKKLHMLNPKQVKKFRDTYSDLPKNDFVDAFIIADHLRFGRINKEVYMGDYRYEALKVLTRARHQTVQSLTREKQRFLNQLFMKFSGFSQEKIFSNNFGATAAAVIENFESLDELAYIDSDELADFIKKHGKGKFEDVDGIVSNLQKAARNSYRPPTVIADSVNQILAISMSTIRLLQGQVKEYDKAIEKQLSTIPNTLTSVKGIGPVYAAGIIAEIGDINRFPSQASLAKYAGLTWTQHQSSEFEAEDTRLIHSGNHHLRYYLCEAANSLRKCDPEFRRFYNLKFREVSKHQHKRALALTARKLVRLVYALLKTNRLYIPPEE

SEQ ID NO: 409230 - protein, 351 aa, unidentified
MLLIGVDYHPSFQQVAFLNENTGECGELQLNHSEGAAERFYRDLKQRGIRVRVGMEATGYSRWFERLLAELGFELWIGDPAEIKAKRVKKQKTDRNDARLLLRLMRENNFPQIWVPSAENRDLRQLLWHRHRLVQMRTRIMNQLQALAMNEGKRCKKKLWSEQGRAEFEELPLGFWATRRRQELLGLLDRMNPNIEELTTAVEQEAQKRPDALRLMTHPGVGPLTALAYVLIIGTPARFSRSKQIGTYVGMIPSEDSSADKQRLGHISKQGNSLLRFLLVEAAQAAARVHPDWRRRYLHLAMRRHRSIAKVAMGRRLAIQLYWMWRNGCEYSQSGKCGSYVGQLGTGHGRK

SEQ ID NO: 409231 - protein, 402 aa, unidentified
MGKFIAEQARVRTAAALEATRGWSHYAAFIGLDVHKETIAVAIALPGRAEPAYRGEIAHEPKALKKWRERLNDEFGGALLLFCYEAGPCGYGLYRQLTEAGHECQVVAPSLIPKKAGERIKTDRRDALKLARLLRAGELTAVWVPDTEQEAMRDLTRARDDMKSQERKARQQLNAFVLRHGHHWPRGKKRWTSVHCNWLESLRFEHEWQQIVLQEYIDAVKAASRRVADLTDQLMQALPGWSLAPVVDALVALRGIDKLAATVLLAELGDISRFESPKQLMAYLGLVPSEHSTGSRRRQGAITLTGNGHARRMLVESAWSYRFPARQTMHLKRKAKMASPEAKAIAWRAQKRLCGRYRQLSQAGKNIKLVCVAIARELVGFIWDIVRHEMPRLAPQQSAVAG

SEQ ID NO: 409232 - protein, 342 aa, unidentified
MEKHTTIAVDLSKTVFEIAVSDYPGRVCERRRLTRGQMVRFFANRPPATVLLEACGSAHHWARTLQQLGHSVRLLPVHHTRRYVLRDKTDAADAFALLEANRNEQILPVPVKTVAQQSLAALHRIRSGWMQTRTARLNALRGILRELGISIPKGARHVLPALKASLSDPDNPLPLSLHPTLLAVAAEIRAFEEKIKDLERQLTAAARSCPSATRHLSIPGIGLLTATALSAFVGDLSRFRSGRRFASSLGIVPREHSSGLRQHLGAITKRGDPYLRTLLIHGARSVLLAASRAKHPDRLQTWALRLQNRRGHNRTAVALANKLARIVWAVSTHQTEYRSTAA

SEQ ID NO: 409233 - protein, 346 aa, unidentified
MAETEVDTFAGIDVSARELNVALRRGKGEDNPTMAKFSNHPSGHKALIAHLLRGGRRMRVCLEASGNYTLDLALTLQAHRQVEITVINPRRARRFAESLGQRSKTDPVDARVLCEYAARMPWVAWQPPSSVALHLRAVARAIADLGVIHTQQNNRAHASAASPALPVLVVKEMQRHQKYLEQRITRLRREALRIIAGDSELDRRFRLMLTTTGIAETSALQILGELAVLPDMLDARQWVAFSGLDPRLFKSGKSVEKRPRISRGGSRHLRRALYMPALVALRRDPYLRCFYQNLLARGQARLQAVVAVMRKLLHALFAMFRTNQPYDGSKLCCAVEMAGHATAARA

SEQ ID NO: 409234 - protein, 374 aa, unidentified
MKEFTKFVGLDVHMETVAASVADAGGGEVRYVGAIVNTPEAIAKLVKQLKKDGARLSFCYEAGPCGYVIYRQLKDLKQDCQVVAPSLIPKKAGDRVKTDRRDSLSLARLHRAGELTSVWIPDGLQEALRDLTRAREDMKHLLRQVKQRLLAFLLRHGKRYTGGKSNWTQAHFRWFETVKFEQPVQQIVMQEYIDTVTSCSKRVLGLDRQLERTAQASAVWPIIEALMALRGVNLLTATTVVAEIGDLKRFAKASQLMAYLGLVPSEYSSGAKTRRGGITKTGNSHVRRVLVEAAWTYRHAARKTAVLQRRAERAPEAIQEIAWGAQKRLCQRYRDLDARGKLKVQTCTAVARELVGFIWAIGQTMPQPTEAAAE

SEQ ID NO: 409235 - protein, 429 aa, unidentified
MTQDEVAVWLGIDWADQKHRWAMRIAGERRVTQGDLDHTPEAVEQFVSALAVRFPGQRVAVALEQSRGALIFMLGKYAHLVLYPVHPNTLDHYRKSVYPSGAKSDPSDAALILDLLCMHTERLRPFEPDTVETRTLQLLVEARRDAVDDKTRYLHRLTAQLKMFFPQVLDWFSTVDTVVVGQLLQQWPTLEELQRAPVSAVAGFLRKHRIPETRIGVLQQFIGQAIPAVNDVAVLESSVLIVRRIVGQLDALRTAIAEHDKKIADLARSHPDFGIFSSLPGAGPAMAPRLIAAFGTQRDRYATAAAIQCYAGIAPVTESSGKQKWVHWRWACPKFLRQTFHEWAWMSTRKPGWAREFYERQRERNKSHHAAVRALAFKWLRIVYRCWKDRVPYQEARYAVALQKHKAAKPVEIHVKRIAGFAKLDGFSC

SEQ ID NO: 409236 - protein, 352 aa, unidentified
MAHPGTPQITVGVDTHLDVHVAHACDQLGRRVDTVQVPTTPTGYHDLLAWARGLGKPVAWGVEGTGSYGAALARFLVANGQVVLEVNRPDRSARRRRGKSDPVDAQAAARAVQAGEVTVVPKASDGHVEMIRSLRVARQTAMRARTQTINALKALLVTAPAELREQLRGLSAARLVRAACELEPGKLTSPLAAAMLALRTLAARHQALSAEITTLTTELDRLTAKTAPKLVALFGVGQDSAGALLVAAGDNPDRLRSDAAFSMLCGVSPIEASSGKTIRHRLNRGGDRQANAALYRIVMVRLCYDPATKDYMARRLKEGKSKKEVIRCLKRYVAREVFAVLTQMGDNPTAAA

SEQ ID NO: 409237 - protein, 388 aa, unidentified
MIYVGIDIAKLNHFASAISSDGEELIKPFKFTNDNDGFQLLISKLNPLDKDSLIIGLESTAHYGDNLVRYLVAKNYKVCVLNPIKTSTMRKNNIRKTKTDKVDTYIICKTLMMQESLRFVAFYDLDLMDLKALGRFRQKTIKQRTRLKIQLTSYVDEIFPELQYFFKSGLHQKSVYALLKEAPTPEAIASMHMTHLAHLLKVNSHGRFDKEMAQQLRVLAQKSVGASDSSLSIQVTHTIQQIELLDSQLERVEAEMTEIMKFNDSVIMTIPGIGYINGGMILGEIGDIHRFSSPNKLLAYAGLDPSVYQSGNFQAKKTRMSKRGSKVLRYALVNAAHNVVKNNTTFKTYYDAKMAEGRTHYNALGHCAGKLVRIIWKMMTDNLEFNLD

SEQ ID NO: 409238 - protein, 337 aa, unidentified
MNKLCKSKADGNVSKSMFVGMDVHKNYLQVAVLDEKGKILNNSRVDNNMIKVNEFFDSLHPGNNTKIVMESCGMWYNIYECLRKRQLNVRLSNPVKTRAIASAKIKTDKLDAVKLADLLRGGYIAECYIATTETMDLRELVRHRAALVRMRTKLKNKIHSIMFMNGTSIEKLKELNDYRINGCLRIIESLNDEINTVSKKTLLLAQEDEMARLLMTVPGIGYYSALLIVSEIGDIHRFPDSYHLCSYAGLIPSTRSSGGTTYHGSITKSGSKYLRWIMLECLHAHIRNEKNSNVTQFYHRLSKKKGNSKAAVAAASKLVKIVYWIMKEKRMYDNHHG

SEQ ID NO: 409239 - protein, 325 aa, unidentified
MKKSIGLDIGKEEIEASLYDGTTYRNKTYKNNREGIRRMRDQFKKASPDVITMEVTGTYYLRCAYALHESGFDVRVENPLVIKRFGQLNLRRTKTDRADARLIALYGHNESGRVFKPVSPERMKMRVLVKEIDQIFKDINRNISRIDALKQYPVNMAETAERYESKNRQMYQEIDMIQKQLNVMIERDEEYRAIRRRLKTIKGVGDRLASALIAYVGNFEDFHTAKQLSAYFGITPMLSQSGTSVNIQGGINKMGNKYIRSLLRNCGMSAVQFNEQCIGLKKRLESRGAKYNEILIAAGHKLLRQCFGVVKNNTDYSPCYVRNMA

SEQ ID NO: 409240 - protein, 322 aa, unidentified
MNGSIVLGIDVAKAKLDCALRLPDGKFKNKVFENNPKGFKTLTEWLEKHGATAAHVCMEATGVYWEAVAEYLANGEMTVSVVNPAQIKAFGGSHLVRSKTDKADARLIAGFCAERNPGPWQAPSPSEQALRAMVLRLDSLQVMRTQESNRLEVARDAVKPGIVSHIEWLDKEIKALAKKIGEHMDGDAGLKDKQALLDSIPGLGERTIAILLAFYAGLERFGNARQAAAFAGLDPHHHESGTSVKMKPRMSKVGHAFLRKSLYMPAMVALYKTAWGIRFRERLAAAGKPPKLIIGAMMRKLVHVAFGVLKSGKNFDPALHGC

SEQ ID NO: 409241 - protein, 361 aa, unidentified
MRSRESQDAGPAPPVHPEQLLGLDTPVFARLGDAGGSRGRKGAIVEPEKVFVGIDVGKYHVEIALSDRGEVSRFTNDDSGIGEILGLLDGRSVGLVVLEASGGYERQLLASLLGAGIPAVAVNPRQARDFAKALGRLEKTDAVDARMLSQFARSVRPPVRPRVSEELTEMQDWLTRRRQLVEMLVAEKNRSQHAKQGVLKDIREHIDWLKKRIRDSEKELGEMLKKAPEWNAEVEVLDGIKGVGRVMAIMLLVAVPELGTLNRKQIAKLVGVAPLCCDSGTLRGKRTCWGGRADVRACLYMAALVAARFNATIQAFYRRLIAVGKPKKLALVACMRKLLTILNARIRDHRAALSGPRAALS

SEQ ID NO: 409242 - protein, 389 aa, unidentified
MTSSLHIDTPAACAKHDTMFVAFELGKAKWELGIVMPGGGKLSQYVVAGGDAKAALQLISKARQKAQRRAGGGVRVVSCYEAGYDGFWLHRWLADQGIENLVLDAASIQVNRRARRAKTDRLDLEQLMSALMRHDWGDRLACRVVHVPSVAQEDDRRPGRERDRLVKERVGHVNRIKGLLHGQGVRDVLPRARNFCTWLGEVRTGDGHGLPPHLMAELKREHGRLLLVQEQIAEIEAQTVAARQAAAPAPMASKINQLIELKSLGPVSSQTLVGEVFFRDFENRRQVGSYFGLTGTPFNSGGSRREQGIGKAGSPRALTTAIELAWLWRRHQPGSALSRWFEDRVGDQKGRVRRIAIVALARKLMVALWRFLEHGLVPEGAILRAAAHT

SEQ ID NO: 409243 - protein, 396 aa, unidentified
MHTIDQPVQPSAIRTDLGAIFVSLELSQSTWLITSLSTGNGEKMSKHSVSAGRHTELFARFAQLQERSRMRTGHSHPIIVIQEAGLDGFWLHRILEREGIESHVVDPASIATSRRSRRAKTDRLDGETLIRTLLAYKRREPRVCAMVKAPSPEEEDRRRVCRERKALTVERVGHVNRIKGLLFSQGITDYEPVRRDRRARLEKLRTGDGRELPPYLKAQLCRELDRLELVLEQIKMVEAERDALIAAQSAMMKPSPVTMLLDIKGIGAECAAILWSEGLFRHFDNRRQLAAYAGLAPTPWRSGTINREQGISKAGNPRLRTTLIQVAWLWLRHQPKSSLTQWFGERVKHNNGRFKKSTIVALARKLLVPSRPGESHPEPLTDPDVNLSIHPARAIA

SEQ ID NO: 409244 - protein, 356 aa, unidentified
MSILADLVDHVIGIDPDKETFSAGIVDALTKGDLGGERFTTRAAGYDSVIEWADTHTDPERRAWAIEGSGTYGKGLARALHDAGEWVIEFSFPQGLAAPNGAKTDHLDALRAGREVLGRMKWAQPRNADGHAAAIGVIAGLRTLMVGQRTQVINHLKALLLRAPNDLRDQLRDHSNAKLVATCANLRPSTDHALLLDETANTKIALRTAARQIQTLNTDIAALLDRLDAQTILKAPQLRAEQGVGPAIAATVLIAWSHPGRVRSEAAFAALAGTNPIPIDSGQNQNRHRLNRTGDRQLNRALYFVTLSRARHDKQTQDFIARKQAQGRTIRHARRCLNRPPARRFYRILENPPTTT

SEQ ID NO: 409245 - protein, 288 aa, unidentified
MTHYVGLDVSQKLTAICVVDDSGHRQWRGQCTSDPEPIERTVRRHGGDDARIGIETGPMTPWLVHELRGRGLAVTCLDARHARAALKMQINKTDQNDAEGLAQIMRTGWYRSVHVKSFASHRARALLGARAQLVGMTTRLSNHIRGVLKTFGMLPGAGRGLAFDRRVETLLADRAEVAPIVRPMLAAWRQLRQQTAAFDKAVRVLVKSNPICRHLMGVPGIGVLSVLAYVSMVEDPARFGRSRSVGAHLGLTPKQYQSGEIDRSGRISKCGDILARTLMYEAAVVLAV

SEQ ID NO: 409246 - protein, 342 aa, unidentified
MNNTTIAVDLAKSVFEVGISHHPGHVAETHRLSREQIAEFMAKQNPATVVMEACGSAHYWGRRFETFGHEVRLLPPLYVRPYVQRSKTDRADVKGMLEAHRNRAIRPVPVKTESQQQLTSLHRMRSGWVAARTARINSARGLLREFGFVFPLGAATVSGRIRELIEDADTPVLMPLRELLHQLVLEIDELETRIKTVEKQLEALAAQTPVVTLLRTIPGIGLLTSTALVGFVGDVGRFPSCRHFASYLGLTPREYSSGSRRRLGRISKQGDDYLRTLLIHGGRSVLVSARFSAQPDRLRARGLELQNRCGHNKAAVALANKLARIVCAVWKSGKPFESRPQP

SEQ ID NO: 409247 - protein, 458 aa, unidentified
MRKNKRRGMSLSDRPVEQPNAAGVDIGAREIFVAVPHDPEGEPVRKFATFAEDLRRLGDWLQRCGVTTVAMESTGVFWIPLYEILEQRGLNPCVVNARHLKNVPGRRTDWHECQWIQFLHSVGLLRAAFRPEDQVCAVRALVRHRQQLVEMVGQHVQHMHKAMTQMNLQLQHVISDITGTTGLAIVDAILAGQRDAKELAALGDPRIKVGAEVIEKSLCGNWRDEHLFTLEQSRKFHRFYQEQIAAWEANIERLLQQFDARVDPQQKPLPVDSKRNRSAAKRRKKLGRTENQFDLRTEAYKLFGVDVTQIPGLETNVVPLFSEIGRDLERWPSASHFVSWLSLRPDNDISGGRILWRGVRKANNRAGQIFRLAAQSLHRSPTPMGEYLRRLKAKLGPAGAITATARKIATLFYTLVTRQVEFDSALWQATDVKRQQRIQARLTRQARRLGYQPVPLAA

SEQ ID NO: 409248 - protein, 340 aa, unidentified
MDKVISVIGIDLAKHVFQVCAANKRGQRLFNRAVSRAKLLSMLANIPKCVVGMEACSSSHYWAREIEMLGHEVKLMPPQYVKPYVKTNKNDVTDADAICEAVCRPSMRFVAVKSIEQQALMLLHRDRRGLVRDRTALVNRLRAIMGEFGVIAPAGLHKFRAWLKNEYGAVESRLPELMRRHVHVMVLRLRETDEHIELLESEIHGNASSTDDCKRLREVPGIGPLTASALVASLGDIKSFSNGRAFAAWLGLVPKQHSSGGKNKLQGISKRGDGYLRSMLIHGARAVIRHLNPNRAVSRWLKELLCRRHKNVVIVALANKLARTVWALLSRGTRYQEAYS

SEQ ID NO: 409249 - protein, 344 aa, unidentified
MVYVGMDVHQSSTTFCFFDPVVGNGGQYRTYTRPTCRESFCEVLAPLGGQCQVAFEVGTQAQWIASMVRPLAGEVQVANPSRIPWLFRDGRKNDRLDARKLATLLYLKQLPTVHWPSANVSAWRALINHRRTLVQRRTMVKNRIRTILRAYGHRCPYKGLWTHRGQVGLESLVFDEARTLMLTTLQDELTFFDQKIAAMEAKLDAIAAAHPSVAMLRTIPGIGPRTGEAIVAFGDGVARFRDRRRFASYFGMTPTEDSSGLVERHGHISKRGPSVVRWVLVEAAHQAIKRCPAFRAFYDRVHRGKKDRAKKAIVAVGRKVLTIAYAMMRDQSPFCAEKVLGRAV

SEQ ID NO: 409250 - protein, 326 aa, unidentified
MTSLPNPTSDTRVTVGIDVAKATVEVAISGRQKTLALSNDEAGYAALLAELSSLNVGLVLLEATGGFELACATALQLAGLAVAVVNPRQARDFARAMGYLAKTDRIDAAVLVDMARTLLARADLSKLVKPLPDAQQLELQALVTRRRQLMAMKLAEDHRMKMPGVRQRRSLNTIIKALDREIVRVDKDLQAFVGANHAELAALLDSVKGVGKATISTLLAEVPELGKLSGREVSALVGVAPINRDSGTMRGKRSIFGGRPDVRRVLFMAALVASRHNPVIKAFYQRLLAAGKPKKVALVACMRKLLTILNAMVRSGKPWDQALHLG

SEQ ID NO: 409251 - protein, 414 aa, unidentified
MVLDQDHHDVDQLSPPPLFAGVDWGGSFHQLCVLDSGGRRLLQRRIVHDVDGLESLADHLAGFGVEVLVAIERAEGLLVEFLQTLPKVTLFCVSPKISARARERYRLSASKSDSFDAFVLADTLRHEYRHWRPLSRPSTLTAQLQAMSRDRQRVLHAKVACESRLRAVLESYHPAPAHLFSELDRDITLEFIRSYPTPDQARRVGAARMERFCRRQHYSGRADPQVLVDRLTPHLLSAGEGTTAGKAFAARLFAEELQMHSDHLRAFDRRINELLMLHPDAPIFLSFPGIGPVVAATLISEMGEDRDRFRSPEVLLAETGLAPVTKTSGRTRQVRFRYAANRRMRHVIDWWAFVAAREDPWSKIVYETSRARGQGKYRALRGLGARWMRILWRCWTDHTCYDSSRHQRPELVSG

SEQ ID NO: 409252 - protein, 402 aa, unidentified
MNCVGIDISKGKSMVAVMRPFGEVVVSPFEVQHTTSELSKLARQLKSLDGETRVVIESTGNYHAPVAWLLFDAGLYVSVVNAILVHSYGNNSLRRGKTDKKDAVKLANYGLDHWLTLPRYVPEEDTRLLLKTCYRQYQQYSKVQTMLKNNLISLLDTAFPDANRLFTSPPRSDGSEKWVDFVAAFWHCECVCGLSEKAFTSKYQKWCRKHGYNFREDKALDIYASACGHCGVIPKTDTAKLLVEQAVSQIRATSATLATLKQKMQSLAASLPEYPVVMGMFGVGPTLGPQLMAEIGDVRRFHSKKALVAFAGIDSPPYQSGQMDVRSRSISKRGSASLRRTLFLVMGVYLQNAPTNEPVFQFMDKKRAEGKPYRVYMMASANKFLRIYYASVKTYLNSLEHD

SEQ ID NO: 409253 - protein, 381 aa, unidentified
MNKTYYLGLDVHSEKNAIAYALEGSREQATYYGSCGASVPNTEVTLRRLAKKLGVNFKDLKVCYEAGPTGFVLARRLIHLGLECIVIAPTKTERKPGEKVRTDRRDAKKLAKLFRNGDLTAVYIPPASDEAVRDVCRARTDAVDDLSRTKLRLKAFLLRNGYRPQGANWSQKYMRYLRELVLADPNQKIVLEEYLQAIDTGIERVARLEAKMFALLEEWEWKPVVEALMAFKGFKEVAAMITISELGDLTRFQHPRQLMGFLGLVPSEETTGTRRRQGGITKCGNSHARWLLIESAQAYRSSPKVSANLSKRQEGQSGAVKELSWRAQNRLSGRYRRLKARGKRENKVIVAVARELCAFIWELHQLMRDRLPASDSTQNAS

SEQ ID NO: 409254 - protein, 411 aa, unidentified
METMIARCCGLDVHKARLTACVRVLVEGVVSELVETFGATSSDLLALRDWLLAHQVTHVAMESTGVYWKCVYYMLEDDFELLLVNARHIKHVPGRKTDTIDAAWIAQLLACGLLRPSLVAPRPIRELRDLTRYRKALIYERGRAVNRLHKLLEDAGVKLSCVATDVMGVSGRQMMRALIDGQADAEALAQLAKGKLRAKLPALRKALEGRFTAHHAFLLERILAHIEALEDDIEAISARVEEQIAPFEPAVQLLRTIPGVERRSAEVIIAETGGDMSRFPSAAHLASWAGVCPGQNESAGKRKPARTRKGSPWLRATLIESARAASRSKGTYLGERYRRLARRRGDKKAIVAIAHEILTATWQMLSTGELYREPGTTVISQREADHARRRAIRQLEQLGHKVTLEPLPEAA

SEQ ID NO: 409255 - protein, 412 aa, unidentified
MKDLLEISCGLDVHKEKIVACILTGPLGKPTRSEIREFTTLIPDMIALRDWIVSQNCHHVAMESTGIYWMPIYEILEDAFSGDITLLVVNARHMKNVPGKKTDMRDSEWISTLLRAGLLNGSFIPEKRIREFRDLNRYRKSVIRDITSQKNRIEKFLQSSGFRLSSFISDIFGASGRNIILHLIEHGQIDKTALDSCLKTKTRNRIDEILMSVNGTLSEHQKTFLKILMTHYDSLKEHLTEVETSLEEDMAPFTLQVEQLNSIYGISTTASCAIIAEIGIDMEPFKTAEHICSWAGLCPGNNESAGKRKSASVTKGNPYIKSMLCEIAWVIAGKRNTYLSAWYWRIKQKKGAKKAIVALARKLLVIIYTMLKQGTLFDESCFETRRKNCEQKQLSRYIRELEKHGYHVEAQS

SEQ ID NO: 409256 - protein, 376 aa, unidentified
MEKDIRHVGFDVDSERIAVAVAEASGEVRSLGMIPYTAESVRRLVKKLGPARRLRVCYEAGPHGYGLYWQLMGLGVHCDVVAPTLVPVKAGDRVKTNRRDAEKLARCYRSGDLTPVWVPDAAHEALRDLVRAREAAKKDQLRARHRLGKFLLRRGLRAAGGVKNWTLKHLLWVRTLRFEQPAQEATFLDYLHEVEHAAERVARLEKAIDQAVAGLPEEMRAVVAGLQALRGIKQITAVTIVAEVGPLSRFARPKPLMGYSGMVSSEDSTGNSVRRYGITKTGNAHLRRVVGEAAWAYQYRPAMSAALKERQEGLSEEVKEIAWKAQHRLCTRYRRLLTKGKVKPQVITAVGRELLGFIWAIGVQVEKEEQLRRRAA

SEQ ID NO: 409257 - protein, 370 aa, unidentified
MKDNTKYVGLDVSKEKIAVAIAEEGREVPRYFGMIPHTLEAVRKLIRKLGEPHTLRVCYEAGPTGYPLYRLLLSLGVHCDVIAPSLIPQKPGERIKTDRRDSIRLAQLYRAGELTSIYVPTPEDEALRDLVRCREDAKEDELRAKHRLSKFLLRNNIKPPTGVNKWTVKYRRWLDTLKFESSKLRIVFQEYYHQLKELEQRILRLEEEIRVQATEGVHAPTIQALQCLRGVALITAASLVAEIGSFKRFSTPKQLMAYVGLIPSEFSSGESRKQGGITKTGNRHVRRLLVESAWSYRYQPSVKGELKRRQSGQSPTIQAISWKAQNRLHKKYYRLLSRGKESAKAITAVARELSGFIWAITQELEEVPRS

SEQ ID NO: 409258 - protein, 352 aa, unidentified
MDATTVAIDLAKDIFEVALANRAGRIIERKRLTRRQFERFVDELPLGTEVIMEACGTAHYWGRRCQARHLLVRLFPAQYVRPYVRRNKTDRTDTEALLEAARCGGIRPVPVKTVEQQTLQALHRVRTQWQAARTARINVVRGLLREQGLPIPVGARTVLARVAGILEAAESALPDLLRHTVSLVVDEIRALETRIATIDRQLTQVARTHPVAVRLQQIPGVGVLTATAMVGGVNHIHAFRRGREFASWLGLTPRESSTGGRRHLGGISKRGDVYLRCLLTHGARAVLLTAQRTVRSAPHRATTFQQWAVTLAARRGHNKAAIAVANKLARMIWAVWHYDVDFQEKPRGIVAA

SEQ ID NO: 409259 - protein, 410 aa, unidentified
MRLFVGDDWAEDHHDVELMDVAGRVLAKKRLPEGVAGMARLHELIAQHAQDPDERGEDAEVVIGIETDRGPWVAALVAAGYTVYAVNPLQASRYRERHGVSGAKSDTGDAHMLTDMVRTDSHQLRAVAGDSADAGAVKAVARTHKTLIWDRTRQVQRLRHQLREYFPAALAAFEDLDAPDALELLAKAPDPARAAKLTRAQVSAALKRARRRDIPGKATAIMAALRGAQLGQPPAITAAYAATVRSLIAVITTLNEQVKTLQGQVEADFGRHPDAEIYLSQPGLGPVLGARVLGEFGDDPDRYASGKARKNYAGTSPITRASGKKKTVIARFIHNDRLIDALMAQAFTALNASPGARALYDAERARGTEHNAALRKVANRLVGILHGCLKTRTLYDEATAWSNRENKLAA

SEQ ID NO: 409260 - protein, 359 aa, unidentified
MITLGVDAHKTVHAAVALDDAGREIATWRGPNSPDGWAELAAWAAAHAASSGTERRWGIEGAGNYGRGLAQHLTAAGETVYDINPRWTAQGRRQARRPGKSDRLDARAVALVVWREAASLPPLQPEEQDETAVLDLLVSEREGALGEATRLRNQLHALLLQLDPQYKVHLPALTTPAGVAAAEAYTGPGRTPLQRAPAASVRRLAQRLRLATEQAADLARQIAARAQAGFFPLTRLKGINLLTAGALAGLLGPGCRFTGEAQLAAYAGVAPLEASSAGRVRHRLNRGGNRRLNAILYRIALTQARCWPPAQAYLARRLREGKTKREAIRALKRYLIRAIWRLWQECVSSHPVTSYGQAA

SEQ ID NO: 409261 - protein, 376 aa, unidentified
MNEKLRFLGLDVHAETIAVAVAEPNGEVRSLGMIANREDSIRKFIRKLDSPEHLRACYEAGPTGFVLYWQLTQLGVKCDVVAPSLVPKKPGDRVKTDRRDALKLARSHRSDDLTAVWVPDEGSEALRDLVRAREAAKQDQLRAKHRLTKFLLRTGQRPPLGVKAWTEKYVEWVQQVRYTHPAQEATLLDCLNEVQHMEERVKRLEQSIVEVIQLAPAPMQQVVRGLQALRGIAHISAVTIVVELGNITSRFESARDLMGYSGAFPSEDSTGKRIRRGGITKSGNAHRRRIVVESAWSYRHRPAIGARLRRRQEGLPAEITEIAWKAQNRLHKRYMTLMARGKEQRKTMTAIARELLGFIWAIGIKAEAACKQQMAA

SEQ ID NO: 409262 - protein, 365 aa, unidentified
MNQSIYVGLDVHLNSITAAVLEGDVQVPQVIKLSGDLNQTRRLFRRLATKGPVRACYEASGAGFVLQRVLSRDGFHCEVIAPSLIPRKPGDRRKTDRLDAVNLARLYKSGHLTPVHVPTREQEALRRLIRLRYEYVRYIVGTKNRISGMLRNHGLVFTEGKTTWTKTHRQWLATTRDQLDGAMRTALATELEHFEYLETQRGMLDSEIERYAQAPPYRGDVEALCCVRGIKTLSAMTLLSEIGDVRRFARPASLMAYFGLVPSERSSGERERRGPITKAGNTHCRRILTEAAWNNRHRSGADLILKRRRQGQPPEVVAIAIKAQHRLYKKFQRLDHRKHRHVAITAVARELCGFIWAILGAAPQS

SEQ ID NO: 409263 - protein, 343 aa, unidentified
MQVSTIGLDLAKNVFQAHGVSAEGKVVLKKQLRRGQVLSTFAKLPPCLVGMEACAGAHYWARELRKLGHDVRLMPARDVKAYVKRDKTDAADAAAICEAVSRPSMRFVALKTPEQQGRLMQHRVRDLLLRQRTQTINALRAHMAELGLVAATGRQGLGLLLAILADAKDERLPQDARASLQLLASQITALQAQIDTLDKRLHAQHRQCPASRRLETIPGIGVIGATALAATITDPKAFKSGRDLAAFIGLVPRNNSSGGKQRLGPISKQGDRYLRRILVVGAHSILKQARTRPDKHPWLARLMARKPGKLAAVALANKTARIAWAVLARGESYRAPTAPAAAG

SEQ ID NO: 409264 - protein, 391 aa, unidentified
MLPTRLREQNESDKVLIKGDSMSVRRILAKTINTDLEYEAIGIDLAKNCVSVALLTTDGEVVCIDRLDYSELEKSAQVLCPTTFAMEPCTEMNYLVQKLEAWGHRCLVIGGKNVQNYVENHYSGQKTDLNDAQALAFLAQDTQLRTIKAKDMEQRKYASLTTLREQYIKQYRQTIVSLKGICQAWGLNISKGISGKARLKDLIENHAAFPEELKESLVDMVTHAQTAQKALNKITKTLEELAKNDKLCQLIRTIPGLGLICSCRLRATIGDIKRFKNPKDFPAYYGLVPRSIATGHNEKKGRITHRGDKTMRSLMVQGAGSVINMATRGKLKSKQLTKWILKKQKEKMPWGKLVCAVAAKLLRIVRAVLISSKPYNPKIAGVAKCSLPKGT

SEQ ID NO: 409265 - protein, 366 aa, unidentified
MKKISTTQAFSNEILEGQKLTIGVDLGDRWSFYCVLDEAGKIILEQKVSTTPEAMKQRFGKIPWSLIALETGTHSPWVSRLLTELGHQVLVAHAQKVELITKSNRKDDRHDARTLARLARIDPELLGPVRHRSAKAQIHLTVIRARAELVSARTALVNAARGLVKSFGERLPKCGTQQVNEKLAEGLNAELREVLAPLLREVESLNERIQEYDQRMERIAKEVYPEVSLLQQVKGVGTQISLTYVLTIEDPYRFPKSRAVGCFLGLRPGRRNSGESEPQKKISKEGDRYLRTMLVQGAHYILGPFGEDSDLRRWGLKLAERGGKNAKKRAVVAVARKLAVLLHRLWVSGEVYEPLRNSQKAMRAAA

SEQ ID NO: 409266 - protein, 341 aa, unidentified
MQITTIGLDIAKNVFQVHGIDAAEKVVVRRQLRRGQVLKFFAGLPPCLIGMEACATAHYWARELTKLGHEVRLMPAKDVKAYVKRNKNDAADAEAICEAVRRPTMRFVGAKSAEQQGRLMQHRTRDLLMRQRTQVINALRAHLAELGIVAAQGREGLKQLLTIIADEKDARLPIDARGSLIVLAAQLQALQTMIGSVEKRLTMQHRANEESKRLESVPGIGTIGASAITATVTDPNAFRSGRDFAAWIGLVPRQDSTGGKQKLGPISKQGDRYLRRILVVGAHSVLRRARQNPEKYPWLTQLLARRPFKVVAIALANKMARVAWALLARGGTYRVPALAAA

SEQ ID NO: 409267 - protein, 403 aa, unidentified
MQPILKSCCGIDVHKNMIKASIAKGPLDSPPRFCTRTFSTMTRDLLKLKDWLTENDVEAVAMESTGVYWKPIFNILENDFQVILANPQYLKKVPGKKSDVKDCEWIASLLRCGLIPASFIPQRPIRELRELNRTRRKLVGMMSSEKNRIQKVLEDANIKLASVVSKIDGVSSMTMIQALLDKYSLSKEEITDMARGKLKSKVDQLVEALNGKVTDHHRFLLNLHLNNIAFLADQVQEIDKQIQKLMIPFQKEESLIQTIPGISKISAKAIISEIGVDMSQFPSEAHLASWAGICPGNNESAGVKKSGKIRKGNRYLKAILIEVAWAASRTKGSAFSAIYNNIAKRRGKKRALVAVGHQILIAVYRTLKTGEPFVDQGAEAIYRRNLEARQQSAIHLLERSGYR

SEQ ID NO: 409268 - protein, 342 aa, unidentified
MQVTTIGLDIAKNVFQVHGIDASEKVVVRKQLRRSQVLAFFKALSRCLVGMEACATAHYWARELTKLGHRVRLMPAKDVKAYVKRNKNDAADAEAICEAVRRPTMRFVPVKSAEQQSRLMLHRTRDLLMRQRTQVINALRAHLGELGIAAAQGREGLKELLKIIASEEDARLPVDAHTSLVVLAMQLQAVQTMIGSIEKRIMVQHRSSEASKRLETIPGIGVIGATAIAAMVTDPKVFRSGRDFAAWIGIVPRQDSTGGKQKLGPISKQGDRYLRRILVVGAHAVLKQARRQPEKYPWLTQLLARKPFKVVAVALANKMARIAWALLAKGGTYRAPKLAAAA

SEQ ID NO: 409269 - protein, 318 aa, unidentified
MPQKTRFVGLDVAKSKVDACIRSEGLRLSAPSTPEGRAGLVAWVRANRVGRAVMEASGGYERGWAEALRAAGVEVRIVDPKRVRHFAKAAGRLAKNDPIDADTIAWFAEAFPDREAQPHDPARDEIDRLVAARTALKDAEDRIKQQGEHRPPAVVAKALAAIAKTIRAELRKVEGAIAAKIKANPGFARRAEIIASVPGLAAQTAAGVIAWLPELGHVTNQAAAALIGAAPYDDDSGGRKGQRHIKGGRRKLRNLLYMPVMGAATRHNPMLKAHYQRLRARGKEAKVALIACMRKLIVILNTMLARDQTWNPPVRAAP

SEQ ID NO: 409270 - protein, 413 aa, unidentified
MNYIGVDLHKKSITVCVMDQNRKVLSRKTINCKETNEIVDFFRKFRPFKVVVEATASYLWFVELVEPMADEVILANPKKLRVIAESTKKTDRLDAQILAEFLVLDMIPRAYQPTPRQRQHRALVRHRQYLQGRITSVRSKIRHILSNYNADRKDLFSAKCGPAYFKEVPLSDADRFVIKQLWALWQEFVAQREALTKKIKAFVAKAPQREAEDRALLKTAPGVGFVTAEVVLSELGDYSRFRNSKAVSAYAGLAPAVRQSGDKRSKDMRITKEGSGLLRWALVESAWRLVGTSPKWSAMYARLKQRKGSKRAIVAVARKLLCVLYAMLRTRTPYKIVATETKAPQKTRKRLVLVRTSTAEQTTTTETATARTTRKRSAKAPVVEQTTTTQAAVPRVTRRRSSRTLAPKQTTTA

SEQ ID NO: 409271 - protein, 404 aa, unidentified
MPTYFVGIDVSKFKHTCCIIDGDGEIIKKSFDFSNSKGGFDSLIEIFKSIDQSELSFQIVMEATGHYHECLFRYLVANNYLAQIKNPVVIARFKQSEYLDKAKTDNLDALIIAQYASKHPFSPSMLKSYSIERIRRISRAKYFLYQDKERTINHLHRYLDESFPELIPFLRKRGDIKRYQGRNFFDSKTTLWFVENFPSAKKFSNARSETAEKLRRMSKGAFSLIKFNELRKIAKESIGVSFQETEEIIIQLVQELRNIQERNDRLDELLVPLIDETAPNLLTVPGIGYRLAGLLISEIGDASEFPSADKIIKFAGLDVRVYQSGTIEKHGAIRKRGSPLLRYALFQAAEKARIHCPEIAEFYSKKKSEGKHPICALTHTARKILRIVWALLKTGQNYSQSISD

SEQ ID NO: 409272 - protein, 365 aa, unidentified
MNTTTTATGLVGVDLAKNVFSICEVDGGGRVGRRQDLTRDAFGVWLVQRPAGTVVAMEACSGAHHWARRCEEYGLVPRLIAAQFVTPFRKRRTSKNDRNDTEAMATAARQGNMRFIPVKSVDQQARLSWHRVREGYKVESLAIGNRLRGLLAEFGIAVAKSESALRTALADLARNTGLPLGMKELIGDLTDHWKQIRDRIAACDARIEAHARADERCVRLRSIIGIGPLTADAMVASVGSARDFKNGRQLAAWLGLVPTQHSSGGHTRLGTISCRGDVYLRTLLIQGARSSLQRAKAVSTEKATPEQLWIGQLAARMPFGKVLVAIANKHARQLWTMLARDVDYDPSASLRHTMRSTTQPAIAAM

SEQ ID NO: 409273 - protein, 355 aa, unidentified
MNDAKYIGMDVHQATISVAVRDSRGNLVMEAILETKADTILEFIHGLRGSLSVTFEEGTWAAWLHDLVLPHVTRVVACDPRKNALLKVGNHNDRMDARKLSELLYLNKLSPVYHGEQGIRTLKELARSYTTITRDLTRVMNRLKAIYRGWGIPCAGQQVYAPRYRAEWLAKISEAGVRRRAELYYQQFDALAALRQGTRRELLAEARKHPAMRLLRQIPAIGPIRAALLIALIQTPNRFRTKRQLWAYCGLALRTYTSGEYRFVAGQLKRSKKVLAVRGLNINHNHDLKNIFKGAATRAASTVGPFQDFYQACVARGVKPHLARLTLARKMAAITLLVWKKGVRFDAEHLKQQAA

SEQ ID NO: 409274 - protein, 457 aa, unidentified
MACEVMAAVMEPQEIEDEEHEQILERVAAVDVAKAAGMVCTRVPHPGRAGKRRTRVWTVDATTNAVLELADHLVAERVEKVTLESTSDYWRIWFYLLEAAGLSVQLVRAADVKHAPGRPKSDKLDAVWLAKLTERGMLRPSFVPPAEIRQLRDYTRLRTDLTRERTRHYPRLEKLLEDALIKVSAVASKLDTLSVRDMLEALIAGERDPQVLAGLARGRMRAKHDRLVQALTGQFDDHHAELARMLLDQIDALTAQIGKLTIRIEALIAAIPAAQGVDADGTTGPAAGHGKGAPVLPAVDRLDEVTGIGRDAAQAVIAEIGLRMSVFSTPAHLVSWAKISPQTFQSGARTRAGHTGKGNPYLKGILGEAAAAAAKTDTFPGERYRRIVKRRGKLKALAAIARSILVIVWHLLTDPAARYHDLGPGYYTSRTDKDRKTRNHIRQLEALGYTVTLTQAA

SEQ ID NO: 409275 - protein, 424 aa, unidentified
MATGEATTAMVTHAWRVGSRLEECFGSPPAPDAWQDVRRGGEEMARAARRPGGSSSRKGRSSRARSAQLEQLNLNAAGIDVGADAHWVAVPKDRDEQPVRCFGAFTADLYALAEWLRQCQIETVVMESTGVYWIALFEVLEERGFDVKLVDAHYARQVPGRKTDVKDCQWLQDLHTYGLLRGAFRPEDEVCVWRSYLRQRSMLVAMASRTVQHMQKALEQMNLKLTEVVSAITGKTGMTIIRAMLAGERDPQLLATYRDKRCKHDHATIAKALTGHWRAEPLFALQQAVEQYDFIAQQLRVCDGHIEGCLQAFGPDVEIDVPQAPSARTWRASRSNPLSFEVQAYLTAMTGVDLTQIDGIDSLTALKVISEIGLDMTCWPTSKHFASWLGLCPGNKISGGKRYRIRSKPSANRAATALRLAAQG

SEQ ID NO: 409276 - protein, 408 aa, unidentified
MIMRTIIGIDVSKNKANIAVATDLVVVKELAISLDALGFNELKHVVLQFGGNPEIVFEATGVYSRRLEYFLQQDGLNYHILNPLAAKNRITTGSRLRKNDERDARRLAITEFTEQLEPYLLAYKQDPIYRELTDMNRYYDQLNEDKKRARNRAHRVLQLVFASFGASKDGFDLDTKLSWELLTLFPHAQIIREIGDLNELENRILAAHFKGIGPKRAHDAARKLWKLAAKNGDAVSLSSDNTRQMKVLAEQVLALETAQDQQVLRMTALGKSLPEYELLQTIPGIGSSTAIRLISELGDIRRFNTRQQLNSYVGIDMTEVDSGDHQSARHITKHGNPHARRILYWTVILMINPKMGNNHIRDAYEKRREASSSKKKLIVRQMDRLIKTILYLIKTNQPYSYELAPQSK

SEQ ID NO: 409277 - protein, 404 aa, unidentified
MHPTPTLAGIDWASRSHAVCVVDATGATLERFEVDHSEAGLRTLVGRLRARGVTGVAIERPDGPVIEALLDAGLPVFVIASRQVKALRVRHGLAGNKDDRSDAYILADALRTDGHRLRPLHPDAPATVALRMTVRARKDLVQARVRLVQQLSAHLELVFPGAVSLFADLDSPIAQAFLRRFPSADRAAWLSPRRMTAWLAAQGYCGRRTGAELHARLEAAPRGHTGEAAEAMAAVTLALVRAIGAVREQIEALETRLREQLLLHPDGAIFMSLPRSGRVRAAALLAEIGDCRERFPTPESLACLAGASPSTRQSGQHRAVTFRFACDKKLRDALIDFAQDSRHANPWAADLYARARRGGKSHPHAGRILARAWVYVIWRCWQDRVPYDPAHHRALRRIVLDQVA

SEQ ID NO: 409278 - protein, 385 aa, unidentified
MTIRFKGYKFIPRNYDVFAGLDVDKKSMSITFADHAGAQRALRMAYSPTPLLNYVRKHFPGQRVAFAYEAGPTGFGLHDELVRQAYTCVVVAPSKVPRAPGDRVKSNRLDSRKLAENLRGGQLRGIHVPTAVYRDLRHLVQLRDTHVKQLTASKLRIKSLLLYEGIPFPDPHEKWSARAMRELQTLPCSETVRFKLNDLLDTLHFHFQAASRATKQIRQHCLHDPELEQSIELMMSLPGIGWIVASHLVARLGDPQQIKNGRQIAGFLGIVSSEHSTGDKENRGEITRSGDSRLRNKLIQTAWTAIRQDPELRAFYRRIYQRHPKKVAARKAIVAVARKLTNRIYVVLKEQRPYVIRPDSSIAPLTAEEIIGPRDRLDTAQNDQP

SEQ ID NO: 409279 - protein, 344 aa, unidentified
MNITTVGIDLAKNVFQIHAVDERGKTVLKKQLKRDQVATFFANLPPCLIGMEACGSAHHWARKLTSFGHTVQLMAPQFVKPYVKTNKNDAKDAEAICEAVARPNMRFVPIKNIEQQSVLSLHRVRQGFIKARTAQGNQIRGLLGEFGLIIPQGISNIAKRVPELIEDASNELTGSFRLLVKRLMDHLKELDKQVGELELQIKTWHRESDASRKLEKIPGIGPITASALIATIGNAKNFDDGRQLAAWLGLVPKQHSSGGKSTLLGISKRGDSYLRTLLIHGARSVILSTSKKVDKSGWLHKLLERRHPNVAAVALANKNARIVWALLANDREFRSDYSPAVAAA

SEQ ID NO: 409280 - protein, 367 aa, unidentified
MKKHTPMAVGLTLNRKCERLTIGLDLGDRSSCYCVLDEAGDVLLEQKVSTTPKAMREVFGSMPRCRIALETGTHSPWVSRLLIELGHEAIVAHARNVRLIGESKRKDDRLDAFTLARLVRIDPQLLCPVKHRSAEAQADLIVIRARAALVRNRTTLVNAARGLTKSYGERLGRGNARSMKPKAAEDLSPELKNALGPLMREIQSVSERIRDYDELLESMAQNKYPEAERLKQIKGVGTLIALTYMLTLEDPSRFRKSRDAACYVGLQPGRRNSGQSEPQMRISKEGDPYLRALLVQAAHHILGPWGVDSDLRRWGMKLAERGGKRGKKRATIAVARKLAVLLHRLWLSGDVYVPLRRIGQAAVPAVA

SEQ ID NO: 409281 - protein, 355 aa, unidentified
MISSKYIGMDVHKESISIAVMNASGKIVMECVIETKASMILQFFDGLRGDLQVTFEEGTSAAWLYDLLKPHVTKLLVCDPRKNASMREGPQSDKIDARQLAELLRLNHLHPVYHGEHGLRSLKELVRSYLTITKDLGRVMTRVKAIYRSWAIPCSGKQVYAARHRAEWLAKITEPGVRRRAEFYYQQLDALRAVRQEVRRELLAESKKHQAWKLLCQIPSIGPIRAAVLLGILQTPHRFRSKRQLWTYGGVGIATISSADHHVVKGQLERKKKQVEIRGLNRNYNHDLKNLFKGAAIVAASKPGPFAEFYAALLAKGMRPEMARLTLARKIATIVLIVWKRGACFDAQHLKPQTA

SEQ ID NO: 409282 - protein, 391 aa, unidentified
MIYVGIDVSKDKHDCYIVNSDGVVLADVFSVENNLDGFDLLLQRLKSVAPDLLNVKVGLEATGHYSYNILGFLLDKGLATFVLNPLHTNLFRKSTSLRRTKTDRVDARTIAAMMSSGIVLKSYTAISYHNEELKSLSRYRFDKVRQRAKLKQAVSRLVTILFPELEKLVPSLHIASVYALLAELPGAKQVASCQLTHLTNLLSAASKGHYDRSKAVELRNAARRSIGSAMPAKSLELQHTIRLIRELDAEINEIEAAIKQFMDQIASPILTIPGISYRMGAMILAEIGDFARFDSPDKILAYAGLSPSTYQSGKLDNAYAHMEKRGSRYLRYALYNAAKYVCHWDASFCAYLAKKRAEGKHYNVALSHAAKKLVRLIFALQRSGQPYCPTA

SEQ ID NO: 409283 - protein, 428 aa, unidentified
MFPNSSTTPLYVAIDIGKNVHSYAAYAGPDFSVVLPPCEVRNTRSGFAQFQTWLSGQLASGRYAPVVVGLEPTGVYHEAWAQALSQTFGPQVQLRLLNPYQTKQKRQQLQGGRRRKTDALDDQALAYCLRDGLGYPLRLRPAAEVRFELWAHDFRQVQQERLQLQVRLLTQIDRLWPGALIKVKAFHQAHPHLEVPQPWVQARPLERRFVRLILTYAPNPYTWLDQSPDQICTFFRSHGLRCGPVTAHKLWQTVQQGLKPSPEVASVLAEHLQTDFTRYQQLEGQLAQLRQQAEALVPGSPAAVLTSFPGVHAYLAAQYLAYVGEVQRFQNADQIWALAGFDVAQDESGDRRRKGHISRRGEPGFRLVLFTLGLTTSQACPVIAQAKQRAQRHGKGSIGAVIHAAHKANRICYHLLRQQEPYDPHRAR

SEQ ID NO: 409284 - protein, 410 aa, unidentified
MSYFAGLDWGNVEHAACVVDEQGQVVQRLVVPHTHEGLRALLAALARLGVTSLLPIAIERPSGLVVDTLVEAGHPVVPIHPNALKACRSRYRAAAGKSDPGDAYILADVLRTDGHRLNPLRPASDELRALRALVRTRTDLVTERVALANQLRALLDSFWPGAVAIFADIDSPIALAFLERFPTPDSARTLGPKRLAAFLARNAYCGRRSPQQLLDRLRSAVQGLASEAEQEAKGELVHALAAVLQTLLTQIKKISAAVEHAVAQLQAGQILMSFPRAGKINAAQILAELGEDPKRFLSDDQLAAEAGIAPVTHESGKSRGVCFRYACNKRLRQALTCFADNSRHDSAWAFQVYAKARARGCDHPHAIRILARAWVRVLWRCWQIGSTYDPARHRAALPFLQSSTPTPTQA

SEQ ID NO: 409285 - protein, 378 aa, unidentified
MRFYNQPHRFYCGVDLHARTMYLCILDQAGAVVLHQEVSAEPTAFLEAIAPFRDGLVVACECLFCWYWLADLCQAENIAFVLGHALYMKAIHGGKSADDRIDSQKIAQLLRGGNLPIAYVYPKGLRETRDLLRRRMYLVHKRAEVVAHVVNTNSQYNLPSFGKKLIYARNRQALKITDRFADASVRKTIELNLRLLDALDDLLGDVELYLERTVKLDDADTFYRLRSIPGVGKILALVFLYEIHDIHRFASEGMFLSYARLIRPRKTSAGKVKGGGGAKIGNAHLKWAFSEAACLLARESDQAKRFLARQQKKHGKPKALGILAARLGRAVYQMLRQKKAFDPKRFWNGEPGVTPAQLHKAAVQRPRRAKGSSCVLEA

SEQ ID NO: 409286 - protein, 343 aa, unidentified
MAIVAGFDVHRNQITFDALDTETGELARGRIDSTPDAVRAWVGRFRGQHVDVAVEACTGWLFVCQSLAEVGATAHLAEAAEVSSRRGKKRHAKTDRADARHLRELLCEGRLPEAWLPPAHIVEWRTRTRLRKTLVEERTQWLQRIRATLFHHGVPAADVPQRLLSRTGRTFLERVQLPEAARERITVALAMIEAIEIQLAPLERRLRRLARRQPGCQALMREPGIGELIAPTLLCELGDVTRLSSSRKAVRAVGLDIGVYRSDRRSRVGKLTKQGSPTARWALYEAAQSACLRTSPNNAAYLELKARGLTHTRASLTIARKIARRSFHTLRELGPQALEPVND

SEQ ID NO: 409287 - protein, 315 aa, unidentified
MSVFVGIDVSKEHLDWAAHDGSGSGRVTNDEPGLADLIARLQALRPERVVLEATGGLEVAVVAALSVAEMPVAVVNPRQVRDFARATGRLAKTDRIDAICIALFAAAVKPALTPMPEAETLELELLLSRRRQMMTMLVAEKNRLSGLTGPRRVTRVVTSIERIIKALTRELDRIDDELKTKIQQSELWRAKDKLLQSVPGVGPGTARALLADLPELGALERKQLAALVGVAPFNRDSGKVRGRRAIWGGRAAVRSALYMAALTARRCNPVIRPFYERLKAAGKPTKVALTACMHKLLTILNAMVKANRTWAPNPG

SEQ ID NO: 409288 - protein, 410 aa, unidentified
MNSTRNKKIEQVKETTMIVGIDIGSEKHYFRAFNWRGIELTRKPVAFSNSMEGFNSFYNTIVELIQKSELEEALVGIEPTGHYWFDLGQFMGEKNIKFVMVNPHHVHKSKELDDNSPSKNDRKDPRVIAGLVRDGRYFYSYMPTGVYAELRNASNRRFVLVEEQTRAKNRLQKWIAVYFPEYKGIYTRIDAKGGLLVLKQAPTPEEIVRLGVEGIIKIWKDAKLRGNGHKKAMLILHAAMKSIGLKAGLTEARMEIQDLIEDYELQTKRLERVNDLIKELCQQIRYADKLLEIKGIGITTVAGFIAEVGDITRFDSAKELQKLAGLELVADSSGKHNGKTKISKRGRKRLRYLLFEAAISVVGKNKEFKKIHRYYTTREKNPLKKMQSLIAVACKLIRVFHVILTIICTI

SEQ ID NO: 409289 - protein, 355 aa, unidentified
MNQEKYIGMDVHAATISVAVKNAQGKLLMECVLETKAATILEFIQGLRGTLALTFEEGTLATWLHDLLKPHVNRLVVCDPRKNALMREGNQNDRVDARNLAELLRTNQVKAVYHGKHGTRALKELGRSYLTLTKDTTRVMNRIKSVYRSWAIACAGTSVYSRRHRAEWLAQLVEPGVRIRAEHLYQQLDSLEPVRQAARRELLREGRQHAAVKLLRQIPAIGPIRSALLVAILQTPHRFRTKRQLWAYSGFAVQTYDSGEYRVVRGKLHRNRERITVRGLNHNHNHDLKNLLKGAAISAIERPGPLQDFYAARVEKGMRPSLARLTLARKIAAITLIIWKKGASFDPKQLQRQAA

SEQ ID NO: 409290 - protein, 359 aa, unidentified
MASNRKSTNHRANSSELASIGIDISKDVFHIVAFDLEGKIVVRRKIRRMALVETFKKLPRCVVGLEACLSAHYVSRSLRQLGFQPKIIAAKHTKPFVKGQKNDYNDAEGIAEAVLRPNLRLVSEKTQDQLDLQAMHRVRSRLVSRRTATINQIRAFLIEQGITVRPGAQTLRKSLFAILQNRVDEISPRMSSIIVGLYEDWLWLDERIESLTKEIDKIATVEENCRRLMTVPGIGPIISTAMVAAIGTGEAFERGRDFGAWLGLVPRQFSTGGRTILGRISKRGNRYLRTLFVQAAHVILMRPHHWEKFSFGPWLQQASTRLHKNKLAAALANKLARIAWSILRNGKPFDTHQLSSSAI

SEQ ID NO: 409291 - protein, 430 aa, unidentified
MTKLSSTPADAVLVAIDMSKHRQEVLIERPEGGRRRRMTVMATKTDYDRLASDLADIGRPIVVGFEATGNYHRTLAHRLLTAGFELRLISSVALARTREALHNGWDKNDSKDAQVILHMLRIGATQRYVDPLAAGINDLQEMSKTHEAISKAKTQTWHRILTHYLPLYFPEIERFAGNSRSDWFLALLERFPTPASMTALGQEAFTSEAWSLVGRKVSKARLINDIYETACASVALPVDEDSVAIVMFRMIIAQARSLIRQRDEIERTAHAMLSENRDYQLLRMIPGIGPINALTILAEAGDLRRFAHHRQFLKFCGLDLATCQSGTFRGRTKLSKYGNARLRRTFWMAAQVAARQRDNSFRDKLGRYMEGHASDPDRRRKAMTALTAKMARVAHAVIKTGTEYRPFLERADTRWKDPSLLCREGATATL

SEQ ID NO: 409292 - protein, 342 aa, unidentified
MSHEKYIGMDVHQATISAAVMDAHGKLLMECLLETKASTIVDFIQGLHGTLSLTFEEGTSAAWLHDLLKPHVSRLVVCDPRKAALLKEGNKSDRIDARKLAELLRTNQLKAVYHEEHGIRALKELGRSYLTITKDVTRVMNRIKALYRSWGIPCSGTSVYAPRHRAEWLAKIVEPGVRVRAEYSYQQLDSLQPLRLQARRELLRESYQHPAVKLLRQIPSIGPIRAALLVALLQTPHRFRTKRQLWVYSGFAVETHDSGEYRYVRGKRQRNRERISVRGLNDNHNQDVKNLFKSAAISASTRPGPLHDCYVARVEKGMRPTMARLTLARKIATITLTIWKKE

SEQ ID NO: 409293 - protein, 414 aa, unidentified
MLKIVYRVCCGMDVHKSFVVACIASTNEQGVTAYKSKRFSTFTGDLRRCAAWLSENNCKDVCMESTGKYWIPIYNILERTCNIVLAHPKYVKAIRGKKTDKRDAKWIADIFKHDLVAGSFIPPADIRQLRDLFRYRWKLTNFATGEKNRAQNCLTVSNFKLDDVFSDVFGKAASAITARILKNPSEKITDVSGFRTKRMKATDEEILAAVDGEMCAEQAEKLRIIRSHMDSLELCKLNLESLILSTAEKYLPQLELVMTAPGIQSFAAIGIISEIGVDMSVFPTSKHLCSWAGLTPQNNESAGKKKTTRISRAGAYIKPLLVQCALSAIRAKQFPEVRNRYLALKKRRGHKKAIIAVARMLLTAIYNMLKKNEPYNSELYRKGDRPPAHREVSVEEAVFILQRQGYLVSAPPTP

SEQ ID NO: 409294 - protein, 383 aa, unidentified
MTQALGTVIDYERTLILAIELSNTSWVLAAQIPGLPGVKAKRSIDPTPEALMAAIENYRARAEKAGRNVDRVIAVYEAGWSGFWLVRWLAKHGVEEAHVIQPSSVPVDRRARRAKSDGIDAELLLRTLLAWLRGEPRVCSMVPIPAEADEDARRRVRERTELVSERVGLVNRIGAVLATLGAGEYNPLRRDRRQRLDELQTALGDSLPTNAHAKIARMLDRLELLLIQITELEQSRDAVLEDESPDRASSMIQQLAKLRGIGVQSATVLVREGFVREFANGKALGSYAGLTATPYSSGGIEREQGIGKAGNARLRTVMVELAWLWQRYQPGSAQVRWFRERGGTGRRVRKVMVVALARKLLIALWRFATQGVVPEGAVMKPAS

SEQ ID NO: 409295 - protein, 342 aa, unidentified
MDHFAGLDVSVKDTSVCIVDGTGKIVREVKVASEPAALLPVLTSPTYHFKRIGLEAGPLSQWLYSALAEAGLPAICVETRHMRAMLKVQINKTDRNDARGMAQMMRAGLYRPVHVKTLRSQKLRMLLTHRKLLQSKAIAIENDLRGTLRNFGLKVGMVGKLKFEPRIKELVENLPDLAVLVEPLLVVRRVLREQLVIIHRRLLAIVRDDEVCRRLMTTPGVGPVVALTYRATVDVPARFRKSKSVGAVFGLTCAKYQSGESERSGRISRCGDEMMRVMLYEAAQTMLHSKRWSWLKAWGMKIARHRGMKKAIVALARRLAVIMHRIWVDGTEFQWTREAAVT

SEQ ID NO: 409296 - protein, 426 aa, unidentified
MFENSREGFRLLIERIRTYSPLEPVSVLLERTGPYHRALEQYLQELDIPLYVMQAQRRPAGMRKTDKRDAFALANQRYSQLELGVPPPDAAVQLIRRLVPPPDAAVQLKGLIRQRYALIHATTRRKNKLTAICDDLFPELTRILKDPTAPVALALRAQFPTPHALATASLSTLQQLRGGAHSLCDAKLMTRQQLAAASIGAKDFARQRSLVLEPAQWIRERRLVREHIAPLETEITRIATQAREGQSLLSFPRIGSVTAATISAAVGSILNFPSASARKSYFGWAPVVVQSGSALDHTRLTRGGTRTMKQVVFLAVWQALREHDSEWAKLYDRLVKANCRDDERTQSYVGKRRVIGRVAGQMTEALSALLKRDAEVLSEVLPGQEPPAPLLYDPQAHRQHRQGQYRPLTSTPLPNTIPILRPRSPE

SEQ ID NO: 409297 - protein, 355 aa, unidentified
MERKIRQHVLEGKEIFVGLEDSKRTWKVSVRSDNLEVHFTSMPAQYRVLREYFANRFPGCKVNVIYEAGFRGFWLYDLLTADGIFCVVTPPSRVTFEHQRRRKNDTIDARRLATIFETGDYKSCHVPDIERREDRQISRILVGLQKDITRVRNRIRKFFDCYVEGSEFPAGAWSVGDYERGRSLRLSAVLRRCVDVWYSALDHMLAQRKELINELRRLSRKVRYCKAVKLLSSAPGIGWQTAIRLVLDWGEDWSRFGSSKQIACYSGLISSEYSTGETEYKGRITGESQPFVRSWLVQCGWSAIRKDPVLLAKYQRVWRNSGSKKKAIVAVSRMLVVRLRALMITQTPYCIGVAA

SEQ ID NO: 409298 - protein, 372 aa, unidentified
MQRTTFVGLDVHKPWINVAVLLPGHDTPIEWRIVNEPQAIRKILKRVASLAPGDVRYCYEAGPCGYALQRQIISWSEASCMLVAPSLIPRKPGERIKTDRRDAKKLALLFRAGLLTEVHPLTEEDEAARDLSRAREDLREDLVRARHRISKFLLRRGITFIPGKRAWTLAHRRWLESLRFDNPADSVVVADYLLAIDHIEQRAKALLVHVERLALDPRYASAVATLRCFRSIDTISAVGLAVELHNFERFTAARRLMSFVGLIPGEHTSGEKRRLGAITKTGNSHVRRLLIEAAWNYRHQPHVGTSLRNRRKGQSPRLIALADRAMLRLHRRYEQMTHRGVLPQKAVVAMARELAGFIWAALSPLADQPAAH

SEQ ID NO: 409299 - protein, 426 aa, unidentified
MSNKLVAGIDISKAFSDICILSPRNEIIVHTKINNDYEGMKSIDLTFKKLETDYNTQLVVIMEATAHYHQLLDNFFRKLNYEVIVINPIQSNAIKNINIRKVKSDRTDAYNIALLYRLKNYSETETHADIIISIKKLCRQHKELTDEIVEHINRLTGFLDTSFPDFRKVFTDLQGKTALTILAEYPTVTAILDPELDKAKIINQIKTISHKSESYASKKYDKLYQAARNSSEICISNLSTSILIQTTVAVVFSLKEALRAIDDEITRLSIMDKQFQTNVKLLQTIPGIGEYTACVLLSEIGNIENFSKPKQLVAFFGLDPGVSQSGSYNRKNNKISKRGSPYVRTILHMLAKANVYSNRNREYPNPVMRDYFEKKIVDKPYKVVMCAVMRKMVQIIFAVLRDQKPFELRTPDDHQKMIRLNNKQAA

SEQ ID NO: 409300 - protein, 294 aa, unidentified
MNKDIKYFGIDISHLVFDVTDSDGNYYQFKNNVSGFKKFIKLLGPNSHCVMEATGYYHYQLAYYLFENGKIVSVENPLSVKRFIQMGLSKIKTDKSDSKLICAYAEQVDLTLWKGSSKAVQESLQIVRALSVYTKQRTMIKNKLHGESVLGEPSKAVVKSLKRSLKQLDKEMKTLENQLLIIVKESHQDLFARIKTIPGIGRKTAIMLIVLTGGFERFSSAGELCSYAGLTPMVRQSGSSVKSRPRISKMGNQKLRNLLFMCSFTACKYNKACRDLYERIVAKGKSKKLALIAV

SEQ ID NO: 409301 - protein, 350 aa, unidentified
MRIIGCDFHTRYQQIAMMDDQTGELVERQLDHENGEVQKFYAELPKPARIGVEATGYMQWFERLLAELGHELWIGDAAKIRASVVRKQKTDARDALHILELLLQKRFPRIWIPSPANRDVRQLVVHRVKLVQWRTRVMNQLHAMAMGQGLRRKKKLWSTVGRQELEALQLGPWASRRRAELLQLLGQLDGSIQELERAVEREAARNAAAALLMTHPGVGPVTSLAFVLTMGPSSRFQRGKQVGSYLGLNPRERSSGGQQRLGTISKQGNSMMRWLLVEAGQTAARYDAELRRVYQRLKFRHGSSSAKVAVARKLAVRLYWMLRSRANYAQLVRVRGSSSTAVVPETGSGR

SEQ ID NO: 409302 - protein, 315 aa, unidentified
MNEESVKFVGVDVAKDHLELFSPGLKLPTRLNNNPKTIAAWLQRLLVSSPAIHVVCESTGGCENALMRACWQAKVPVSQLNPARVRAFARSQGLLAKTDAIDARVLADYGRIFRPQPTPEPSAQQVRLGELVARREDLKTQRAAESNRLSYLQDAALRRMIKSHLRWLDANIAQIEKLMAETISKDPVLRHKRQVLVATKGVGNLIAATLLADLPELGSLSRQAAPALAGVAPFNRDSGTLRGKRSICGGRATARKALYMAALVGSRRNPILCDFYQRLRQKGKPGKVALTALMRKLIIHLNSQLKIHTPQPSPC

SEQ ID NO: 409303 - protein, 341 aa, unidentified
MDIVVLGIDLGKNSCSLAGLDASGRVILRRRMRRSSVEGFVKGLERCIVAMEACCGAHHLGRVFAAQGHETRLMSPEYVRPYVKAQKNDELDAEAIAEAATRPTMRFVAVKSQSQSDIQSLHRARERLVSERTALINHLRALLLERGIVAPQGRRKLQEELLVFADEDGIEALNPRIRLLIEDLRSEWRALDERIAAFDAEFVRMAREDEAVRRLTTIPGIGTINATALAAAVGNAQAFGRGRDMAAWLGLTPRQMTTGGKSRLLGISKRGNRYLRKNLIHGARAVLPYLVQRETPLGRWARGLLARAHKNIVVVALANKLARIAWAVLARGRTYEAASAA

SEQ ID NO: 409304 - protein, 368 aa, unidentified
MQELITGFVGLDAHAESTAIAVAEAGRAAPRFVGSVGARVAELTKALSKLGAPQSLCVVYEAGPCGYVLARELTSLGYRCEVVAPSRIPRRPGERIKTDRRDALNLASLARAGELVPVTIPDERDEAIRDLSRARVDAVRARLKARQQLKALMLRHGQRYSGKTSWSAAHERYLARVSFAHPAQDIAFTEYRQAVGEGEARVQRLRESLTREVEHWRMHSLVSAVMTLRGLDLVAATTVVAELGDLRRFAHPRELMGYLGLVPSEHTTGSKRRLGAITKTGNGHVRRVLIEAAWNYRFPARISPALQMRQERQPPDIRAIAWRAQLRLNHRYRRLKARGLHHNKICVALARELAAFVWDIGRHVAPSP

SEQ ID NO: 409305 - protein, 344 aa, unidentified
MDHFAGLDVSVKDTSVCIVDDAGKIVREVKVTSEPAALLAVLKNPAYRFKRIGLEAGPLSQWLFSALAEAELPVICVETRHMHAVLKAQINKTDRNDARGIAQMMRVGLYRPVHVKTLRSQKLRMLLTHRQLLQSKAIAIENDLRGTLRNFGLKVGVAGKVKFEARIRELVANLPDLTALIEPLLIVRQVLREQIVILHRRLLAIVRDDDVCRRLMTTPGVGPVVSLTYRATVDVPARFRKSKSVGAVFGLTCSKYQSGEVDRNGRISRCGDEMMRVMLYEAAQSMLRSKKWSWLKAWAMQVAKRRGMKKAIVALARRLAVILHRIWVDGTEFRWTREQAAAAA

SEQ ID NO: 409306 - protein, 422 aa, unidentified
MNFGPVAGIDVSKRFSDMCILSPDNKIFAQEKIYHDETSINRANTLLQKAEQIFSSKPVIVMESTSHYHLILFQFFSEHGYDVIVVNPLQSSSMKDFSIRKRKTDRVDAFKLAMMYRTKTLRPSQVPQTALRALRQLCRERVEFLNDVSSYKNRLTAFLDQVFPGYDKVFSDVGGITSCAVLVHFPTPAILLAAEEAELVEVIAAASKSGYGFAKKKAELLISTAQKAQTLGIHSCADETLIVCTIQMLRTLSESVFQIEKAIDNLLVQMKEIQNNVSLLQSIPGVGSHSAALLIGEIGDFTLFKKPKQLAAYFGLDPSERQSGTFRGTKNKISKRGSPYARASLHMAVVNAICKHGKQPAPNPVLLSYYEKKCKNKPAKVALAASMHKLVFIIFAVLRDQKPFELKTPEQHAAEQGFVKAA

SEQ ID NO: 409307 - protein, 411 aa, unidentified
MELLGRALGSSALIVAIDPGKVSNRVWLATGEQGLVAEPVSLPVLREGVETLSRLIDAARTPGPPVIGIEATGGLHRAWTSELERRYPGSVRLFAPSQTQAARAQLGWRRHKTDDRDCAALVWLLRQGAGRPAVDRGVDALLGAVRHRRGLVTDRKTLQQRLHDQLNALCPGLSAPTGHGRALALEHPAGEAVLACAAAFAGRAVSVRSLRARAPGRLTQATAEFWAARWRACLPPPGDASLRAERLGRDLDRWHALRADITTLEAQIAKLLATTPGQILTTLPGVGIVRAAAFTAYSLPIDRFPTPEHLYSATGLAPAAWQSATLHRRGRISRQGLAEHRDALMSIAWGLSQHCAAFRDRDQELRARGMQPIQARVALARHACRLAYALLKTQQPFDETRYRQARHSRGR

SEQ ID NO: 409308 - protein, 310 aa, unidentified
MIIAPGFVGIDVSKHHLDVFDATAGVVARFGNTAAALAELAHDWAQRDAFVLFEATGRYDLDLRHVLTAAGVRFARVNPARARDFARSAGFLVKTDAVDARMLAAMAQCLQPPAAEAVREARERLACLNKRRDQLVATRQQERTRERECRDPVSRQSIAAHLAWLNAAIVAIEAQIAASIAQEPDLEQDRRLLTSVPGVGSVTAATLLALLPELGRRSPKQLAALAGLAPYNNDSGTRRGQRSIRGGRKRVRDALYVAAFIATRHAARFSAFFKVLLAAGKPRKLALIAVARKLLTVLNAILRDRQPFHA

SEQ ID NO: 409309 - protein, 341 aa, unidentified
MPKNTFFIGLDIAADDFVASIYQSPGQRVITKESIKNNPDGFKMLTTWLKEHMINPSNSIICMEATGVYSEAIAHYLVTYGFRVSVEPPLKVKRAFDPVGHKTDPVDSRQIAEYAYRYSDELKFWRPREEIVEKIKHLLTAREQFTKQSTAIQNSIHAYEKHIIQVPLIVKAHHQTLKELKRHIAEIDKELDRLIRQNPTISKMTNQLKSIPGVGLLLAADLIATTGAFKYISNYKTLSAFLGLCPYQHRSGKSVYRQPHMRFFGPTYSRKLLMLAARSCATHKMPFRKYYLRKLAEGKAKQLVLNNISNKIIKIACSLIKNNSNYVESYRSVNPVCFNLA

SEQ ID NO: 409310 - protein, 420 aa, unidentified
MKVVYQTCCGVDVHKSFLVATIIKTTSGIEPSYQKKRFSTFNNSILQFKDWLLKNHCRDVCMESTGKYWVPVFNLLEDEINVTIANPKWVKAVKGNKDDTKDSKWIGDLFRLGLVPGSYIPCKPIRILREFTRYRYKLTSCRTSEKNRYQNALTVCNVALDSVVSDIFGKSAASVIDYLIEQSGNSVNHEEIASRLLRSLKKKSDSIIESIEGYQMTDSQKYRMRLVRAHLDYITSTINDIDTMLDSLIAPYENAVQLLCTIPGVDRNSAVTVISEIGTDMTPFSNSKRLCCWAGLTPGNNESAGKKKSVRITRAGVYLKPALVQVAHAAVKSDKSPYYKQKYERIMKRRGKKRAIIAIARMILTAIYQILSTGEVWNPTDLYKIDMPEPLKEKQREKAIRQAKKLLISEGIISESQLAS

SEQ ID NO: 409311 - protein, 344 aa, unidentified
MKLHVLGIDLGKTVFHAVGLDATGKVVIRKKCSRRQLLVFTANLEVELIGMESCSGSHFLGRALREQGHEVRLMPAQYVKPYVQTNKSDFLDAEAIAEAVQRPRMRFVPIKTEEQLDLQALHRVRERWVMRRTAVVNQIRSLLLERGLTLPKGRRYVDQQLPRILEDAELRLSGSFRVLLAQLKLELDQLGARIEEMDRVIQKTAKENEDCQRLTEIPGVGPVTATALIAAVGNASAFQKGRNLAAWMGIVPREYSTGGKQKLLGISKRGNKHLRTLFIQGARSVLQQRHKQTPGLNHWLEQLLGRTHQNVVIVALANKLVRMAWAVLCKNERYRAPVVAATTN

SEQ ID NO: 409312 - protein, 356 aa, unidentified
MDENITANGSLTIGLDLGDKHTEACVMDGNGEVLETFRVRTTQVALDRALGRFERARVVLEVGTHSPWVSRRVTAAGHEAIVANPRRVRLIAENDSKNDRFDAELLARLGRVDPSLLSPIVHRGEQAQRDLVLIRARDGLVRARSQLINQVRGFAKSLGSRCPASSAEAFPRRVRAALPGDLFPGLSTMLAMVEQLTAEIRSMDRAVERLCKERYPETAVLRQVKGVGAITALGFVLTLEDPHRFAKSRSVGAYVGLRSRQRDSGEQRPQLRITKAGDALLRRLLVTAAHYVLGPFGPDTELRRFGLRLAERGGTAAKKRAVVAVARRLAVLLHRLWVTGEVYQPLGYQSCVARAA

SEQ ID NO: 409313 - protein, 421 aa, unidentified
MKSSVASKVRQVPAGYIVVGIDPHKHKHAAVVITQDFVIQARFKFSNTRQGFEVMLERVRTEMVKTGCRGVIFAVETGGHYWRNLAYFLDDKGIPFRFISQFTLKRRREGKDLNRRKNDYRDSEVAAQLLCTGEFTESRLPQGVYAELRTAHNAYRRLVKERTRITNLMKGLLDALFPEFTHVFKDPCGLTALSVLSTCPIPSVIAGMTAQEFVAAVEARHQGRLMRRKLGMLHHVAETSIGIKAGARSVACEVSFLVEKLGLIRRHICSLERTLVSLVDETEEGKYLLSIRGLNYIAVAGLLAELGCFKLYRSAKQMIKMAGSNPTESESGGKRGTHTPMSKQGRPVLRYCAWTSVIPMLRLNPDFKAWAKKRRERPVYANPLNGREVVGAALNRLLRLAFALVKKQTFYQTPELVRIAR

SEQ ID NO: 409314 - protein, 341 aa, unidentified
MGEVTTVGLDIAKSVFQAHGSDASGSVVFRKKLSRARLLAFFAAQPPCVVAMEACAGAHHWGRELMKLGHTVRLIPPAYVKPFVKRQKNDAADAEAICEAAQRPTMRFVPVKSREQQASGVVFRARDLLVHQRTQIMNALRGHLGEYGHVAPKGVMYVDRLIAEIEDSDSDLPEAARASLLGLVRMLDRLDTEIAALDAEIARRAKEDPVARRLMTIPGIGPVTAAALTALAPEPQAFRCGRDFSAWVGLTPLQRSTGGKQKLGQITKAGERTLRRLLVIGASAVIKQALLKGAPPGSWLAQMLARKPRMLVAVALANKTARIVWALLAKGGIYRAPALAA

SEQ ID NO: 409315 - protein, 376 aa, unidentified
MQAAQRSGYEAGTVLYMAMELSNRSWKLGFSDGAKRRRKSVEARNRGQLLEVVAQAKSKLGLDAQVRVVCCFEAGRDGHWIYRWLSSEGFEVLEIDSSSIEKPQGRKHVKTDRVDVVKLLDLLLRYCWGLRQAFRVVRVPDEAAEAAQRLHREDEYLLKQRSRVSNRIKSLLVTQGIEGFALRGDVPARLERLRLWDGQRLSSELKAELLRLYAQYRVFDEQLREVAAAYEAELSMATPVGHKRRQLEQLKSVGPKTSRILCAEVFGWRRFANAKQVGAMSGLTPTPAQSGDARTEQGISKAGNRRVRRAMIELAWLWLRWQPDSALSQWYQRRFAQGGPRARRIGIVALARKLLIALWRYLEDGVMPEGAVFKAV

SEQ ID NO: 409316 - protein, 316 aa, unidentified
MKENTATVYVGIDIAKATIQVHREGSQAELANAPAAHGKLCKELKSFPAVHVVCEATGGYEQGLVGALHKAKIPVSVVNPAQVRAAARACGQRAKTDRIDAAMLTDYGQRYQPKPTPQASRVQQQLVALTQWLKQLVQSQMLTKSQAEHHQDRFVKQQHQALLDYYQSQIKAVEERLEALMEKDQALRQRVEALDAIEGVGSRTALLVLAHMPELGQLNRQQVAALAGLAPWTRDSGAMKGLRCIGGGRSQVRLALYMPALTAMRRNPLLSAFYQRLIAKGKPAKVALTAVMRKLLIYMNHKLKALDAVSAVQVTA

SEQ ID NO: 409317 - protein, 337 aa, unidentified
MLAANGEHLDTERFPNTHAGRSRAIAWAARRAGGDLGALWVIEGTGSYGALLAGTVLRSGYRVVEAPRVRSYAAARRGAGKSDPLDAAAIAAAALPLEESRLRIPRQDEGVRAALRVLVATREQMTVERTAKVNALIALLRTVDVGLDARKPLADSQFIEISHWRKREEDLATATARTEVVRLAKRLVVLDAELKDKEARTAELLEASPAAVLLEETGVGPITAAVVYTAWSHLGRVRSEAAFAALAGVNPIPASSGNTVRHRLNRGGDRRLNSALHMATVVRMVHDPATRAYAERRKVEGKTSREIRRCLKRYLARRLYRILNAHHENVSALPQAA

SEQ ID NO: 409318 - protein, 407 aa, unidentified
MDLLKTVFGIDVSSWKSNVCIMVNDQKVNDYAISNDMVGFNQLLGDLKQVTKPQIIFEATGVYSRRLQAFLDMHELRYVMMNPIEAKRKTKDDPHQNKTDKLDALYLAKLQSEHPQRLAYVQSKEYQELMANNRIYEQASHDLITNKNRLHKAIQLTFPEIEHLLANPRGKNYWSIVLRFPHPDIVLETKEADIIDFLKGLSGIGKKRANDITQSLIRLAKVACPAVKKNSAHVRGLKMAINNILGAEEECQSALQEMAKLAPKRDLEILTSIPGIGENTALRIISELGDIRRFNNPSQLNAFVGVDPQVYESGNLTAHLSISKRGTAIGRKVLYLAINQIQSAKKAGNPCHIADYYEKRKRSSETASHKKATIASIHKLLRTMFALIKNDQLYSYDVAKHNQRLLS

SEQ ID NO: 409319 - protein, 411 aa, unidentified
MRLFAGDDWAEDHHDIEVMDAAGKVLAKRRLPEGAAGMSQLHELIGRFLPEDADEVEVVIGIETDRGPWVAALVAAGYTVFPVNPLQASRYRERHGVSGAKSDQGDSHMLADMVRTDSHQLRPAAGDSPEAAGVKVVARTHKTLIWDRTRQVQRLRHQLREYFPAAIEAFEDLDAPDVLELLGKAPDPARAARLTRAQISAALKRARRRNIADKTDAILAALRGEHLTQPAALTVAYAATVRSLVAVITTLNEQAKLLEEQVKEHFGRHPDAEIYQSQPGIGAILGARVLGEFGDDPRRYVSAKSRKNYGGTSPITRASGKKKVVAARFIRNDRLIDALMSWAFASLNASPGARAFYDQQRAKGLEHNDALRRLANRLVGILHGCLKTRTLYDEATAWGHRENLPQSSVAA

SEQ ID NO: 409320 - protein, 314 aa, unidentified
MTEGYVYVGIDVSKAWLDVAVEPAGQNWRTENDPRGINQLVGRLGELAPKIIVVEATGGYEANLVEHLCEAQLPVARVNPGRVRRFAQGLNWLAKTDKIDARLLACFGEKANPRLTKLPSEHQRRLAALVKRRKQVLEMLVGEHNRLENADGEVSPYIQDMMTMLQKQLDELERAIGSLIEDTPDLKGRHDVLLTVPGVGQVTASTLTSQLPELGSCDRKEIAALVGLAPFSHDSGKKRGQRAIKAGRPAIRSVLYIATLSSIRFNPVIKKFYDRLLGYGKETKVAIVACMRKLLTILNAMIRHNQPWRPDSAS

SEQ ID NO: 409321 - protein, 429 aa, unidentified
MNQKLDCAAFVGVDWGDQEHAFCILPIGGGAPLRGSLKQQPEAIAAWVSQLRQRFGGRPVAVCLEQSRGALMYALMQYEFLLLCPINPTQLAAYRRALHPSGAKDDPTDAELAARFLRDHRDQVRVWRPDDEISRGLRMLSQQRRDWVEQRVALENELRQRLKETYPLALQLFPSDLHAEGCLAFLAKFPTLKELQRASPQQLAKWLPKRRRRADDPPAEELCHEQIRTIRQAMPLTTDRAVIEHARLVICHVAAQIQSLNRAVAECDQKIAALFAKHPDREVFSSFPGAGSAIAPRLAAAFGTDREKIQRAQDIQQMSGIAPVTRRSGKTTVVQIRWACPKFLRQTFHEFARCSTKFSAWAQAYLDMRRAAGTPYQVIIRALAFKWQRIITCCWQNRQPYDEQRYLQSLRARGSALVRFLPTHGAENP

SEQ ID NO: 409322 - protein, 374 aa, unidentified
MLSLNEERVVLQKLNSTGTLIQRTTTEAAQRHMYYIGLDVHKKTISYCVKDASGRVHQQGKIGATRIELDGWMRNLPRPRTIAMEATIFTGWIYDHLLPHAEQVKVAHPLMLRAIAAAKKKNDRIDAGKIADCLRCDFLPECHMAPTQIRDRRRTLRYRHLLVRQMVQMKNRISGLLMETGVSHNKQRLHKVGYFRELLATSEEVNESIRPLLRLSRETIVRLQKTEYALVSSLERDPMLADRIKRLRTIPGVGPITALTWALEMGDVSRFRSIRQAISYCGLCGDEKSSADKVMRTPLSKQRNKHIQRVLVEAAKLAPRQDHELARVYETEKQKGNANRATLAVARKMVAYLLAVDREAREFVPAEQYKTAVA

SEQ ID NO: 409323 - protein, 343 aa, unidentified
MGEVITIGLDTAKSVFQVHVDAGGAVVIRKKVSRAKVLEFFSSLPPSLVGIEACPTAHHWSRKLQAQGHTVRLMPPSYVKAYVKRSKNDANDAAAICEAVTRPSMRFVPTKSEQQQSALMLHRSRQLLVRQRTMLSNAIRGHLAELGIISAKGRNGTAELIEILTNEKDDRIPAAARLSLTILARQYAAITTEIGAIEKHIHAWHRSCEESRRLEEVPGVGPIVATALVAEIGDWTAFSSGRSLAAWIGLVPRQHSTGGKERLGRISKQGNRHLRWLLVCGAMAVIRYARRHGTKRPWLIRLMGRRPTKVAAVALANKIARIAWAIMVRGERFKEMKLLSAAA

SEQ ID NO: 409324 - protein, 344 aa, unidentified
MDHFAGLDVSVKETSVCIVDDTGRILREVKVASEPEALLQVLRNPAYRFKRIGLEAGPLSQWLFSALAEAELPVVCVETRHMQALLKAQINKTDRNDARGIAQMMRVGLYRPVHVKTLRSQKLRMLLTHRKLLQSKAIAIENDLRGTLRNFGLKVGMVGKVKFETRIKELLENLPDLAELVEPLLIVRRTLSEQIVILHRRLLAIVRDDEVCRRLMTIPGVGPVVALTYRATVDVPARFRKSKSVGAVFGLTCSKYQSGEIDRSGRISRCGDEMMRVMLYEAAQSMLRSKKWCWLKAWAMQIARRRGMKKAIVALARRLAVIMHRIWVDGTEFRWTREQAAAAA

SEQ ID NO: 409325 - protein, 412 aa, unidentified
MKRIYQRCCGIDVHKATLTACVRVHGAGRKLSQEIRSFGTTGDELLSLHDWLMTHRVSHVAMEATGVYWKPVFYVLEQGFTLLLVNPADVQRMPGRKTDVSDAAWLAQLLENGLLRPSFIPPRAIRELRDLVRYRSELKHDHTRVANRLHKVLQDADLKLSSVMSDILGVSGRQILRQLAAGHSDPAALAELARGSLRAKRPALRQALSGRFSEHHAFLIGQALTELDNLEESMSALAARVEQHLVPFAQQIEQLTTIPGIKRVAAAVILSEIGTDMSCFPDTAHLASWAGMAPGNHESAGKRRRAKARHGNRWLRTILVECGHAAGRTRDTALAAIYRRMIIRAGRKHAAFVTGRHILNIAYHLLTQHDTYRELGPSYFEQRRAEQLKRRCLDQLRNLGFQATLAPLPTAA

SEQ ID NO: 409326 - protein, 330 aa, unidentified
MGWTIKRRCIIGIDVSKYSLDCFYYPEETIHQEVNTNRGIDTLIRNLKNISPDIIIVEATGQYHRLLVEKLHHSLLPVKVVNPRQVRDFARSLNKLCKTDAIDAKILVEFALSRYIIPDTPKSEHGTKLSALLVRREQLQFLITQEKCHIESTEGQYAHYIEAILDTLKAQLKEIDASISQVVKKDEKFAQDNKIIQSIPGIGPIVSATILTECPEITRIGRKQLAFLVGVAPFNRDSGRFRGQRHIAAGRAKIRKVLYCAMRPCLRWNSTVRNWFEHFLSSGKPYKVAVVACMRKLLMVLRAMLISQRRWHPSLKEDAETIWNNLDDFL

SEQ ID NO: 409327 - protein, 373 aa, unidentified
MPKYSTAFGMDVHLRSTTVCALDADTGEAVTRRFPGNPWGEIAGWMDGFPGPSLAAYESGYLGFAPQRELAGLGVECVVAAVSKIPRSAADSASKNDRNDAARMAKAILAHDISPVWVPSPEVEGIRDLAGAHGGATARLATAKQRLLAFLAKRGFVYGGTTPAGNPRKYWTYDFLRWLDKVRPEDDGGVRTLAALRNEVEAAAEARADLLSEYRAAVDASPIAAEVAALQSIKGCAFALAAAFSAEVGDFTRFRSGRQVTAYFGLAPSQRSSGDSVRLGGISGAGNALVRKLAVEGSWCYAAARHQPKLMPRDTGVPLEIRMHGRKGSERLLRRREEMLARGMPAAKANAATAAELVRWLWALGMMCREGAE

SEQ ID NO: 409328 - protein, 464 aa, unidentified
MVLPEMECPNGSLPMFNKQSPFGCRSSQNLKIMEKIRNNVSGIDIGAKKVFTAVEGQPVVSHFTFTEDFLKLRDYLIQQKVESVAMEATGVYWVILYEILEEAGIDIWLVDGRQTKQVPGRKTDVKDCQWIQELHSYGLLNRCLVVEADIKELRSYLRLREDHIRSSSMHINHMQKALTQMNIRLKEVLSQLHGKSGIAIIEAILNGERDREVLVGLCHISILKGKRDLVYKSLEGRYTESGLFALKQAYDAYKFYQHQIQQCDARINTVLNRMGKSGQGQNTDQKRKPIRHHKPQVDHLGSNLLNIFEGKDATLISGITDYSWVQLLSETGNDLGKWPSEKHFTSWLGLSPGQNDSGKKKKKVKKKGRPVAGQIFRTIAQGLINSKNIAIGAFGRRLRGRKGAAIAIKAMARKLAILYWRIMQKGLDFAEKGIKKYEEQLSAQKLKTVMRLAYELKLNISHYQ

SEQ ID NO: 409329 - protein, 361 aa, unidentified
MEVLYPRCAGLDVHARSVTACVRIASGPDVTYQHRTVATTTRALLELADWLAASLCTQVAMEATAVYWKPVWHILDGQFTLVLANAMHIRHVPGRKSDITDAAWIADLLAHGLIRSSFVPPAPIQALRDLTRTREQLVGEIARHTLRIQKTLEDANLKLTHVVSNTLGVSGRAVLRAVIAGETDPERLADLANGRLKASRAQLVEALHGRVTPPHRVLLDLHLGQIAALEAAIAKLEHHMGDAMAPFHRAVSLLTTMPGLSDTSARVLIAEVGDDMSRFPSPGHLISWAGLCPRLEVRAGKRHSTRIRPATPWLNTTLIQAAWAAMRKKDSYLHAQFLRLKSRRGPKKAIVAVAASMLTAA

SEQ ID NO: 409330 - protein, 422 aa, unidentified
MSQNQPEIQYAAFVSIDWADQKHVWSLQEANSSTREHGEVGHMPEAIEAWIAQMSQRFVGRQIAVAVEQSRGALVFLLSKYEQLHIFPVPPAMTANLRKAFYSSGAKTDPADTDLLQDVLQMHREKLRRLSPDTEATRLIQNLVEERRKLVDEKTAQSNRLEAHLKIYFPQIPQWFGDVDSPLVCALLERWSALEALQKARPDTLRSFFRKHQCRKEELIESRIKAIGEAMPALKDRAVVEAQLAVVKVLVQVIQVLHQGIEDFNRQIQEAAEAHPDFFIFESLPGAGAVMAPRLLAAFGSQRERYRNAAEVQTSSGIAPVTESSGKSSWIHFRFACSKFVRQSFHEWAALSITQSQWARAYYELQCRRGKRHHAAVRALAFKWIRIIFRCWKERVAYDEKVYLAALAQHNSPLLAATKIAL

SEQ ID NO: 409331 - protein, 460 aa, unidentified
MNIKGTKKKNQVLSVNIFEQQEIIAKADAIKAGLKASTWHELETKGKFDKNDKLSFVSDDMLILGCDIGSETHYVRAIDTRGRELSKSAFGFSNTAEGFESMLDWSTKLAAANDKKQIVLGLEPTGHYWFCLTTWLVVKGISVVQVNPYAVKQTKEVEDNSQLKDDKKDPKLIANLVKDGNFGMPYLPEKLYADIRRLSMFRDQLNEDRIRNLNRLHREMKIYFPEYKDAFGKIDGAFSLELLKAAPFPDELAALGTEGMKQIWHEAKLRGRGYANASSILEYARKSVGIKDGADASRQAVKWFVSRIIELDEQLSDIENQLNQRCNEIPYAKNILAISGIGENILSGILAEMGDISRFDNVKEIQKLSGLGLVACSSGKHTGETKISHRGRKRLRYWLFQAAKSAVAHSEEFKELHVYYTTRKQNPLKKMQSLIVIACKILRVIFTILTKGTTYDPKKC

SEQ ID NO: 409332 - protein, 457 aa, unidentified
MEEPREVPDEEHERVWERVAAIDVAKGSGVVCTRVPDEDRPGRRRTHVWTVAARANAVIELGDHLRGRQIQIVTLESTSDYWRIWFVLLEAAGLTVQLVNARHAKNVPGRAKTDKKDAVWLAKLTERGMLRPSFIPPPQIRRLREFTRLRADLVHERTRFWARLEKLLERALIKISDVASTLDTKSCRAMIEALIAGQRNPKILADLAKGPMRRKRADLIEALTGKFEDQHGEIARIMLDQIDGLTGQIDQLTTRIAGLLEEIPAAWGTDADGTTGPGAGTGPAARILPAVARLDEITGCGPYAAQAVIAETGLDMTVFGTPARLVSWARRCPQTRQSGSKTSHGKPGKGNPYLNGILGEIAASAASTDTFLGERYRRIARRRGKRKALAAIARSILVIIYHLLADPEARYHDLGPDHYTTHVNRDRKIRSLIHQLQAIDADPGEVTALLTRQPPAA

SEQ ID NO: 409333 - protein, 343 aa, unidentified
MDHVGIDVHKKESHICIVAEGGELIERRVRTEVGRLAEMFEKRPHARILIEASTDSEWVARCLEGLGHEVVVADPNFAPMYATRRRTVKTDRRDARALADACVLGAYRPAHRLSDAQRHVRGRLGVREALVRTRTRYISLIRARLRQDGWRVPTGSAEGFGRRVLALRLPGRLLSEVAPLLAVMRHGDRQLAYADERIAAFTATDPRVRRLRSVPSVGPVTAAAFVAALDDAQRFRRAHEVEAYLGLVPQEWSSGESQRRGRITKAGSRRVRWLLIQAAVSMRRLRDPRTAGLREWAERIAARRGRKIAVVALARRLAGILFALLRDGTVYEARPQPAVPVPA

SEQ ID NO: 409334 - protein, 351 aa, unidentified
MLIIGCDYHPSVQQIAFIDLETGETGERQLLHKDGEAERFYRDLKLRGISVRVGIEATGHARWFERLLAELGFELWIGDPAQVKAARVRKQKTDRQDAQLLLKLLVEERFPRIWIPSPENRDVRQLLWHRHRLVQMRTRVMNQLQAVAMNEGVRRKKALWSKSGRAQLESFVLSPWASRRRQDLLEVLDRLNPTIDELSTAVEQEAKKRPEVLRLMTHPGVGALTGLAFVLIIGSAERFACGKQIGSYLGLIPCEDSSANRQRLGHISKQGNTLLRFLLVEAAQAAVRGDAEWRRKFVHLAMRRDPRIAKVAMARKLAVSLFWMWRKEWNYEQVIKFGSHAGQSDYVHGVK

SEQ ID NO: 409335 - protein, 550 aa, unidentified
MSFLGATTLLPSITSLRVIPQRSAHFLLEETEPLRVESGPVQTVKTGPALVFPNPFASMVPIMRGFVIGGPNGTPFRSVHNLSMIGSGPSQYPELEAMAKQKREIRVKVQVNALEQINLHAAGIDVGAEEVYVAVPPERDTESVRVFPTFTADLRSLAEWLKVCQIETVAMEATGVYWIPLYEILAEAGFEVCLVNARHLKNVSGRKTDVLDCQWIQQLHTYGLLTPSFRPPEQIVAIRSLVRHREMLVQYRSAHIQHMQKALTLMNVRLTNVLSDITGVTGLMIIRAILAGEHNPKQLAQLRDGRCKRSEAEIAKSLEGHYKREHLFALKQALELYDFYDLQLKACDAELEAMYQEFDPPEYPGTPPPTSRTQKRRKNQAHFDLAAALYRMSGGVDLTQIDGVDELTAQKVLSETGTDMSKWPTVKHFTSWLCLCPKNKITGGKVIQTGVQPTKNRASSALRVAATSLKTSDSALGAYFRRMRTRLGTPAAITATAHKLARIIYFMLKQHIPYHDLGADSYDLQYRARVLRTLNRRAAKLGFRLEPATP

SEQ ID NO: 409336 - protein, 334 aa, unidentified
MAVMIGVDPHKGSHTAVAIDGDEVELATVRVRSSSRQVAELLGWSAGFAERTWAVESAGGVGYLLAQQLVAAGERVLDVPATLAARVRVLGTGRSNKTDPNDGYSIAVAALHAPALPAVTPADHAAVLRLLAKRNKQLGGQRTRTACRLHALLVELVPGGIPKEITVNRAARLLESVTPANPVEMTRYELALEHLDDLRRLDEQTRALHKRMGDAVKASQTTVTELFGFGPVGGAIAVGYARDVRRFASRDRFAAYNGTAPIEVGSGGRMVHRLSRRGNRQLNHAIQSKLAEGEHEQGLDNKEEFVRRRSVPQLPAYCPNRSSAPAARCCALVQ

SEQ ID NO: 409337 - protein, 339 aa, unidentified
MNLNAVGIDIAKNVFQVCWVDPASGELVNRQVKRASLLQLFSNRERCLIGMEACGGAQHWARMLIGLGHDLRIMAGKAVKAFVNRNKSDFADAKAIWMAVQQPVKCVAVKTEAQQAILALHRMRQQLIKFRTMQINGLRGLLAEYGEVMGVGRAGINRAIASILAKLTARLPAVLIESLRDQWGRVGKLDDEVAAIEQRLRDWMKEERACKVIAEIPGVGLLTATAAVATMSNPHAFKSGREFAAFLGLVPGQTGTGGKTKLLGISKRGDTYLRTLLIHGARSVMVHQKEPPTWLAELQSRRPHNVVAVALANKMARTMWALLAHDRPYKQNHISVAPA

SEQ ID NO: 409338 - protein, 338 aa, unidentified
MKLYGAIDLHSTNNVTVVINEQDQVVYQKRLPNDLSLIAQQLSSYRASLQGIVVESTYNWYWLVDGLMEKGYRLHLANTAAIQQYNGLKYTDDHSDARWLAHLLRLGVLPEGYIYPKQERVVRDLLRKRGQLVHQRTANLLSIQSLISRTTGNSISAKYIKALDIQHVDGVLPNPDLVLALKANLAVMNSADAQIEILEKTVQDRVKLRPQFRFLKTVPGIGPILALTIMLETGEIERFASVGNYASYCRCVGSRKISNGKRKGSGNTKNGNKYLAWAFVEAANFAIRFSSRIKSFYQKKKSKSHAIVAIKAVAHKLCRACYYIIKDQVVFDITKAFA

SEQ ID NO: 409339 - protein, 403 aa, unidentified
MNSVGIDISKGRSTIAVMRPFGEVVISPFEVRHTGSELSKLAKQLKSLDGETRVVMEATGNYHASVAKLLHNAGLYVSVINAKLVHGYGNNELRRVKTDRKDAVKLANYGLDRWLTLPRYIPEEDTRLLLKNCYRQYRQYSKVQTVLKNNLISLLDTVFPNANRLFSSPIRGDGSEKWVDFVAEFWHCRCASEKSERAFTSKYLRWCRKHGYNFREAKAHTIYAEASGHIGVMPKSETTKLLVKQAVSQLRATSTALAALKQEMQSLASVLPEYPVVMDLFDVGPTLGPQLIAEIGDVRRFYSKKALVAYAGLDAPPNDSGDVTGRHKSMSKIGASSLRRTLFLVMSVYLQTAPLDEPVCQFMDRKRAEGKLYRVYMMAFANKFLRIYYATVKAYLESLEHTA

SEQ ID NO: 409340 - protein, 423 aa, unidentified
MDPAEFQQQYAHFGGFDWARQEHVVVIVDRLGGIVYDQALPETAEGWAAFRQAIAPLQPLAIAVETSNGPAVERLLELEVAVYPMNPKAAGSYRQRKAPSGVKDDHLDGWSFADALRTDGHGWRKLLPETEATKLLRLLCRDQVALIEQRTALVNALQQCLLEYYPAALEAFDDWTAPSSWAFLEQFPTPELLLKRGKRKWQNFLHTQKLYSPQTAEKRLEIFARADQFVSPSSAVTQAKSFLAQRLAKQLRLLEEQLRQYQEQIEQAFRAHPDHELFDSLPGAGLKTKARLLGEIGTDPQRFADGDALRAYAGSAPVTQQSGQSRRVYLRRACNKPLRQAMHFLADLSRHACDWAQAYYQLHRDQGDSHQGALRKLAGRWEKILWKMLQTRQKYDPGKRLADMVRHGSPVIPLLREGQAATA

SEQ ID NO: 409341 - protein, 426 aa, unidentified
MNEVDNIRLKEFRQLTKEIRGSKEYLIVGIDVAKDKHSAFFGTTTGKTLFKRLVFENTHEGFERLLIQADAIKIQHSLKKIVFGLEPTANYHKPLGEFLIKHAHTVVLVSGVAVKRNRELLDGRWDKHDTKDSANVADLISQGKCLFYEYPPMALRELRSLLSLKRRLKKQEHGLKVRIRNHLLAAYFPEFDKYYRQSDSQGLAIVRWCLDPSVIAGLKYDEFVRFVAPRTRTIGQRDRLKAIWKKAADSIGCDAGESLEFEAKVMVEGLKHVQEAISEVNDKSEDICCAFPEYRYLLSIPGFGPDVSSKVLGAIGDPFRFKTGKQVLKMAGLDLSAERSGKNSGAAIPVISKKGKADLRYALYQAAMIASTRNQYFIMYFTNKLRGREREKGIKTKMRVKLAAKMLIIAWTLMKKKEVFYTPQAY

SEQ ID NO: 409342 - protein, 429 aa, unidentified
MTQSPNPSTLTPLAFVGIDWADQEHAVCLSPADTLLPEQLVVKHTPEAIAEFVALLRTRFGGGFVAVGLEQARGALLYALMNYEFLVLYPINPLTAKRYRDAFAPSGAKDDPVDARLIWELLVKHRDQLRPWQPEDVVTRQLALLCEHRRELVNQRTCFVQQVRAALKTYFPQALDWTGDDLASVMAADFLLKWSTLAALQKAQPQTVRAFYYAHQCRRPDLVSQRLAQIKTATALTTDRAVIAAHALRVQTIARQLRALVTAIAEYDRQIQALFATHPDAAIFASFPGAGACLAPRLTAAFGTNRDRFPEPEAMERLSGVAPVTRRSGQFQSVQRRYACARFLLQTFHEFARCSIKLCDWARLYYDAHRAKGQGHHAAVRALAFKWIRILWRCWRDRRPYDDATYTAALRRRGSPLAKLLPLPSTPAL

SEQ ID NO: 409343 - protein, 363 aa, unidentified
MLKYSVGLDVSSKKIDGCFSVIDTIQKVTIKSTITISNNSNGFKMLENWIIKHQKETIPLVICMEATGVYYESCALYLFEKKHKVSIILPNKAKKYLQAIGLKSKNDSIDAKGLAQMGAEQALTLWQPLGKYFYELRQYTRQYQNIQEQKTVFNNQLHSLKSGMYSNKTIVKQLDNCIKLFDKQLKELEKRIQEHINSNSEVKQKAINICKIKGIATLSLATILAETNGFELFESVKQLVSYAGFDVIENQSGNRVGRTKISKKGNSRIRRILFMPAFTAVSCKEKPFFNLYNRTFERHGIKMKSYVAVQKKLLIIIYSLYKNNQEYNPERYNIQEKEQVLCSLLAFEKGIKNSPNQIEAITR

SEQ ID NO: 409344 - protein, 408 aa, unidentified
MSLEVMYQRCAGIDVHQGFLVVCVSVIEGGKRQKEIRTFNHDTAGLLALRAWLLEQRCTHVGMESTGVYWMPVYRRLEGFFELVVANAQHIKGVPGRKTDVKDAEWIADLLQHGLVKASFVPSQEQQDVRDLTRTRIHLVEERSRLVNRVQKVLEEAGMKLPSVVTDVMGVSGRAVLRAMCAGERDPERLASLLLPGVKATHEQAVVALTAEVRVHHRFLLQELLTLIDAQDRAISHLEGEIERHLHPFEEQMTRCEKINGVSSHIIHVLMAEVGTDLSRFPDAEHLSSWAGVCPGHKESAGKRQSGRCRKGNRYVRTALVQAAHAVRRSHTYLGERYRRLKKRRGSKRAALAVGRSILVIYYEMMTTGQDYEEKGEEFFRQRDRGKVERELIQRLKRLGYQITQPAA

SEQ ID NO: 409345 - protein, 382 aa, unidentified
MSAERVNDCYVALELSQRTWLIGFLLPGTDKVQIMTVAGGDAEALLSALGRIESLAGTRLPAECTMVSMRVCYEAGYDGFWLARYLIDRGIDTTILDPSSFLVSRRGRRVKTDRIDVEAMVFTLKAYLLGDRSVCRPVRLPSVAEEDAKRLSRERTQLKKERTRHVNRIRALLVLHGIRSVPGLWGGRWKEALSNIRTGDGRELGRFIFRELCRQFERLDLVHSQLKGLEKERIQACETEGAINDSGKIRVLKQLDGIGEVGATQLVAEVYHRTFKNRKHLASYLGLSPSPYSSGEVHRDQGISKAGNKQARVMLVELAWCWLKYQPQSELTRWYRARFSGHGSRSGKVGIVALARKLAIAFWRFIEDGVVPEGATLAVATK

SEQ ID NO: 409346 - protein, 410 aa, unidentified
MNMNAVGIDVSKGKSMVAALRPMGEVALLPQEFLHTEVGLEQMAYAIVALGEDTRVIMEATGRYHEPIAAALHEYGIYVCVLNPLFIKQSGGGSIRKVKTDKADAMKIAKYGLDNWVELREYTPMDTVRQQLKLCSRQYNLYMKTVVSLQNNLISLTDKTFPGVNELFSSPERADGHQKWVDFVMTFWHCDCICRVSEKAFTDRYQKWCKRKGYHFSTEKALDLYAGSCGHFTTLPKNDNTKLLITTAAQQLLAGKTTLAALRAEMTRLAKQLPEYDTVRAMYGVGETTAVQLMAEIGDVRRFPRRSSIVGFAGVDPAVDQSGKHSAKSVPTTKRGSPHLRKTLYQIVCTYLKRSPADEPVYQFLDKKRAEGKPYFVYMTAAQNKFLRIYYARVKECLEAFDERQDTVQN

SEQ ID NO: 409347 - protein, 360 aa, unidentified
MKYIGLDCHKFYDFATLIDSETGEVRSKKLAHKKEEFKAFIGDRSNSRMVIESCWNWSKTYELAKDLVDEVILAHPLKIKAIASAKIKTDAIDSRTLAQLLKADLIPQAHLREADNRIKQKVIRHRAFMVAMRTRVKNKVNDLVNNRLLTTAVEETKPKNLFSKRGKGENGVAWLKSLEWSVEEDKRIFESAMRLIEHLNHEISASNQMVEEIYKKDKDAQLLSTIPGIGKTLAVLISTEIDGIGRFSSPSRLCSYAGLVPSTHSSGGKTYHGKITLEGNRWLRWALVEAVVPASYADTEIRTRLNALRKIKNANVAKTIMARWLLKVVYHVLKENRSYVPADPADASPGRLLKALASSE

SEQ ID NO: 409348 - protein, 431 aa, unidentified
MNRSVEFLSVGIDVGADFSLMAFALPSQELLGKPCKIIHSSQHSLNGAVEKIKTLSQKYQLPARVFMESTGIYHYPLYHKMKDAGFNVFVLNPLVTHAGRDLNVRNIHNDKYDSQKIALLGLRPGLKTSLIPSDQVISMKVILREYYAVKKEISMYICRLKNQLRQAFPQFLPLFSKVNGVTAMAILCEYPNPESLLNAGEHAVADFMKSVSHNGPLKVQKKAAALIQAAQDARSFGHWNHGISILIRHYIEMIRLLDIRAKTLLAQAKALLAEQDSKTLAHQTELLQTIPGIGFLSALTLICELGDFSAFKRPKQLFSYFGLDPIVRQSGNYNVTNLKLSKRGSPFARRCIFVIALQSISLNIHKEPKNPVLRTFYEEKCMCKAKMTAIGAVMHKICNLIFAVLRNDAPFVLQTPEQHNAAYLSKTHSVA

SEQ ID NO: 409349 - protein, 339 aa, unidentified
MYYTGIDQHKVFSVLTTVDKSGKLVKQAKLNNNDYEYVNYFKSLKGKHKATVETTGGWYWMNDLISSLGIDLKLAHAKYLKAISYAKVKTDKVDSLILAQLLRLNFIPEAYKISNDIRTLRDTLRARLRLSQKRTSCLNFMHRMLEKFNITDKSELDPFYQLQYQQFDTQAKLLKEQMLTLEKSLYPSLIPNSDIQRLLWIPGIGKMNAFTILLEVGDINRFPTEKNFFSYCRLVPSARNSAGKIKQKSASKDGNKYLKIVFSDSAIHALQYYPVIKRYYHSKLRKKNKQVAKTIIAKEIARIVYHVLKNKTNFNNKFKNKDLEHLKSVQWPRITSPDV

SEQ ID NO: 409350 - protein, 315 aa, unidentified
MSDVPCFVGIDVAKAQLDIALRPSGERWAVPNEASGVMTLVDRVQALHPTLIVLEATGGLERAVTSALATAGLPVVVVNPRQVRDFARATGQLAKTDALDARALAHFADVIRPTPRPLPDAQTQELRALLGRRQPLIGMRTAEQNRLAGTNARLTQDIAAHMTWLNAAIATLDDDLETILRASPLWRENDDLLQSAKGIGPVCAHTLLLELPELGTLTRQQIAALVGVAPLHCDSGTLRGRRMIWGGRAHVRTVLYMGTLVATRFNPQIKVFYERLLAAGKVKKVALTACMHKLLTILNAMLKHRTPWQPQEVQS

SEQ ID NO: 409351 - protein, 424 aa, unidentified
MAGVVIGIDPHKGSHTAVALDVHEKQLGRLRVRASSRQVDGLLEWASGWPRRRWAIEGARGLGQLLAQQLIASGERVLDVPPKLAARVRLLDSGQINKNDPNDARSVAVAALRAHELPELAAEDHAMVMRVWARRYHDLARLRTQVVCRLHAVVCELVPGGVRKYLRASQATDVLDRIVADSPVAQAKLELARELVADLERIDAQRREAKGRTARAVAATRTSINDVYGVGPIVAGTVLGYVRDIRRFPTRDRFASYNGTAPIEVSSGDRKIYRLSRRGNRQLNHAIHMAAISQIRHHDSEGRAYYEKKIAEGMTGKTALRALKRKISDALYARMIDDARRLAAKDPGGHTGNDSASSAAGSHPETPALRKSHSRATANSKTGTGQRPLTLRPAPDRRRTSRRATGVQVEPRPGPHRGRRQDRP

SEQ ID NO: 409352 - protein, 449 aa, unidentified
MAKKKRKYRKLERSLPVMRANAGGIDIGATEIFVAVPADRDTESVRSFPTFTQDLHALADWLQQCRVDTVAMESTGVYWIPLFQILEARGIEVHLVNAQHVHHVPGRKSDVLDCQWLQYLHSVGLLRASFRPEHAVCEIRSLMRHRENLVQMACVHVQHMQKSLDQMNLQIHHVISDITGVAGLAIVDAIVAGNTNPKELAKLRDHRIKASIETVTKSLVGDYRPEHIFTLKQSLTAYRHYQKLIADCDQEVQQRVEAFQSNDDGPTAAADSSSATSPTAPSFDLHSHLERIFGVDLTAIPGFDVLRIQTIFSELGADMSPFPTDDTFCSWLNVCPKDGTSAGRRIRAPKVKTKNRVTQAFRMAALSLHNNKSYLGDYYRSQRARHGALKATKNAAHKLARIFYHLVKTRQPYDETVFAKLEARNQKHRLHKLQTLARQMGYSLVQANA

SEQ ID NO: 409353 - protein, 426 aa, unidentified
MKTITDFAATVGLDWADRKHDLWIQPADGSPPQPLQLEQTPEALHAWVAQLRQRFGPRPVALAIETTRGPVLSALLAYDFIVLFPVNPKALKDYRAAFCVSGAKDDRTDARLLEELVRLHRHRLKALQPDTELTRKLAGLVENRRHLIDERTRLVNQLHSQLKTYYPLAQTLFKNQMTTPLATEFLSRWPTLAALQQTSSQTLRAFFYKHHSRSAKLLDQRLEQIRQAQPLTSDPALLEPASLLVEALAGMLKPLHRTIARLDQAIEAVMAQHPEAALFNSLPGAGPALAPRLLVAFGTQRERFTSADQVAQFYGLAPVVEQSGNTKVVHLRYRCPKFGRQTFHENAACALRKEPWAKAYYALHRQRHNQKHHQACRALAFKLIRIYFACWRDRQPYRSDRYLQGLQKHASPLLKKLANSNLLARE

SEQ ID NO: 409354 - protein, 337 aa, unidentified
MNPTKSNHKFCLGIDISKADYHVALLHRESGESIARSKFANNPQGHAKLLDWLAKHTGADLPVHACMEATGSYGESLADHLDGKVAILSVVNPRAIKAHGDSDLRRCKSDPADARLIADYCRSKQPRAWQAPSPAQRKNKAISRCLANLKKDRTRESNRLDLCSDKTVVKALKAHIKWIEKQIAKLEDELLAAVKENAASARALELIVSIKGIGEKSAAYLIAELPDLTLLKNARQLAAYAGVTPRIFQSGTSGKTRTPMSKAGNRHIRKALFFPAMSAMRFNPICKAFAERLKEKGKPSIVIIGAVMTKLLHLIYGVLKSEKPFNPDILKKAQITP

SEQ ID NO: 409355 - protein, 377 aa, unidentified
MGNDSTVYVGLDVHKESITIAYAIDAGDVESMGKTGTTPTEIDRMCKRLQSKASQVRVVYEAGPCGYGLYRRLVKQGFVCMVCAPSLIPKKPGERVKTDRRDAIKLARSLRAGDLSAVHVPSIEDEAFRDLARTWASARDDLRHARQRLKSFLLSHGVHYIGRADWGAAHRRWLSKYSFESAWRQLAFDEHRRTIEDRLAQCDRLETALREAVVEWSFYPAVLALQAMRGIQFITAIGMMSELGDLSRFEHPRQLMAWLGITPSEHSSGGTRRQGAITKTGNSYARKLLVEAAWSYRHPARVGKTLQPRHEGIPKPIIDRAWDAQLRLCKKYRKLAARGKNVNVAVVAVARELAGFIWDISRLAMSLALPRHAVQPV

SEQ ID NO: 409356 - protein, 341 aa, unidentified
METTRHIGIDLHRNKFTCCMRVENGRSYLSQWNLEDLPRFVKKLRSTDEVAVEVTGNTRLFHDAVAPHVARVAAVDPNQFRVISHSVKKTDPNDARNLGLYLSKGLLPEVRMKEKTQAQIASLTQTRDTLVKLRTALKNKVNNILSAHGINLEKEALSSEKKLNEVLAMQFDPMIRIELKVIVEQIRSLNQSIAELEKTITEEGQKLKGHKNLTSIKGIGPLSGSILLSVIGDIHDFADEGKLAAYFGIVPRVSNSNETERSGRITKRGSKLGRTALVQCALIAQRYSPYLKKFYEKTKARRGTGKAIIALARKLLGIVYRTLKNNWVFKDFPNFVLAEES

SEQ ID NO: 409357 - protein, 329 aa, unidentified
MDISIKEIVCTTIDEKGNVIRKEKFENTFENLDAFLKNFSHEDSFVMESTGFYEPLYDFIESKGFKVKLANPLKIKLIAESRMKNDDIDSEILAKLLRNNWIPESYVPDREIREIRRVVRTRMDIKRTITSYKNRIRIEMKRLHVDFNEDPFTLNGKIFLRTLNSDRINSYLNVLNGLEEEVKSIDRYLKKYEGIEEVRLLQTIPGIGLFSALIIYSEIGDVNRFSSSSKLLSYAGTVPSVRQSSDVMQYGRITRQGSKNLRWIITECLHIHLRFDPSSSVSRFYRRISRGKRKKGRAIVAASNKLLKIIYWVLKERRPYTSSSAEQPR

SEQ ID NO: 409358 - protein, 354 aa, unidentified
MPRQSKDTVAILGIDIGKNTFHLVGFNKRGAIVLHQKLSRRQLEARLANLPPCLIGMEACVGAHHLSRWLKAFGHDARLMPAKYVRAFLKGNKNDYRDAEAIAEAVQRPTMRFVATKTAEQLDLQALHRVRSRLVSERTAIANEIRAFLLDRGIAVAQGLHRLRGALPDILATRTDLLAPRLLHILEDLIGDWRRLDERIHSVSLEIQRLAQQDPACDRLMTVPGIGPIISSATVAAIGTGDVFSNGRDFSAWLGLVPKQISTGDRTILGKISKRGNKYLRTLFVQAARVVLLRPATWQRHGLQSWIAAAAQRLHHNVLAIALANKLARIAWSVLHHGRNFEVRKISEATSQAA

SEQ ID NO: 409359 - protein, 422 aa, unidentified
MIVSSKLKGASAMETVVERPAALDVHKEQVTACVRSPGGDGQREQHVAEFKTTVQGLLALRDWLKAHGATKVAMEASGVYWKPPWAILEDEFECVLVNARHVKQVPGRETDVSDAAWLCQLLEAGLLSASFVPPKPIRTLRNLTRYRKAQIGERQREANRLHKILEDTGIKLDCVASDILGASGRAMLDALVAGTTDPAVLADLAKGKLRQKLPALREALEGRFDAEHGIVVGAILAHIDFLDEQISLLSDAIEEQIRPFAAAVELLCTIPGVQRRTAEVIVAEIGTDMTVFPTAGHLASWAGLCPGNDESAGKRRSGRTRKGSRWLGIALTEAAQANTRSRDTYLSAQYRRLKPRRGHRKAIGAVRHSIIVASWHMLTTGEVYHDAGGDYFTRLDPDKQTRRLVAQLERLGHTVTLQEAAA

SEQ ID NO: 409360 - protein, 349 aa, unidentified
MKYVGIDFHKSYSFITEMDEAGVIGRQVKLSNDHKTLQGYLNTLAAPTKIAIEATCNWYYFYELIEDHDLEVVLAHPLKTKAIASARLMNDKVSSETLAHLLRADLLPSAFIPNQATRDAREVLRMRAFLTAQRTRLKNRVHAVLLKNGLACPYSDIFGKTSLTWLNDLSLRPCYQDAITSYIRLAKALNEELAQLKDTITTLAYNHPYVRLLETHPGIAHYSGLLIAVEIGTITRFPNAGKLCSYAGLVPTMHASGGKVRMGSITKQGSKWLRWILTECASHAVKQSPHYEQLYTRVATKHGTGTARIAVARSMLRAIYAMLTHQQPYRERQLRSAPWGHNLKKGSEI

SEQ ID NO: 409361 - protein, 429 aa, unidentified
MSYRIAGIDVHKKMLAVVVSNVEVESEFQFERRMFGGNPEQLRLLAAWLLEQEAEEVVMESTAQYWKPVWGTLERYWKPIREKREGAKRRSGTLHLAQAQSNRGRRGRKKDFVDAERLVKRLVARELTLSFVPDAEQRLWRAVTRKKYQLRRDLVRLNNQLESLLEETHIKLSSLVSDLLGVSARRMLKALADGETDPAALAALAHQRLRATPEQLCDALGACTDLKPVYRRLLKMTLEQLQLLEQQIGQLDQELATLLHPHQDAVHRLAEVPGFGVDSAQQIIAEVGPTAATFPSEKCLSSWVGACPGDEESAGVNYSHQSPKGNRHMRRLLNQAANAAVKVKGSIFEVIYRRCVPRLGHNQAIGVIAHRQCRLIWLILHNGALYEERGPAVTMQSKYKRTWRMIRQLRQLGYRIDPPNPQPSQAQAQ

SEQ ID NO: 409362 - protein, 417 aa, unidentified
MKPIDEGGIGVWVGLDWADEEHAYGLRMSGSSEIETGEVKQTPEALASWINELRQRSGGGWVAIAVEQSRGALLYALMDYDFVLIYPINPKSLSSYRKAFYPSGSKDDPRDADLVLDFLLKHRERIRLWQPQSPEVRCLRLLCEQRRKLVDLRAELTNQWTANLKNYFPQALKWAGPLKGNKACDFLNRWPSLQSLQRARPSTIRRFFKSHRGGGSEQLQLQLEEIKQARALTGDTAIVTACSLLTQSLAGQILQLNDSIQRFDAKIEELFNHHPDHFIFSSLPGSEKALGPRLLTTFGEDRDRFECAGEVQTVSGIAPLLRTSGKSRIVSYRWACPKFVRQGVHEFAALSRHWCPWAQAYYQMQISQGKDHHVAVRSLAFKWLRIIYRCWKNRVPYDDAIYMDSLKANNAPLLAFL

SEQ ID NO: 409363 - protein, 349 aa, unidentified
MDHIGIDVHKRESQIYILAEGGEVVEQRIRTEPERFAAVLATRTRARIVIEASTDSEWVARCLEALGHEVVVADPNFAPMYATRSRKVKTDRRDARALAEACLLGAYRPAHRLSDPQRHVRGRLLVRDAVVRTRTRYISLIRALLRQHGYRVPSGSAETFGDRVQRLPLPGRLLSVIAPLLAVMRPLNRQLAYSDATIEHLAVQDPRVPRLRSVPCVGPITAAAFLAAIDDARRFHHAHQLEAYLGLVPREYSSGETQRRGPITKAGHSRTRWLLIQAAVSILRRRPPQAEELRTWALRIAARRGKQVAVVALARRLAGILYALLRDGTVFEPQRIRQRRLPTATLVNM

SEQ ID NO: 409364 - protein, 395 aa, unidentified
MFIVGIDVAKRSHEVCMITSDGQTVQRPFSIRNNCTGYNLMLEKIRKHTNIKSQIVFAMESTAHYWLALFTRLRKDGYHVILLNPIQTSAMRDMFIRKIKTDAKDSFIIAELIRFGRYAESNVAQDRLLALKELCRNRFYLVDMAGDLKRKMIALIDRVFPEYEAQFDTIFCKSSVALLKKYPTPQKLSNAHLDKLTELLWNSSNGHFGEWKARELRELARNSFGVEDCDGAYSTLILLMLDQIQSLSGKADALEKEISRLFQSFDTTVTTIPGVGPIIGAVILSEVGDISRFSSADKLAAYIGVDPSVNQSGEFQAAHAHMSKRGSPYLRRCIWMASQVAVQRDPMFRAYYEKKTAEGLKYMTIIGHVTRKMTAVIFAILRDHKVYEPVLPTAA

SEQ ID NO: 409365 - protein, 322 aa, unidentified
MNAIVGVDIAKDSFEACLLDEQGQVHEASFPNLLKGIKQFERWLKQLGCGKAHVCLEATGIYGDLLAETLHKHQHPVSVVNPARIKAYAESRMQRNKTDQLDAALIAVYCRTQQPPLWTPPPAEVKALRALVRHLDDLKQEKQRARNRLESQRTSSPIKAHLDEQIRVLDKQIKHTEYLIHDHINQHPDLKRCDDLLQSIPGIGTLTSSLIMAEFGDMTRFDDVRDVVAFVGLNPRQNQSGKKRSTQGISRMGRASLRAALFLPALVAKRRNPRLKAWAEQLERRGLTPKQATVAVMRKLIHLAYGILKSGRPFDPNYGCAS

SEQ ID NO: 409366 - protein, 365 aa, unidentified
MTSYRSLEQLAIFYSDILKYAIGGKNMRHIGVDLHTNSFTACYLQEGKPEHIQTFRLKDLDNFTKDLQETDEVAIEATGNSCFFYDAVSPYVKCIVIIAPGQFEVVRRSVNKTDKHDARAIAFFLSKDMLPEARCKNKQCQQLASLLQTRDQLVKSRVSLINKVHGLFNYHGIKIKKEVLTTKVGFERATQKHNWDPLEKVEIEVISYHLEAIRESLKKLEKEIIAFAKQLPGFSNLISIKGIGPISAAVFIVTIGDINDFRRPEKLTAYFGVVPRVSQSNQQCTIGRITKRGSKIARTSLVQCTWIAVRYSPYLKSFYEHIKKKRGSAKAITATARKFLITIFYTLKNNWVFKDFTKFEISIGQ

SEQ ID NO: 409367 - protein, 360 aa, unidentified
MKKVSRQMRKMEAADKPAMTLGLDMGDRYSHYCLLNAVGEVVEEGRMQSTEAALRRHFEGEPRMRIALECGTHSPWVSRLLKALGHQVIVANARKIPAITGSESKNDRNDAEKLARFAAYDPKLLSPLEHRSPERQLDLNLIHARATLVRARTMIVNALRGLVKSAGGRLPASSTEALPARAPAAIPSALATVATPLVEQIALLNAQIGGMDKQIEALSAKYPEISLLRTVPGVGPIVAAAYVLTLERPDAASNRSAGAFLGLRPGQSQSGDSDPQRRISKTGDGCLRSLLVQSAQYILGRFGPDSELRRWGLKLAATGGKRGKKRAVVAVARKLAVILHAMWRNGECFQAFPQPAARAA

SEQ ID NO: 409368 - protein, 355 aa, unidentified
MDNLRYIGLDVHRDTISAAVLDHDGKLIMQSVVPTRASAILDFLHGIRGTLHVTFEEGIHSAWLYDLLQPRVARVLVCDPRKNRLLKSGNKGDLIDARKLAELLRNDALSPVYHGELSSLEVQRRTRSYTMLTEDTTRIMSRVKAVFRGQAVPYHGKSIYRPDRRESYLAQLPTEGLRQRVELLYQELDAVHRLRLRAKREMLAECRKHPAMKWLQSVPFLGKVRTAVLIGRVQTPHRFRTKRQFWSYCGLALETHDSAQYHVLHGQVERKPRFVQVRGLNWNHNHDLKDVFKSAATMAAVREGVFRDYYCGLLAKGIRPEMARLTLARKIAAITLKIWKEGGMFNAEQVKPQAA

SEQ ID NO: 409369 - protein, 345 aa, unidentified
MLYIGLDVHHKTTTCCVLDHAGRVTHTRTLRGPWAKTVAFLQTLGNDLAVCFEASVGYGPLYEALASFCRRVEVAHPGHLRLIFRSKQKNDRVDATKLAKLLYLDEVPRVHVPGLDVRAWRELIEFRRRSIDKRTKVKNQLRCLLRAYAISKPREVPGLWTRGGLAWLERVALPTATAQLKRELLLDELTHLKTQINRVTTQLDRIAADHPGVALLMTIPGVGPRTAEAFVAYVDDPHRFEKANRVPSYFGLVPSQDASAGVNRLGHITKRGPATARKLLVEASWQMVRHCPQTRAYFDRLVAGKPERRKIALVAVAHRLVKIMHAMLKSGEVYRPRKQEVMNVK

SEQ ID NO: 409370 - protein, 399 aa, unidentified
MSLKGSFDGFVGIDVSKDKFDACGITGDEVKLFQFSTTMDRKGFEKLKGYLAAVSISSVLIGMESTASYHVNLFSYLVSEGYKVFLINPLLISNYVKMQLRKTKTDKKDAVVIAQFLLTNGDTLVQRATPSLVSDLRDLSRQRESLVDEMTSLKIEIKQLLNITFPELEHMAGIFTKSILKLLQQYPSAFTLRDANLGQLSQMLIADSYGHKREAFAAELIKAAHSSIGSKSPAKDMILKQKIALLRHLEDALQEITGMLIEMSRKLMEEEINLMTSLKGIGEKAAANFLIEMGGDINQFERSGKIIAMAGLDPAVYQSGKHDGKGRITKRGNRHLRKIIWLMTTKVIQYTDTFSVYYLKRRKEGLPYKMAVLATAHKLIRVIYAMLTHRTTFCAQVNS

SEQ ID NO: 409371 - protein, 387 aa, unidentified
MQKPHDESKACLTAFVQDSTLTVVIEMSLANWLVAGMIPGVDRQPLKKIVPNPEVLLQLLHRWRDEAIKAGKEITRIAVAYETGRDGFWLARWLRARGIDAHVIHATSVAVSREHRRAKTDRIDTAVLQRGFLGWLRGERGHCSMAYVPTVEEEDAKRPHRDRESLLKLRTSTVNRMKSILIQFGVRNFNPILRKAPENLASVRTPEGIPLPPNSVTALRRHMERFRVIKEQIKAIERTRLERLQRDPAEKLNAMVFLLVRIVGLGIETAEQLVHEILSRNLRDRKAVARYARLTGSPDESGSKRRDKGLSRSGNRRVRNILIQLSWRLLRFQPESDLVLWFKKRTANAQGSRKPMIVAFARKLIIALWRYVNTGLVPEGFQLRSAT

SEQ ID NO: 409372 - protein, 364 aa, unidentified
MTESITCVAFDMHQDSITVAWLRPGATAPETRTVPNEPKLFRRLVQELLARGRARACYAAGPLGDAPQRQRAAWGLPCEVIAPSLIPRRPGDRVKTDKRDAKKLVKLYRSGELTPIRIPTPAEEAARDLVRCREAAGVEARRALHRLRKFLLRRDLRCPAGRPGTQAWWRWVHALRLPDPAAQRTLEEYTLAATTARARWKALDPEVTALATRAPWVAPVARLRCFRGIDTLGAVSLHLEVFDWRRFGSPRPCMSFVGRVPSEHSSGGRRRQGSITKAGNAHLRRILVEAAWQYARRADRRAAVRQRQQGQPPAVVAVAQQAEQRLYRRFHRLVDRGTLRTVAATAVARELCGFLWAAMVEAPV

SEQ ID NO: 409373 - protein, 400 aa, unidentified
MGQPLWAGVDAGKSDHYCAVIDADGKRLLSRRVANDEVALLELINAITALADGGELTWAIDLNAGGAALLIALLIGAEQRLLYIPGRTVYHASGGYRGEGKTDAKDAAVIADQARMRRDLKPLRPEDDIAVELRILTSRRTDLVTDRTRAINRLRAQLLEYFPALERAFDYSASKAALILLSGYQTPDGLRHAGAARLAAWLRKRKARNADAVAAAAIEAAKSQHTVIPGQQLAAAMVARLAEEVMTLDTEIGDTDAMIEERFRRHRHAEIILSMPGFGVILGAEFLAATGGDIAAFGNTDRLAAVAGLAPVPRDSGRISGNLKRPRRYNRRLLRACYLASHIAIRTDTASRIYYDRKRAEGKRHTQAVLALARRRLNVMWAMVRDHKPYQPTAPNGAAA

SEQ ID NO: 409374 - protein, 344 aa, unidentified
MLKSTIFGIDLAKTVIQVCQISKHGELVKNKAVSRQKLKEVLAKAQPSIVAIEGCGSSHYWGRYAENFGHEVRIISPKKVKGFLQGHKTDANDALAIANAALQIGLKSSKPKSEEQQTLQTLETSRVYLSRSITSLSNHLRAVLYEYGIVSARGVKGLTKVVQDTLNTADSIPECLRSTVNQLWVTYLHLKQELAQLIKTKNELIRQLQPCNKLMDLEGVAEVCAGMLYSSIGDGKQFKNGREASAFIGLTPKQHSSGGKVFMTGIDRAGGIKELRSALYQGALSYICRLPDEPKTAKQAWLIKLVQRAGIKRTCIALANKTVRTAWAMLRYENKYEQQPLLAM

SEQ ID NO: 409375 - protein, 453 aa, unidentified
MSTGAPDWTAGCTLNLKRSYLMNRLQVGIDFSQKKADFCLLFPDGQPLEPHVSFANSCSGYSSAKQLLIDALDTYAFDGVDVSGEATGYLWLPFFLQLAADPDLTLRDTNLFLLNPRWVKWFKKCFAEDDKCDEKDPFYIAERTRTRRPDVAWSPPDCLPLRFYTRLRFHIVQNLAREKCYFSAFLFLKASSYRCIKPFSDVFGVTSRLVLTQQPTLDELADLPVEDLASHLCDLSGNHLPDPLNNARKLQRVAQESFHLDPSLTLPVQRILDLTLEHIRFLEAQLEQADHWIATELENYPVIAQLATIPGVGPVFSSGLGAEIGGIQRFLQGHKWDKKRKRYRPRNLRDAEDAVAKIAGLWWPRADSGDFEAQDRHMAKSGNRYLRYYIIQAGNLMRLHIPEYAKFYARKYKEASKHHHKRALVLTARKSVGLVVGLLHRDEPYRSKEDRRT

SEQ ID NO: 409376 - protein, 370 aa, unidentified
MSVRRILAKTINTDLEYEAIGIDLAKNCVSVALLTTDGEVVCIDRLDYSELEKSAQVLCPTTFAMEPCTEMNYLVQKLEAWGHRCLVIGGKNVQNYVENHYSGQKTDLNDAQALAFLAQDKQLRTIKAKDIEQQKYASLTTLREQYIKQYRQTIVSLKGICQAWGLNISKGISGKARLKDLIENHAAFPEELKESLVDMVTHAQTAQKALNKITKTLELLAKNDKVCQLIQTIPGLGPICSCRLRATIGDIRRFKNPKDFPAYYGLVPRSIATGHNEKKGKITHRGDKTMRSLMVQGAGSVINMATKGKLKSKQLTKWILKKQKEKMPWGKLVCAVAAKLLRIVRAVLISRKAYDPKLAGVAKCSLPKAT

SEQ ID NO: 409377 - protein, 430 aa, unidentified
MKSNTQNAKIEAITEKTLVLGIDVGSETHYARAFDYRGIEYSKKPFKFSNTEAGFVTFKEWILDIKERHEKDKVVPGMEPTGHYWFNLGKFLQDNEMKPVLVNPHHVKKSKELDDNNPTKNDRKDPKVIAGLVREGRYMIPYLPEGVYADLRTASNIRFQLQAELTRIQNRISRWFNIYFPEYKTVYGKPDAKSGMLILKAAPLPEDILTLGIDGVNQIWRDAKLRAVGKARAKTLIEAAEHSVGSNEGEVSARMELRMLLEDYESRNIRLQEVMTLIEGLVKQIPMAEKLLEIKGVGIRTVSGFLAEVGDISRFSNPKELQKLAGLALVENSSGKHKGETTISRRGRKRLRYLLFEVAMSLVAKNPEFRELHNYYTTRRLNPLKKMQSLMAIAAKLIRVFYAMLTKGVDYDPKKMVSDIKRPAVYLQAA

SEQ ID NO: 409378 - protein, 307 aa, unidentified
MTLPHHVIGIDIAKHHLDLYDAASGQTWRIANEAWAIAELVATLGPQHLVVFEASGAYDAALRQALAGAAIAHARVNPARARAFAQALGQSAKTDALDARLLAAMGACLPLRREPDPDTARERLTRLHRRRDALVEMRAAEQTRRADALDPETVESLNAHIAWLSAAIAELESAIRAHLDAHPSLREAVHLLASAPGVGPVTAGIAVALLPELGRLSPKKIAALVGLAPFNRDSGRAQGERRIEAGRRRVRRALYMAAVSAARSHLKPFYQRLRRAGKAPKLAFVVTARKLLTILNAMMRTQTPFRA

SEQ ID NO: 409379 - protein, 369 aa, unidentified
MPMLANVVDAVVGVDTHRDTHHVEIALPTGSPIAACSISNDTRGYAQLLAWIADHTPGPRLVVSIEGTRSYGLGVARALTAAGLAVIECEQPTRNNRRGRGKSDPIDAHLAVLTALRLDVERLPTPRADGDREALRILLSARHDLTVATTAQTNRLRALLRDGDDGDRQLARGALTDTVLAGLARRRPPRDATRAQAVRQAEIRRLALAVRDTGRALKTNRAQLQAIVDELAPGLTDRRGIGAVSAAQVIISFSHPGRCRSEAAFAALAGASPLPASSGRTMRHRLNRGGDRALNRALHTIAMTRMNTCPTTQAYVARRTAQGKTPREIRRCLKRYIARELYRNPHRHHDTHHQHPDTHRSVNEYEHAA

SEQ ID NO: 409380 - protein, 427 aa, unidentified
MKYTQNDKIKQITPETLIIGVDIASVNHYARAFDFRGIEYGKVLMFSNDATGFEAFRSWIGHLLVEGNMRTVLVVMEPTGHYWFNLAQYLDDQGMKTALVNPYHVKRSKELDDNSPTKNDQKDPKTIAMLAKDGRYLMPYIPKGIFSDLRVAMENRSRIAERLNGVANRVKRWLSIYFPEFNAVFAKWDGKTALVCLREFSTPALVLEQGVNGIVESWKEKKIRGEGNKRATRLFEAAQRSVGVREGQSAALLELEVLLEEYDLLTKQVDRAMAFVKDLVSQIPGANEVINVKGLGLVTVAGFLAEIGDPSRFSHPKQIQKFAGLNLKENSSGKHQGKTTITKRGRRRLRAILFRAIMPMVATNAEFKQLHKYYTTRSENPLKKMQSLVALMCKLIRVMFAMLTKNVAYDGQKMLQDIHRPTEKNAA

SEQ ID NO: 409381 - protein, 335 aa, unidentified
MFRGLIESGEYMEAMIKRCAGLDVHQETVVACVLTGSLNKKPKSEIRTYGTYTKDLEELHEWLLEEKVEQVAMESTGIFWKCVWNIIEDERYEIKLANAKEIKNMPGRKTDVKDAQWIAELLRCGLVKSSFVPEVEIRELRDLTRYRRKIIQQASAEKNRIHKILQDANIKMTTDISDIFGDTGRKLLEKIIEGKEITDQDLIEITSGRGKASLREKMPRIKEGLKGTTREHHRKMIKLIYEHLKYLEEEQKEIEGMIDEACEEYKTEIKLLDSIPGIDQESAKSIIAEIGVNMKQFPTVKHLTSWAGMSPGNNESAGVKKKERQQMEIELYEQP

SEQ ID NO: 409382 - protein, 427 aa, unidentified
MNETDAIRIEEFRQFKKEIRGSREYLVVGIDVAKEKHHAFFGTAMGKTILRGLVFENNLAGFRKLLEQSEALGIQEQLSKVAYGLEPTGNYHKPLGEHLIKCGKLVVLVSGVALKRNRELLDGRWDKHDVKDAANVADLMVQGKCLFYEYPDSQLRDLRVLLSLKRRMRRQEHGYRVRIRNHLVAQYFPELDGVWGHSESESLAIVRWCLDPSVIAGLDLGEFVRRVSARDRGVRQRARLERIWNLAVDSVGCEVPETVSVECKLMVEGLKRLRQEIGEVLEEIERICLQFPEYSYLLSIPGFGPEISAQVLGAIGDPHRFRNVKEVLKMAGLDLSADRSGKTAESARPVISKKGKAHLRYMLYQAALIASIRNRHFMSYYTAKLVGRQQERGIKTKMRVKLAAKLLVIAWTLMKKKEPFDASHLTN

SEQ ID NO: 409383 - protein, 361 aa, unidentified
MGDGSTEHSRMTVGLDLSDKYSHICALDTDSGELLEEGRLRTTPEAFGRRFGYERGLRVAIEVGTHSPWVSRLLEDCGHEVLVANPRRTRLIYGEGRKTDKLDAQKLARLARADPELLYPIEHRGEDSQANLSLIHSREALVRSRSQLISHARGTVKSFGSRLPGCSAPSFHKKVREHLPTEVAEGLGPIVDTIASLTQKIGDYDRRIEQLGTERYPETELLRQVQGIGTLTALTFVLTLEDPKRFAKSRDVGAYLGLVPGRDQSGDKDVQRGITCAGDKMLRAMLVSSTHYILGPFSQDSDLKRHGQKIASRGGKNAKKRAVVAVARKLSVVLHHLWVSGEVYEPLHNARCTEATGEEIA

SEQ ID NO: 409384 - protein, 338 aa, unidentified
METYAGIDLHSSNSFVGVINGEDKRLYGKRHSNRLEEILSALDRFKESLKAVVVESTFNWYWLVDGLQEHGYPVHLANPSAIKQYEGLKHTDDKWDSFWLAHMYRLGILPEGYIYPKEHRAVRDLLRRRLLFVRQRTAQILSLQSMISRNLGFKMSNNEIKKLKAKDIEDLFDCQNLVYMATSSWATIEFLKHVIKGIEKQVKRQVKLRKEFAMLNTIPGIGTILALTIMLEVGDIARFPKVGDYSSYSRCVDSKRISNGKKKGENNKKNGNKYLAWAYVEAANFSRRYCVNAQRFYQSKAAKTKPVVAIKALSNKLSRASYYIMRDRVAFDENKLFC

SEQ ID NO: 409385 - protein, 320 aa, unidentified
MQTRMPVGIDIASKKFDVAVWKGETSYKTKVAPNTPKGLSALKKWREPFGCCHICMEATGAYSEPLATFLHDEGYDVSVENPARIKRFGQAELNRNKTDKDDARMIARYCKMHGPSLWQPAPLNERRLKALVKRLTNLQEMRQMEENRLEISDAVVQPSIRVVIAALDAQIDETKRAINDHINNDPDLKKNKELLESIPGIAGVLSSTMLAYMGDMSRFRNSKALVAWVGLNPMRQESGEWKGKSRISKMGNSAMRKALYMPAIVAMKWNPAVISLKNRLDAGRKTGKVVVCAAMKKLLQLAYGVLKSGRPFDTKICLAR

SEQ ID NO: 409386 - protein, 318 aa, unidentified
MSHGYDKFVGIDVSKDALDVHGLPDGSPSRFDNTAAGRAKLLSLLPQAGACLSVVEATGGYERDLVAEAVTAGHHIAVVNPRQVRDFAKALGLLAKTDRIDASVIARFAETTRPVPKGYDERQEQLRELIVRRRQLLDHRTAEKNRSEMAHSSLVRKSVLKLIETLNKDIQRIEKAILQLVESNDDWRERFEKLKGVPGVGGQTAATLMAELPELGHLNRQQVAALVGVAPFNRDSGQFRGRRAIWGGRQSVRNALYMAALSAKKHNPVIREFAARLMAKGKPPKLVLTACMRKLLIILNAMLQSGDSWSPRLATLTP

SEQ ID NO: 409387 - protein, 307 aa, unidentified
MNGIGIDVCKAMLDVAVHRGPFARFPNTPAGHRKLLSWLATQQAGQVVLEASGGYEQRVLDALFDAGHQVVRANAHRCHAFAAAIGLPAKTDRLDAINLACMAATLELRAYQPMEPWRRKLREFVRARQQLVDLATSAQNQLEQVTDTTLRRVLQANIAQMKKTCVILEKHIAEQVGQQPQLEAMRAFKGVGAILQAMIASYLPELGRLDGKAIAKLVGLAPIAHDSGQMRGLRQIRGGRIEVRNVLYMACLSAIQHEPRIREFYRSLRARGKPGKVAVVAAMRKILVILNARARDALAGESQAIPT

SEQ ID NO: 409388 - protein, 256 aa, unidentified
METITTIGLDIAKSVFQVHGVDAQGKVIVRRQLKRRYVLAFFQKLPPCLVGIEACASSHYWSRELQALGHTVRLMPPAYVKPYVKRQKNDSTDAEAICEAVTRANMRFVPTKTTEQQSCLMLHRTRHLFIRQQTAVINAIRAHFAEFGIVAPGRDFSAWIGLVPKQHSSGGKNKLGGISKQGDRYLRSLFVAGALAVIRYAKIHGSKHRPWLAALLARKPTKVAAIALANKIARMAWAMMAKGERYRQPVALAAAW

SEQ ID NO: 409389 - protein, 351 aa, unidentified
MPRRSTVRAVTTIGIDMGKNTLHVIGLDSCGAIVLREKVSRGRIASRLANLPPCLIGIEAGMATHYVARELAALGHDVKQVPPTYAKPFRQGHKNDFRDALAVAEAVQRPTTRFVPPKSNEQLDLQALHRVRSRLVSQRTAVINQIRGFLLERGVIVRQGLRFLRQLLPDILAKRTDVLSPRMVRIVSDLAGDWRQLDDRIETVTDEIETLAKADDSCRRVMTVPGIGPIISSAMVAAIGNGSAFSRGRDYSAWLGLVPKQMSTGDRTILGRISKRGNSYLRMLFIQAARVILLRPANWPKHGFGAWLVRAIQRLHPNVLAAALANKLARIAWTVLAQERSYEARVTKAEA

SEQ ID NO: 409390 - protein, 401 aa, unidentified
MNAVGIDVSKGKSMVCVMRPFGEVVLEPFEVLHTAQNLNDLAGKLKALDGETRVVLEATGNYHKAVAFVLHDAGLFVSVVNPVLIHDYDNNSLRRVKTDRKDSVKIANYTLDKWTRLRQYLPEDDTRLALKNCYRQYQQAVAIRTMLKNNLISSLDLTFPDVNKLFSSPAKNNGCEKWVDFIGDFWHSECVSSLSPDAFSKKYLKWCQKHGYNFTRSKSDEIFACAVNAASLPKSPTSKLLIQQQVAQLKAVSQSVAAFQQEMLRLSQQLPEFDTVMEMYGVGPSLGPQLMAEIGDVRRFSSKKSLIAFAGIEPQPNDSGKVVGNDKGISKVGSAVLRRTLFLIMTVILHPQPQDEPVFQFMNKKRSEGKPYKVYMMASANKFLRIYYARVKSVMDSECSQ

SEQ ID NO: 409391 - protein, 343 aa, unidentified
MEAYAGKQFVGIDLHRRRTVIVRTTASGEVLEAVRIVNDVQRLASVMARAGQCPEVVLEATYGWYWAVDALQACGASVHLAHPLGVKAFEYRRVKNDVRDAQDLADLLRMGRLPEAWIAPPPTRELRELVRHRAKLVGLRSHCKAEVHAVLAKCGVQVLMSDLFGLAGTELLDGLELPAPYAARIASLRRVMDDLDFEITLFAGIIRGRMAQEPGYTAVQNIPGIGPTLGAVLVAEIGDVSRFASASKLTCWAGLTPKHHESDTHVRRGRITKQGSRLVRWAAIESVKTVSKTSEVGVLRERVADRRGRNIGSVAAARRQLELVFYALRDGHVRALEHLPRVA

SEQ ID NO: 409392 - protein, 336 aa, unidentified
MKNYVLFTGIDVSKDKLDICYVDKNGNVLGSKVIDYKPKNIKSIVKDLERLGYNLTQTLICFENTGVYSIKLGEVLSELNAYYSEVSALEINKSKGITRGKDDKTDAKMIALYALRNIDKIVLSKVTDEAIQELKLLFAEREKIQKSITSLKMTQENEGRVNSKAYESVQKINQQTRVALKNSLKAIENEIERVFKEHPELKKNRDLLKSIKGIGTIISAYLVMITHNFTKFKNSRKFACYSGIAPFEHSSGKSVRGKTQVNHFANKKVKALLSMAVQSAKKYNTQIKAYFEKKKEQGKHILLISNNIKFKLVNIAFAVIKRGTPYVDIYKYATVA

SEQ ID NO: 409393 - protein, 342 aa, unidentified
MEEITIIGVDLAKSVFQVHAANSDGRAAIRKRLPRTRFLSFMSQVRPCVVAMEACATSHHWARELTALGHDVRLIPPIYVKPFVKRQKNDANDAEAIVEAAMRPSMRTVPVKSPEQQALAMLFRTRELLLTQKTQLVNALRAHLAEHGVIVAGGRRSIDPFIRVLDDVTNALPPGVRKVGAIYLDRIARTAGEIEDLERQIDEQAKEHEMAQRLRTIPGVGPVTAMAIEAFAPAMESFARGRDFSAWLGLVPRQHSSGGKQRLGRTSKMGQRDIRRLLISGAMSIIHWRGRNGGKPGSWLARMLACKSRMLTAIALANKLARIIWAIMTRKDVYRDPVGAVC

SEQ ID NO: 409394 - protein, 354 aa, unidentified
MIIIGCDYHPGFQQIALVDTETGDYGEQRLEHSEGAEKFYRDLAAQSKKVRVGMEASGHARWFERLLAELTFELWIGDASEIRAKRVRKQKTDRQDAQHILQLLMENRFPKIWVPSGENRDLRQLLWHRHRMVQARTRIMNQLQAVALNEGLRCKKRLWRDAGRKQLESFRLSPWASRRRRDLLELLDRLTPTIAELTQAIEQEVEKCPEAQRLQTHPGVGALTALAFVLIIGRADRFQCGKQIASYLGLVPLEDSSGQRRRLGHITKQGNSLLRFLLVEAAQVTVRSDQEWRSKYFHLAMRRGRKIAKVAMARRLAVRLYWMWRKRWDYGQLTKFSSHAGQPGHRDGVQSNAE

SEQ ID NO: 409395 - protein, 358 aa, unidentified
MRESYFIGLDIAKNIFQVFTADGKGREISNKKLSRNAMTQYFAQLPESIVGIEACGTAHHWARTLTALGHTVKLINPHRAKAFLGSRNKTDAADAQAICEALMHPGTTFIRAKSLDQQDIDHLLARRELLVQNRTQLVNQTRAFLCERGIVIPQGRHSFMKILPQIIAEKWDEFSARFQAILTDNYADYQDLDAKIVRLDKMIQAEAANTEPCKRLMQMNGIGPQIALALFAHVGNATHFKNGRQMSAYLGLTPREHSSGGKQRLLGITKRGNVRLRTLLLLGARAAILGIGRRNRGEGGQPVRQSYLDKWILGMVERIGLFKAAVALANKMCRIAWVLLAKGEKFNPLVFYRLAKAA

SEQ ID NO: 409396 - protein, 400 aa, unidentified
MDERKGFRWFLGIDISKETFDACCISGQGEKQFSISTSMDRKGFEELIKQLASLSVPQEAVLVGMESTACYHVNLFSFLISLGYTVIVINPLLISNFVKLQLRKTKTDKKDAYVIAQFLLLNRDSLGRTAGSSDFSDVRDLSRQRESLVDQMTSNKIEIKRLLTMTFPELEHIACIFTKSMLRLLCQYPSAASIRQAKRSKIARILIPGSYGKQTDASVERILKAAETSIGTASSAKEIILKQKVSLLMQLEQHLQELTDILTEQCKGNIRRDMDILTSMRGIGKKTAMNFLIEVGRDVKEFESHKKVIAMAGLDPALYQSGKIDRKGKITKRGNRHLRRVIWLMTTRVIQFNARFKQYYLKRIQDGLPYKMAVLATAHKLVRIMFAMLTNETQFNESMN

SEQ ID NO: 409397 - protein, 331 aa, unidentified
MDIKEVIGIDVSKNINEARIHTNQKLFEFENNNGGFRALEKWVLSNVKCHKSQIMFAFEHTGLYSYPMSVYFTEKGYSYIVIPGLELKRSMGIARGKDDKIDAKRIATYAYEKRSKLKPYVLPQEEIIQIKRLLSLREKLVKQRAGYKGTLGEFKRFLKRKDNRMLFDVHEKMIKELSKQIEKLEDKLDELIKNDKQLKQMYELIISIKGVGPQTALFLIVYTDKFTRFDNWRKFASYCGIAPFPNRSGISIRGRTKVSNLANKKIKSLLDQCAKTSIQHNPEMKLYYEKRVKIGKPKMSTINIIRNKILSRIFAVVQRGTPYVNTMGYIS

SEQ ID NO: 409398 - protein, 393 aa, unidentified
MGVWVGIDVAKEVHWACVVDDTGQVVWDQRVDNDPAAIGALIEELGVLGQGLVVGMDVVGGIANLVQAMLAAAGFRLVYVSGLAVNRARQGTRGGESKSDPRDARVIADQVRTRRDLRSIRPSVELDLEIRLLAGRRRDLTDEQTRRLSRLHDLLASVHPGLERACDLTTKGGLWLVSRYVTPAEIRAAGHDGLVEHLQAAGGLPSRQIQALADRTLAAATAQQQAVPAERLTADLARELATEALTCRARLAQLDRDLDQLLARHPDAALIRSLPGMGAVLVAEFIAQAGDLGRFTSADQLAAAAGLAPVLRQSGKVRFQRRPSGGNKDLKRVFYQSAFCSLHSPDSRAFYARKRREGKRHHQALLALARRRIDVLWAILHSRQPFQPHYKAA

SEQ ID NO: 409399 - protein, 328 aa, unidentified
MFFIGIDVSKAKLDCCLLLDVASNKRRAKVVANSKTGIADLLAWCIKQQAPVHELHAIMEGTGVYHEQAALALSDAGATVSIVNPAQIKDFGRSLGVRTKTDGVDGFVLARYGALLKPKPWTPPAQEARTLQALLSRREAIAQDLQRERNRLEKADATDTPRLIRQSIEDSIDFLEKQLTKLQQDIDDHINKHPNLKDDRDLLISIPAVGPQVGNHLLSVMHNHEFQSAEQLAAYLGLVPVERQSGTSLLGRPHLSKAGPARIRAVLYMAAIVATQHNPHLKALYHRLQERGKTKMSALGAVMRKLVHLCFGVLKTRQPYQPDYGSPA

SEQ ID NO: 409400 - protein, 346 aa, unidentified
MENDTLAAVDIAKEIFEVGVSGRPGRVALRKRLPRDRFLEFFAQLPRATVVMEACGSADHWARRIEELGHVVVLLPPQYVRPYVMRNKTDRTDVDGLLEAFRNERIRPVPIKTVTQQVIATLHRLRSGWLADRVRSINSLRGLLRELGFFIPEGRRHVLPEAWEIIHDHRRGLPDALKPSLAALCEEIASLSTRIEDVEAQLEALARQIPLVARLRSVPGIGLLSATALYAFIGDPSRFPSGRHMASFIGLTPREHSSGLRRHLGRISKRGDSYLRMLLIHGARSVLWHAKRMKNPDRLRSWALRLERKVKHNKAAAALANKLARICWAVWKNDRDFEVVPEPQAA

SEQ ID NO: 409401 - protein, 405 aa, unidentified
MDRMNVGIDVSKDDFKAAVKDSKNETLMPGNTYKKDKPGMDSFMNDVDKLKEEHGDHVIYGMESTGIYHLPLYQYLLDAGEDVKVFNGLELEGFKQSQIRKTETDEIAAERIAEALILEREPSHDPSEDPSLIRIRELERLRFRMVKKTSKCKTQANRVMDIICQGYTDVFGDILCKSSIAIIKHTIRKTRLFETDVETMTEVLQEYLSKSKAKKKAKKLDRIFQNTVVPEYMQESCILEIHMLIQQFQMIKKQIDRIERKLEKLVEKQDPYMLSVPGIGPITAGVILGELRDPSRFSSGKEVTAFAGLDPSVKESGKMRKEGKISKRGPPNLRAALYKATLPAITHNPVCKEFYDRLKEKGKHHDVARIAVARKLLLIAYSVEKNEHEFYVPSYVSEEYISKEN

SEQ ID NO: 409402 - protein, 402 aa, unidentified
MPMLSIGIDVSKGKSTVCGMKPGGEIVYAPFEVQHTREGMLELVSLLRSSGEEVRAVLESTGSYHCPVVAALLENGIFVSVVNSLRMKRFCSQSIRKVKTDRIDAMQIALYGLAYWQELQPTKLPEDTYRELQLLARQYYQMTSLLIKAKVDFNALCDQVLPGMQELMSDHAGRHKLSDFVLRYHHTTHILEMGETRFRKDYCKWAEKKGYRNCERMAVLIFATAQNGIPVLPNAPSTQIVITEAIRVLHTVEASRDAILTQMQALAKTLPEYSLVREMPCIGDTLAPRLIAEIGDVRRFHSKRALIAYAGIDAPPYQSGKFCANNRHISKRGNRYLRKTGYEVMQSYVMHKPANDPIFTFIEKKRSEGKSGKLAMVAGLNKFLRVYYGKVTELYRSLPAIE

SEQ ID NO: 409403 - protein, 310 aa, unidentified
MANQYVGIDVAKAMLDVALGSDGELVQVENSEAGIARLLEQLGEVAPRLVVLEATGGYESVVAGAIVGRGIPVAVVNPRQVRDFAKATGVLAKTDRIDARVLARFAEAVRPEPRPLPTAEAKELEEYLSRRRQLVDMLTMEKNRQSIAATERMKKSLKKHIDWLEEALRRANDDIDKAIRNSPAWREQEDLLRSMPGIGPVSARTMLAELPELGQLNRKKIAALVGVAPLNRDSGTLHGSRTCWGGRASVRQVLYMAALSAVRCNPVIRRTYAALRARGKKHKVALVACMRKLLTILTAMVRDQRRWSPS

SEQ ID NO: 409404 - protein, 334 aa, unidentified
MQNITLIGIDLGKHSFHVHCQDRQGNALLRKKFSRTQLINFLGSCKAATVVMESCGGAHFMARRIADLGHEAKLISPQFVRPFVKSNKNDFVDAEAICEAASRPSMRFVPPRTEDQQAMAALHRVRDSLIRQRVKTTHQMHAFLLEFGVSLPRGIAVIRRLATVLEENDFPPYLARVLSRLHSHYVYLSGEIEEVDKELKTHLAEDETAQRLLTIPGVGPVTASLLAMRLGDGKNYASSRDFAASTGLVPRQYSTGGKTTLMGISKRGDKNLRRLLVQCARVFMQRLEHNPGRLAEWVNRQLARHHSNVVACALANKLARIAWAVTAHQTVFIK

SEQ ID NO: 409405 - protein, 318 aa, unidentified
MQRIFIGVDVSQDYLDLHVRPTSARKRFANTAAGIADLLAWVRPLGAERILFESTGPYQKAAVGALLAEKLPAVVVNARQVRDFAKAMNYLAKTDTIDAAVIAHFGEVANTTVRPLESQEIRDLRELYDRRGQLVHMLAMEKNQRHSAVVARASSKVLKSIDKHIGYLEGQIKDLEERMDKLIESSTTFQARNEILQTITGIGPQVSRTLIAHLPELGKYSRQTIAALVGLAPFNDDSGNHAGVRHIRGGRNKVRIGLYQAAIAAIRHCARMKAFYASLKARGKASRVAIIAIARKLLVLANAMIRDMLPYKTPANSV
